United States Patent Application Publication US 2008/0070235 A1 - sequence listing, part 2

SEQ ID NO: 5454 - DNA, 484 bp, Homo sapiens
  I.5454 (R88835)
  misc_feature (406)..(406): n is a, c, g, or t
  misc_feature (423)..(423): n is a, c, g, or t
  misc_feature (433)..(433): n is a, c, g, or t
  misc_feature (442)..(442): n is a, c, g, or t
  misc_feature (450)..(450): n is a, c, g, or t
  misc_feature (455)..(455): n is a, c, g, or t
agccagggtggtctcgatctcctgaccttgtgatccgcccacctcggcctcccaaagtgcttggattacaggcatgagtcactgcgcccagcctgcaaagttttctttcttaaacaattttgaaactgttactggaagatatcaatatgtggccaggtcttgggtacaggctaattcattatattatcctctataattttccatatgttttaaatcatttattaaggatacgtgcacaccttggggaaagagagtaagcccttcatgacgggacccacattgaacatgccactcattttcaataaaggtaaaagggcgggcgtgggtgaggagctgcacacactccacttcctggctggaagtcttccttttcaggaacaggtcctggaccccgggaaaccacttnacccttcacacaccggncccccgttcntaagggctnaggattcnttccngggggtagggggtttcccggttggggttt

SEQ ID NO: 5455 - DNA, 365 bp, Homo sapiens
  I.5455 (R88747)
  misc_feature (305)..(305): n is a, c, g, or t
  misc_feature (346)..(346): n is a, c, g, or t
ttgataaaattaaatgagttaatgcttgcaaaacacataggctagttacagaaacatacaaagggtaatatatattattttaaatattactactcaccctacagatatctgcctaagaatcatttccatctgcaagtctcctctggcccttctaatagtatgcttacatcctaaatgtgcaacatctatgtgccctgacatatttcatgttgtgttacaattgtgggtttacttatctgtatactcccttcactcgtctgtaacatcactgaggaaatgggttctctttttatctcatataatanctatcaaaaaggggaaaaataaaggatggatatggcaaaanacaacatggcattgtgggg

SEQ ID NO: 5456 - DNA, 265 bp, Homo sapiens
  I.5456 (R88475)
gagatggaattttgctcttgtcacccaggctggagtgcaatggcgcgatctcacctcactgcaacctctgcctcccgtgtccaagtgattctcctgcctcagcctcccaagtagctgggattacaggcatgcgccaccacacccagctaattttgtatttttggtagagacagggtatctccatgttggtcaggctggtcttggattcccgacctcaggtgatccgcccacctcggcctcccaaagtgctgggattacaggcgtg

SEQ ID NO: 5457 - DNA, 114 bp, Homo sapiens
  I.5457 (R87957)
  misc_feature (20)..(20): n is a, c, g, or t
  misc_feature (47)..(47): n is a, c, g, or t
  misc_feature (99)..(99): n is a, c, g, or t
tacaaatttacattaatttnactacatacatatatatttaaagcgtncataacaaacttagaaaatagcggatgaaatccagtacaccaatcatctagncttagcaaatactat

SEQ ID NO: 5458 - DNA, 395 bp, Homo sapiens
  I.5458 (R87956)
  misc_feature (220)..(220): n is a, c, g, or t
  misc_feature (287)..(287): n is a, c, g, or t
  misc_feature (320)..(320): n is a, c, g, or t
  misc_feature (336)..(336): n is a, c, g, or t
  misc_feature (372)..(372): n is a, c, g, or t
  misc_feature (379)..(379): n is a, c, g, or t
ttggtaccagtaccatgctgttttggttactttagccttgtaatacagtttgaagtcaggtagcgtgatgcctccagctttgttcttttggcttaggattgacttggcaatgcgggctcttttttggttccatatgaactttaaagtagttttttccagttctgtgaagaaagtcattggtagcttgatggggatggcattgaatctataaattaccttnggcagtatggccattttcatgatattgatttcttcctacccatgagcatggaatgttcttccatttntttgtatactcttttaatttcgtttgagcagtnggttgtagtttctccntgaaggaggccctttcacggtccccttgttaagttngggaatnccaggggatttttaat

SEQ ID NO: 5459 - DNA, 469 bp, Homo sapiens
  I.5459 (R87800)
  misc_feature (395)..(395): n is a, c, g, or t
tagcaccatgagcttcaataccctgtccttttgagtttttacggaggcttcactacataggcattactgattaaaccattggctgttggtgataatcttatcaccaatttaatggtgaaacttaatcttcagctcctctcacctcctgggaggttgcggggtggggatgaaaagtcccaatcctctaatcctgccttggtcttttgctgccagtccccatcctgaagctacctaggggatgccagctaccagtcaattcgtttgcatacaaaaagatatcactttggagtttctaagtgtatacgaggaaatgaggtcaaagaccaaatatatatatttcactatatcacacttacaaacttttgtttactgtttcttcttctcctactctattnataaaccttggagggtgggggactgtgagttatttatctttatatttcaagccaagtatggactgtggagtttt

SEQ ID NO: 5460 - DNA, 421 bp, Homo sapiens
  I.5460 (R87737)
  misc_feature (3)..(3): n is a, c, g, or t
  misc_feature (121)..(121): n is a, c, g, or t
  misc_feature (128)..(128): n is a, c, g, or t
  misc_feature (162)..(162): n is a, c, g, or t
  misc_feature (186)..(186): n is a, c, g, or t
  misc_feature (237)..(237): n is a, c, g, or t
  misc_feature (269)..(269): n is a, c, g, or t
  misc_feature (274)..(274): n is a, c, g, or t
  misc_feature (353)..(353): n is a, c, g, or t
  misc_feature (378)..(378): n is a, c, g, or t
  misc_feature (397)..(397): n is a, c, g, or t
  misc_feature (407)..(407): n is a, c, g, or t
  misc_feature (414)..(414): n is a, c, g, or t
aangatttgagtttcactccagcctgggtaacagagcgagaccctgtttccaaaaaaaaaaaaagaaaaaaaaaaagaaaaagaccaagtaactctgcccatgggaatgcttcacatgtgnaaatgtnatctgttgtcacttctcccccgtgggagaaagtnactggggactgcttgtctaaaganctaggatagcatctgttttaagataaattgaggctagtttgaatattggtnatttttcaaaaccttgaaaatgtatttctgancagantacattatttgactaagtttggggggcccgttttcagggtgtaacggtgggtatggtttatcccattaacaccactctngcggaacatgaggtaaggcaaaggncataatatccattatattncctttacccntaagggnctggggg

SEQ ID NO: 5461 - DNA, 289 bp, Homo sapiens
  I.5461 (H48124)
  misc_feature (101)..(101): n is a, c, g, or t
  misc_feature (165)..(165): n is a, c, g, or t
  misc_feature (211)..(211): n is a, c, g, or t
  misc_feature (224)..(224): n is a, c, g, or t
  misc_feature (256)..(256): n is a, c, g, or t
  misc_feature (280)..(280): n is a, c, g, or t
tgaatttttattaaaatctttaatttataggaaacagaagaactccatatctaataaagatacaaatacttatcaaataaccattcattataaaatttggncatatactataccacaaaagagatctcaacattttcagagaacagtcatgataccaatcatggntttggaccttattgcaataaaatttcaaacaaataaattgattccntttttaaattccntgaatttataaataaaatatattctaaatagnttgagttaacaaaatcaaataccnttttacatc

SEQ ID NO: 5462 - DNA, 381 bp, Homo sapiens
  I.5462 (H47956)
agacataacatctgctccagcctgttcactatccatgtggttttaaactcttaactttacttcttagcttcatccctgtaagtaagtgctctctacctcacaggggtcttatgagggggaaaaaataagatgtttaagggttgttttaagagagagatccttcttttaaagtgattttatcaaagccccttgggttagaaatgaaaaactctatagctatttttttcctattctcgttttgctatttttatttctgaaaagtgatctgtctgaaaagagccttatatctggttttaacttctcctcattgacccttttcacagtgaaatctctactttatcccatgctcttaactttttatttatgggagccccaaactaa

SEQ ID NO: 5463 - DNA, 291 bp, Homo sapiens
  I.5463 (H47864)
  misc_feature (228)..(228): n is a, c, g, or t
  misc_feature (239)..(239): n is a, c, g, or t
  misc_feature (266)..(266): n is a, c, g, or t
atggttaatataaatttactgctctaggttaagcctaacatatgtaattgctactcagcctattactttttagtccattgggaatcactaaaaaaagtagaggctttagcttcattcctcggctgcttaaatcatattgtaatgttttaaattgttatgtcgtcctgtataaccttagggccccagtaactgattaatatgaggtcagctttaaggttaattacaggntataaaagggnaataggacacatagggcatccaatctngggccggtttaattttttagggggt

SEQ ID NO: 5464 - DNA, 380 bp, Homo sapiens
  I.5464 (H47863)
  misc_feature (351)..(351): n is a, c, g, or t
  misc_feature (356)..(356): n is a, c, g, or t
  misc_feature (361)..(361): n is a, c, g, or t
  misc_feature (367)..(367): n is a, c, g, or t
ccttaaagtaataaaataaaccaactcttttcctttatgagctgtagttcttgtttaagaaatccctctttactctgaggtcataaagatattgccctgtattttctttaaaaatttttaaagtttaatttcccatctagaattgacttttgcatatactgtaaggtagggatccattttttccatatagctaagtgtgtgtgtgtgtgtgtgtttgtgtgtgtatgatatatatttaaatgcagatattaacacaaatgccagtgttgtcttttgtctttaagctttaaaaactgacatgtggggatagggccctctcccagaatttttcattctaatccttaaagggtnagggnatttnccaacncctttaatttagg

SEQ ID NO: 5465 - DNA, 298 bp, Homo sapiens
  I.5465 (H47779)
  misc_feature (230)..(230): n is a, c, g, or t
  misc_feature (261)..(261): n is a, c, g, or t
attaataaaaatctgaacaaactgaaaaatcagcaactcttcttagatccatcagagaagtgaggtcacagggcaatctaccaccccccaaattagagaaataggcaactacaaagaatcaccacaacttacaggagcagaaacccaagagcagaaatctccagaccatccaatgccagggaaggaacacctgaattacaactgctggtggtgcagtgaggtcaagtctnacagttttacgaaccccagggaaagccagtnataggggagattcccattgctttttctgaattttact

SEQ ID NO: 5466 - DNA, 286 bp, Homo sapiens
  I.5466 (H47651)
  misc_feature (170)..(170): n is a, c, g, or t
aaaaactttatttaaaacatgtaaagaatcatatagttcaaaactgcaaaaataaaagacaatttcttgtaacttaaaaataaagtatatatctagaaaccaccacattaacatctactatttatagtacaatctccaattcaaagctaatctttgtatttctgtatttngcaacttttgagctagaatcttcctccctatccaactatactgttatgtaaccccattgttttaacatttaacaatacaacttggggtattctctgacaggcaaggaatatatact

SEQ ID NO: 5467 - DNA, 395 bp, Homo sapiens
  I.5467 (H47408)
  misc_feature (47)..(47): n is a, c, g, or t
  misc_feature (265)..(265): n is a, c, g, or t
  misc_feature (290)..(290): n is a, c, g, or t
  misc_feature (318)..(318): n is a, c, g, or t
  misc_feature (373)..(373): n is a, c, g, or t
gcaggagggtggattgttggtctcagtcagtggtgggacagaccagnagctccgaacacttcagttttaaaactagttgtgagtttccaattctgttaatgtcttttttggtccttgtttctgctaaatgaatacatcccctccccttggaacttaatatcaataaataacaagcacagaaatatgcaaaaggaccaggtctacttgaagaatttgtgaggattaaatggtttatgagtagaggagggtcagtcagtaagtattngctacctcatgtgtgtccccattantaaccttgggtttaggacttatctattntttgtgtagtcttcctgttcataaaaattctgtgtaagggaccccatggctaggnatccagtgaaggattgtgaatc

SEQ ID NO: 5468 - DNA, 437 bp, Homo sapiens
  I.5468 (H47323)
  misc_feature (106)..(106): n is a, c, g, or t
  misc_feature (121)..(121): n is a, c, g, or t
  misc_feature (155)..(155): n is a, c, g, or t
  misc_feature (198)..(198): n is a, c, g, or t
  misc_feature (204)..(204): n is a, c, g, or t
  misc_feature (212)..(212): n is a, c, g, or t
  misc_feature (220)..(220): n is a, c, g, or t
  misc_feature (226)..(226): n is a, c, g, or t
  misc_feature (234)..(234): n is a, c, g, or t
  misc_feature (273)..(273): n is a, c, g, or t
  misc_feature (291)..(291): n is a, c, g, or t
  misc_feature (297)..(297): n is a, c, g, or t
  misc_feature (320)..(320): n is a, c, g, or t
  misc_feature (344)..(344): n is a, c, g, or t
aaaagaagagacagggttttgccatgttggcaagcctggcctcccaaagtgctgggagtatagggagtataggcatgaaccacgatcatctattcacatcttaaantcaaagctgccagtnttttctcacaagtgtaaaactctcaggacaactntccttgcctatgccttttccaacttcacctcacaggtaggttnttaagntcccagtntcactganttgggntgtagaantgggacctgggacccccaactcctcccagtcctgggcantgagcagagaccaagctnttcagntttacactggaaaacagtttganttcctggggcccaagcaccagggntttgttttacttttaatgaactgttttctagtgtcctaagtaacttttatacccatctgtactaaagtgaaaaagacggttttcccaactttc

SEQ ID NO: 5469 - DNA, 122 bp, Homo sapiens
  I.5469 (H41223)
  misc_feature (1)..(1): n is a, c, g, or t
  misc_feature (4)..(4): n is a, c, g, or t
  misc_feature (5)..(5): n is a, c, g, or t
  misc_feature (7)..(7): n is a, c, g, or t
  misc_feature (100)..(100): n is a, c, g, or t
  misc_feature (117)..(117): n is a, c, g, or t
nttnntnaaaagttaaaaattccttaattttttattcctgggaccactaccacaatttacagggcaatatacctgatgtaatgaaaaaaaaaaaaaaaangacaaagctacaacagntaaaa

SEQ ID NO: 5470 - DNA, 486 bp, Homo sapiens
  I.5470 (H41087)
  misc_feature (13)..(13): n is a, c, g, or t
  misc_feature (219)..(219): n is a, c, g, or t
  misc_feature (459)..(459): n is a, c, g, or t
  misc_feature (474)..(474): n is a, c, g, or t
gagcacagtgttntcctgtgtcacccaggggggagtacagtgggatgatactccgctcactgcaacctccacctccagggttcaagcaattatcctgcctcagacctccagagtagctgggattacaggtgcacaccaccacgtcccggtttatttttgtatttttttagtagagacagggtttcaccatgttggtccaggccggtctcaaactcctgnacttcaagtgatctgcctgcctcggtctcccaaagtgctgggattacaggcgtgaaccaccacgcccagcgataactattttaatgtacttctttgctaattgtaacatctgtgttaatcatgggtcacttttgattgcttaatcatttcctcattatgtcagtattaataatatttcctgcttctttgatgtctcataatctctgattgggaaattgacatttgggaaaacagtaggtntctttgcattccagnaaaatgcttgtc

SEQ ID NO: 5471 - DNA, 469 bp, Homo sapiens
  I.5471 (H40703)
  misc_feature (1)..(1): n is a, c, g, or t
  misc_feature (2)..(2): n is a, c, g, or t
  misc_feature (3)..(3): n is a, c, g, or t
  misc_feature (15)..(15): n is a, c, g, or t
  misc_feature (19)..(19): n is a, c, g, or t
  misc_feature (23)..(23): n is a, c, g, or t
  misc_feature (28)..(28): n is a, c, g, or t
  misc_feature (43)..(43): n is a, c, g, or t
  misc_feature (104)..(104): n is a, c, g, or t
  misc_feature (129)..(129): n is a, c, g, or t
  misc_feature (138)..(138): n is a, c, g, or t
  misc_feature (172)..(172): n is a, c, g, or t
  misc_feature (260)..(260): n is a, c, g, or t
  misc_feature (276)..(276): n is a, c, g, or t
  misc_feature (294)..(294): n is a, c, g, or t
  misc_feature (345)..(345): n is a, c, g, or t
  misc_feature (387)..(387): n is a, c, g, or t
  misc_feature (401)..(401): n is a, c, g, or t
  misc_feature (417)..(417): n is a, c, g, or t
  misc_feature (434)..(434): n is a, c, g, or t
  misc_feature (461)..(461): n is a, c, g, or t
nnntttttttgaggncctntttntgttnaatcccttccagttnaaggtcatgttctggaagaggtatgggaaatgaacagatggttttatacatactatcaaanaaaagttagtttttctgggaccatnttttatggnattgatatttcaaggttctaaagcacccctgggnaagctgttgcctcaactggattagaaatgtgatagattaggggacacttttgaaagataaaggggaagacagcaggagtaggccaggncagccttcacaccctnttgtagttctcacacctntgaggggagaaagagagaaagaaggaggggctgggtgggaaaagcctcagnttgcagcacagttctgagaaagccactgacgggcccatggtntccccatgccaaanttgcccaagagaagantccttgcagggcagggntgggccaatattttccctcagtctggncagcagct

SEQ ID NO: 5472 - DNA, 475 bp, Homo sapiens
  I.5472 (H40680)
  misc_feature (20)..(20): n is a, c, g, or t
  misc_feature (63)..(63): n is a, c, g, or t
  misc_feature (79)..(79): n is a, c, g, or t
  misc_feature (88)..(88): n is a, c, g, or t
  misc_feature (283)..(283): n is a, c, g, or t
  misc_feature (451)..(451): n is a, c, g, or t
  misc_feature (457)..(457): n is a, c, g, or t
  misc_feature (462)..(462): n is a, c, g, or t
tgcagtggagcgatctcggnctcactgcaagctctgcctcctgggttcacgccattttcctgncctcagcctcccgagntagctgggnactacaggcgcccaccaccacgcctggctaattttttgtatttttagtagagatggggtttcaccgtgttagccaggatggtctcgatctcctgaccttgtgatctgcctgcctcggcctcccaaagtgaataagattcttttgagatgctatagaatccttttgatactaattcccaaaggaatattttttggnaactatttggaggaggaaagcacaggaatccaacaaaaatctggcaccactgtgtcctctaaaagttttatataattcattgttttccttttaaagtgcactaaagcctgttctaaatcaggaactaccccagactttcactgaacaactgtctgaacagattttctncttcancaagntaccagggcaatg

SEQ ID NO: 5473 - DNA, 393 bp, Homo sapiens
  I.5473 (H40622)
  misc_feature (32)..(32): n is a, c, g, or t
  misc_feature (302)..(302): n is a, c, g, or t
  misc_feature (310)..(310): n is a, c, g, or t
  misc_feature (332)..(332): n is a, c, g, or t
gtagaggaacctcgcgcaccgcctctccggtnctgggaatctgctgaactccttgcctctcctggggtccctcgaacgccccagctaagaagggcggggccttgccagggcgcgacaacatgacgttcaaggtcttcctgtggcttctgtaaagaaatgttcacgtgggagcctgtccacatgggctgtactaaggatctggcacgaggaagaaatatcactgcagaacctgaagccctccgttggaagggtcgttcactcgagtacctattctaagtaacagtgacacaaaacacatgttngaaaaaancaaaagtttggagggtatactnttttttaaaagaaacttttattttgccttttctgttaaggcctctaattttcattgggcct

SEQ ID NO: 5474 - DNA, 195 bp, Homo sapiens
  I.5474 (H38382)
  misc_feature (187)..(187): n is a, c, g, or t
tgggccatggttttgttgttgctgctattgtttactttattttattttttctttgcatctactttttaaattgagatatacttaaccataaaattcatccttttaacatgtacagttcagtagtttttagtgtattcacaaagttgtgcaatcagtattatccagaatactttcattgtatgcaatngtctacct

SEQ ID NO: 5475 - DNA, 416 bp, Homo sapiens
  I.5475 (H38347)
  misc_feature (1)..(1): n is a, c, g, or t
  misc_feature (38)..(38): n is a, c, g, or t
  misc_feature (74)..(74): n is a, c, g, or t
  misc_feature (277)..(277): n is a, c, g, or t
  misc_feature (361)..(361): n is a, c, g, or t
naacactttgcaaactttattatcaatacattcaaagncaatacaaagttatatggaaactaaattaatctagnaaagtagatttttatatcattcaagatacggagaagcccagattaaatatataaaattgttgttatttacacagctaacttcccgctttgaaaacaatcccatacgtaaatttcttttttggagcaaggtaacttggtgattgttctatctctacccaaaattcacccctatttggaaaactgggggctaaaagcaatcaganttcaccagttcaaaaacacttatgtccatcttattagcaacactaactacccagaggaaactaaaatagaccagatttacagcngtaagtaaatctaattgtaattttaacattaccttattttggcaaaggtgaaggg

SEQ ID NO: 5476 - DNA, 578 bp, Homo sapiens
  I.5476 (H38310)
  misc_feature (424)..(424): n is a, c, g, or t
  misc_feature (434)..(434): n is a, c, g, or t
  misc_feature (476)..(476): n is a, c, g, or t
  misc_feature (505)..(505): n is a, c, g, or t
  misc_feature (510)..(510): n is a, c, g, or t
  misc_feature (528)..(528): n is a, c, g, or t
  misc_feature (538)..(538): n is a, c, g, or t
  misc_feature (546)..(546): n is a, c, g, or t
  misc_feature (557)..(557): n is a, c, g, or t
aactccatttgtaatcaggatttatgtagccctgcttttcattctgcatggcacttattcccaaggatatcatttcctaagacactctcgaacactgtaagaggtttttctattaaaggagacaggcttttcttttcctaattagggagtgctgacttgccagtcacataggctaggctcctgactccctttacacttaatcttctgattttccaaagtgctaagattacaggcgtgacacccgcacctggcctattttcaaatttttctactaataaacttgtattattcaagaaactcaaaagaatcttttagtgtaggggaagaggtcgagggccaggagaaatccatcacgttcttaggagacagcgtcagtgttcacagtgtcacgggtgaaccagcctgtgcctggggggaagctctnggggtggggnagggagccaggccaggggaggagggccagggcccagccatgncttcccacatctgcccggggtttgtttantaagnttttgggaagttcctttncccaggatanggcaaggnccccaaaattnaattccagcaagggtttgggt

SEQ ID NO: 5477 - DNA, 581 bp, Homo sapiens
  I.5477 (H38309)
  misc_feature (400)..(400): n is a, c, g, or t
  misc_feature (437)..(437): n is a, c, g, or t
  misc_feature (473)..(473): n is a, c, g, or t
  misc_feature (485)..(485): n is a, c, g, or t
  misc_feature (515)..(515): n is a, c, g, or t
  misc_feature (540)..(540): n is a, c, g, or t
  misc_feature (566)..(566): n is a, c, g, or t
  misc_feature (576)..(576): n is a, c, g, or t
ctcctctgcaaggggcctttgggattgttctggacatggctgaagattgacttagagattgaccctccacctcgacattactgacatttggggccaggtgattctttttgaggggactgtcccctgcattgtaggatgctgagcagcatcccgggcctcaccagatgccagtagtgccatcccccaaccatacccctggttgtgacagcccccaaaaatgtctctagacattgcgaaatgttccctgcagggcaaaattgcccccatttgagaaccactggcttggagaagggactacaaatgtacttcctcccccattcttttgacgctaagccaccctggtccttgacgcctcccctcacttagaaaaggcatacaggaggccgggcatggtggcttnacacctgttaatcccagcatttggggaggctaaggtngggcggatcacaaggtcaggagtttttgagaccagnctggccaacatnggtgaaaccccatctcttattaaaattacnaaaatttagttggggtgtggtttgncgggtgctgttattcccagttatttnggggaggctngggca

SEQ ID NO: 5478 - DNA, 156 bp, Homo sapiens
  I.5478 (H38282)
  misc_feature (145)..(145): n is a, c, g, or t
tgtcacccaggctggagtgcaatggttcaatgcctataatcccaacactttgggaggactgcctcctgggcccaggagtttgagaccagcctgagcaacactgtgagacacccagtctctttttttttttttttttttttttganagagtcttgct

SEQ ID NO: 5479 - DNA, 245 bp, Homo sapiens
  I.5479 (H38281)
  misc_feature (126)..(126): n is a, c, g, or t
  misc_feature (189)..(189): n is a, c, g, or t
  misc_feature (199)..(199): n is a, c, g, or t
ctcttcagcaaacatttacaagatatgtgggccacactgaaaaaaagagtgcactccgcggacagaacgagtcccacgcatccaattccaggacacagaaacacacacaacatacagagatctgantaggcacagtaaaccaaataaatatgacttattccaaatcacaaccacagatgctctctggancatcacaagngaaggcagagaagagattttgtgctgtactttgagactagtctgtt

SEQ ID NO: 5480 - DNA, 326 bp, Homo sapiens
  I.5480 (H38159)
  misc_feature (5)..(5): n is a, c, g, or t
  misc_feature (6)..(6): n is a, c, g, or t
  misc_feature (8)..(8): n is a, c, g, or t
  misc_feature (302)..(302): n is a, c, g, or t
  misc_feature (318)..(318): n is a, c, g, or t
atttnntngctactagaaaaccttaaattacaaatgtggcttatcttgtatttctgctggacagagctgctagaacctcccagcaattaaagagtgtcatgcataaaaatcatatatacacacaaagctaagacttactaactatagtgaatatcccgttaccttaagagtctcaaattatatgcatattttaaaagatatcgtctttttaaagttaaattttttaagtttcacctaggactgactttttttaacaaaataacctaggaggtgatccctatggatataggtttaagggggtngtaggttttggggggnctcaacca

SEQ ID NO: 5481 - DNA, 552 bp, Homo sapiens
  I.5481 (H38158)
  misc_feature (387)..(387): n is a, c, g, or t
  misc_feature (417)..(417): n is a, c, g, or t
  misc_feature (460)..(460): n is a, c, g, or t
  misc_feature (476)..(476): n is a, c, g, or t
  misc_feature (500)..(500): n is a, c, g, or t
  misc_feature (526)..(526): n is a, c, g, or t
  misc_feature (531)..(531): n is a, c, g, or t
ctcaggcttctggaagaactggtcccaggtcctggaaagccatcagcaatcctgagggtcctttctgtttatgtctttctttctgcaaagcttttactcatctttcttactaactggctttctctgccactctgtcggtagagggtggcctcccacagccctaaactatgcagccaagttctagccaaatggaaagcctgtctttccatctcaattctaaattctctaagacttgggctaggcttgggttagatgtctatccctgggactagtcagctgtggccagggagcggagacatgctgcacatatctgtctgcctctgctcacctccgaaaagtagggtggggaagatagaaaaaggggtaggggagggcagcagacagagnagacagacagcagagagacattgttaaggnttggcagacaactttttaaatatcttatttgggtgagtttccntaaactattacccttnaactttttccttagggtccatttntagggttattttgtttaaaaaaagtnatccncgggtggaactttaaaaaatt

SEQ ID NO: 5482 - DNA, 484 bp, Homo sapiens
  I.5482 (H37908)
  misc_feature (5)..(5): n is a, c, g, or t
  misc_feature (9)..(9): n is a, c, g, or t
  misc_feature (13)..(13): n is a, c, g, or t
  misc_feature (14)..(14): n is a, c, g, or t
  misc_feature (18)..(18): n is a, c, g, or t
  misc_feature (19)..(19): n is a, c, g, or t
  misc_feature (37)..(37): n is a, c, g, or t
  misc_feature (368)..(368): n is a, c, g, or t
  misc_feature (424)..(424): n is a, c, g, or t
  misc_feature (433)..(433): n is a, c, g, or t
  misc_feature (439)..(439): n is a, c, g, or t
  misc_feature (459)..(459): n is a, c, g, or t
  misc_feature (473)..(473): n is a, c, g, or t
  misc_feature (482)..(482): n is a, c, g, or t
gaaanaggntttnntttnnggctagagtgcagtggcnaatcatggctcactgaagcttccatctcctgcactcaagtgatgctaccacctcagcctcccaaatattataaccacagatgtgtaccaccatgcctggccgatctctttatttttattttggtagagacaagatcttgctgtgttggccaggctgaactcctgaggctcaagcaagcctacctgtctcagccttccaaagtgctcagatcacagtcatgagccagcaactaatctgcaactttaaccacttacaaccaaaaggattctcaataataatctcaaatccatttgcccaataacacgttactctcagtctagtgggctagggnactgtttaatgggactaggggaagacagagtttaatttgatgttactccaaggagntacaggggncatagngttaaaattcacattttttncacccttttgggcngtagggggnaa

SEQ ID NO: 5483 - DNA, 432 bp, Homo sapiens
  I.5483 (H30516)
  misc_feature (12)..(12): n is a, c, g, or t
  misc_feature (180)..(180): n is a, c, g, or t
actcatgtatantaaaatttatatccacatatgggttagtagtagtatttgttgaacacaatttttggttttcacacaaatgcaccttttcaaaaatcaattgttccttctcccaacataccccaggctggcaaatgacaaatgaaaataaaatccctgctggaaatagtggtataaaangcattttccattttatgtgcacttttcaacccagagaaaataagaaatttgttttatttttgtgcagtagtttctaaaatataatcggagagatgctaggtaaacatttaactttaggattagctttctcaaaacttttaagcgctgggaatgaaagatttgcttacattctgaagctggtgcagggtatcttttttaagccttctttgggctctcattttcacggaccatctgaggtgacttgggaaacac

SEQ ID NO: 5484 - DNA, 347 bp, Homo sapiens
  I.5484 (H28748)
tctctgtaaatacaagatgtttataggaaatatgtattctgaactctatctgcagaatgagtcactacaccaaaatagttctattatttagaatgtgttaattttaaagggacctgataggtatttatttacatatgcgatccacatttgtgtgaaagcatgtgatcatactaacccagcctcctgggaatgtcgctgtacgatgattgatgtctttttctcagtccatagttacaattgtttagtatgctaatcagtccagttccctgaggtttaagatcaaatataaattactctgcttttcgactcattcagggtaggcattgtacctgaacctgattgcttac

SEQ ID NO: 5485 - DNA, 483 bp, Homo sapiens
  I.5485 (H28775)
  misc_feature (8)..(8): n is a, c, g, or t
  misc_feature (10)..(10): n is a, c, g, or t
  misc_feature (11)..(11): n is a, c, g, or t
  misc_feature (338)..(338): n is a, c, g, or t
  misc_feature (431)..(431): n is a, c, g, or t
gacatatntnncggtttattgtatctttacaataataaaaataaattagtcacacacaaaaatagtcatttttgctgaagagaaaacagaccatatttactcacataattcgccttctacctttcacctgcttatgtaataatttaacactgtagaggggacatggaggtgacggagtatttagtgggttccttgctcctggctgtgcagttcacaggccccacaggcttggcccagcatccccagcagggacagtggaagtgtcagagcagtaaatgccaccacttccctctcagcctctccctgtccccgccagccacctgcctcacccacggctntaaccaagcccaccgaggcaactgacgttgccagtttaacaacggggacaaaggcaaagagaaagggataacagacaccctcccttttccttntccaaatgtttgtgggatgagggggaagggcaggtttaggttgagggaattt

SEQ ID NO: 5486 - DNA, 476 bp, Homo sapiens
  I.5486 (R84968)
  misc_feature (222)..(222): n is a, c, g, or t
  misc_feature (360)..(360): n is a, c, g, or t
  misc_feature (370)..(370): n is a, c, g, or t
  misc_feature (397)..(397): n is a, c, g, or t
  misc_feature (405)..(405): n is a, c, g, or t
  misc_feature (410)..(410): n is a, c, g, or t
  misc_feature (438)..(438): n is a, c, g, or t
  misc_feature (448)..(448): n is a, c, g, or t
  misc_feature (456)..(456): n is a, c, g, or t
aaataaaaacagtaagcaaataacactgtgggcagcatacagaggtggcaaacaaataaagtcctgggttactaagaggaaccagggtgaagagtccagtctggatgcagtgggttggtgggcagcggcaaatctcgtcaggggctaagctgcagtagcggacccctgagagcccacctggggctgcagcctggccccgggcctgggagttggggctgccgntttccatgctggggtcctgctgggtccaatggggcacctgccctctggcccagctcattgggtgaagcatcagatgaggcgaggtggttccagccccctaaaccagggtgatgagggttcagcgaccttcggagccangcccagggtnagtttttgggatgccccagggttcctnaaacaggntcccngtccccagtttttcttttggaacaagcntgctggggtnctcccggnataagtgaatcagagttttt

SEQ ID NO: 5487 - DNA, 388 bp, Homo sapiens
  I.5487 (R83479)
  misc_feature (78)..(78): n is a, c, g, or t
  misc_feature (367)..(367): n is a, c, g, or t
  misc_feature (378)..(378): n is a, c, g, or t
tctgaaaatttaaagggagaagacagctaattttaagaagtatttgttcaggaaataccctatataatagtcaaatantgaaaacattcttgtttataatatttttgcaataaaaagcaatgtaactatattaccaataaaaagtaaaatgactaccatttatctagcatttaccatgtactaagtataatccagcccttcggttagatctctcattgtatccttacagcagcctgtataattgtaattgaagaaattatgattcagaaagattccttgttcttagtggcctgttttgggggcctgggaaccagtatttgattctcttgtcactctgaccccaaaactgaacaaccacccttagccnttgaagtgaanttttcccact

SEQ ID NO: 5488 - DNA, 337 bp, Homo sapiens
  I.5488 (R83265)
ctgtaggtagcaagtatgaattcctccatgacatctgggctacaagaaatgccaagcttggccactgctcacagtacccgggactcataagaatccatgcatgccttctcccatctaagacatgcgggatccatgccagggaagaatgaggcacatgccagaggatatgggggctgggaggagggcactaacccagagtgatttgaaatgaggtaggcattcaatgggcccctggcaaaaaagagaaagaaggacgaggggagctgaaaaatgtctttcatgggagaaagggaggggaggggaaggacaggggaggggagggggtgggtccaactgg

SEQ ID NO: 5489 - DNA, 392 bp, Homo sapiens
  I.5489 (H46164)
  misc_feature (8)..(8): n is a, c, g, or t
  misc_feature (9)..(9): n is a, c, g, or t
  misc_feature (10)..(10): n is a, c, g, or t
  misc_feature (12)..(12): n is a, c, g, or t
  misc_feature (202)..(202): n is a, c, g, or t
agaagatnnntntcctggatgctttgcaaatagctagggagagcaacagaagctacaagtgagtctggttatgacacaggactctttcggtgccactttgccagccagagacctccacggccggcaacgccctgcgcaaggcctcacggctccaggctgttggaggtacctgcccactcaacctgggctggctgttggaggnacctgcccactcaacctggcgggctgtgcgtggcttgtgctttgggctggatcccacgctcgccatgggatctgcactcggactgcagctgggccgggcatgccatgaacctggcttccaccttgggtgccgacgtttggatgagaggaacatggtgggcgcctgaaaaatctggagacaccagaaaccc

SEQ ID NO: 5490 - DNA, 366 bp, Homo sapiens
  I.5490 (H46163)
  misc_feature (13)..(13): n is a, c, g, or t
  misc_feature (15)..(15): n is a, c, g, or t
  misc_feature (92)..(92): n is a, c, g, or t
  misc_feature (199)..(199): n is a, c, g, or t
  misc_feature (214)..(214): n is a, c, g, or t
  misc_feature (298)..(298): n is a, c, g, or t
gccggacgccgtntnacgtccccgcgctgtctcggcggcccaggaattgcctgtctgtagcatctgctcctccacagagggaccctggaatngcgatggcactcccgatgcctggacctcaggctttcttgttgccaaaccagcactgatctccctattggagcaaggagaggagccgggggccttgattctgcaggtngctgaacagagcgtngccaaagccagcctgtgcacagaggaccctaatacactgcccagcagaagccagggaaggaagccctgccagcttcagaaggtnggccagggagagaagggtgtgggccggaaggtagccggtgggggtgctgcatcctctttgggccccac

SEQ ID NO: 5491 - DNA, 382 bp, Homo sapiens
  I.5491 (H43476)
gctcttaaaaatacaaaaaaaaaaatgttttgttttgtgttatttttggtttgtttattggggggctttttttaattgtcaggattatgatcttgctgtttttcttcaatatgtatacaaggtgatgtgaaaagatgacttgggcagaggagtaagaacaagtaggcttgttcttctactttgcttcagaattcagttaatgccaaaagcgaagatcaagcccatgttgatgtctcgttgctcacctgcatttccagagagtgtgacactcatgcagtccctgagaaaaataaaatcagggacatacttctccttttagccttttaaaaattcaaaaacgtttagtccaagggaactttttatggctatcagggaaaggttt

SEQ ID NO: 5492 - DNA, 386 bp, Homo sapiens
  I.5492 (H42491)
  misc_feature (1)..(1): n is a, c, g, or t
  misc_feature (83)..(83): n is a, c, g, or t
  misc_feature (93)..(93): n is a, c, g, or t
  misc_feature (131)..(131): n is a, c, g, or t
  misc_feature (140)..(140): n is a, c, g, or t
  misc_feature (146)..(146): n is a, c, g, or t
  misc_feature (173)..(173): n is a, c, g, or t
  misc_feature (178)..(178): n is a, c, g, or t
  misc_feature (181)..(181): n is a, c, g, or t
  misc_feature (189)..(189): n is a, c, g, or t
  misc_feature (214)..(214): n is a, c, g, or t
  misc_feature (221)..(221): n is a, c, g, or t
  misc_feature (234)..(234): n is a, c, g, or t
  misc_feature (241)..(241): n is a, c, g, or t
  misc_feature (250)..(250): n is a, c, g, or t
  misc_feature (290)..(290): n is a, c, g, or t
  misc_feature (306)..(306): n is a, c, g, or t
  misc_feature (317)..(317): n is a, c, g, or t
  misc_feature (324)..(324): n is a, c, g, or t
  misc_feature (331)..(331): n is a, c, g, or t
  misc_feature (337)..(337): n is a, c, g, or t
  misc_feature (343)..(343): n is a, c, g, or t
  misc_feature (354)..(354): n is a, c, g, or t
ntatgcattaccagtacaaattaggagactgtaaaacctacaccgtgttagtatcattagagaccacaaaagttcagttggantcaaaagggncagaagcctgtgctctcacagaagcagaaaagcttaanctttcaaanccaaancagagcagagctttgcaggtttatatnctgantantaagaaanggggaggggtagggggagattaaanccaacanccaaaggaaagcntttcaanttgaaattnccaaaggaaagaagtattaagagagaaaaggagaaaaccnttgattgttttatttnttttaccaaangaaaaanaagtttncaaaanttaaangtttccggggngctttgagctaggggtttggaacccctaaggg

SEQ ID NO: 5493 - DNA, 305 bp, Homo sapiens
  I.5493 (H41124)
  misc_feature (189)..(189): n is a, c, g, or t
  misc_feature (266)..(266): n is a, c, g, or t
  misc_feature (272)..(272): n is a, c, g, or t
  misc_feature (285)..(285): n is a, c, g, or t
  misc_feature (304)..(304): n is a, c, g, or t
tttctagttaatttatttgaaaagttgatattttatgctctagtttctggcatgagatataaaacgtgccactgctctaaaaaatatatcagaaaatttttttccacaaatggcttttttaggaaaaaaaattataattaacaggatcaaaatttcacatagttccacatctctaaacttatatagaantttaatgattacataacttcaaccatatcaggcaaatacacttcttttactaggcatggcatcaatatcctccccanttaaantactctggtaggnctgcctacagtatttcagnt

SEQ ID NO: 5494 - DNA, 426 bp, Homo sapiens
  I.5494 (H39161)
  misc_feature (350)..(350): n is a, c, g, or t
  misc_feature (384)..(384): n is a, c, g, or t
  misc_feature (418)..(418): n is a, c, g, or t
gtttcttatttggcacagaggagaattctctcaacaaacgttttcgactgtttattgagtcccttaaaaaactgtccatttaataaacatttgtgatctgtgatttgcattgaacgagatgctggaagtatgaggataaataggaaatgatcacctttctcaaggagctctcctgcagttttcacttcaataacttggacacgcctgaaagggttgtcccacacgaaaagagagaaaaggataatgaggttcttttgatgctgtagtttttcctgggaagactaggaaggactctgaatttcaaaagaggtgatttctggcatgagcatctcttccatcctccctccctncacaagctacagtgatgcatgtagcagacacggnacctacagagtacatggtccaaggccaataaagnttcagcaa

SEQ ID NO: 5495 - DNA, 556 bp, Homo sapiens
  I.5495 (H38953)
  misc_feature (387)..(387): n is a, c, g, or t
  misc_feature (435)..(435): n is a, c, g, or t
  misc_feature (446)..(446): n is a, c, g, or t
  misc_feature (464)..(464): n is a, c, g, or t
  misc_feature (477)..(477): n is a, c, g, or t
  misc_feature (491)..(491): n is a, c, g, or t
  misc_feature (497)..(497): n is a, c, g, or t
  misc_feature (505)..(505): n is a, c, g, or t
  misc_feature (528)..(528): n is a, c, g, or t
  misc_feature (533)..(533): n is a, c, g, or t
  misc_feature (541)..(541): n is a, c, g, or t
  misc_feature (552)..(552): n is a, c, g, or t
cttaaaacctaagacaaaaacacacacattagcctaagcctacacagggtcaggatcatgaagatgtcaccaggtgataggaatttctcagccccactgtagtctcaggggattgtacgtgagagcggtgttgatggaaaccttgttatacagcgcatgaccgtatttctcttctcccgttaaaggctaagaaagcctctgactgaacagaatagcttggaaatcaacttcaaatcactgataccaatatcaatcccaatattttataatccttcttccccctacattttgcttctctttattcaaattcagggttcaatctaaaccaatctgggggatatttccaaaggggtaaggggccataaggctccatctttggcttggggntttgtttgagcttttttgggcttggggcctgtactccgtagggggccntgtcttgctanaagcatcaccgtaggctntgggggggagggngggttgggaggagntgctcnggcccggnatcacccctttttgaaattcagnggccntccccggnttcccgggggnaatt

SEQ ID NO: 5496 - DNA, 487 bp, Homo sapiens
  I.5496 (H30009)
  misc_feature (142)..(142): n is a, c, g, or t
  misc_feature (225)..(225): n is a, c, g, or t
  misc_feature (227)..(227): n is a, c, g, or t
  misc_feature (350)..(350): n is a, c, g, or t
  misc_feature (379)..(379): n is a, c, g, or t
  misc_feature (449)..(449): n is a, c, g, or t
  misc_feature (464)..(464): n is a, c, g, or t
  misc_feature (472)..(472): n is a, c, g, or t
cgaggcagaaaaattctactttccatctgcttggctgcggaggaccttggggtgggctcagcgtgggggctgcaggcagaaatgggtccagaaggcaaggtcgaggttagagccaagcctgtggcagggctacgggcagggngcggggaggaatgtgggtccaggcccagaggaaaaggttgaagttatagccaggcctgtgggcgaggccgcagcagggcccantnaggggaaggagccaatgtgttatgcatgtagaaaatagatggcctggagcaactgaagaaccacaaaagaagtgaaacagccagttcctgccttaactgatgacgttccaccattgtgatttnttgctgccccaccccaacttgatctcttngaccttgtgacattcttcttctggacgagtctcaggagtttccccaccgagcaacttgttgacccccggncctgccaggaaaagntaaccacnttaacttttccatta

SEQ ID NO: 5497 - DNA, 333 bp, Homo sapiens
  I.5497 (H29719)
agcagttctaatatcaattcctaccagcccaggctgtggacagcaatcccatgcctacaaagctgatccagcagaagcatctcagggtgtgtgagggcaagtagagggtacaagtgaatggtaaacaaggaagagtggctgtctgaaaattcgttttcatgttttcctgtttctttacagaaacccgggatggacgtggccgacgcctacgtgactttcgtccgccattctcaggatgtcctgcgtgataaggtcaatgagggagatgtacataggaaaggttattttgatgttagttaaatgcctttttccttctttggaaaacccaagggg

SEQ ID NO: 5498 - DNA, 534 bp, Homo sapiens
  I.5498 (H29626)
  misc_feature (53)..(53): n is a, c, g, or t
  misc_feature (90)..(90): n is a, c, g, or t
  misc_feature (431)..(431): n is a, c, g, or t
  misc_feature (467)..(467): n is a, c, g, or t
  misc_feature (492)..(492): n is a, c, g, or t
  misc_feature (499)..(499): n is a, c, g, or t
tgcctcagtggcttgctttgctgtgcagaatgcagtctcagtggaaataagantgctcaaaaatgattaacccttggtaatctgcatttnctgaagtttgacctgggtccgcagcccaatgtactcattctttgtacacctgtttctcataaattatcagctggctgggtgggcagggggcgccatggtttaaagctgcaactgactgagcaactctaatgtaagtgtttgccaaaacccagggtaaggatttccagtcttccaggaatgaaattatctttgaagtgataacgatgcgacatttactgcacatctgcacaccacagctggtgtcagggaggcgccacccccagggagagggagttggtctcagcctccctgatgagaatatctccctaaagtgagggccagattgcaaggagggaaaaccntgaccaagaaaggttttttgccagtttagagagagntgcctttgcaagtttcgttgcaggnttgagcntgtttgccgagagttgttgttgccttctaagtttt

SEQ ID NO: 5499 - DNA, 493 bp, Homo sapiens
  I.5499 (H29209)
  misc_feature (365)..(365): n is a, c, g, or t
  misc_feature (393)..(393): n is a, c, g, or t
  misc_feature (438)..(438): n is a, c, g, or t
  misc_feature (471)..(471): n is a, c, g, or t
ttttttttttattgtctgatcaaatttaaagtaaacaataaaatgtttgattctaatggcagctttttcatcactgctgcctaccaagtaaaaaaagttttaactttcctcaaacagcaggaaaaaatgttagaaaaatcatcttctaataaactactttttattcccactgatgaagaaagactataaaataagcttgctacattctaattggcagtaaacactgaaaagtacctgcagtggtctatacagcgcatactcatctctgaaaagctggtcgtgatgactaacacaatccagccaacgtccatcaaccattgcttgtccaattgctatagcttgtgccctgaaatcaagacccacangaatgaaaagttttaaaagtcagtcagnatagttaagtaccagataaggcacaaccttaaaatattttttttnagttctaatcagagttaggatttgcaatggccntgggtaagtaagggcggtacga

SEQ ID NO: 5500 - DNA, 516 bp, Homo sapiens
  I.5500 (H29208)
  misc_feature (99)..(99): n is a, c, g, or t
  misc_feature (203)..(203): n is a, c, g, or t
  misc_feature (247)..(247): n is a, c, g, or t
  misc_feature (302)..(302): n is a, c, g, or t
  misc_feature (303)..(303): n is a, c, g, or t
  misc_feature (318)..(318): n is a, c, g, or t
  misc_feature (329)..(329): n is a, c, g, or t
  misc_feature (333)..(333): n is a, c, g, or t
  misc_feature (344)..(344): n is a, c, g, or t
  misc_feature (346)..(346): n is a, c, g, or t
  misc_feature (415)..(415): n is a, c, g, or t
aattgtgtgagttagctaccataaagaaatccaagttaggtttccttttatgagtctaaaaatcacaggaaaacatctgaaaaggtatatagcattttnctcaagggtaactacttgctgttaatgtgattgcaggacagtgtgcagttaaaagacctgtggaaaaaaatctgccatcacagcagtggaatggagtttcaggntcaccgctactggttgagaacgcatcccaactgcattgtagganaggaattagtcaactggctaatccgaaatgggcatattgccacaaggtattctgnncttagaaggtttcantattatttgtntatnttgaatgaganancatatttgaagatagtaagagttacagatttctttgtagagttagggtgctctttgttttatgtaattnatggtttaggggtgcttaattacttaaccctcctccaatctggagttttaaccagcagagaacagatgcaagggagtacaaggagccaaatagggtctttt

SEQ ID NO: 5501 - DNA, 428 bp, Homo sapiens
  I.5501 (H27230)
  misc_feature (36)..(36): n is a, c, g, or t
  misc_feature (43)..(43): n is a, c, g, or t
  misc_feature (45)..(45): n is a, c, g, or t
  misc_feature (107)..(107): n is a, c, g, or t
  misc_feature (186)..(186): n is a, c, g, or t
  misc_feature (257)..(257): n is a, c, g, or t
  misc_feature (280)..(280): n is a, c, g, or t
  misc_feature (299)..(299): n is a, c, g, or t
  misc_feature (370)..(370): n is a, c, g, or t
  misc_feature (422)..(422): n is a, c, g, or t
ggctgcagtgagctgtgatcgtaccactgcactctngcctggnanacagagtgagacactgtctgagaacaaaaaacgactgaaaaaaaaaatcaccttagcttttnctcttagaatcttctctaaaatgtattctttgtggcattctgaaataggattcatgatgatgcctgttgatcttagggncactacctcacctgccagtatctttggggctgtgtccttcaaggacatgtccccagactgctgtgcagtgntcattttttgtgtttggtttggnggtggcttcttcccccttnctaggctatcaacctcttatcaccacttgttggtgtcagaactaactgcttctggtctgggagagggactnaaccgatgcctttggggtaggagagaattatgaaagaaattttgggcattcnctctaa

SEQ ID NO: 5502 - DNA, 402 bp, Homo sapiens
  I.5502 (H26480)
  misc_feature (270)..(270): n is a, c, g, or t
  misc_feature (361)..(361): n is a, c, g, or t
taggtttaatgaatccacttcctttattgcagtaacctctgtacaaagcagcaactgcaatactcaaggttaaaacattagaaaagcatttgtgtgacaggtatattacagtattatcaaaatattacattttcagacttacttagcagataatcatccaccagagcttaaatctttaaattatttccatagtcttaaaaaatatgtaatgtcagaatgcatataaaaagaatgtaaaaggaaacctaaaatacaaatggaataatgtancaaataaatatttgatttcagtaactgttaataatcagctcaacaccaccatttctctcttaaacttcaatttaattccttatagggtttnatgaactgttcaaatgccctggcatatattattttattttc

SEQ ID NO: 5503 - DNA, 410 bp, Homo sapiens
  I.5503 (H26319)
  misc_feature (61)..(61): n is a, c, g, or t
  misc_feature (303)..(303): n is a, c, g, or t
  misc_feature (366)..(366): n is a, c, g, or t
  misc_feature (384)..(384): n is a, c, g, or t
  misc_feature (395)..(395): n is a, c, g, or t
  misc_feature (410)..(410): n is a, c, g, or t
tggaatgcagtaacgtgatcttggctcactgcgacctccacctccccagttcaagcgattntcctgcctcagcctccctagtagctgggactacgggtgcacgccaccatgcccagctaattttggtattttgagtagagacagggtttcaccgtgttggctaggatggtgtctatctcttgaccttgtgatccacccgcctcagcctcccagagtgctgggattacaggtgcgagccactgcgcctggctggttttcatgaatcttgatagacatctataacgttattattttcagtgggtntgcagcatttttgcttcatgagtatgacctaggtataggagatctgataacttgaattcagantattaaggaaaatgaagnaaccgattttncaaaaaaaaaaaaan

SEQ ID NO: 5504 - DNA, 405 bp, Homo sapiens
  I.5504 (H26279)
  misc_feature (1)..(1): n is a, c, g, or t
  misc_feature (265)..(265): n is a, c, g, or t
  misc_feature (368)..(368): n is a, c, g, or t
  misc_feature (387)..(387): n is a, c, g, or t
  misc_feature (398)..(398): n is a, c, g, or t
ntattgaataggttcaaatatgaagacattattggtgaaaaaacaaaaaacaaatagtggacaagaaataatagtcaccacaatcatctttttcaacctaacacaattcagaataatacataagcaatttttacatttttaatcttacaatcatcttttattctaccatactgtcaaatacttgtgaaaataaataaaaataaaatacatgatgcataggaagattttttttaaaactgaactattgcacaaatcaatgtgagantatgcaagtaatataaaagtgcatttaaatatattgtcacaacatatttcggtaagtcataaatctatttcacctactgtttataatctctggggctctgggnactaggtggtttcttaccnactcatctccngtgggga

SEQ ID NO: 5505 - DNA, 314 bp, Homo sapiens
  I.5505 (H26240)
  misc_feature (240)..(240): n is a, c, g, or t
  misc_feature (246)..(246): n is a, c, g, or t
  misc_feature (280)..(280): n is a, c, g, or t
  misc_feature (287)..(287): n is a, c, g, or t
  misc_feature (292)..(292): n is a, c, g, or t
  misc_feature (303)..(303): n is a, c, g, or t
acagtatagcaagacagtctgcactggcaaacccaggcctttccatctgtagcccacatagcaaactttgggcagaggcttccctagcaagtttgttcctttcctattcatttctggccctacgaccatcagctcaattgaaactagtccaacagaatcagaggcatttgtaaaaggttttcagaggaaaatctactgtaaactgtgtaatcctgaattagtccatgtttgattctacangtcttnaaataaggcttcagctttatgacagtcttaccanggtgaancaggngcattcgggantgttaggcccg

SEQ ID NO: 5506 - DNA, 344 bp, Homo sapiens
  I.5506 (H25857)
  misc_feature (1)..(1): n is a, c, g, or t
  misc_feature (40)..(40): n is a, c, g, or t
  misc_feature (141)..(141): n is a, c, g, or t
  misc_feature (223)..(223): n is a, c, g, or t
  misc_feature (318)..(318): n is a, c, g, or t
  misc_feature (336)..(336): n is a, c, g, or t
nttgaccacagagattctgttacttagaaacacaccaggncattttaataacatgatgtattccttttcttttccaaactaatatgtatttagtgtaatcacatgttatttttaatacagtcctgctttcccttgtgtggnttcacattcttcacattttatacaaaggaaaaaatatgctagactaagttttgattttatccattttcatacagaaaagggnacataacttcacagaaggaaatgggtcatgcctttatggatttaggttggtatcaccccctaaaggtttacttactgaggtttagggaccatttnttccctttacaaattacnggttggtg

SEQ ID NO: 5507 - DNA, 452 bp, Homo sapiens
  I.5507 (H25703)
  misc_feature (211)..(211): n is a, c, g, or t
  misc_feature (331)..(331): n is a, c, g, or t
  misc_feature (397)..(397): n is a, c, g, or t
  misc_feature (411)..(411): n is a, c, g, or t
  misc_feature (430)..(430): n is a, c, g, or t
  misc_feature (435)..(435): n is a, c, g, or t
acgacacagctcttaatcattgtcactttcagtatatcatagtagttagtagtagattgccttgatggcagtaattctgtagtaatttctattcaatcaaacctaagagagctttgatcttactgtaaaggtacaaacaaatctcttatataattcctagcttttttttttgtttatgattctgatcaactataagacacaatgtaaaganttgtggcttataatttatctgaaatttattagcttagtttagtttgggcaggagttacaaacttaataggaattgtcattttacttacagtttatttcctgattagttgttaattttttncccctcagttatctttattcagtcttattgggtcaaaacataggatacaaattagtccctcaactnaattaggctgttantggaatttaggaggtggantggcntatttttgggtttccct

SEQ ID NO: 5508 - DNA, 510 bp, Homo sapiens
  I.5508 (H24182)
  misc_feature (118)..(118): n is a, c, g, or t
  misc_feature (224)..(224): n is a, c, g, or t
  misc_feature (232)..(232): n is a, c, g, or t
  misc_feature (364)..(364): n is a, c, g, or t
  misc_feature (436)..(436): n is a, c, g, or t
  misc_feature (462)..(462): n is a, c, g, or t
  misc_feature (501)..(501): n is a, c, g, or t
cttcagcaaacgtcaaccatggtagcaaattggtgaggctgtgaccaataatgaggaaataatctggcaaatttttaggggtgggaacttttttaaatgttcatttaagaaaaaacanaaacagggcagtcttgtagtttaaaatatatttctaaaagcttaacagttcgttttcaactaaattgtgtttagggatctgtgtttgagatttttctttatttctntttttttnttaaatagtaagtcacaggtccacactgtgtaaacatgcatctgataagatactgctgatattctaaacaagttgaaataatcttgccttagtgatcatgattacacaaaagaggtgcactgccaataagtntctctaattccaatagttggaaagcaacctggcatggctaattcgtgggttttcgggggttgagggattaanaacacccccacataacctgccttttncctgggggcccgaacccgtggaatgtttacggttgtggnttcattttt

SEQ ID NO: 5509 - DNA, 518 bp, Homo sapiens
  I.5509 (H24131)
  misc_feature (423)..(423): n is a, c, g, or t
  misc_feature (437)..(437): n is a, c, g, or t
  misc_feature (445)..(445): n is a, c, g, or t
  misc_feature (476)..(476): n is a, c, g, or t
  misc_feature (490)..(490): n is a, c, g, or t
  misc_feature (501)..(501): n is a, c, g, or t
  misc_feature (512)..(512): n is a, c, g, or t
tttcttccacttgatcgaatcggctcttgaagcttgtgcatgcatcacgtagttctcatgccatggttttcagctccatcaggtcatttaaggtcttctctacgctgtttattctagttagccatcgtctaatcttttttcaatgtttttagcttctttgcaatgggttcagacatcttcctttagcttagagaagtttgttattaccgatcttctgaagccttcttctctcaacttgtcaaagtcattctccatccagctttgtcctgttgctggcaaggagctgcattcctttgaaggcactctgatttttagagttttcagcttttttgctctggtttctccccatctttgtggttttatctaccattggtctttggatgattgtgacataccgatggtgttttgggtgtgggatgtccnttctgtttgttgantttccttntaacagtgaaggaccgtcagctggcaggtcngttgggagtttgcngggaggtccantccagaacccngttttt

SEQ ID NO: 5510 - DNA, 504 bp, Homo sapiens
  I.5510 (H24128)
  misc_feature (14)..(14): n is a, c, g, or t
  misc_feature (32)..(32): n is a, c, g, or t
  misc_feature (33)..(33): n is a, c, g, or t
  misc_feature (434)..(434): n is a, c, g, or t
  misc_feature (451)..(451): n is a, c, g, or t
tggaccccttaggntactgaggagcagagttnngaaagtgaagccaggacataagggttctgtgtcacctctgtcacagctgactcagtgaccttcagtgagtccattcctacctctgggattctgtcctcgggttccgaaagacagggaagggagaaaaataagtacaaagtagtgagttttacataaagcctgttattctgttctatttttacaatgttaaaaatgtcctttcttttatgttacaatagtaagagaagattataaaagtttctttttgaatgccctttatagattaaaaggttgcctccctgaacaacttttgtctcagggaatacttactggttcttgaagcccaaaggtgtaggaactcctttggacaatatccatgtttttcaaactttttgattgcctgccataggggaaaaaaggcntttagtactcttatatntaaccgaaataacagtctataaaaggtactttagtggaatgtaccccgatatt

SEQ ID NO: 5511 - DNA, 516 bp, Homo sapiens
  I.5511 (H24120)
  misc_feature (468)..(468): n is a, c, g, or t
  misc_feature (485)..(485): n is a, c, g, or t
tggaattgctaggttgttcagcaccacacttttctcccctctacctcaatggttcctggctctgtgtgggtgtctcctagcagataaaatggccctcttccatttacatttgtcttatccttatatcttcaaaatggttcgtaagacaaaaagagcctgcccttgatagactgcctcccactgcagcaagtctagcactgagcagccctaagactagaatgccaacttcgtagagggaggatagataggaaaggctcctgagacctggggcctgggagaaggaagtagtaggttcaagattaagaggaggtgagtgatacgtgtggctcagacataaaatgtaatgcccaccaaaaaactcagtcattcaatctaagtaatatttactgaaatgatttttaaaattcacagtatgagaaacccgtgaagaacaaaatattcaaacttgttaaataaagacaggatccngccgggccagtgtggtngtgaggcaagtgaggctaagttattgtaatt

SEQ ID NO: 5512 - DNA, 513 bp, Homo sapiens
  I.5512 (H24101)
  misc_feature (494)..(494): n is a, c, g, or t
aaaaagacaaaaaagaccttgctatttgccaggcaacccttcctacacataccattccctagggcagcaggttgtatcttcaggcagtagtcatagtttaagtcttattttgcaaaatgtccttgaaactaagttccgggtaaaataacgaccagtacacagagagtgaacatactctgttatgtaagataacatcactttatgcatcacacaactagttgactcattctcagcttaatgtggttagttttggtttttgttttcagtttccactgctactaagtcagacattctttttcctatacttctgttttttgctctgttttggcttcctgaatgcaagttcaggtcctaacagtgaagtgaggacagaaaaataaccttggatttgcctattttgtggaagtgatggggaaaggtagtcagttggagagactgttgagaaggagtaagggactgttagggacaactcttttcaaggaagattgaaggantgagggagatgcagaggga

SEQ ID NO: 5513 - DNA, 453 bp, Homo sapiens
  I.5513 (H23995)
  misc_feature (370)..(370): n is a, c, g, or t
  misc_feature (377)..(377): n is a, c, g, or t
  misc_feature (445)..(445): n is a, c, g, or t
ttttttttttttttatcacactaagtatattttattgtgcattaattagatgaaagttagtaatatgcattgaccaaaacatttgattgacaagaccataaaggataactgagagttttctttaatataattgttgtacagcaaggattcctgctgtatagagtatatagaagatgacatactctaggaattagaacaatatatattcaatacaataacaaaactatatagtactttaagaactctttcacatatatgaacactcttacttagaacttcagctgtttaaagtaaggcaatatggcaagcctataaaggtacacaccaaaaaaatctaacctacaaaacacccaaaggcaaatgttaggcntatctcnaattatcaggattattcttcttcaccatcgttttctttccaaaattttggtgggaaaaggttctttanctttccct

SEQ ID NO: 5514 - DNA, 351 bp, Homo sapiens
  I.5514 (H23839)
  misc_feature (253)..(253): n is a, c, g, or t
ggcatatgcatagtgaaaggagtgagggctgcaagttcatggatgcattattttctcgttttcgtttgtagggaaatacatgctctgtcattgacttgcaaggattttctttttattcttaattgcctccctaatcctttctccactcagctgtggtactcaatgcactcagattaaatgtgtgtgttcttctgggccaggaaggaatagatagcattgatgtggaccctcaactgtattacagaatagggtngtaaacactcaggagaaacattctccctgggtaaagtgctaagcaattgttaaacagcattttaaagcatgaatgaacgtcttgcttgtacattccaa

SEQ ID NO: 5515 - DNA, 370 bp, Homo sapiens
  I.5515 (H23819)
  misc_feature (138)..(138): n is a, c, g, or t
  misc_feature (255)..(255): n is a, c, g, or t
  misc_feature (265)..(265): n is a, c, g, or t
  misc_feature (282)..(282): n is a, c, g, or t
acttgtttgaggtgatttaggattaccaactctgggaaaaaatattcacagccacattataaaaaacattatcggcaggattcatctcctgctcctttagaataagaacttttcttttgtttgtggaactttggaatntacaagcaagacgttcattcatgctttaaaatgctgtttaacaattgcttagcactttaccagggagaatgtttctcctgagtgtttaccaccctattctgtaatacagttgagggnccacatcaangctatctattccttccngggcccagaggaacacacacatttaatctgaggtgcattgaggtaccacaggctgagtgggaggaaagggattaggggagggcaatta

SEQ ID NO: 5516 - DNA, 394 bp, Homo sapiens
  I.5516 (H23462)
  misc_feature (332)..(332): n is a, c, g, or t
  misc_feature (335)..(335): n is a, c, g, or t
  misc_feature (364)..(364): n is a, c, g, or t
  misc_feature (382)..(382): n is a, c, g, or t
ttttttttttttttgtcagagaaaataaatgtttatttttttaaaccattgaattttggagtaatttgttatgcagcaataaataattaatacattttctaattcaaatgtctgtagatgttatattcagtgctccaattcttcaatttgctttgcctgtgtaagagaaagaaaaaaaattgtaaaattcaaggtgtaccacaactgaaaaattaacctatagaggaaaattattaatttgtggtaaaccagtttattttaaaaaaacattttgtctccttggtttgccattgtagcttgagcaccttgtgtaatgcttgggtacataatanggncattaaataaatattgttaaatgaatgantcaataaatttgcttccncaggttttaagg

SEQ ID NO: 5517 - DNA, 535 bp, Homo sapiens
  I.5517 (H23461)
  misc_feature (429)..(429): n is a, c, g, or t
  misc_feature (460)..(460): n is a, c, g, or t
  misc_feature (505)..(505): n is a, c, g, or t
  misc_feature (513)..(513): n is a, c, g, or t
cttgcattgaaaggaagtctttctaaggagaaggcttggtaactgagcagtcagcctatgtaagtggaagttgaggtacaggtggaaggtttatgaccaaaggttagaatatttcaacccaaagccttcctggttgccttgatcgtctaatacgtcattccttaaaaacaattttttttcttcctactctgccaggcactttgccaagtttggggaatgcaaaggcttaattagacccctcacctttccccaggtattgcccgcagtcaagggggagagccttggccctgcttgctagttagaatgtaccttctacaggttcagtaaggcatacctgggaagtctgagtctccatgctcctttctattttgacttcctgtctgccatgtccacgtttatgaaggggttaaaatgaaaaaatcaaaattnccctttagcccaaagtgtgtgtgtttaattnccaactaattagggtttgggtctgtgtcatcaccaatttccagtnggattgtnattcccagtgtttggagatgaa

SEQ ID NO: 5518 - DNA, 434 bp, Homo sapiens
  I.5518 (H23431)
  misc_feature (274)..(274): n is a, c, g, or t
  misc_feature (413)..(413): n is a, c, g, or t
tttttttttttctttgagacggattcacctttgttgccaggctggagtgcagtggtgcgatctcggctcactgcaatctccacctcccgggttcaagcgattcccctgcctcagcctcctgagtagctgggattacaggcgtgcaccaccacacccagctaattttttgtattttagtggagacggggtctcaccatgttggtcaggatggtcttgatctcctggacctcatgatcctcctgctcggcctcccaaaatggtgggattacaggtntgggccaccgcgccaggccgggaaacagcttcttaaggattctacttattttgtttccacgggaaactttcaagagaagaagacaaactatagtcccaatgctgtagttgatttcctgggcataacagattcatcattncctctttagagtcccctcatc

SEQ ID NO: 5519 - DNA, 506 bp, Homo sapiens
  I.5519 (H23430)
  misc_feature (375)..(375): n is a, c, g, or t
  misc_feature (409)..(409): n is a, c, g, or t
  misc_feature (456)..(456): n is a, c, g, or t
  misc_feature (503)..(503): n is a, c, g, or t
acatctggggacctaaagtgctatgacctactcttgttagaatggggaggggtgtatgagactcagataattataataaatagagttctggcccagatttaactcacagtgtgtctctgttatcagagtcctttctctggttcctagttttgtaattgggaatcaacatacatggtagttgggcagaattctcaacttgggctccttgaccagtttggttaagtgctttcctagtgggggaagatcaagtgggaagcctctaaaactgtaccttccctcaccttggaagggacagcatttcttctagtttgggattaacacatattctggggtccacatgtttgctttttctgcccataagtccacagccagcancactatctgagggacttacagagtgtttgatccnctaatacggggttcttgagtaatatttgtctcttaaccaggagtcgnactttacagggaaagatgtttaggcgtggggccaaagttcatggatnccc

SEQ ID NO: 5520 - DNA, 412 bp, Homo sapiens
  I.5520 (H22999)
  misc_feature (345)..(345): n is a, c, g, or t
  misc_feature (360)..(360): n is a, c, g, or t
  misc_feature (388)..(388): n is a, c, g, or t
  misc_feature (393)..(393): n is a, c, g, or t
tttttttttttttactctgaggaggctgtatttataaaatggttttcaatgtcaaattactcagtatggcgacccaatgagtatttttactttaaaaaagaaaatggtagtcttaaaaaaaggtaataaaagcttgaactgcagccaatcaatagcttcctttgttaaagatgctgcatcctcacgactaaagaatgaagcacaatagtgaaaatggtctctttgggcagcacaagagggtactttctgggcagatataattgtcaaacagtaaaatgattcccggggagggctctggggatctctctagtggggctttgacagagggagttactcccctgtgtnttggggaagggaagnctgggggagctgatgttgataggggcanggtcnttctctggggtccccaaga

SEQ ID NO: 5521 - DNA, 476 bp, Homo sapiens
  I.5521 (H22949)
  misc_feature (433)..(433): n is a, c, g, or t
  misc_feature (440)..(440): n is a, c, g, or t
  misc_feature (449)..(449): n is a, c, g, or t
  misc_feature (456)..(456): n is a, c, g, or t
  misc_feature (464)..(464): n is a, c, g, or t
  misc_feature (471)..(471): n is a, c, g, or t
  misc_feature (476)..(476): n is a, c, g, or t
gaaaagcctatgttactttaataataaacattggccttggaagaaaattgcttgagattgaattctgccttttctacttaatagctatgtgattttagaaaggtggcatccttctctgtgcccctacttcctcatctgtaaatgggagattgccttaatatagtacatgtagcagttcaaaagattaaatgagcacttaaaactgcgcctgatatagagtaacataaaatcaggcatcaatatttttaaatgacccaattttaattttctgtaaagctcttatcattatccagtattcatctcatatgcatagttactggtttacttctttctatcattttaaaaaggaatgtctggggaaaaaggttccaaggatgggccaaatagggaaggaggctccagtctacagcttcccagcgttgagttgatggcngaaggtngggtggttncccgccntttccaancgggggnacccn

SEQ ID NO: 5522 - DNA, 476 bp, Homo sapiens
  I.5522 (H22946)
  misc_feature (391)..(391): n is a, c, g, or t
  misc_feature (456)..(456): n is a, c, g, or t
  misc_feature (468)..(468): n is a, c, g, or t
ttttttttttaactgattcacagcttcaatgccatttatggacatttaaaatgcacacatatgcagaacaatgctttagcttttcgagcatatgtatcaaaacattaaaattggatgggtgcccctgggaaaaaggaaagtaggcaggggactgggaatgaagggaaagaaataaaactaaaagacaaaaggtttgcatagaccaatattgatgaagtgccacacactgaggagtgtgctgagctgcgtgaggtgcagagggaacctggaaaggagagagcaggagtatagaaaagtacagctcttgggaggctgaaggtcagatagtcaggtagcctggggtcaaatctgagctctgctgcttcccagctctttcaccttggacacgttnttccaagctccctcgcgtttctttttacgttcaaacaaggttacaaggtgttttacacaagcagntagcagatttgntcccgact

SEQ ID NO: 5523 - DNA, 441 bp, Homo sapiens
  I.5523 (H22938)
  misc_feature (413)..(413): n is a, c, g, or t
  misc_feature (435)..(435): n is a, c, g, or t
tttttttttgaagttgtttattgagaggtttaatcatttgtatatcagggaaagccttatgccttaattacagtgataatagaaaaaagtattgattaggcctggatttctgtcatgaaagtagagattacaaggtatcttctttatcagtagaccttgctgactttaagaaaggcagactttccttcagtcttagttttacggaaaaatgaaaacttatttaataaaatttttataaaaaagggaacgaaaacctcagagatataaataaatgattcagagtcacacactgggcagtcaatttcacttaggaccctaaggcccaccctcttttcaccacatccaaggattggggttacccttcaacaattgactgggatacaagtgtaggagtgttactggaattccccccnaccgactggtcccgttttgttnctaaat

SEQ ID NO: 5524 - DNA, 441 bp, Homo sapiens
  I.5524 (H22921)
  misc_feature (282)..(282): n is a, c, g, or t
  misc_feature (356)..(356): n is a, c, g, or t
  misc_feature (368)..(368): n is a, c, g, or t
  misc_feature (373)..(373): n is a, c, g, or t
  misc_feature (394)..(394): n is a, c, g, or t
  misc_feature (404)..(404): n is a, c, g, or t
  misc_feature (413)..(413): n is a, c, g, or t
  misc_feature (424)..(424): n is a, c, g, or t
  misc_feature (435)..(435): n is a, c, g, or t
tttttttttttttgagacagggtctcactctgtcacccaggctagagtacagtggcacaatctcggcttactgcaacctctgcctcccaggttcaagcgattctcctgcctcagcctcccgagtaactaggaccacaggcacacaccaccatgcccggctaatttttgcatttttagtagagacagggcttcaccatgttggccagggctggtctcaatttcttgacctcatgatccaccagcatcggcctcatgatgtgctggggattacagggcatgagncaacgcactcgggcctagtattcaattttacagggcagggccacctcttacctattttcacaggaaaaccagtntttacacaggancagtnaggaaccactggaattcagtnggtcttttcnggggggttntaggttcacantggatttaaantacagg

SEQ ID NO: 5525 - DNA, 401 bp, Homo sapiens
  I.5525 (H22714)
cttcaagagacaggtagaagaaaaaaaaaaagaaacagtagatgtaatttcaagattgaggatttattttgttagtgactgttccagaagctgaattttggtgttagagcaattcaggagggacagtttgccaccattttatgatactttactgtagaaaagttttcaggatttagaccaggaaagagacatcctaaccatatgggttgattttattttatggaccctgtgaagtctgggactgatcaggtttctcttttgttggctactagaaagcttggagtcaaatgtgtggtcaatgcatagcacttgtaatgggactctacggtatgtatgcactttgtattagctttctgccagggctccatttcgtgttcctatctatattgtttttgtttttt

SEQ ID NO: 5526 - DNA, 415 bp, Homo sapiens
  I.5526 (H21776)
  misc_feature (11)..(11): n is a, c, g, or t
  misc_feature (12)..(12): n is a, c, g, or t
  misc_feature (14)..(14): n is a, c, g, or t
  misc_feature (194)..(194): n is a, c, g, or t
  misc_feature (263)..(263): n is a, c, g, or t
  misc_feature (376)..(376): n is a, c, g, or t
  misc_feature (411)..(411): n is a, c, g, or t
ttggctcaaanntnatatttaccatttccagctgttgctgaacaaaaggaaacaatagtcagaggataaatgtaagaagaaacaatgcaaaaacatgtggaaagaagttgctggtaatgcatcacagaagtaggacatggccacagcagcggggccatctccgcttcccttctttgtctctcccttcagacagntcatgaacaagaacttttaactaggcattaattgggacatttatgtaaaggcaatcggggtgggggganttccgtgggagacacacaaggcaactcttaggttatgggcacaaacaggtaagggagatcctttgggcccttaaaggaaacagatgcctttttgccctttttcacgggggggnggacaaggggggccagagaaggggggttagtgctnccaa

SEQ ID NO: 5527 - DNA, 438 bp, Homo sapiens
  I.5527 (H21775)
attcggcacgtgggaaggcatgaaaaggcaagatctgtcaggacattgcgaatcagtaaaaccagacctttgctcttgagagactcccacacgtgaaggttcttaataaactttctcacctgccagaaagtgtgaaagccttgaatgtggaccccttttgatatgcctggcattgttgcattgagttttgtcatccgtttctagaaaagataaagcaagcttattttataacttcttttcttgtttttacttactatgtcttcatcttcattaacgacaacaaccaagagtgccagaattctcttgtaggcactaacccccttctctgcctccttgtctccctccgtgaaaaggcaacagggcatctgtttctttaaaggggccacagatcttcctttactggtttgtggcccttaactaaggagtttgcttgtgttg

SEQ ID NO: 5528 - DNA, 528 bp, Homo sapiens
  I.5528 (H20876)
  misc_feature (396)..(396): n is a, c, g, or t
  misc_feature (408)..(408): n is a, c, g, or t
  misc_feature (465)..(465): n is a, c, g, or t
  misc_feature (478)..(478): n is a, c, g, or t
  misc_feature (498)..(498): n is a, c, g, or t
  misc_feature (503)..(503): n is a, c, g, or t
  misc_feature (508)..(508): n is a, c, g, or t
gtacatgtgcacaatgtcagagttagttacatatgtatacacgtgtcatgctggtgtgctgcacccattaactcgtcatttagcattagctatatctcctaatgctatccctcccccctccccccaccccacaacagtccccagagtgtgatgttccccttcttgtgtccatgtgttctcattgttcaattcccatctatgagtgagaacatgcagtgtttggtttttttgtccttgcgatagtttactgagaatgatgatttccaatttcatccatgtccctacaaaggacatgaactcatcattttttatgggctgcatagtattccatgggtgtatatgtgccacattttcttaatccagtctatccttgttgggacttttgggggtggggtncaagtctttggntattgtgaataggtggccgcaataaacatacgtgtgcaagtgtctttataggcaggnaaggattataggnccttggggatatacccgtanggggntgggngggggcaaaagggaatttcc

SEQ ID NO: 5529 - DNA, 400 bp, Homo sapiens
  I.5529 (H20826)
  misc_feature (314)..(314): n is a, c, g, or t
  misc_feature (385)..(385): n is a, c, g, or t
ttttttttttttcacatataatcagttttattgccaggtaagaaattcatattaatatagtgaatacatatgtttacaaataaacattcttagaaaacaaacaaatgtgtttttttcttcattgtaggaagaattattcgtatcataaactctgcagttgttgacaagtattaacacaggtttacttgcagaacatacggttactaaaatattcgcacataaaatatgctccatttacacaaaaaactggggaagagttaggatgggggaggccgggcggacccaagggcaggatgggagggctgaggacactntgaaaggggcaaaggggaaggtcagactctgggtccccttggggttggggaactgggggggacagctaaanggcaaaaaattgggg

SEQ ID NO: 5530 - DNA, 485 bp, Homo sapiens
  I.5530 (H20320)
  misc_feature (342)..(342): n is a, c, g, or t
  misc_feature (386)..(386): n is a, c, g, or t
  misc_feature (403)..(403): n is a, c, g, or t
  misc_feature (420)..(420): n is a, c, g, or t
  misc_feature (434)..(434): n is a, c, g, or t
  misc_feature (442)..(442): n is a, c, g, or t
  misc_feature (456)..(456): n is a, c, g, or t
atgttttctattttatatttctcaagccaaatatctgcaacaataacatgtattgaaaggtatagaaataaacagatggatagacagaaaaagactcagactgtctaagtagtgaagtttgtgcagaactagaaacaaaaatccacctgggtcagaggtatagggttaatttctcttgctgaggctcagatttctccttcatgcatgtttaatggtccacctaagttcaactggaggagcatctttcttctttgttaaccaaacatgcccagggtaggagctgcttctcttttctatgggtaggctgctgagttctgactgtgtcagcctgggagggtaccnccggacgttaggcatctttagggctgcctattcacgggcagccnggggagggtagtgggcngggctgggggcatagtncccgccagatgggnaaaagggncacacccggcccgnttacaagggccttggggattttttcagaa

SEQ ID NO: 5531 - DNA, 474 bp, Homo sapiens
  I.5531 (H20086)
  misc_feature (388)..(388): n is a, c, g, or t
  misc_feature (430)..(430): n is a, c, g, or t
  misc_feature (437)..(437): n is a, c, g, or t
  misc_feature (461)..(461): n is a, c, g, or t
gaaatatgatctatttttgccaagctgatctatatcagcttaaacttgaactttgagggcagacaaaacagaatcgtactatcatcctaaagactacttcctccctctagtgaccaggaatgggaatatcacagctacaggcatttagaaaacttgattctcaatgtatatgcatacctccctctaggggatatttgggaaattttcagtagtaattttggttattacgatgaatagggctgcagctggtattcattaagggcattagggatgctagacatcgtgaatgtgagggatagtgccctatataaaataattttccagctcaaaacatttcatgtagatgaaaaattcattattttttaaagtctagaacattagccagttncagttcatgttttcacttaggcaatggagaccttgctgaganatgtgtncttagggcatttcatcttgtgcancatcatacatatt

SEQ ID NO: 5532 - DNA, 414 bp, Homo sapiens
  I.5532 (H20016)
  misc_feature (164)..(164): n is a, c, g, or t
  misc_feature (182)..(182): n is a, c, g, or t
  misc_feature (200)..(200): n is a, c, g, or t
  misc_feature (257)..(257): n is a, c, g, or t
  misc_feature (304)..(304): n is a, c, g, or t
  misc_feature (360)..(360): n is a, c, g, or t
  misc_feature (383)..(383): n is a, c, g, or t
  misc_feature (396)..(396): n is a, c, g, or t
ataaagaaaagaggtttaattgactgacagttccgtatgcctgaggagccctcaggaaacttacaatcatgacagaaggtgaaggggaagcaaggcacatctaaccatgacaaagcttgagagagagagagagagagcaagccacatacttttaaacccccagntctcatgagagctcactntaaaaagaacagtaaggnggaagtctgcccccatgattcagtcacctcccaccaggcccctctgacatgtaaggnttacaatttgagatgagatttgggtggggacacagagccaaaccgtntcaagtagtgtacagtaatgtcctagaccttcacatgcgcttaccactcacttcantgatttcacccagtttcaatttncagtcctacaggnttccattattggtaagtg

SEQ ID NO: 5533 - DNA, 234 bp, Homo sapiens
  I.5533 (H19933)
aattcggcagaggccttgcttgagttcttcggaaagtctcatccacccccacatcgcctctttaggaagtcacttaatgttgggcttcattattcccacatccctttccttactacttgcctgcacttcttgagaaaaagactgcagaaaggagaggtggggctttcagtagaaacaagcaaaccgcagtccctgtggggggactctccaggaagaagggtaatttcctgcctc

SEQ ID NO: 5534 - DNA, 475 bp, Homo sapiens
  I.5534 (H19386)
  misc_feature (10)..(10): n is a, c, g, or t
  misc_feature (395)..(395): n is a, c, g, or t
  misc_feature (435)..(435): n is a, c, g, or t
ctcgtcaccncaaatcataccaacactgaaaagaagagacaataagaagcattctttctttcaacatcacagacattggcaactctaggatgtctatacagagggataaaaaggggtggcagttggctgggcgtggtggctcatgcctgtaatcccggcactttgggaggcccagggaggtggatcacttgaggtcaggagttccagactgacagtctggccaccatggtgaaaccccgtttctaataaaaatacagaaaaattagctgtgctggtggtgggtgcttgaattcccagcttcttgggaggctgagacaggagaatcgcttgaacttaggtggcggaggttgccgttgagcttgagattcacgttcactgggacgacaaagtgagantctgtcttcaaaaaaaaagggagggggttggttggcaggntttccgaagggagggacttggaggttttttggtttagctt

SEQ ID NO: 5535 - DNA, 448 bp, Homo sapiens
  I.5535 (H19208)
  misc_feature (255)..(255): n is a, c, g, or t
  misc_feature (258)..(258): n is a, c, g, or t
  misc_feature (278)..(278): n is a, c, g, or t
  misc_feature (283)..(283): n is a, c, g, or t
  misc_feature (295)..(295): n is a, c, g, or t
  misc_feature (316)..(316): n is a, c, g, or t
  misc_feature (351)..(351): n is a, c, g, or t
  misc_feature (441)..(441): n is a, c, g, or t
tttttttttgcttgtggctcttttatatatatttaaaacacacagtaagaacataagaacatctcaaatcatttagaaggtaaaagggggttatcaaccaaaatctttggaaatttcataaaatttaaatatctgcaaacagtccaaccaaaaacgaaaaaaaaaaaaaatcccaacatttggctatggagggcacttcacatgtgaaccaaatgggcgttataacattttccttcaactagtcactaaacccanttngaaagattacaagagcattnttggngacatccccaantaccacgtacttgattaggancattctgttatgaaggcgctcagcttaccgcgggnctttcctttacattgccattacatttactttaccattttctacagtggcaatgttggaaataggcctccaaattttggcaaagtaggttngtgtccc

SEQ ID NO: 5536 - DNA, 213 bp, Homo sapiens
  I.5536 (H19207)
tattttactatttaaaagatgttattttaccatgtgttaccaagatgaaactgtatgggtagcttttttgtttgttttttgttttgtttttgtttttgtttttgtttttagttgtaggtcgcagcggggaaattttttgcgactgtacacatagctgcagcattaaaaacttaaaaaaattgttaaaaaaagaaaaaaagggaaaacatttca

SEQ ID NO: 5537 - DNA, 446 bp, Homo sapiens
  I.5537 (H18944)
  misc_feature (386)..(386): n is a, c, g, or t
  misc_feature (435)..(435): n is a, c, g, or t
tttttttttgagacagagtttcactcttgttgcccaggctggagtgcagtggcgcaatcccggctcactgcaacctccacctcatgggttcaagagattctcctccctcagcctcctgagtagctggaattacaggcgcccaccaccacagctggctaattttttgtgtttttagtagagacagggtttcatcatgttggccaggctggtgatcttacctcaggtgatccacccgcctcggcctcccaaagtgcagggattacaagcatgagccacaatgcccggccaccttctattatttttaagttacccagtctgtgggtattttgttacaggcaggcacaaacaggactaagataacaaccaagaggccttacaggaaaganttgttattaattaaaaatactgggttaaggcacaaagtgccaggggtantgtttaggaaa

SEQ ID NO: 5538 - DNA, 524 bp, Homo sapiens
  I.5538 (H18738)
  misc_feature (389)..(389): n is a, c, g, or t
  misc_feature (417)..(417): n is a, c, g, or t
  misc_feature (441)..(441): n is a, c, g, or t
  misc_feature (516)..(516): n is a, c, g, or t
  misc_feature (521)..(521): n is a, c, g, or t
tggaagaaaagtattctggtagagagtcggccgggtgcactggctcaagcctgtaatcccagcactttgggaggctgtggcaggtggatcacctgaggtcaggagttcaagaccagcctggccaacacagtgaaaccccatctctactaataatacaaaaattagccaggtgtggtggcacatgcctgtagtcccagctactcgggaggctgaggcatgagaatcgctgcaacttgcaaggtggaggttacagtgagctgaaatcacgccactgcactccactccatctcaaaaaaaaaaagagtctacattaaacagattccaaagtaaagtttcttcatcccaatgcatggccatgatttacacagacgtgcctagcatggctcatncaacattttgaacggttgttccctaccntgcctttgcaggcatttccacagngttcagggagatggggtttaaaggtaaaggtttgggggttttagtgggttttagggggacaattgtttagtttgnagggngag

SEQ ID NO: 5539 - DNA, 540 bp, Homo sapiens
  I.5539 (H18736)
  misc_feature (450)..(450): n is a, c, g, or t
  misc_feature (539)..(539): n is a, c, g, or t
atttttgttagaactttctgatggctttactaagatgtcaggttttgtttgaggactgaatttgacatatatgcaagatatttatttactgctgctgccttgggtctccaggttctacctaggaggtatttgctgttccattgcagcatagggaaactgttcaagcacacaatgtgaatgttgagatcatgtgcagagaggccagtaccaaaacttcagtatctggcccaatggcaagaggctactgttaggtttgcatttgggcagttagaacctcacagataccagctcccaagttgctagtccatcagtgtaaactgaacacaattctctcttgctttctctctctctactccctcacacatttggaccttgtcacttggtgtttaagcaccttgcctattcaacaaaatctggatggaggcagccccatgggacttttcctgttantaagggaacttgcttctactattttattcttttaatgttttagtattttgatattgggattcaaatgaaaggggtctcattctgtgggnt

SEQ ID NO: 5540 - DNA, 539 bp, Homo sapiens
  I.5540 (H18723)
  misc_feature (499)..(499): n is a, c, g, or t
  misc_feature (509)..(509): n is a, c, g, or t
  misc_feature (515)..(515): n is a, c, g, or t
  misc_feature (521)..(521): n is a, c, g, or t
  misc_feature (527)..(527): n is a, c, g, or t
cactttcaggctcacagtttctcatcttttcaacagtcagggaaaagaaacctatggaatagttcgcatttcacagaggaagaaactgagggccagagctaggggtctctgacacagccatgggatcctgcaccccacactggctctatgtgactctgtagtagtggctaatgtccatcagtcgccccctgctcccctgcctggccatttgcccccaaatagggcagtggtgggagtatatcctggaggagggggaagtgggatataggtagtacttggctgacttcacaattttgctacacccagtctggacctcctgacagtgggagtgggatccctgtggcttcctttttcttgtttttgttttgttttgttttttttagatggagtctccctctatcatccagggtggagtgcaatggtgcgatttcagctcactgcaacttccacctcccaggtttcaaacaattcttcctgtctcagccacctgagtagcttngactacaggnacccgncaccancccagntattaagtttaa

SEQ ID NO: 5541 - DNA, 485 bp, Homo sapiens
  I.5541 (H18651)
  misc_feature (37)..(37): n is a, c, g, or t
  misc_feature (102)..(102): n is a, c, g, or t
  misc_feature (396)..(396): n is a, c, g, or t
  misc_feature (425)..(425): n is a, c, g, or t
  misc_feature (444)..(444): n is a, c, g, or t
  misc_feature (457)..(457): n is a, c, g, or t
  misc_feature (472)..(472): n is a, c, g, or t
ttttttttttttttttttttttgagacagagtcttgnctctgtcacccaggctggagtgcaatgatgtgatctcagcttactgcaacctctgcctcccaggntcaagagattcttctgcctcagcctcctgaggagctgggattacagacacgtgctaccatgcccgcctaatttttgtatttttagtacagacagggtttcaccatgttggaccagggctggtctgggaactcctgacctcaaatgatctgcctgcctcagcctttcaaagtgctgggattacagggcatgagctactggggcctgggccagtttcactgtatttttcggaacaatttccaacaggaaaggcacagcagtggacgtttccttactgggtcactgctcccgtgctntgaggcctgggagctgatccaagggaagnttacacattttcccggccntgagcagatgganttttagggttgctantttgggggacttt

SEQ ID NO: 5542 - DNA, 439 bp, Homo sapiens
  I.5542 (H18649)
  misc_feature (380)..(380): n is a, c, g, or t
  misc_feature (402)..(402): n is a, c, g, or t
ttttttttttttagagtaaagtctatattgttgtaatacagaagtgaaggtgagtgggagggaacaatataatgaagaaacccaagtcagatggaacaggttaaacatgaaggtgaattcagagtaccttccctcaaaccccacccacacccctgctgctgttcctgagtatgacctgagttcagggctgcagcttcttcacagacagctacaggaacaaggtctacctaggaaaaaaaaagaggtgggtgccctggtgcatctgtaggcactgggaaatgactatcttgtaggaggccattaggattagggaagatagggaattaggaggctgggaggaggaagtgtttcagtttttgaacttcccctggaacactttncccttgaaggggaggacccctngggtctttttccaggccttccctaggagaggacccct

SEQ ID NO: 5543 - DNA, 397 bp, Homo sapiens
  I.5543 (H18639)
  misc_feature (26)..(26): n is a, c, g, or t
  misc_feature (251)..(251): n is a, c, g, or t
  misc_feature (257)..(257): n is a, c, g, or t
  misc_feature (323)..(323): n is a, c, g, or t
  misc_feature (328)..(328): n is a, c, g, or t
  misc_feature (339)..(339): n is a, c, g, or t
  misc_feature (346)..(346): n is a, c, g, or t
  misc_feature (361)..(361): n is a, c, g, or t
  misc_feature (384)..(384): n is a, c, g, or t
  misc_feature (392)..(392): n is a, c, g, or t
ttttttttacccttctgcaaatgggnctcgtttattcattcaacaaacatttattgaacccataatccatttggtgccagtctccgagtcaggggtggtgacattcaggttaacagtaactaagttctccaaagactgaggcatgttcacatgtttcctcaccccaacactcccctcaccccgaagacccgcctgggctctcagacgacccagccccgaccctcacctccagtgaccagggccacccactncagggnattttaactggcagtgggatgtttgcagtaggatgatgctaagtcactgtgtttgtgggttgaatncgggntccataggccnattcctntgtttcccttagggnaagtttacttggactttcccagnaggccttnagttt

SEQ ID NO: 5544 - DNA, 513 bp, Homo sapiens
  I.5544 (H18543)
  misc_feature (398)..(398): n is a, c, g, or t
  misc_feature (428)..(428): n is a, c, g, or t
  misc_feature (461)..(461): n is a, c, g, or t
  misc_feature (472)..(472): n is a, c, g, or t
atggaaggagactgggataaggcagaaaatgacctgaatgaactaaagcctttagtgcattctcctcatgctattgtggtaagaggcgcacttgaaatctctcaaacgttgttgggaataattgtggcacaaacattttctgaaacttccatcaacttttttcccctgactgctgctttctgtcatgtcagaggatgaagtttttgctgctgcagcagaagtacctagaatacctggaggatggcaaggtcctggaggcacttcaagttctacgctgtgaattgacgccgctgaaatacaatacagagcgcattcatgttcttagtgggtatctgatgtgtagccatgcagaagacctacgtgcaaaagcagaatggggaaggcaaagggacagcttncccgattctaaactatttgggtaaaacttncagagttaaggagtcttaattttttatggttgnccgtgttttcnctttaggttacaaatgggatacagtgatccattagggagtt

SEQ ID NO: 5545 - DNA, 493 bp, Homo sapiens
  I.5545 (H18435)
  misc_feature (20)..(20): n is a, c, g, or t
  misc_feature (30)..(30): n is a, c, g, or t
  misc_feature (318)..(318): n is a, c, g, or t
  misc_feature (428)..(428): n is a, c, g, or t
  misc_feature (440)..(440): n is a, c, g, or t
  misc_feature (461)..(461): n is a, c, g, or t
  misc_feature (488)..(488): n is a, c, g, or t
tttttttttttgagacgganttgcccctgntcgcccaagctggagtgcagtaaataatttgggacatagttaaattgtcagacacagaaaacaagtaaccaaacctatagataacgaaaaactggcttcccaacttcagttctcaaggtatggttactaagtaaacatacagaaatttctcataattttcaattttcattgttccagctttactcgtgaacaaatgctaaatcagacatgaactgttatataggctacaggataagactctaaaaaagaaaactaaaattttgtaaaatgttagggctgtttcaggantatagggaagttttcctcttacctacttacaaacatgggtctattaggcggggacacaggaatctagggttattatcagtttgggtattgtgatatagggcaccgttccnttgtaggttccnccgtctgccgcgggggagttngttaaacgcctgggggggaggcttcantgttt

SEQ ID NO: 5546 - DNA, 477 bp, Homo sapiens
  I.5546 (H17810)
  misc_feature (320)..(320): n is a, c, g, or t
  misc_feature (402)..(402): n is a, c, g, or t
  misc_feature (420)..(420): n is a, c, g, or t
  misc_feature (448)..(448): n is a, c, g, or t
  misc_feature (459)..(459): n is a, c, g, or t
  misc_feature (477)..(477): n is a, c, g, or t
ttttttttttttttttccttccatttcctctatcttatcccttaatatggtaggtaaataactacttctagccaagccagcttaaacatttactctttaactaaatatttggagagacagggataaaagcaaaaaaggtgtatttgactaccatactctagtgagaagtatatatgacacaacaaagtcataactccaatgtactgttttctcaagttttatcttttacaatgcttatgtttactattcggttgctgcagatatacataaataaggtcatgattctccaattttctttttactcctggggtatgccaagnctaggcataaagaaagggccgcagttaactttggaattaaggtaaacaaagagaacagaggaaatcaaatcataaaatatgncattatattccataagtnttcatataacaggctgacctggcccgangaaattccttnttgaggggagttcccccn

SEQ ID NO: 5547 - DNA, 385 bp, Homo sapiens
  I.5547 (H17809)
ccttaaactttgtaggcaatgatatattctgagatgagaccaaaagtatgaatgccattcacagtttgtcaaaatgtcaaggaggtacctgaataaccatgtagcacaggttaataataaatctttatctagttaattcatttgtgcaaatcatggcttccacttgagccccttccctctgtctagtctttcctggttgttcaagccatttttgatcgtatggttcctaatctctgagaacaactgatgttcaggttatttgctgtgtgctaacctcatgtcaatttctgaagtcttgagagatagtatccacttaccctatgtaccttatagaacctggggacagtgtgagtccagatttgttctttggtttcctgaggttgta

SEQ ID NO: 5548 - DNA, 444 bp, Homo sapiens
  I.5548 (H17770)
  misc_feature (8)..(8): n is a, c, g, or t
caaaaccncatctctgctaaaaatacaaaaaaattagccaggcatggtggcgcatgctgagtgtaatcccagctacttgggaggctgaggcaggagaatcacttgaacctgggaggtggagatggcagtgagccaagatcgcaccattgcattctagcctgggtgatggagtaagacggtctcaataaataaatagataataaagatgaagtagacatcacctatttgtaaattataacagaaaagattaccatccagaattaaaagtacctggaagccaccaagaagcacatagtttgacagcaaagtgaacaagtaaggcaggcgcagtggctcacgcctgtaatcccaacactttgggaggcagaactgggtggatcacttgagatgaggagtttgagaccagcctggccaacatggcaaaatcccgtctctactaaaaac

SEQ ID NO: 5549 - DNA, 528 bp, Homo sapiens
  I.5549 (H17765)
  misc_feature (417)..(417): n is a, c, g, or t
  misc_feature (488)..(488): n is a, c, g, or t
  misc_feature (503)..(503): n is a, c, g, or t
  misc_feature (508)..(508): n is a, c, g, or t
  misc_feature (515)..(515): n is a, c, g, or t
  misc_feature (521)..(521): n is a, c, g, or t
tgataaaaaacaggtagtaactgccattgtttgtttgttttcctaataaggcctgaaaacagccattccttgttaagaaagtgtacaatgtaacatatttgctagagttacatggattatatatttcttaaagggaaaaatttgagagtatcatggactaccaccagcattattattacagtagttactcagatttggttaaggaagcccaagcaatgtatagtgaaaggattattatctctctgctaagattcagatattgtttcagaaatctcagctccagtaattccacaacatctaaaaacaaatgtttgtgatcatgtgtaagcatgaaattgttccaagtaagtgaggatattttagttatgtgaaagacagtttcatgggaaggtatttgttttataccagtggctgggntggtgggattggggttatttctacattattcttagacggttactaaactgttaaggaatgccccatatccnttttgtattctgggnagganaaaatcngtttcnactgttg

SEQ ID NO: 5550 - DNA, 503 bp, Homo sapiens
  I.5550 (H17670)
  misc_feature (495)..(495): n is a, c, g, or t
  misc_feature (500)..(500): n is a, c, g, or t
tcagtatgttttcaattctatcataattaaaagtctttgcagttgtaaatgccacctttaggttaaatataaaccaagcatctgtcagcatcaatgtaagagagcaaataatgccttaaatgctaagagagtaaaactcaaactgcattgaaatgagcttgtcatctcaatgaacattcataaacacatccctgtttagttctgtgaaagagtagaattaataagtacatatattttcacatagtgattttatatatatatatatacatatatatatatgcctttctttagagttgtgctaaacagtgtgatttttctaatgcacactgctctgtccccttctcctctggttcctgttgcccagaatgtccttcctgtgggataggtcccgggggtcatctctcctagggaggtttctgtggaccacccctcctctgagggggctaggaccccagtgcttttaggggcacattgagtatctccccgtcataggcnttttnacc

SEQ ID NO: 5551 - DNA, 464 bp, Homo sapiens
  I.5551 (H17654)
  misc_feature (220)..(220): n is a, c, g, or t
  misc_feature (226)..(226): n is a, c, g, or t
tttttttttaaattttaacactttttattattagttacgtatgtttcattccctcatttatttggcttatgacatatgaattatccccatttatctgagggaacaggcttggatggcaagagtcctctttgcctgatcaaatacgttctgtgacccaccccatgctaactccctattagagccagtgtccttcaaaacatgcttgctccacttagctggntctggnaagccatccttcctgccaaagaggtcttttatgcttctctctgctgctatcaccccctcctccatagcctactattctttcttacacaaaatacacgcattcctgttataaaaggatttgaatacacaggcaaatagaggtccttactgatgggaaattgacattggggaccatttggtttactattattaaacaatgctggcaatggaacctaatagtatggtatgtcttattaaaa

SEQ ID NO: 5552 - DNA, 402 bp, Homo sapiens
  I.5552 (H17649)
  misc_feature (53)..(53): n is a, c, g, or t
  misc_feature (128)..(128): n is a, c, g, or t
  misc_feature (165)..(165): n is a, c, g, or t
  misc_feature (238)..(238): n is a, c, g, or t
  misc_feature (353)..(353): n is a, c, g, or t
  misc_feature (396)..(396): n is a, c, g, or t
tttttttttgcttaattacatgtaattgtttatttaaaataattttccaagtnttccaatgatttaacaggctttgcttcacttttatcatctcaaacagctataaatcaacacactttttgtatttnattttactactatgtatgctattttaataacattttnctttattaatactagaaccaaatatattgaccaataaggcagtataggatttaaattatcttcttgggttggnctgaggttgctgatgggattcttggggattgatctgatgctaggaagctatcttagggccctgtctctaactcactgcatgtttcagggcaaaacatgccacgggttctagggtntgttttccccatctggcaaaattaaacacccaaatttaggganggatac

SEQ ID NO: 5553 - DNA, 134 bp, Homo sapiens
  I.5553 (H17602)
  misc_feature (80)..(80): n is a, c, g, or t
gtgcatgcctgtaatcccagctactcgggaggctgaggcaggagaatcacttgaacccggaaggcagaggttgcggtgancgagattgcaccactgtactccagcctgggcaacaagagtgaaactctgtctca

SEQ ID NO: 5554 - DNA, 481 bp, Homo sapiens
  I.5554 (H17563)
  misc_feature (443)..(443): n is a, c, g, or t
aagactctagggctaaaattcatggtcagttccataaaatgcatctcactttatttctgaatttttcacaacccctctattttcttacattaaagaacatctggataagttagaatagtgccaacttgtttgatttgttatatgattttcttgttaatgtgttgagtatgggaaataagggctttctgtgtgtcttgactcacaggaaaactgaaactgccagggaagcaacattaaaacaactgggatagattgaatacatttgaaaaaataatttctggaaaaacgctatacatgctttttatgtttatatcttctttcttattaaggacatggaatcagatccatgtgggcattccaaaacaaatttattttgggttatattctttacaagtccataaatttttacctaaaattgtggggatatgcctgtggattacacngtgtaggtattaaactcaaccatttggatttttcccgt

SEQ ID NO: 5555 - DNA, 451 bp, Homo sapiens
  I.5555 (H17519)
  misc_feature (436)..(436): n is a, c, g, or t
  misc_feature (447)..(447): n is a, c, g, or t
ttttttttttttcaggatatgaatacagtttattacagttttcagactcccattacgacacatatctaaagctgaacattgcaaactgaccttactagcagcaattctccctagacaggaagggtttcagttaatttagcaattaggagtaaagacaaacttacaagtcatggtttttcttgtagcagctggtatatgagcagtgaaactatagatacgtagagtcattcaggtttagccttgtctaaaaaaacattaataagttatggtgcagaggagtatccccagggttgccaaagagaaggctgatgtctttaggatgtcagtatgaaacaagcaaatcactttcaagacatgggcttactatttgctttactgtcagggacaacagaaaaagaagtgggacagcttaccccaggtttctaggcttcacacntatttcagccngata

SEQ ID NO: 5556 - DNA, 383 bp, Homo sapiens
  I.5556 (H17495)
  misc_feature (26)..(26): n is a, c, g, or t
  misc_feature (328)..(328): n is a, c, g, or t
  misc_feature (350)..(350): n is a, c, g, or t
tttttttttatttttaacttttattntaggtttgggggtacatgtggaaggtttgttacataggtaaacacatgtcatagggttttgttgtacatattatttcatcacccaggtattaagctcagtccccagtagttaccttttctgctcctctccctcctaccgttgctcaggtaggccccagcgactattgtttccttctttgtgttcatacattcccaagagttttaaaaatctgttaaacccttattaatatttatcatatttgaaactaaatttttaaaaatgtgtttgttacttaaaaaataaaaataattttattacacgntaacacaaataggcttattttnatggaaaaggcaatggctcttttccaggggcaa

SEQ ID NO: 5557 - DNA, 506 bp, Homo sapiens
  I.5557 (H17457)
  misc_feature (260)..(260): n is a, c, g, or t
  misc_feature (336)..(336): n is a, c, g, or t
  misc_feature (357)..(357): n is a, c, g, or t
  misc_feature (431)..(431): n is a, c, g, or t
  misc_feature (467)..(467): n is a, c, g, or t
  misc_feature (482)..(482): n is a, c, g, or t
  misc_feature (491)..(491): n is a, c, g, or t
  misc_feature (497)..(497): n is a, c, g, or t
ttttttttttcaaaagtaattatttttttatttcaactctataaagtatacaacaggcactcagcaattacagctgcaggaaaaatacagagcaaatcaaagcaggtaaatttatgaaaaagtttttaatctacatcaaaagagtgcaagtggtcaatgaccatttgatgacagtttgttgcattctgactaacaaaggaactctttcatgtagaacaaattgtaagggggacaatcaaataaccataggctgtaaggantacaaaaggaactggaccagttggtaaaaacatcatacattggaaattaaatttggataggatggatggctttaanggaaatggtccctttacttcnggaaggcccccaacctctggggtccttggccagggtccccggaggctctggtctggttggattccgggggggcngagagggagggggcttaacccaccacacttttccantgtttttggcttttncgggggtcntgtttnggaaacttt

SEQ ID NO: 5558 - DNA, 414 bp, Homo sapiens
  I.5558 (H17432)
  misc_feature (184)..(184): n is a, c, g, or t
  misc_feature (228)..(228): n is a, c, g, or t
  misc_feature (303)..(303): n is a, c, g, or t
  misc_feature (319)..(319): n is a, c, g, or t
  misc_feature (372)..(372): n is a, c, g, or t
  misc_feature (389)..(389): n is a, c, g, or t
  misc_feature (395)..(395): n is a, c, g, or t
  misc_feature (410)..(410): n is a, c, g, or t
ttttttttttttttataggcatatatatatatatatatatttatgtatttataacatagaaaattggatagaaattattccaggcatatgggatgtggttcccctgggccagaaccacgtagggcagaggagccctgccctccaagtgtgcatgcccaccaaagggacaggggctttcagggantcacaccagatcacgcttgggacctttttagagcctggctgagncaccctttccagagttccagtgagcagggggcccctcagtgcatcttccccacctcccctgtcttccagggacgntgggctgcagacttcncagctgctgccacatggggttggagcctccaacagcatcatccctgagttagnacctgggtccactgagnccccanaggttcggctttatngcag

SEQ ID NO: 5559 - DNA, 344 bp, Homo sapiens
  I.5559 (H17431)
  misc_feature (37)..(37): n is a, c, g, or t
  misc_feature (48)..(48): n is a, c, g, or t
  misc_feature (96)..(96): n is a, c, g, or t
  misc_feature (162)..(162): n is a, c, g, or t
  misc_feature (204)..(204): n is a, c, g, or t
  misc_feature (210)..(210): n is a, c, g, or t
  misc_feature (259)..(259): n is a, c, g, or t
gaggtgctgtggcaagaagctggcgcagggcggcccncccggacctgnctcctcacacctgtggagcgcatggtggcagagaccttttccgcccanggtccccaaggcgagggccagaccacggagcccctgccaaatagtattgaagccagccttgaggtncgctcctcgcatgcggaggcagcccgccagctcctggctggnagccanccggcaccaactgatgaggaggacgagacccccagctgcttgtggctgnccctgaggtccctggaaggcccagcctgcctgaacctgaccccctggacttacgaggagtcttccacgcacccacctcctcaccc

SEQ ID NO: 5560 - DNA, 498 bp, Homo sapiens
  I.5560 (H17256)
  misc_feature (137)..(137): n is a, c, g, or t
  misc_feature (203)..(203): n is a, c, g, or t
  misc_feature (428)..(428): n is a, c, g, or t
  misc_feature (449)..(449): n is a, c, g, or t
  misc_feature (456)..(456): n is a, c, g, or t
  misc_feature (463)..(463): n is a, c, g, or t
  misc_feature (496)..(496): n is a, c, g, or t
ttttttttccataaaggatcttccttcttccccaagttagagtgaagaaaacaggaaaaaaataccttcagcttagggtggaaaaggaaggaaaacccaagatgagtgcaggtgacgaccgggcggcccccacaggntctctgcaggaccacaggagccaagactcaggcataagagcatcaccctttcagcagccaaggcgngtggcaccttcccctccatggtcactgggaggctgtggggccatagctgcagagaacgcaggcggcgggagaccctctcagcctctcttcttccaagctcagtttcttgagatcttccagaatacccacaaaaaagagggtgaacctttaacaatgccccagagggagctttcgtgggctacaggggggcctcctgacccccaacccagccttttcagccagggnttcaggaggttagttttgacntcaaaantcagagnccccttgagacacaggggcagccattccctggntt

SEQ ID NO: 5561 - DNA, 529 bp, Homo sapiens
  I.5561 (H17255)
  misc_feature (216)..(216): n is a, c, g, or t
  misc_feature (419)..(419): n is a, c, g, or t
  misc_feature (482)..(482): n is a, c, g, or t
  misc_feature (495)..(495): n is a, c, g, or t
taatgaaaaccacctgggactacacacgcatgccaccacgcccggtcagaagctgtgtttttaagtggacataccatcttgtcctgctgaagtatctccatgtaatcacaatatctatgtcacccaaatctcctccttcctcctccctcccccaaaacacccccacaggcatgcataccctcccatgcgctggaggcagaatctcccaaggggagnctggccaggagaggtgtccctgagttcagatggaggtggaagccagagtggggctgggaccacccagtgacatgaggatggggcttgggataaagccctggggacactgacatttaaagtgtggacagaaggagctactgaaggcaatggatttagaaaagcaattgagtatggatttccttcttcaagaaaggctgtccaantaggttttcacttcctttcgtgttgtttcagtgttcacccggaagcagagttttaatgttgantaaagttcaaccnttggttcacattgttcagggagttttgggaagtt

SEQ ID NO: 5562 - DNA, 433 bp, Homo sapiens
  I.5562 (H17055)
  misc_feature (72)..(72): n is a, c, g, or t
  misc_feature (91)..(91): n is a, c, g, or t
  misc_feature (274)..(274): n is a, c, g, or t
  misc_feature (313)..(313): n is a, c, g, or t
  misc_feature (351)..(351): n is a, c, g, or t
  misc_feature (389)..(389): n is a, c, g, or t
  misc_feature (424)..(424): n is a, c, g, or t
ttttttttttttttttttatttttctgcaaatctttattgatcctctggttgtttcagttactctgctaggnataaggaatacaactaggnacaagacagagtatccccttgagggttacactttagtggcaataaatgagtagaccattcatacttgctctgtctcagaacttaggaacaacgagttccttggcaagaaagctatgagactttacctgaagcacaatgtatttatttaacttctatgtttatttagggagatagggctacagnatgattaaatgaaaatgggagagaggggtactggaaggntagggattctgtatgttgcctctttgggtaggtcctgncagtggaaattaaccaaatgctggacttaaagtaactngcagattgtggataaatgttattaaagcaaagggnagaggagtg

SEQ ID NO: 5563 - DNA, 476 bp, Homo sapiens
  I.5563 (H16966)
  misc_feature (146)..(146): n is a, c, g, or t
  misc_feature (149)..(149): n is a, c, g, or t
  misc_feature (152)..(152): n is a, c, g, or t
  misc_feature (446)..(446): n is a, c, g, or t
  misc_feature (452)..(452): n is a, c, g, or t
  misc_feature (457)..(457): n is a, c, g, or t
  misc_feature (470)..(470): n is a, c, g, or t
ttttttttgaaacagggtttcactctgtcactcaggcttgaatgcagtgacacaattatagttcattgtagcctcaacctcccaggctcaagcaatcctcctgcttcagcctcccaagtagctgggacacaggtgtgcactggcanccnagnctaacttgattttttttgtagatacggggtctcctttgtttcccagggctggtcttgaactgctgggctgaagcgatcctgctgtcttggcctcccaaaatcctgggtattataggtgtgagtcaccacacccagccaaaattctattttcttgggttagtaacttatgaatgtataaacaaaaattgaggcaaacaagtttgataaaggttaaatttatggaaattctatatcctgctattatggctatcttttactaacacacgggaaaactttgagggatttgttttattncataanttttnccgaatttagggntatttt

SEQ ID NO: 5564 - DNA, 427 bp, Homo sapiens
  I.5564 (H16965)
  misc_feature (400)..(400): n is a, c, g, or t
tctagtaagaggttaactattcatgatcactagattattaaaataatcttttttcatgatcactagatcactctgaatccttgtttcagagcaagaacgacatgattcttttgacacagattgagcttttaaagagctcactcaaagggcttttagacgccaatcttctaatcgtttatggcagagttaaggacagcaattgaatgtgattgctactacaaggatttttactttctagaattacttttagttaaaaagttgtggagatttatgctgcatcaccacacttaagatctttgccaatttctgggatttatgttaaggattcatcagtttatctcaggatatatttttaacacgtgtttcagaaccgtggggacctctgggagtattacagggngatttctggaaggaggactggccgtcc

SEQ ID NO: 5565 - DNA, 489 bp, Homo sapiens
  I.5565 (H16900)
  misc_feature (423)..(423): n is a, c, g, or t
  misc_feature (439)..(439): n is a, c, g, or t
  misc_feature (451)..(451): n is a, c, g, or t
  misc_feature (466)..(466): n is a, c, g, or t
  misc_feature (475)..(475): n is a, c, g, or t
  misc_feature (485)..(485): n is a, c, g, or t
atggacttttaggttgattccatgtctttgctattgtgaatagtgctgcaatgaacatatacatgtgtgtctttataacagaacaagttatattcctttgggtatctacccagtaatggggctgctgggtcagaaggtatttgtttttcggtctttgaggaagaaccacaccgttttccacaacggttgaactaatttccactttcaccaacagtgtgtaagcattcctttttctctgcaacctcgccagcatctgttttttgtttgttttttgagacggagttttggcttttgttgccggggctgggagtgcaatggcacgattcttgggctcatcgcagcctctgcctcccgggttcgggtggattctcctgcctcagcctcccaagtagttggggattacagggcatgcaccaccatgcncgggctaatttttgtnatttttaagtangagttgggaattttntccatgttnggtcaaggcngggt

SEQ ID NO: 5566 - DNA, 505 bp, Homo sapiens
  I.5566 (H16883)
  misc_feature (210)..(210): n is a, c, g, or t
  misc_feature (440)..(440): n is a, c, g, or t
  misc_feature (453)..(453): n is a, c, g, or t
  misc_feature (505)..(505): n is a, c, g, or t
tcagattctccgaggacacggtgaggctgtacatctgcgagatggcactggctctggactacctgcgcggccagacatcatccacagagatgtcaagcctgacaacattctcctggatgagagaggacatgcacacctgaccgacttcaacattgccaccatcatcaaggacggggagcgggcgacggcattagcaggcaccaagccgtnacatggctccggagatcttccactcttttgtcaacggcgggaccggctactccttcgaggtggactggtggtcggtgggggtgatggcctatgagctgctgcgaggatggaggccctatgacatccactccagcaacgccgtgggagtccctgggtgcagctgtttcagcaccgtgagcgttccagtatgttccccacgtggttccaagggagatggtgggctttgcttncgggaattccttnattgttgaaccccgaggcaccggttttccagcttccaggacgttgcaggcan

SEQ ID NO: 5567 - DNA, 475 bp, Homo sapiens
  I.5567 (H16790)
  misc_feature (401)..(401): n is a, c, g, or t
  misc_feature (409)..(409): n is a, c, g, or t
  misc_feature (433)..(433): n is a, c, g, or t
  misc_feature (440)..(440): n is a, c, g, or t
  misc_feature (450)..(450): n is a, c, g, or t
  misc_feature (455)..(455): n is a, c, g, or t
tttttttaggaagttgatcaaatgcttcgaccgtttatacaccaacggtcacagatgtttaaggatttgggggatctacgtgaatccagcttgtggacactgaaaatgacgttgctcttatagtgaaaaagaagcgagaatatttactgcacatcaaatagtgaagacacaccagctgaacactgagggtatttgagcttcgagttgtgaagatgatttgtgtagctagcaagcttacctcatttcccacttactttacctatttcttctaccagttttaagcaaaactctccttccatgtgactgtaaatcatctctataacctaaaggctgcttgaatgggcccgatgttcctgacgcgtagggggagccacacacactgggggtctctttgagggttnggagggtngggagggagggagagggtgaacgnttagcantccgagctcngggtncagactgcccgagggttatt

SEQ ID NO: 5568 - DNA, 413 bp, Homo sapiens
  I.5568 (H16774)
  misc_feature (234)..(234): n is a, c, g, or t
  misc_feature (259)..(259): n is a, c, g, or t
  misc_feature (292)..(292): n is a, c, g, or t
  misc_feature (295)..(295): n is a, c, g, or t
  misc_feature (298)..(298): n is a, c, g, or t
  misc_feature (363)..(363): n is a, c, g, or t
  misc_feature (373)..(373): n is a, c, g, or t
  misc_feature (395)..(395): n is a, c, g, or t
tttttttttttttgagcggttctcacattgtaattctcagaggtgaaaactatacagaaattgctggagcagtttgaatctctagaaaacattcacctccccacccactaccccaacccatgcccttgacctccaagaactgagccgagcctggggcacccgcggcctgtgctgcaagggtcaccttgtgacgagggccgtgcacagcctccgggcttagtcagggacaaagantcctgtcccatccatgggccccagntccccgtgagcgggtaagagggcgcccagcagncgnttnccttccatcttagggcgggtttcgggggcccacgggaaaatgccctccacaggttttcccctggnacccacagcnttttgttcccctgcaccaccanggaggcctgaggttttga

SEQ ID NO: 5569 - DNA, 241 bp, Homo sapiens
  I.5569 (H16537)
  misc_feature (146)..(146): n is a, c, g, or t
  misc_feature (163)..(163): n is a, c, g, or t
  misc_feature (209)..(209): n is a, c, g, or t
  misc_feature (230)..(230): n is a, c, g, or t
tgttatttttctttaatggggaaaattggactcccgcgtgtcagatctgtggatttccgaaaggcaatggaaatggtactgacatcactttgcactttaacaatcggatttggtcagggtacaagttgtttgtttaacccgacagntcggtgcaccccgtcgnacgctttgcacactcattaaaacgattattcacgacctgtcgagtnttttcgggttcattcacaggnaaggcttggga

SEQ ID NO: 5570 - DNA, 466 bp, Homo sapiens
  I.5570 (H16536)
  misc_feature (237)..(237): n is a, c, g, or t
  misc_feature (433)..(433): n is a, c, g, or t
  misc_feature (446)..(446): n is a, c, g, or t
ttcaggtagaactggcagaaagaattttttttccagtagtagtagtattagtggagttgaaaaatatacttttaattatacattgcaagctctgattgcaggttagaaaactaaaatcgatcattcctacatcaatagtgttgtctattactacattgatttgtgtttatttatgcagagactttcagttatttatttacatatttcagcatctgcctcttgattattatcgtaggntgcttttaatgaaagagcttatataggaagcgaaacacacttgacagatccattttaagtaaacctgatagtgaattatgggcaacccaaggagattatgaaattacttattcatacttgctttttaggcaattagggaatctgtttctggattaaaaacctcatgctggcttggaaaacttcccttctttttctnccatacattgtanttgatgtggcttcattaaat

SEQ ID NO: 5571 - DNA, 662 bp, Homo sapiens
  I.5571 (H16435)
  misc_feature (5)..(5): n is a, c, g, or t
  misc_feature (18)..(18): n is a, c, g, or t
  misc_feature (22)..(22): n is a, c, g, or t
  misc_feature (34)..(34): n is a, c, g, or t
  misc_feature (51)..(51): n is a, c, g, or t
  misc_feature (58)..(58): n is a, c, g, or t
  misc_feature (61)..(61): n is a, c, g, or t
  misc_feature (107)..(107): n is a, c, g, or t
  misc_feature (120)..(120): n is a, c, g, or t
  misc_feature (124)..(124): n is a, c, g, or t
  misc_feature (431)..(431): n is a, c, g, or t
  misc_feature (476)..(476): n is a, c, g, or t
  misc_feature (492)..(492): n is a, c, g, or t
  misc_feature (572)..(572): n is a, c, g, or t
  misc_feature (580)..(580): n is a, c, g, or t
  misc_feature (587)..(587): n is a, c, g, or t
  misc_feature (603)..(603): n is a, c, g, or t
  misc_feature (608)..(608): n is a, c, g, or t
  misc_feature (641)..(641): n is a, c, g, or t
  misc_feature (652)..(652): n is a, c, g, or t
  misc_feature (661)..(661): n is a, c, g, or t
ttggnacttcatgacctncctncactggatgtanaacccaggaatgttagnatagagnggnccacacccaccctgtgccagagtagagggcacctgtgccacgtggnccagggcccatgnctgnccaccctcgaggagatggaaccctgtgatgcaaaagctttgctggtgtgtttggggcataaggcactgctccccttccatctctagcagatatcatcttctcagccaattctgtaggacactgaggctcttgtttgacatggtgtgtggatggggacttgccccaagactgagcaggtctgccctttcattggggtgtatacatatcaggggaccctgaggtgggcaccgtactcagtgttgtgatgcccccacctagggaggactcaatgctctttgtatgccttatgcagcgtgatctgtccctngagttcccaggttcccagctccccccctgcaagccttgaagcctncagcaacgtctatctncaggagagcagggagcctatgaaagtgttccggcagaccagaagttgccactaacacacgtctaccagtaacccaaatgngacacttnagacctnaagttttagaccaagngcttncttatctcccacctatcatttttaaaccaaggnccttgcttagngaaggaggna

SEQ ID NO: 5572 - DNA, 571 bp, Homo sapiens
  I.5572 (H16406)
  misc_feature (32)..(32): n is a, c, g, or t
  misc_feature (106)..(106): n is a, c, g, or t
  misc_feature (204)..(204): n is a, c, g, or t
  misc_feature (210)..(210): n is a, c, g, or t
  misc_feature (433)..(433): n is a, c, g, or t
  misc_feature (445)..(445): n is a, c, g, or t
  misc_feature (500)..(500): n is a, c, g, or t
  misc_feature (515)..(515): n is a, c, g, or t
  misc_feature (542)..(542): n is a, c, g, or t
  misc_feature (547)..(547): n is a, c, g, or t
  misc_feature (566)..(566): n is a, c, g, or t
ttttttttgacgttttctggaaaggaccaggncctttaattcagctcacaggcacacttccctgacattcccttcagggacagtgggcctagtatccaagcaggtnttggaggaaatccaggggaggggccctccaagctcacaccccaccccctgctgtttaccctgtccccttgcactgtgataagctgcccctcaggcgtnccaggncagcagccctagctgaggcttggcccaaatgaccattacacactctcaggttcaaacaaccttattgggctcagttctgggctatggtttcttaccagcagagagtgtgtgtctatgggcttgaccttcaactgaatgattattaatgatgcaagcattgctaatacctttgcggcttaaacatgtgggcaaatgttgctttaataaagtcacggaaggacanagccctgggctngcccaggccccctggcttgcagccggagaggtcaaatcggaggctgtcccaatgnagctgatccattctngggatcagcttaccctcttaaaactancccancttcagaaacaccaaaggntccct

SEQ ID NO: 5573 - DNA, 318 bp, Homo sapiens
  I.5573 (H16388)
  misc_feature (28)..(28): n is a, c, g, or t
  misc_feature (83)..(83): n is a, c, g, or t
  misc_feature (98)..(98): n is a, c, g, or t
  misc_feature (117)..(117): n is a, c, g, or t
  misc_feature (123)..(123): n is a, c, g, or t
  misc_feature (161)..(161): n is a, c, g, or t
  misc_feature (267)..(267): n is a, c, g, or t
ttttttgtgggaatttcaattttaggantttctttatttttccttggcaaaacatggtgtcatggaacatgtgactgtataanttaattcagcagatnggaggagctaaaatatttncctggntaaaaccgaattacaaaactaataatttaagtaaagantggcttcaagtgcttgtcaagccattttcagatacattatgcatgtgctcctcaaaatcaccatgggaagtacagagggtcttatactcatttgacagatgaggantcagagaccagtttaaagtgagttgatcaaggtctagggatatttatacct

SEQ ID NO: 5574 - DNA, 425 bp, Homo sapiens
  I.5574 (H15695)
  misc_feature (188)..(188): n is a, c, g, or t
  misc_feature (189)..(189): n is a, c, g, or t
  misc_feature (199)..(199): n is a, c, g, or t
  misc_feature (232)..(232): n is a, c, g, or t
  misc_feature (382)..(382): n is a, c, g, or t
  misc_feature (397)..(397): n is a, c, g, or t
  misc_feature (414)..(414): n is a, c, g, or t
attgtcaaaaatagacaaactttaatttcctttaacaggaatattaatttaacagccttccataagccatcaccattttgtaagcataacaggcaagagagtcaaagataactgttagtggaaaaaggacaacagttctacatcgatgcccaagaagccttgcccagtcagtggtgacaactccaggnncagcggcagnaaacacagtgaacctttggagcttaacaatagnacatgcaaaacaacattgcatttatcttgggcccaattctataaagattgggctttgtaggtatctttccaaggcatttgaaggagtttagtttgttaggaacactgggcttaatttggaacagtggacattttagggtcacttataggnatccggtaacggganccacacccgtttttccngttaacaccgg

SEQ ID NO: 5575 - DNA, 470 bp, Homo sapiens
  I.5575 (H15478)
  misc_feature (401)..(401): n is a, c, g, or t
  misc_feature (413)..(413): n is a, c, g, or t
  misc_feature (434)..(434): n is a, c, g, or t
  misc_feature (460)..(460): n is a, c, g, or t
tgggctggaagagaagcctggcacctagccctaagcaaatcaattgtgtgaggtctaagcataagtatccatccaagccagccttgccagccaggattctacacagagtgacaacagtggagggagggcaaaacgttagacaagaagtgtcttacggcccctctttctgcctgcttggcattttaccatcagttacctcttatctaaaggcagtgagtgtaagctgtttttctactccaccctactccggccccataccctgttgtcctttctgaaggacagagtagagggatttctgtgggtggttgttttttttttttgtttgttttgttttggttttttttttaaacctaaggacttaaatatgtatccatcatccaagcctgaaaacaaataaatcngggacattgaangaaaacaggggcaagagcccnggggcccaattccactgcaggttccnctgttttttt

SEQ ID NO: 5576 - DNA, 549 bp, Homo sapiens
  I.5576 (H15423)
  misc_feature (305)..(305): n is a, c, g, or t
  misc_feature (486)..(486): n is a, c, g, or t
  misc_feature (493)..(493): n is a, c, g, or t
  misc_feature (504)..(504): n is a, c, g, or t
  misc_feature (526)..(526): n is a, c, g, or t
  misc_feature (537)..(537): n is a, c, g, or t
  misc_feature (547)..(547): n is a, c, g, or t
tttttttttccttgttataaaaagtttattgtaaatagacaagttatagttgtatgtatttatagagtacaaaatgatgctatgattttgtaatacaaatgtggaataattaaatcaagctaattaacatatccatcctcacaaacatttatcatatatcctgagagaggcactagatatacaggattgagccatacaaataactagagggaaagatacacttaaaactcataatgacacaaataatgacttaattatagctatagaaaggactacctttttttgaaggtagactgttataaaancaaatgcaatcttccctgccttaggcaaagcattattctttgggcattatttcagttggttttttgtgcaggagcatccttagggtctgtgggattcgggctttatttcaatcactgagtgactcctaccaaaatccagcggtgttcccgttggcccgcccccagcgttagggcccgtttntcggggncagctcctccngtgtgggggtggggttgggcancgaggtgttancttccccccntt

SEQ ID NO: 5577 - DNA, 512 bp, Homo sapiens
  I.5577 (H15301)
  misc_feature (437)..(437): n is a, c, g, or t
  misc_feature (465)..(465): n is a, c, g, or t
  misc_feature (478)..(478): n is a, c, g, or t
  misc_feature (503)..(503): n is a, c, g, or t
ttagttctgagatctagtccctctctgattcacttagtaatctatcctcttttcagtattacatgtgcttaatctcagatgaaccatttcaccatggcagtgttatctcatctctgggcttttctgggaattgaagtatctctccttaaccccaattgtcaagggtagtagctgtatactaccactttgaattattgaaacgggtcaatttacgaagtctgcattggctatggagatatggtttatagtacagcctagagaatgaaactcaccgtccagataaccatgcatgcacccagattttttccaccttggatacctgtcactagggaataataaaggccttattttttgtcttattccaactaagtagatccattatctctttccttttttatgttaatgaggagaatttaggcctccactcaacaatgttncaatttcaggcaagggttttcatatccntgctgtggggtcntgggataagggagcctatttcaggnttcccgccc

SEQ ID NO: 5578 - DNA, 453 bp, Homo sapiens
  I.5578 (H15290)
  misc_feature (206)..(206): n is a, c, g, or t
  misc_feature (233)..(233): n is a, c, g, or t
  misc_feature (242)..(242): n is a, c, g, or t
  misc_feature (254)..(254): n is a, c, g, or t
  misc_feature (297)..(297): n is a, c, g, or t
  misc_feature (306)..(306): n is a, c, g, or t
  misc_feature (350)..(350): n is a, c, g, or t
cgttgagtaaatttctttctacatctaaagttgttgccagtttaaaataagctattctaactacaatttattctacataagcctcatggtaaccacaaagcaaaaaaccaccccagataaacaaataataaagagaaaggaatcaaagctcagcattatagaaaatcaccaaatcacaaaggaaaacaagagtaggaaaggaacangggctctacaaaacaaccagaaaacanttaacaaantagcagaagtangtccttccctatcaataataagcttgaatgtaaatgggattangttctccanttaggaggacaccgagtggggtgaatgggattaaaaaaaactangatccaacctatatgctggcccacaagaggactcattttaggctttaggaacacatacaggctggaaagtgggaggatttggaaaaggtttttccttgttaaa

SEQ ID NO: 5579 - DNA, 519 bp, Homo sapiens
  I.5579 (H15289)
  misc_feature (477)..(477): n is a, c, g, or t
ctcgcatagacaaaaaaaaaagaggaataatgttaggctatttatttgagatactattattatgattattattttagagactgggtctgactctgtcacccaggctggagtgcagtggcatgattatggctcactgcagcctggaactcaagtgatcctcctgtctcagcttcccaaagtactgggattacaggcctgagccaccatgcctggcctcttcttttttaatgtaagaatttattgctatcaacattcttcttagaactgcttttgctttcgttgcatcccctaggttttagtatgttatatttccattctcttttgtctcaagatacgtttctcttttgatttcttctcaaccaatctattgggttgttcagggagcaggttgtttaaatttccacatctttgtggatttttccctgaattccctctgttaactgattctagtttttttaccatgtgggtgggaaatantactgttatggatttcagttataaatttgttaagactgtttt

SEQ ID NO: 5580 - DNA, 460 bp, Homo sapiens
  I.5580 (H15093)
  misc_feature (74)..(74): n is a, c, g, or t
  misc_feature (420)..(420): n is a, c, g, or t
  misc_feature (440)..(440): n is a, c, g, or t
  misc_feature (455)..(455): n is a, c, g, or t
ttttttttttttttcagtgtccaaaaaaataaagttttattggcacacagccaagcccactggatgacacattntccacggctcatcttgcaatacaatagcagggttcactaatgtgacagacatggtgtggctcacaaagccaaagatatttactatgtggctttttacagaaaaggtccgctgacctctgactcaaagcaacaatcatttatttcacttgtgattctgcaggcggggatcagctgggcagctctcctggccaggcggggctcagctgggtgcctcttctggccaaggcggtgctcagctgggtggctcttctggccaaggcggggctcagctgggtggctcttctggcccaggcggggcttcagctggggtggctctcctgggccaaggcggggcttcagctgggtngcaatcctgggcagaggttngggctcagctggatnggctt

SEQ ID NO: 5581 - DNA, 271 bp, Homo sapiens
  I.5581 (H15092)
  misc_feature (7)..(7): n is a, c, g, or t
  misc_feature (141)..(141): n is a, c, g, or t
  misc_feature (195)..(195): n is a, c, g, or t
  misc_feature (207)..(207): n is a, c, g, or t
  misc_feature (228)..(228): n is a, c, g, or t
  misc_feature (236)..(236): n is a, c, g, or t
  misc_feature (258)..(258): n is a, c, g, or t
  misc_feature (265)..(265): n is a, c, g, or t
ttttttnttggtggcaaaatatatataatacaaaattttccatttaacctcaacaaatgctttttgatccacctgtgacagcagggattctcaacccggggtctggggaaacctaaggtaactacaggcacacctgtcttngtcattttcaggggatcagggcagggcgggaggccacagctttcatctgactcnaaactttgaganggcaagggggattcagcgtgnccgcccangttgggaccccgggaagggctnttgggcntttccc

SEQ ID NO: 5582 - DNA, 454 bp, Homo sapiens
  I.5582 (H14986)
  misc_feature (419)..(419): n is a, c, g, or t
  misc_feature (437)..(437): n is a, c, g, or t
  misc_feature (443)..(443): n is a, c, g, or t
  misc_feature (453)..(453): n is a, c, g, or t
tttttttttcaaggagagtcattttattatgaatcattgtgcaaagaacataaactaaattgtaagctcttctagggcaacacccaaatatcctaattttgaattctgtacttcaaagtgattataaaggaataagactttttataaaacaaacgtatcatatagctcatatatgcaaaggagttttatcctttcaaataagtccctgtatcgcttaaaacatttttgggaagttctatctaaaattttgtttcatgtgagggcaggtgtcaggcaccgaaaaggtactagggtccacttcacactattccacctgggttaggaccatacttcatggatgggccaggtcagttatgggggaccgttaaacaaaatggattactgggactaggcttaggaacaagtttcaacttgttccnggaatggatggaggggantggaanttcaaaggtnt

SEQ ID NO: 5583 - DNA, 452 bp, Homo sapiens
  I.5583 (H14985)
  misc_feature (225)..(225): n is a, c, g, or t
cagaatatatgtcatgacgtacatgcaataaagtccacacacattagtcacagaggagactgactcaaaggccacttaaacacagtgcaaagagcagcaccagaactcacacaccctggatgggggccgtgtaagaagtaccttgattgatggccagtatctctgaatgatagtttttcccattctggtttctgaccatgtattcctggattggcaagcgtgcgntcttgacagagtattcccgggccttttgaaatgtcaccttctgtaaatatatagttaaatatttttcttataaaaattatacatgagtatattctcaatgtaatacagcattaaaaataagtagcctattgtgggaatgggaaggaaactgcaggtaatgagttaactgtcttcaaggggcttatgtggacaatatcttactttttgggggggtcactcatccacag

SEQ ID NO: 5584 - DNA, 330 bp, Homo sapiens
  I.5584 (H14949)
  misc_feature (206)..(206): n is a, c, g, or t
  misc_feature (229)..(229): n is a, c, g, or t
  misc_feature (241)..(241): n is a, c, g, or t
  misc_feature (289)..(289): n is a, c, g, or t
ttttttttgttttaaaagaaacagtatttattaagaaattatatgttgaattctcctacagtctgtgaagatggtttcttccatttccacagcacaagacaacagctaagattatctggaaaacactggcaatgcttgggaatggagagttcctaggaacaggaggtgaaatgacatgatgtatgcactaatttaaacttttgggntccaagggcaaggacagtctttnccttgggcaatnctagttccttaacttgttccatgggaattcttcattacccaggactgnaaggtaattaattgggatccattttaggttccaggtaggag

SEQ ID NO: 5585 - DNA, 469 bp, Homo sapiens
  I.5585 (H14948)
  misc_feature (99)..(99): n is a, c, g, or t
  misc_feature (391)..(391): n is a, c, g, or t
  misc_feature (445)..(445): n is a, c, g, or t
  misc_feature (450)..(450): n is a, c, g, or t
atgagttacagaccatcaagaaagaattaacccagatcaaaactaaaattgactccttgctagggcgcctggagaagattgagaaacagcagaaggcgnaggagaagctcagaagaagcaattggaagagagtctagtgctgatccaagaggaatgtgtgtcagagattgcagatcactctacagaggagcctgctgaaggagggccagatgccgatggagaagagatgacagatgggatagaggaggacttcgatgaagatgggggtcatgagctgtttctacagataaagtgatcttgaaataacgcatgatgccacaaagcagaaaagagaaactgtgacaacccccagaaatgtggaaaggaggttttctttactgggacagcagcntcttttggtttcaattttattattaaaaaccccaattaattaaattgggacatntttgntcagttttttaggaatttt

SEQ ID NO: 5586 - DNA, 242 bp, Homo sapiens
  I.5586 (H14893)
  misc_feature (184)..(184): n is a, c, g, or t
  misc_feature (195)..(195): n is a, c, g, or t
  misc_feature (211)..(211): n is a, c, g, or t
  misc_feature (220)..(220): n is a, c, g, or t
aaggatatgaaaacactttatgaaaatgaaattcattaaagcccttaataatcaggtagggaaggcaggtgctcacaattgtcacctgttggtgagtgaacaccttaggctcggggaggacaatgactcaagaacaaggtcgaattgcaggtggggggtgaagctgatccctaacagtgtcctncagcccctggnactgaggaaggacatngagggcttncatcgacttttcctgggcaggc

SEQ ID NO: 5587 - DNA, 462 bp, Homo sapiens
  I.5587 (H14835)
  misc_feature (200)..(200): n is a, c, g, or t
  misc_feature (279)..(279): n is a, c, g, or t
  misc_feature (445)..(445): n is a, c, g, or t
tttttttttattatttatattttcctttctgtggaaaatatattgtttatatattacatagtcatattaaacctgacttctcagaccacattttaaaaatagattgcagtcgttttattgcacgtgttctgtattcacacaagtcagaattttgtgtatttgtttctcataaacatcatgctttgacccactgggaaagncaaggactgtggaagtggacacatggactcctgaggcaggggctgcatgcgagggcattgaggaggacttctcaggagnctccccatgaggctgaggctgggctgacctgctccgggggataatcagggacctaccctatgggaggctaggagttttcatccctctgggggcatggtggcttaaattcacacttaatttcacacaaatggctcctaaggggggtggacaatttaatggcactgtnctcttcgggggggcact

SEQ ID NO: 5588 - DNA, 526 bp, Homo sapiens
  I.5588 (H14721)
  misc_feature (399)..(399): n is a, c, g, or t
  misc_feature (404)..(404): n is a, c, g, or t
  misc_feature (437)..(437): n is a, c, g, or t
  misc_feature (446)..(446): n is a, c, g, or t
  misc_feature (470)..(470): n is a, c, g, or t
  misc_feature (477)..(477): n is a, c, g, or t
  misc_feature (490)..(490): n is a, c, g, or t
  misc_feature (515)..(515): n is a, c, g, or t
  misc_feature (521)..(521): n is a, c, g, or t
acttcggagagagaatgtagaatggaggaggtgaggaatttaactaatagagatgctttttctaacaggcagaaattagagaaatggatcaaaagatttaaacattgattacatataaacgagtttcctttttttctacatagcacacaggtgctcaacatttaatgaataatataacagatactgtcttaaaagtttaaaaacaggatttgtacttaatcctaaattcctcttatcacacaccagaaaataatttgggattttatttacaaactacatccaaatactcttaagggaaagagtgtcatttaggcttgggagtaggggactgactgggggtcttaagtgttgggaaatttaaattctgccctttcagtcccaaccttcaaaggtgttccnggggnaagggagtttttgccagggactagggaaacccnttttcacanttggaggtggcaggtgtttgggcntgaaggnttagggggggacnttttcaccaaacacaggacacgggntccccntacgg

SEQ ID NO: 5589 - DNA, 483 bp, Homo sapiens
  I.5589 (H14700)
  misc_feature (432)..(432): n is a, c, g, or t
aaaacgattgtcattctcctctcattcttctttttggtatgaaccaaaagcggctaggagcaatgcctcaaataaccagaaatgaccttttgttgatacaaattgtatctctttttttcctgattgtatagaaacaaatgtacaaaactcatctgaagctaggtttggcactgaattttcaccatgaggtttgtggcactgtgtgtcacagggaagtagctcaggggttgtgagggagcttttatttctaaagggcagtagtaatttatagacaaaaacaatttttcaaggcctctttattaccactgcacagctatcatgtgtaaaatttcaagcattatattgcataagttctctttagcctattaaatttaatatgtccttgcaaaaggggattttgtgtaaaaagtgttcagtgttagtgactcatcnggcaagaatctacaatggggccatacaacttggatacataaatacagctgg

SEQ ID NO: 5590 - DNA, 462 bp, Homo sapiens
  I.5590 (H14677)
  misc_feature (449)..(449): n is a, c, g, or t
acagatcccacgtgggccctgttgtctgtcattgccatctattctccaagaattctgtctcaatgagaagaaaaacagatcaacaggggagctgaggaatagatgggagctgcgagctgcagagggccaggactcggtgtgttccccacagcggccatctgcttggcttgtggagacgaccagctcggccacacttctgagattaggactccctgacgggccagcagaaggggctcttgtcaaatcccactttccctgattaaaccggaacaggaatgtctggcagagtagaaaatccagggaggagaggtgaggcctgcatcctggagggaaggttgtcctgagatgttcctgccatttttgtccccaaaagcgggatgatacttagaggcgatggggcaggatccatcctgaatgtgttccggagagtttttggaagattttgaccntcattgcaatagt

SEQ ID NO: 5591 - DNA, 382 bp, Homo sapiens
  I.5591 (H14594)
  misc_feature (148)..(148): n is a, c, g, or t
  misc_feature (290)..(290): n is a, c, g, or t
ttttttttttggttagtacacaaatagtttatgcagtaaataactgtggttacagttcattgttgtcagcaatacagcattttccatcacaattataggtgaaacaaaacctcatgaagtagtcatagcacattcatgctagcgaganatattacaaagcaatgcacgtgcattataggggcagacaaaactggggaagggctatattttcactcacctctggttaactttgtgtattttgtcattaagacttacattatgtttgggtcaaacaaaaaacccaaagagcnttttataaaagtttacaaccattaaacagtattgtttaatcccacaaatgggataaagccaaactactataggctcaacattacacaaaccg

SEQ ID NO: 5592 - DNA, 197 bp, Homo sapiens
  I.5592 (H14583)
  misc_feature (134)..(134): n is a, c, g, or t
  misc_feature (151)..(151): n is a, c, g, or t
  misc_feature (162)..(162): n is a, c, g, or t
  misc_feature (183)..(183): n is a, c, g, or t
agcttccgtttagtattatcgtctgcccagaaatgacttttgctgcaactctgcaagccgtccttttcaaacagggctgcactctgggcacattgtattctctgaacttaaccaggacaaagagatggtgaganaatagtaagtaaatctnaggatggcagngtctggaatttaaaaaataanccattctgaaactt

SEQ ID NO: 5593 - DNA, 463 bp, Homo sapiens
  I.5593 (H14423)
  misc_feature (398)..(398): n is a, c, g, or t
  misc_feature (440)..(440): n is a, c, g, or t
tgcctgttgctcaccatagacataattttcttttcataaaacattctttgtataatcacctcagagattatgaaagtgactttgataaaatttaatggtgttcacaaaataattttcacgtgagtaatttcacagtgcgtgtattgtatgttatttagtgtattttatattttgtttcaattagagaatgctattgaatccagtttttgtttagttactgttcattttactttataaaattgacataattgagtttattaaatttattgggccaatttaagtaaacagttgaacgtttcataagtcatgaggtctttttgggcatatacatgaagtaaacaaagacaatactaggctatgtaataggaaggctaccttaattaggaggtaaatattcnttttggaaattgggcccgtgggcctcgggtggaaaatggggnaatatccctaggtaaaaaaatgg

SEQ ID NO: 5594 - DNA, 438 bp, Homo sapiens
  I.5594 (H14374)
  misc_feature (131)..(131): n is a, c, g, or t
  misc_feature (160)..(160): n is a, c, g, or t
  misc_feature (248)..(248): n is a, c, g, or t
  misc_feature (301)..(301): n is a, c, g, or t
  misc_feature (308)..(308): n is a, c, g, or t
  misc_feature (337)..(337): n is a, c, g, or t
  misc_feature (345)..(345): n is a, c, g, or t
  misc_feature (361)..(361): n is a, c, g, or t
  misc_feature (392)..(392): n is a, c, g, or t
  misc_feature (407)..(407): n is a, c, g, or t
  misc_feature (420)..(420): n is a, c, g, or t
  misc_feature (432)..(432): n is a, c, g, or t
tttttttttaacaggtaacagcaatttatttaaaatgtaattagaatttcttaaataagtaaataatttaagtaaacttagtttatattacttgtataaattattttacatattatcctcaatcttaaaanaatttagctaggtatgcaattcaaaattnatagattttttaaaaaataggcaacttaaaaacattttattggaacaagttgggtaatattaattctcaaatattttatcttaggaantcaacacacttgacaattgatattcatagtatctatgaaaagtgacattctgnaatgtgncttttatacttgaccaaaaatttaagagnaaaaaaanctattctgggccttcngtaggtaaaacttaaagattaaaggaaatanggtttaaattttacngggcctaaattancccacaaaaccnggaaat

SEQ ID NO: 5595 - DNA, 386 bp, Homo sapiens
  I.5595 (H13909)
  misc_feature (109)..(109): n is a, c, g, or t
tgaagtcagtgagaccaagaacccaccaattccggacacaagagggtgcagcaagaaggctctcagtagacaccacatgcaggtgccttgaccttggactgcgcagttnccagaactgtaagaaataagtttctgtttttatacattacccagcctaagatattttgttatagcagcaacaacagactaagacactatgcctacatagctggccaatggataaatgaatacatttatatacaattgacccatgaacaatgcaattgttaggggtgctgaccttctgcacagttcaaaatctgcatattaacttctgacttcccccaaaaactttaacttacttacagcctcctgttgggccagcctttcctggataacatggaaca

SEQ ID NO: 5596 - DNA, 271 bp, Homo sapiens
  I.5596 (H13858)
  misc_feature (246)..(246): n is a, c, g, or t
  misc_feature (263)..(263): n is a, c, g, or t
atttttaaaaactcacagataaactgcatggcctagaaatattgaaaaaaataggaaaaaggcatgtcattaattcacaaaatatattcatgtcacgaatgcataaatcacacacatttgttaacacatatgtataacatgtacatatgataaacagttgggctaacacatacgtgtgtgtataacataaacagttgggttaatacatacatatgtgttaacttatggtatggtggttaacccacnggtttaggttataaacnatacatgg

SEQ ID NO: 5597 - DNA, 450 bp, Homo sapiens
  I.5597 (H13751)
  misc_feature (280)..(280): n is a, c, g, or t
  misc_feature (375)..(375): n is a, c, g, or t
  misc_feature (393)..(393): n is a, c, g, or t
  misc_feature (398)..(398): n is a, c, g, or t
  misc_feature (403)..(403): n is a, c, g, or t
  misc_feature (421)..(421): n is a, c, g, or t
  misc_feature (430)..(430): n is a, c, g, or t
tttttttcatatcaacagaggttatcttggaagagagatagcaaacaatttctgtgtgtctttgtgacctttaaattcaaaacaaaaaaaataagccactcttttaaaagtgctcagtctaaaaaataaacacgtagtctagaggcggcaaggcccgtgtgtgaagcctggctcttcctcggctaagctgtgtgacggtcggcaagttgcttaccttcttgaagctgcattctcctcattcttaaaataaaaatgggtaataacaggaccgcctcattgnggcttgtgtggaagagtaacaggacaactgcaggccaagtccccagagggtgcctggggcacttagttgaggggctttgatatggagggtagctntttatcaggggacatggnttccngttantctttcacatttttttantttggacantcaaaaggccattacagtta

SEQ ID NO: 5598 - DNA, 356 bp, Homo sapiens
  I.5598 (H13699)
  misc_feature (303)..(303): n is a, c, g, or t
  misc_feature (310)..(310): n is a, c, g, or t
  misc_feature (336)..(336): n is a, c, g, or t
ggctaaggagcctgctgatgtcacttttcttgtcttttcaattatctgtattggctttttgattgtcaaagtaaaaaaatgtgaagattacaggaatcatgtcctgataatagctacctcatatcaagccctcactatgtgccagggcaccttctgggggacttgggctgcagttgtctgttactcttcacacaagctcaatgagggcggtcctgttattaccatttttattttaaggaatgagggagaatgcagcttcaaggaagggtaaggcaacttgcccgacccgtcacacagcttagnccgaggnagagccaggggtttcacacacggggnccttgccgcctttaggacta

SEQ ID NO: 5599 - DNA, 327 bp, Homo sapiens
  I.5599 (H12997)
  misc_feature (196)..(196): n is a, c, g, or t
  misc_feature (221)..(221): n is a, c, g, or t
  misc_feature (233)..(233): n is a, c, g, or t
  misc_feature (271)..(271): n is a, c, g, or t
  misc_feature (314)..(314): n is a, c, g, or t
tatagccctttgttttggccaacttctcccatttggaatgggtatttttactcaattcctgtacccccattgtatcttggaaataactaacttgctttagattttacaggcttataggtggaagggacttgctttgtctcagatgagactttggacttggacttctgggttaatgtttgaatgagttaatactttnggggactattggaagggcatgattntgttttgaaatntgagaacatgagctttgggaggaactagggtcagaatnatatggtttgggtttgtgttcccacccaaatctctccttgaantttaataatcccc

SEQ ID NO: 5600 - DNA, 455 bp, Homo sapiens
  I.5600 (H12039)
  misc_feature (375)..(375): n is a, c, g, or t
  misc_feature (408)..(408): n is a, c, g, or t
  misc_feature (452)..(452): n is a, c, g, or t
ctgaggactggactctgaccactgttcttggttctaaatttcttcccgaggcccaagaggaggtcacgtccaccagctaaacctagcattcttttctgctggctacaaaatttttagacaaggctttgctccttaaacaattgcaagtttaaaaatctttgaatccagccatctatgacctgtgggcccccacttggagatgttccacgtttttaggtcaagccaatgtacagcctccacctattgatttatgactttgcctgtgacctctgcctccctccctttaaaaactcctacctgtaagccattgaggccagggtctaaatcatgagctgccctgcaatcggtgcctcaatttctctcgccgcaaccctnaggtcagccttggttttggttctggttgcaatnggtggacccaaggttttgttcagtaacagtcagccttaggggtnctg

SEQ ID NO: 5601 - DNA, 427 bp, Homo sapiens
  I.5601 (H12014)
  misc_feature (341)..(341): n is a, c, g, or t
  misc_feature (413)..(413): n is a, c, g, or t
gccaccatgcccagccttgtgttgcctcttggtaagaaataataaaaagaaattagtagcttgtttacctggtaccagatttggagggggctgagtataatttttactgagtggtatgtggttggaaaataggccacatttagccttgaattgtttagaaatcaaatgcgattcagaattgaagaggacattgctgggctatgaaatagggtactaacaaggctatttttgtagcaaaatggccaaaagctgaaataaatcttcttagtctgtgatgcttgtagcatcctttgttaagtaaagcacaacaccctgggacaagcgactagttatgacttccnaataggattgataatagccttgcatgttgtagttagagacactgtagctgtatctgtatacccgttaatatngcccggggaagttc

SEQ ID NO: 5602 - DNA, 368 bp, Homo sapiens
  I.5602 (H11871)
  misc_feature (10)..(10): n is a, c, g, or t
  misc_feature (68)..(68): n is a, c, g, or t
  misc_feature (117)..(117): n is a, c, g, or t
  misc_feature (139)..(139): n is a, c, g, or t
  misc_feature (334)..(334): n is a, c, g, or t
caaattagtngtgcatgcctgtaggccagctacacgggaggattgcttgagcccaggagactgaggtncagtgagccgtgattgctccacttcattctagcctgagcaacggagcangaccttgtctcaaaaacaaaanaacaaacaaacaaaaaacaaaaagcaagttcccagaagagaaaaaagaagttccagacctagtgaatcaaaaactctgagcgtggcatctcacaatctgtgtttttgtaatccttccaggtgactgattcatgctaaagtttgagactcattgctctatgccagtcatcattccctttgctcaggttaggaatcntctgggagagcttattaaacgtccccatgaccca

SEQ ID NO: 5603 - DNA, 491 bp, Homo sapiens
  I.5603 (H11854)
  misc_feature (10)..(10): n is a, c, g, or t
  misc_feature (13)..(13): n is a, c, g, or t
  misc_feature (34)..(34): n is a, c, g, or t
  misc_feature (218)..(218): n is a, c, g, or t
  misc_feature (245)..(245): n is a, c, g, or t
  misc_feature (247)..(247): n is a, c, g, or t
  misc_feature (248)..(248): n is a, c, g, or t
  misc_feature (408)..(408): n is a, c, g, or t
  misc_feature (431)..(431): n is a, c, g, or t
  misc_feature (436)..(436): n is a, c, g, or t
  misc_feature (458)..(458): n is a, c, g, or t
  misc_feature (468)..(468): n is a, c, g, or t
  misc_feature (474)..(474): n is a, c, g, or t
cagcaccgcnagngacttgcaagatcggggagtngggagggcgagagaggaggaggtgcagctttgatgctgggacctccctgagtggggctgatgaatgtatattcattagcaccatggctcacttcccaggaagactgatcaggagcccttcagggacaattttgttctcaagattcacaccttaggaacacatttttatcacctcaaaattttgntccatcacccctctctccacctatatntnnacaaataccattcagacttaaattaagctgaagaaactagcctttggtaacatagggtgtcattggttttcagggatgtaaccaattccagaaatacatttctttttgcctgggcatgaaagactttggaaacacgggccgcttatttttcagagttccngttttttggggaacgtgaatttngggtnacttgtttaatttcccagggtnggttaaccanaagggncgggggtcatggccttt

SEQ ID NO: 5604 - DNA, 430 bp, Homo sapiens
  I.5604 (H11776)
  misc_feature (35)..(35): n is a, c, g, or t
  misc_feature (40)..(40): n is a, c, g, or t
  misc_feature (45)..(45): n is a, c, g, or t
  misc_feature (51)..(51): n is a, c, g, or t
  misc_feature (53)..(53): n is a, c, g, or t
  misc_feature (56)..(56): n is a, c, g, or t
  misc_feature (58)..(58): n is a, c, g, or t
  misc_feature (205)..(205): n is a, c, g, or t
  misc_feature (221)..(221): n is a, c, g, or t
  misc_feature (268)..(268): n is a, c, g, or t
  misc_feature (324)..(324): n is a, c, g, or t
  misc_feature (345)..(345): n is a, c, g, or t
  misc_feature (391)..(391): n is a, c, g, or t
  misc_feature (400)..(400): n is a, c, g, or t
  misc_feature (407)..(407): n is a, c, g, or t
  misc_feature (415)..(415): n is a, c, g, or t
  misc_feature (421)..(421): n is a, c, g, or t
  misc_feature (427)..(427): n is a, c, g, or t
ttttttttttttttttttcacttctgagtcatttnttganaaaanagggtnanatncncaaaccagagtaaagtcaaggaacaaatatctgctgtgccagctgggtgcagggatagatccactgaagagtgggagaggaggtcagagccaccttcctcatcacccggttcgagcagattagatgagtggagagagccatgcaaantcagcccctagtagantgcgagcggcacccgggtaagatgcctgctgtacagtgaggagggtnttagggttttgagcatccccatgagtccagttttcacaggtaggggtacgagggtnttacctcaggaggttcacggncagccttccacataggggtaggcaggccatttgatgttcattttcnttgggacantgaccgncttccatncctttngacctnatt

SEQ ID NO: 5605 - DNA, 519 bp, Homo sapiens
  I.5605 (H11557)
  misc_feature (326)..(326): n is a, c, g, or t
  misc_feature (431)..(431): n is a, c, g, or t
  misc_feature (468)..(468): n is a, c, g, or t
  misc_feature (479)..(479): n is a, c, g, or t
  misc_feature (519)..(519): n is a, c, g, or t
agaaatcgatgtcaaagggcaagctaacagtctcatttagaatgcttctcccatttcaaaactggtgccttgattttttttttttttttatggcaggaacaattcagaaacagcttaaatcattcagtcttcttcttcttcttttttttttttaacttgctgcattggtaacccttttcattcttgtgtaagaaattggaactgtagcacataatgatgctttggtatgaaataatggtaggaataaaaatgatttcttctgagaagcctgtgttaaagcacttggatactgataactggcttacagggaggctgatccaggtggncttaaaactggctctcctgaacgccactcaagccccagtcccatctgctcctcctttgttaactcctgtcagttgatgcctctcctagggagttttctcccgctngcaggcacccccgggggaacacccgagactacaggtncagaaatgggnttccattccagctgggggtgctaactcacaatattcattn

SEQ ID NO: 5606 - DNA, 473 bp, Homo sapiens
  I.5606 (H11495)
  misc_feature (316)..(316): n is a, c, g, or t
  misc_feature (340)..(340): n is a, c, g, or t
  misc_feature (364)..(364): n is a, c, g, or t
  misc_feature (400)..(400): n is a, c, g, or t
  misc_feature (416)..(416): n is a, c, g, or t
  misc_feature (431)..(431): n is a, c, g, or t
  misc_feature (472)..(472): n is a, c, g, or t
ttttttttttttccatgttcatttttatttaaagactcagaaacacaggcatcatggtttgtcatcactgacaagtcttccaaaatcacacgctgacatttgtgtctaacaaaaacacttgggatagggtgtgtgtgtttgtgtgtgtgaactgtgcaaagtacaaaggatctcccagtcggctgagcctgttttgaagtgcccggcctggcatcaccccatgaggatgccagggagagcacccgtgggccgccatcctctctgcctccctctgggcagaggccctgggtgggctggcagtcctgtcccctcggtntccacttgacttcagccatgggtngtgggacttttaccatgcttcctnaaagggaaattttcttttggggccccccaagggcanttacatggggttaagntgttgtaacatcatnggggggccagggtttgaaacattaaggggtttaattttcant

SEQ ID NO: 5607 - DNA, 427 bp, Homo sapiens
  I.5607 (H11448)
  misc_feature (399)..(399): n is a, c, g, or t
tttttttttttgtattttttatacagatagggtcttgccatgattcccaggctggtctcaaactcctgagctcaaagcgatctgcctgccttggcctcccaaagtgctgggattacaggcatgagccaccacgcccagccaatctaatttatttttaatttttaacatacagtcactcaccaacaatttattttcttctgatgtggttcctactttgatgacactagggagctactttacagatgtagttgtaagtcaggttaaaaaaagaaacctaggaaatgtaaagtatttacacaaaacccaacagatcaaatagggagccagggcaaatttaattattttaggactcacaatttgggcaaccattattggggtgtgggtttcttcaaccatctntaccccggaaacctttgtgggaggccaa

SEQ ID NO: 5608 - DNA, 359 bp, Homo sapiens
  I.5608 (H11274)
  misc_feature (136)..(136): n is a, c, g, or t
  misc_feature (139)..(139): n is a, c, g, or t
  misc_feature (254)..(254): n is a, c, g, or t
  misc_feature (255)..(255): n is a, c, g, or t
  misc_feature (257)..(257): n is a, c, g, or t
ttttttttttactgaaatgacttttaatatctcatgtcgcagcaaaattaaaaatatacaaaaagtttgtggtgtacaaaagagtctcagtaaagaggccccagctcgggccacctccccctccccctcctggganagnctcggagggtgaatgggggtcagggggatgagggatggcacagatgtagtaaataccaggaggtgggaccagggaaaaggaaacagaagaggacaggggtgagggcccgttaganngnaagagacgacagggaggggaagaatcacttcggaattgtgctgacagagggagattagccccttcaggcatggcttagtgattcctaggagttccaggggca

SEQ ID NO: 5609 - DNA, 430 bp, Homo sapiens
  I.5609 (H11273)
  misc_feature (16)..(16): n is a, c, g, or t
  misc_feature (162)..(162): n is a, c, g, or t
  misc_feature (164)..(164): n is a, c, g, or t
  misc_feature (354)..(354): n is a, c, g, or t
tggggctggggagganaggagcttcaatgtgccattctggttggggagaggataggacatttctgggtccttggctgctgcggtagaggtatggggaggaaaaactctagagtgggagatgtggaagtggaaaaggaaggccctgtccaggcctggcctgtntntctggagacagaaaactccccaggggacagagaggttacccccttgtgcttagcttctgccacccttcccttctctggaggagaaggctgccctctcctcagcaaccctggcctttattctatgcataaccactgcaagggcacccctgggccaggctgaatgggtgggggtcccagggcacctgcaatnaatcttcagaatgggagggtatcctggggacaaagagggggtacagaaggttgccaggggggaaaaggtgatttcc

SEQ ID NO: 5610 - DNA, 394 bp, Homo sapiens
  I.5610 (H11156)
  misc_feature (379)..(379): n is a, c, g, or t
caagatctggtaaatgaggagccaaggacaggactacgaccactgaagcgttcaaagtcggggaaatcactgacccagtccctgtggctgaataacaatgttctcaatgatctgagagacttcaaccaggtggcttcacagctgttggagcacccagagaacctggcctggatcgacctgtcctttaatgacctgacttccattgaccctgtcctaacaactttcttcaacctgagtgtcctctatcttcacggcaacagcatccagcgcctggggggaggtgaataagctggctgtccttcctcggctccgtagcctggacactccatggggaaccccatgggagggaaggagaaagggtattagggcaatatgttgntgtgcaacctgttcc

SEQ ID NO: 5611 - DNA, 409 bp, Homo sapiens
  I.5611 (H11068)
  misc_feature (18)..(18): n is a, c, g, or t
  misc_feature (281)..(281): n is a, c, g, or t
  misc_feature (373)..(373): n is a, c, g, or t
  misc_feature (378)..(378): n is a, c, g, or t
tttttttttaagcaggangattctttttatcaaatgaaatcttaagcagaatcccagcatataaaacagaatggaattactttgatctgattgaagttggggctggtttcagagatcataggccatcttcttggcctgtcatggaggcctgtgaggcatctctacagaccctggtactctgtgaagagtttggaaattactgatctactttaacccccaaatctctaagctgaaaagtacaaaggggcccagagagttagataaatttcccaggctgtgtngtaacccacgtctccagtgtcccgggccagcaggcttttccctcaattgccttcctttttcagcaaaataagactaggagcttggccaggtncagtngcttatcctgtaatcctaggcactttaggga

SEQ ID NO: 5612 - DNA, 426 bp, Homo sapiens
  I.5612 (H11032)
  misc_feature (376)..(376): n is a, c, g, or t
  misc_feature (398)..(398): n is a, c, g, or t
  misc_feature (420)..(420): n is a, c, g, or t
ttttttttttttgtaaatttaatatttagtcctaattttaaagcacacacaaccacaagatattcagaaagctaaaaatagtcagaaacttccttaacctgtaacaaacattgtatttaatgcatgagaacagatattagcaaattttcccgtaaaagctcagatggtgaatattctaggtttttcgggcaataccgcctctgtctgggactatttaacagcattgctgtgggcgtgacagtaggccatcaggacaatatgtaggaaaaatgtgtgtaactgtgttccaataaaactttatttacaaggaagagaccattgggctgggatttgggccccccggccacccagtttgggaaacccctggcattaggantcattcggcattagtccggaancaggggaaggcgcttgagtccnggggcc

SEQ ID NO: 5613 - DNA, 411 bp, Homo sapiens
  I.5613 (H10691)
ttggggttgtgtgagatacgggtctaacgttttctttttcaaatacgtagccagttgtcacatcatttattgaaaaaggaatcttttctccaccgactgacatgaaatgctaccatcatcgtaaataaaattcccgtaaatacttgctgtctctgctgtctcagtcctgactcacgggctgagttctctttctgcacagtagcactggcattaactgtgacagctttacagcaggctccctccccgaggccgttcagaagcattcctcagcgggtcctacacgtttcctctcccatgtcaagtttaggaaggcagtgttcaagacccacagcagtcctgcgggggagtttttaaggggatggcacgggagtttatggggggacagttttggggaaattgacattcatgtgg

SEQ ID NO: 5614 - DNA, 288 bp, Homo sapiens
  I.5614 (H10250)
  misc_feature (176)..(176): n is a, c, g, or t
  misc_feature (216)..(216): n is a, c, g, or t
  misc_feature (252)..(252): n is a, c, g, or t
gcctggctagccagtgctggctccactgggcaggaagcctgggacccccaggtatgaggagggggtggtcttagggttctgttccaggtctgccccgcccccctcccagccatgccccaggcagaacttggaattcaggtgtgcacctgcaggctgaggggctctgtgagcaggtnctgctcacacagggagttcaggcgccacaaggcccctgtnctgctgggataggcctgcttcacttagggagcactncctcaagacaggtaaagcccccttcgttttccccca

SEQ ID NO: 5615 - DNA, 328 bp, Homo sapiens
  I.5615 (H10200)
  misc_feature (26)..(26): n is a, c, g, or t
  misc_feature (64)..(64): n is a, c, g, or t
  misc_feature (107)..(107): n is a, c, g, or t
  misc_feature (186)..(186): n is a, c, g, or t
  misc_feature (277)..(277): n is a, c, g, or t
  misc_feature (290)..(290): n is a, c, g, or t
  misc_feature (322)..(322): n is a, c, g, or t
ttttttttttttttgaaaacatccantttaagctttattacaacacattgtctccaaatacaangggaggggccgggagcagaaggtgcggctgtggcgggaggggntccaaggggggctgaagggccggcagccagatctacagagactggaggctcagcgggggacctgcaccctctcctccgntggacttcccagcaaataacaggaggggccgggtccattttggggcgatcccaatgccaggcagtggccaggtgggaggggccggagagangtttggagaggantcagggttgggtcaggtgaaagccaccaggtngggccc

SEQ ID NO: 5616 - DNA, 429 bp, Homo sapiens
  I.5616 (H10090)
  misc_feature (398)..(398): n is a, c, g, or t
  misc_feature (420)..(420): n is a, c, g, or t
tcccaactccaaatattaaaactctttctttaataatggtacttgtggtaattagcccaagttaggcacacaagtcttataactgaatttctgccagggttagatttgctggcatcgtgtttatgcaaatcaaaacacagttttatctatcaacacctcaacatttaattgtctggtgttagttcctgtaacaacaatcacatatccatttagctctcttaaatgaaaatcactatgagattataacaggttgagtgggactgaaaatgtaatttgaaaatgaggggagaaagcctgggaatttatttgcatctcatttattttaattcagttcgtaaactgtttagtggaatggaaatggaaagccaacttctgggaatgggcaggagagccagttngggaggagggtataaggggaangtttggggt

SEQ ID NO: 5617 - DNA, 449 bp, Homo sapiens
  I.5617 (H10036)
  misc_feature (413)..(413): n is a, c, g, or t
  misc_feature (436)..(436): n is a, c, g, or t
  misc_feature (444)..(444): n is a, c, g, or t
tttttttttttttggttgttgttgttgtttgttgttgtagagacagggttttgctatattgcggttttgctatattgcctaggctggtcttgtcttgaacccctaggcgaaaatgatcctcccactttggcctcccaaagtgttgggaaaacaagcatgagccactgtgcccaggctggagagagctttctaatgccacacatcccagcacatcactctgctaatgaagtccagggtagggctcaccattgccctcaggataaatgttagcctgggcaccatgttcttttccatgtgcagtctctgggctgcatcttctttttctaccctactctctaacacatccactgccacactggaattagtttttctgaaatgccattccctttttgggcctcttgggctttttccantggggcgacatttttttgttccngttcaacnttgtt

SEQ ID NO: 5618 - DNA, 484 bp, Homo sapiens
  I.5618 (H09698)
  misc_feature (431)..(431): n is a, c, g, or t
  misc_feature (449)..(449): n is a, c, g, or t
cggggtggcttagcgttgataacagaagattctgagatgggtgagaagtggtccacacgtggccactgtcattcctctggcataatggacttgggctcaggaggtcaagccctcttcaaggagcatgagctgaaattgctaaactttgggagttttccgtgacacccttcaaagtgctcacggtgtggcatggatcagctggggagggttgatgtggttttgccctgtggggtatctatctgtgtacttttgtctgagggaggcaactggggccacttaggccggcaggtgcccactgtgattggttgacatgataccaagcaacaggatcatccagtcaccttcaatgcagggaggatggctgacaggctccctggggtgacactttcatgcaatcagatgttcgagttgggactgtgacatagagcccngtggcccacattaaattncccccccacccttcccctgttccacaaccgtcatt

SEQ ID NO: 5619 - DNA, 478 bp, Homo sapiens
  I.5619 (H09657)
  misc_feature (212)..(212): n is a, c, g, or t
  misc_feature (263)..(263): n is a, c, g, or t
  misc_feature (397)..(397): n is a, c, g, or t
  misc_feature (438)..(438): n is a, c, g, or t
  misc_feature (446)..(446): n is a, c, g, or t
  misc_feature (476)..(476): n is a, c, g, or t
tttttttttttttttcaagggtaacttcagaaatttattcgtatgtcttaattcacagaaacattggcactttacagcaaaacaattagcataatgagaaataagtcactgagtgagatgtggtgttttggaacaggtatacagctctgtctctagaaaggaacagggttctgccaagtgtctttggtttggcaagggttgttctggacttntaggaacatgtggcggcaccatccagagggatttacttgcagctgattttntgggagtttttcttggtctccttgtgcagtaagtacagcttcaactattttcataacatttctcttcaactattttcataatatttttctaatattctttaaccaccacgtggaaatatcacagggaagggctnttgtggggttcagcttccggtcacttcgtcccacatggggncaatgagngttgctcataggactttcaggggcactccntt

SEQ ID NO: 5620 - DNA, 431 bp, Homo sapiens
  I.5620 (H09462)
  misc_feature (331)..(331): n is a, c, g, or t
  misc_feature (424)..(424): n is a, c, g, or t
  misc_feature (429)..(429): n is a, c, g, or t
ggatccactagctacactggctgagaatgctctcaccccaggatttcatttttattttaccacatcattgttggtatcttaagatcaatgtactggagcagcggggtctcacaaagaggatacctggtgacacgcccaggctttcagaatgcactatagggctttagtgacttgtccaggttcagctgaaatgtgccatctgggacctactaatgcttgttgaactttactggatctcagaagctgggtctcagaagctcagatgttcctcagagctacgatatcaacaacctgtgatgacagagagaaggttgctccatgatgggatttnggaaacttactgggctagcttaaacctggacttgaatgggggaagggaatgtgggatagctttgggaactctagttttcactaggatggagcngggantt

SEQ ID NO: 5621 - DNA, 480 bp, Homo sapiens
  I.5621 (H09112)
  misc_feature (11)..(11): n is a, c, g, or t
  misc_feature (178)..(178): n is a, c, g, or t
  misc_feature (241)..(241): n is a, c, g, or t
  misc_feature (291)..(291): n is a, c, g, or t
  misc_feature (360)..(360): n is a, c, g, or t
  misc_feature (399)..(399): n is a, c, g, or t
  misc_feature (416)..(416): n is a, c, g, or t
  misc_feature (424)..(424): n is a, c, g, or t
  misc_feature (440)..(440): n is a, c, g, or t
  misc_feature (463)..(463): n is a, c, g, or t
  misc_feature (470)..(470): n is a, c, g, or t
  misc_feature (476)..(476): n is a, c, g, or t
ttttttttttntttttaagcacatgggaggagtgactttattcacaataggtaaaataaacataattaatttttaaaaggagaacaaatgaaattaagatagataattgcaataatcaataatattgttggtttaattcataaattaaagttcaagcctgatgccataactcataggncttatatttatttttcccttatcctgttaaaagatgtgtgaggcagcccgagatataattttngcctattcttttctcatccatgagggcatgaaatatcagccctaccgagntaatgtgggagcaaatctattccagttaaaacttacagtgatttaagggacaggacaggatgtatattncacaatatttgtggcacaatacacccggggggcaatttncaaatggggcaaatccngcagtgtnctttttcaaatagggntgaggtgttccaggttccttttnagggggnaggtgnacaa

SEQ ID NO: 5622 - DNA, 134 bp, Homo sapiens
  I.5622 (H08911)
gtggcaggcgctgtaattccagctactcgggaggctgaggcaggagaatcgcttgaacccaagaggtggaggctgcagtgagccaagattgagccatggcactccagcctggggacaagagagacttcgtctca

SEQ ID NO: 5623 - DNA, 313 bp, Homo sapiens
  I.5623 (H08827)
  misc_feature (10)..(10): n is a, c, g, or t
  misc_feature (11)..(11): n is a, c, g, or t
ttttttttgnnacatgtaaattatactttattaaagaaaacaacaaataccaagtatctattaaaacatctttggacactttaaaagagcaaatagtgatcaacagaagtaaagcatatcactaagaaatcatttccttttttggcaagggaatttcaaagacagacgacacctgctgttatgaattttaaagacctcttttgttgaattcaggttaattccattctgcaagaccacaggggggaaactatggaaataggatatactgaaactctacggtatacccgggctctttgccaatagctgggatgtt

SEQ ID NO: 5624 - DNA, 500 bp, Homo sapiens
  I.5624 (H08791)
  misc_feature (11)..(11): n is a, c, g, or t
  misc_feature (29)..(29): n is a, c, g, or t
  misc_feature (281)..(281): n is a, c, g, or t
  misc_feature (325)..(325): n is a, c, g, or t
  misc_feature (345)..(345): n is a, c, g, or t
  misc_feature (435)..(435): n is a, c, g, or t
  misc_feature (500)..(500): n is a, c, g, or t
ttttttttttntttttttcagacggattncgactctgtcgcccaggctggagtgcaatggtgagatctgggctcactgcaagctccgcctcccgggctcacgccattctcctgcctcagcctcccgagtagctgggactacaggcgcccgccactgcgcctggctaatttttttatatttttagtagagacggggtttcaccatgttagcaaggatgatccccatctcctgacctcgtgatccacccgcctcggcctcccaaagtgctgggattacaggtntgagccaccatgcgtggccctgggacacataatttgtttaaaantaaagtgtgtaactaaggtntcaccgataatatatgaacagaaagaaaacttgcgggaaactttcaatggaacattactttcaaaggaaattttgaccttgttttttcgnttcattttcaagtagttttaggtttccgacattgtaatatggggttgtgatggctagggtagttn

SEQ ID NO: 5625 - DNA, 440 bp, Homo sapiens
  I.5625 (H08750)
  misc_feature (104)..(104): n is a, c, g, or t
  misc_feature (204)..(204): n is a, c, g, or t
  misc_feature (241)..(241): n is a, c, g, or t
  misc_feature (305)..(305): n is a, c, g, or t
  misc_feature (351)..(351): n is a, c, g, or t
  misc_feature (367)..(367): n is a, c, g, or t
  misc_feature (376)..(376): n is a, c, g, or t
  misc_feature (422)..(422): n is a, c, g, or t
ttttttttttttttttgcttcacaaatgtcaattttattgacactagggcacaactaaatacaataattgcaaaggaagtggaacgtgttcaaacagaaatggngacaatgagttagaactgcagttgtttcaaggtactacactattatttaaaaaaaaaaatcacaaaaagaaaaatgttatcactacaagtaggatttagnggagagaaattctggacagtctgtctagaggttaaancatttcatgcatttgtgagttgctgttgggagagttgttttttatttgtccaccgtaatctggncaacatccggggcttaccttcaggctctcgcactgtgcgtgaggancgggtgagggcagttnttaaggtgnggaggcatgtctgggacaccttggactttggcagttgacgtgggancaggaaaaaggctttcac

SEQ ID NO: 5626 - DNA, 445 bp, Homo sapiens
  I.5626 (H08735)
  misc_feature (427)..(427): n is a, c, g, or t
tttttttttatctgagtcagaaatatatacattatgcaagctcatcaataggcttttcggtcctttcatcattttacccataagctatcacagtccacagtgtacattaggtacattagaactagacctctataggtctctcacatttctgtacatattgagagcaaagatactaactatgcttttgttctgaactcttttcaataatgttttgatagtaaacaggctgggaatatagagttagtgtctcccatggaaacagatggtaggggcagctttgtttatggcccaatataataaagatagtggttctcttccgaggcaaagttcagggcaggattcatttgttcatcccttacaaaacatttcagggatttccttaaacttagggatttcctcaggctgtgatgccaaacccactaatttncacagttacccaccgagg

SEQ ID NO: 5627 - DNA, 487 bp, Homo sapiens
  I.5627 (H08568)
  misc_feature (95)..(95): n is a, c, g, or t
  misc_feature (436)..(436): n is a, c, g, or t
  misc_feature (474)..(474): n is a, c, g, or t
  misc_feature (485)..(485): n is a, c, g, or t
gttttttaaaatagagatggggtcccaccatgttgcccaagttgatcttgaactcctgggctcaagtgatccacctacctcggcctcccagaggnctcggattacaggcttgagccactgcacccggcctagcagcattgtttaacactacaaaaaccatataaccactgagctccttctcagaaggaagatggcgaaagtcactgctcaacagtgactagattcataacctggggctttggtctgtttgttttaggcttaactcttgcagatttggggaatgtcaggttccaaaacttgagttcattattcctgtcaattcagggcacacccttaccataagcccatgaaagacatcttgttgggttattttattattttttctttatctccatgctcactccccatttttcatcctgcctattacataggtgtntttggaaattaaatattattggccgactccagtttaanttttccaaggngt

SEQ ID NO: 5628 - DNA, 514 bp, Homo sapiens
  I.5628 (H08567)
  misc_feature (16)..(16): n is a, c, g, or t
  misc_feature (485)..(485): n is a, c, g, or t
  misc_feature (492)..(492): n is a, c, g, or t
  misc_feature (502)..(502): n is a, c, g, or t
gggcactaatatcacnaaggaaacctaaagccgggaactgcttagggcaaacctgcctcccattctattcaaagtcacccctctctgcccactgagatagacgcatatctgatttgcctcctttggaagggctaatcagaaactcaaaagaatgtaaccgtttgtgtatcacttgtctgtgacctggaagtcccttcccccgttccaatcttccgcctttgattcaagttgtctcacctttccagaccgaaccaatgtacttcttacataaattgattggtgtctcatgtctccctaaatggataaaagcaagctatgccccaaccacctcgggcacatgtcgccagggacctcctgaggctgtcacgggtgcatcctcaaccttgggcaaaattaaacttttcttaaattaacttgaggacctgtctcacattttctgggtttcacagtagttgcacaataacctttcaaatacatttttaaancacacanggggaaacancacagttttttt

SEQ ID NO: 5629 - DNA, 447 bp, Homo sapiens
  I.5629 (H08550)
  misc_feature (263)..(263): n is a, c, g, or t
  misc_feature (294)..(294): n is a, c, g, or t
  misc_feature (331)..(331): n is a, c, g, or t
  misc_feature (395)..(395): n is a, c, g, or t
  misc_feature (403)..(403): n is a, c, g, or t
ttttttttgtgtacaaatgttcataggatttttatttgtaacagtaagaaaaaccgggaacaaaactaatgtccttcagtgggtgaataaacaaatagtggtatattcgtatcatagattattagtggccaataaaaacagagccaatgatatgcagaacaacttgggatggatttcaggttaatctgctttagttgaaatagccaataccaaaagggtacatgctgtatgattccatttttataacatgctactaatgacanaactaaagatgaaaaggatttctgattgccnagggttagggctgaggagaggttgtgactataaacanggggcatgaggggagtttgcattgatgcaaccttctggaatctcgattacggtggtgggtgacntggaatcnatatatgtgtttaaggttttcttaaagccaccttttaaaaaacc

SEQ ID NO: 5630 - DNA, 392 bp, Homo sapiens
  I.5630 (H08549)
  misc_feature (140)..(140): n is a, c, g, or t
tttagtgatcagttacttcatgttttgtgtcagagaaaacatgtacaaaacatttgagaaaatattttaggacattatgtctaaaaattgtatactgagaaaaatcctatgaatgtggcagactataaaagcctttggtnggaagataaaccccctcagaagtgatcatagatcatgaataaactactaattcgtggaaatgtaataattatagggacgtctttgcccaaaaataaaacttcaacagattgagagagttcacactggagaaatactttcctctggcaaacccctgtggcagggttttcagtaaaatgttttgcctcatcgtgtgctagggaaataatgcagaaaaaacttatgaaaacatttcaatgtaggaagacttttag

SEQ ID NO: 5631 - DNA, 488 bp, Homo sapiens
  I.5631 (H08468)
  misc_feature (103)..(103): n is a, c, g, or t
  misc_feature (140)..(140): n is a, c, g, or t
  misc_feature (386)..(386): n is a, c, g, or t
  misc_feature (404)..(404): n is a, c, g, or t
  misc_feature (430)..(430): n is a, c, g, or t
  misc_feature (449)..(449): n is a, c, g, or t
  misc_feature (454)..(454): n is a, c, g, or t
  misc_feature (482)..(482): n is a, c, g, or t
tcttcccacctgctggaatggacaccagtttgtacagactgttgtcacacaccctggctcaaagtcaaaagagaattttaattactcatcaagctgccaaatnctactaattgcccccttgtcagcatatttcattaatngctgaaaggtaaatgagttacatattttgtttggaccacgtcacctgtacattttcaaagcctcggattgtttatcttgcaaggagagaaggggcctcttctccacagatgcagctcaaattagcaaaactgaactgtagagtttcaggcctttcccttccttaaaatgctgataggatttctaggaccaggactttggatatttattgggcttcttgggtcttgctgtttaaacacacccattgnccctttctttcttagggncctgttaaggcaaagttgggagtagncttcttggggtaaaagggnccaantggacccaccctaatttttgttcggttnccaggt

SEQ ID NO: 5632 - DNA, 439 bp, Homo sapiens
  I.5632 (H08448)
  misc_feature (96)..(96): n is a, c, g, or t
  misc_feature (283)..(283): n is a, c, g, or t
  misc_feature (393)..(393): n is a, c, g, or t
  misc_feature (402)..(402): n is a, c, g, or t
  misc_feature (407)..(407): n is a, c, g, or t
  misc_feature (419)..(419): n is a, c, g, or t
tcaaatatttctctccctcgcttggatgtaagcctagctagctgagctgggggtgagaaggacagaacgagttggtgtgggcagcctggtctgagntctttttggaagtgcgtgttgtaaatcttcatcctctgggctcaaatgaccaatattatatttttcagaaatcaataatcatgaaattcatcactgttcatttataggtgaataattacacactgaagaggctaattgctattctataatattttgaaaaactaggaaaatgggaaaattgctaagnaaatttatccattccctttgcaaaaaaagttggggttttgtcaaggaatgtgaaaagtctggaaatttttctctacttttcagggctaacaatttattttaggccttccncagtttccngggcnggatgctgggcnggaaggacatggatactccc

SEQ ID NO: 5633 - DNA, 236 bp, Homo sapiens
  I.5633 (H08428)
  misc_feature (27)..(27): n is a, c, g, or t
  misc_feature (79)..(79): n is a, c, g, or t
  misc_feature (234)..(234): n is a, c, g, or t
tttttttttttttttttttttcaaatntcagatttctttattaaaatgtgcacattatagtttacttaaatacaaaatnttcactttccttgcaggtaagaaatttcactgacatttccatgtcaattagcttctttttaataaaaatccttccactgaaaataaataagcatttaaattactgaactattatattcattagtctcaatacctcttaaaatacttaaaactttnga

SEQ ID NO: 5634 - DNA, 520 bp, Homo sapiens
  I.5634 (H08427)
  misc_feature (27)..(27): n is a, c, g, or t
  misc_feature (30)..(30): n is a, c, g, or t
  misc_feature (42)..(42): n is a, c, g, or t
  misc_feature (119)..(119): n is a, c, g, or t
  misc_feature (233)..(233): n is a, c, g, or t
  misc_feature (237)..(237): n is a, c, g, or t
  misc_feature (474)..(474): n is a, c, g, or t
  misc_feature (485)..(485): n is a, c, g, or t
  misc_feature (514)..(514): n is a, c, g, or t
acaagtaaatgggggccgttgggacgnggngtgcctggaggnagctctgggctcagcgggcagtgcttagagcacaggcccctctgttgggggatggggaggagagcagtctgcccttnggagcgtaggccccagggagacttctaaagccccccctgtcgtctgctcttcacccagcaccacagaggcacctgctgcacacacaagcatctcactcggcccacggagggcangtgncttcctttgcctgaagctgttttgggaagggtctccacacaggcactgatctcccaagctttggtcatgatgtcttttaccatttgataattttaaacattgtttttaaacccaaaacatttagtggtccgtttgcctctgaaagatgttaaacaaacaaatacactattttctggggaacattttatattggaggattctttgtgggctattgggtgtggtctcaacagggcaaanttttgattttnggctaaaaataggggttcagatgtatttngtggtt

SEQ ID NO: 5635 - DNA, 372 bp, Homo sapiens
  I.5635 (H08269)
  misc_feature (76)..(76): n is a, c, g, or t
tgatgtgaaaatccctgcgttcatcaacataacccagttagggtcgcactcatcacggggcccccattgcctctgngcaccccacgactgacatctgcggggccttcgcgctaggcttcgagtttcagcttccgcaccaggcctgcctttctgcaggggccagggtgggggtcgtgtgctgattgggccctctgaaccgccaccgctgcagaggggctgttccttccgtcacatcccttgtgcccgaatccaccctgtgtcttctcttttctcagcaggacattttaaaagcccagaccccctccttacagagcaaatgtccagggttcggaggtcactgtcacatcccaagaacccccttcaccagggtgc

SEQ ID NO: 5636 - DNA, 496 bp, Homo sapiens
  I.5636 (H08260)
  misc_feature (413)..(413): n is a, c, g, or t
  misc_feature (439)..(439): n is a, c, g, or t
gaacaagtgaggttgaaacttgatctaatgtaccaggaaaccatcccatctgagtgatctagtggcttttcataggctagagctgaacagtttctgatgactgctcaaaagcaagtcaatcagcgagtaatagagttcagaatctttattctctggtttgtatctggactgtgaacaacccttaataaagagtacattcctttctgccagaactgcccaatggaagacaacaagtctatctaggcttcttataaaagccaacagaaacctcccaagggagactcaaacctcagatcattgcattaggagctgaaaattagagtgccattgactgttgttgccatggtaatcactgctgacctgggcaggttcttcctcatgataggccttcttcaacaggtttcactttcttncttaagggtgttgagggtgtgtgtcntctgttttgttttggtttgtgggcaaagttgttcatgttttactcttaaatacaaag

SEQ ID NO: 5637 - DNA, 473 bp, Homo sapiens
  I.5637 (H08170)
  misc_feature (53)..(53): n is a, c, g, or t
  misc_feature (94)..(94): n is a, c, g, or t
  misc_feature (118)..(118): n is a, c, g, or t
  misc_feature (312)..(312): n is a, c, g, or t
  misc_feature (406)..(406): n is a, c, g, or t
  misc_feature (411)..(411): n is a, c, g, or t
  misc_feature (442)..(442): n is a, c, g, or t
  misc_feature (458)..(458): n is a, c, g, or t
tttttttttttttttttttttttgactgagtcctccctttgaggcaggcactnttttatgcactgaaatacaactatttatacaacagacactnttccctccccccatggaggttctnttcaagcggggagacagtcatttgttaaacgaaacataaaatctcagtgacaattagagctctgggggagaatgaaggagcaggaagaggcagaggaagaggagccagggctgccaggtgcagtagcccaggttgcgcactgctcaactttgctgtgggattcacatcacagtcatcagagtcacactgggcantttcccagtagatggccgcactttgtctcagggaagggcccattgccgttttgtccaaggccatctcatgggcttcaaagccatgggaggggangggtnctgccagggtgacacagatttggggccctcntttcctcccttcagangatgcccagctggga

SEQ ID NO: 5638 - DNA, 475 bp, Homo sapiens
  I.5638 (H08161)
  misc_feature (448)..(448): n is a, c, g, or t
  misc_feature (458)..(458): n is a, c, g, or t
tttttttttcagctgttactttttcttctcctcctatctggtattctttgatacactctgacagcttgttcaaactgaggagcctaagaaggatccacctgacaacctagactcaggaaaagcacatgcgaaaatgccgtttccagccactgtacgatcatcgggcctcggagaatggtgctagtacgtttccaaagtacttcggaggctgcaaaaaaaatgttaacaaacattacctcatttgatacaaccacctgtgggcataggaaaggcaggtgtcttcattttacaggtaagagaggttaatgatgtgatcaagtctatgctattaggaaaaagcccagcatcagggccaaccttcttactattggtctgtgggtgatgtccccacactacactggcctaagtaaataatcttacgtctttttacacaccccctacggtaaantgaaacaccngggctttggtttcattt

SEQ ID NO: 5639 - DNA, 444 bp, Homo sapiens
  I.5639 (H08054)
  misc_feature (12)..(12): n is a, c, g, or t
  misc_feature (47)..(47): n is a, c, g, or t
  misc_feature (296)..(296): n is a, c, g, or t
  misc_feature (424)..(424): n is a, c, g, or t
  misc_feature (434)..(434): n is a, c, g, or t
tttttttttggnttataataaagattttattaaaaaagtgttaaaanaaataatacatattccagaacatcactgttctgagaaatcacttccctttagaatatgagttctagatggcagatctacttacaactgctctgaggtctttcactagctgatttataatcctatattaaaaaaaaatctatagtctgcagtcttttgacatacttctcaagggtggatatgtggtggaatgcagactccatcaatatgtgtggttttgtttgctttttgtagcttaactgctgtttagnaaatcccagaggaatatgattgaggccagagttacattggttcataaaattcgaacagttgaaggctgtttttgttaattgctggggccacaaccaggaaatccggatgatggggagagaaacacttntttagggtantggttaattt

SEQ ID NO: 5640 - DNA, 431 bp, Homo sapiens
  I.5640 (H08053)
  misc_feature (372)..(372): n is a, c, g, or t
  misc_feature (402)..(402): n is a, c, g, or t
  misc_feature (417)..(417): n is a, c, g, or t
gtagggatgggcagttgcacgaaggcatgaatgtattgtaaataagtaactttgacttctgacaaaaaacaaaaagtgctgcatggctcgcatggaatccacgcgctccagggactctgcccgcccccgcgactggagacggcatctcgttcacagcacccaccctcttacctgataagttccatcgtatcaaactttctataaacaaaatacagtataatcagaaagtgccatttcgccattatttgtgatcggtaggcagttcagagcataagttaactgtgaaaaaaatgtaaaggttttatttagggacatttgcatggctagtcatcagtccattttatgagttaacaatgtatttttgtttgaggngaagtttttagggggttgtttttgggttcnttttattttttgatnggtggatgttttta

SEQ ID NO: 5641 - DNA, 487 bp, Homo sapiens
  I.5641 (H07097)
  misc_feature (439)..(439): n is a, c, g, or t
  misc_feature (470)..(470): n is a, c, g, or t
  misc_feature (481)..(481): n is a, c, g, or t
ttttttttttaaaaataagttttattgacataatttacgtaccattcaattcacccatttaaagtgtacaattcagtggtttttagttattcacagaatcgttcaactgttgctacaatcggtttcagagcatcttcgttaccccagaaggagattccatgttccccatttcccctctcccccagacctaaacagctactaatgtactttccgtttctatgggtttgcctattgggggacatttcatataagtgaaatcatacagtatgtgggccttttgtgtctgggcttctctcaccaagcatgttttcagagttcatggctgtaggggtgtcagtgcttccttcctttttataggccgaatcgtcttccattgtctgggggcaggcctacgggttttgttttatccactttgttgatgggacattgggggtgtttnccacttttgggccattaggattcaagtggcngggaacattgngtacaa

SEQ ID NO: 5642 - DNA, 434 bp, Homo sapiens
  I.5642 (H07096)
  misc_feature (15)..(15): n is a, c, g, or t
  misc_feature (418)..(418): n is a, c, g, or t
  misc_feature (424)..(424): n is a, c, g, or t
ggaaaggagtgtttnccagacagcccagcacctgcaggggatggagggcacataagtttgaatataaagtttaacaaatcaggggcagggcagaggaaccaagtccaagctcttgggttcaactataaagtaccatggaagtttgaaaactgaaagagatcaaaaagctgttagaagaaaacgcaggcatcaatctttatgaccttcgattaggcagtggtttcttagatatgacaccaaaagcaaagcaacaaaagaaagaaaacttaaagtgggatgtcatcagaatgaaaaactcttgtgcttcaaaggataccatcacattttataattcataggtctggataaaggacttgtatttaaggaaatacaaggaactccaacttcattaaccggaaaggaccaccccatttttttnaagggntttggaacca

SEQ ID NO: 5643 - DNA, 448 bp, Homo sapiens
  I.5643 (H06824)
  misc_feature (26)..(26): n is a, c, g, or t
  misc_feature (405)..(405): n is a, c, g, or t
  misc_feature (426)..(426): n is a, c, g, or t
  misc_feature (435)..(435): n is a, c, g, or t
  misc_feature (442)..(442): n is a, c, g, or t
tttttttttgcagttgaaatattttnttatgtaagcttatgtctactcaattcctaagaatcacataaaaatgaggaggaaaaactctacatgaactcacacccaaacacacaaagacacagatgtttccagaagtgtggcatctgcagacaaagctactgggagttttaatttaatttttaaatttcatccaggatgtctattatatcataaatacttcttaggtgttcagcttttcaggtactttatagatgtaaaatctctggtaaagaaagacagtcaaaaacacactgtatacacatactcacatggcatatggcactggaagggagttcagcaaatgccaccccaaaatatgttggctttgggtatggctggattactttcagtaggggcaacgggggnaacaggcaaatgccgggggtngggggtgcntttcttntggaac

SEQ ID NO: 5644 - DNA, 556 bp, Homo sapiens
  I.5644 (H06823)
  misc_feature (445)..(445): n is a, c, g, or t
  misc_feature (458)..(458): n is a, c, g, or t
  misc_feature (465)..(465): n is a, c, g, or t
  misc_feature (501)..(501): n is a, c, g, or t
  misc_feature (525)..(525): n is a, c, g, or t
aagtttatgaggcaatataaagttatttgaaaagggcacatttccatcagctcttatagatctgctgcagtggtgtacaaatgcccctcttatcaatgtggaaattgtgctaactcctggggtctttcttttcctacccattctccctaacaaagcatcactggaacaataactgtcatgataaaagacccactgcatacgtcttggcacaggagttgaagcaccattgtgaaaccatttgtgcctggagtgctttttcttttcttagcactggctcatgacatgcttcagattggtcaaagaaagagattttatcaagtgttcccttctcaagatgtgtgataagtgctagcagagtgtgctggtagcagatctttaggagattgaaaaagagaaggggaaatttcaggaagtgggggggaaaaagcttaaaccttatttggantattgtgggttcnagggtcnttgttatgtggaattcagtgatgataaattttcacnttgggatggacataaaaggtaacnaaattttatattctgttccttgttgtgcctg

SEQ ID NO: 5645 - DNA, 484 bp, Homo sapiens
  I.5645 (H06380)
  misc_feature (19)..(19): n is a, c, g, or t
  misc_feature (20)..(20): n is a, c, g, or t
  misc_feature (21)..(21): n is a, c, g, or t
  misc_feature (24)..(24): n is a, c, g, or t
  misc_feature (26)..(26): n is a, c, g, or t
ttttttttttggagcggtnnnagnantcattatgaagagtgaaaggacaaagcttccgcagtgtggaaggggacccgggcaggttgccgtgtttgtgttttaagctaagtgttattacaaaagattcagaagttaagaattttaaagttttactttttatgtagcctaagtgtgtttataaagtctacagtgatgtacaataatgtcccttcatattcagtcaccactcagaggcaacttccagtcccgcaagtgcccaatataggtgtaccaatttttcttttatattgcatttttactgtaccttttctatgcttcactatgtttagaaacacaaatacttaccattgtgttaatcactcttatagtattcagtatatagtattctcttatagtaacatgccatacaagtttgtaggcctagggagcaacaggccataccatataggcgttggggtattagggggctataccacctaggtct

SEQ ID NO: 5646 - DNA, 452 bp, Homo sapiens
  I.5646 (H06379)
  misc_feature (386)..(386): n is a, c, g, or t
  misc_feature (395)..(395): n is a, c, g, or t
  misc_feature (430)..(430): n is a, c, g, or t
  misc_feature (436)..(436): n is a, c, g, or t
ttcaaaccagtatctgaaacaagtaggtttctagggagaaaagataatctcttaccaagcatgtcagttcacctgccttcatcaaaggactgactgcataggtgttaacaatcataattctgaaagttgctctttgatatcagtatattctataatgtattattggcttttaaatacctcaccctcctcacagtctgtaggacatttttatttaacttcttgatttgaatcaaagcagctattacttcattagctcttttgaagtgttcttggttgagaaggaacagcaaggcttatagaagaaagccaacttttcaaatcagtctttcttttgatcagcgctgaatctgatactacactgtactttaatcagagggaaaaatggngatttgccntttttctatggaaaattttattccataatgagggnaagggnataaaaggtataggct

SEQ ID NO: 5647 - DNA, 311 bp, Homo sapiens
  I.5647 (H06263)
  misc_feature (64)..(64): n is a, c, g, or t
ttttttttttttttttttttttttttttttatttagagatggggttttgctctgttgcccaggntggagtgcagtggcatgatcatagctcacagcagcctctaactcatgggctcaagcaactcttacacttcagcctccaaagtagctgggactacaggcatgagaaaccacacttggctaacacacacacacacacacacacacacacacacataattgctatcatctctatcaaatatacacatatatttgatatatatgtatatttgtgtgtgtgtgtgtgtgtgtatatatatatatatatatgt

SEQ ID NO: 5648 - DNA, 456 bp, Homo sapiens
  I.5648 (H06262)
  misc_feature (349)..(349): n is a, c, g, or t
  misc_feature (359)..(359): n is a, c, g, or t
  misc_feature (377)..(377): n is a, c, g, or t
  misc_feature (396)..(396): n is a, c, g, or t
  misc_feature (419)..(419): n is a, c, g, or t
  misc_feature (435)..(435): n is a, c, g, or t
  misc_feature (441)..(441): n is a, c, g, or t
  misc_feature (452)..(452): n is a, c, g, or t
tgaagaaaagggaagaagaggaaagaaacaagatttggtagctcttgggcatatccaagcatttttgattttagagaggccctatggagtaatgaaaaaaatacaagctgacacagctttaaatccccactgtgttatcttgggaaaatcacttcaacctccttgagtctcaatttgcaattttggaaaagaaaaacaatttttgtcctgtctttcttgcaagattattatgcaacctgattaaatgtacagatgtgcagactcttaaaaaccttatgttaatgtaacccatataaaagtacgacttttggtcgagtaccagcacaaatttgcattccaaaggaaggantagttccatncagtgccaaaaagccttncaaaggtaattcagttccntcacgtattctggaggaaaaggngggatggctttcaaancacaangccaaattgcnttcg

SEQ ID NO: 5649 - DNA, 420 bp, Homo sapiens
  I.5649 (H06245)
  misc_feature (237)..(237): n is a, c, g, or t
  misc_feature (255)..(255): n is a, c, g, or t
  misc_feature (285)..(285): n is a, c, g, or t
  misc_feature (328)..(328): n is a, c, g, or t
ttttttttttttttttttaattcattcatttaattcaaaaatattaaatttatccatgctcgttataacggcaggcactctggtagctactagacatacaatattaagtgatactatatatttgccactctcatagagcttacagtccaatgagacagacagtagactaatagcaatagcaacatgaacaataaaaattaattaaaagttaataaaagtgctgggaaagcaaaaggngcatgtcatggtagagancactgcagcaggggctacttcagtagggtnttcagaacttctcccattcaaaagacactgtggcactattgtngggaaaaaaacatgggcaacctgccccctcttcacagcttcaactggggacctagtatttcccctgaggaaacatccttttccaactttttt

SEQ ID NO: 5650 - DNA, 457 bp, Homo sapiens
  I.5650 (H06244)
tgtgaagctgcccaggtggtgtgtaggaaattttggtagagaaagaaatagtttgaaagttggtttctgacaagaggaaagaaaaggctgcaacactaaaggaagactcaaagtgttaaaaggacgctcaaaatgtagtattgtggcaggtcgggcagagacggggttttactgtgttagccaggatggtctcggtctcctgacctcgtgatctacccgcctcagcctcccaaagtgttgggattacaggcatgagccaccgcgcccagccgtcttgtcaaaatactctaagacttcatctgtttagaatcaaaagtgcggaagacctggggaattatgtaataaggatagcagaataatcctcgtcactgacaggtggtgagctgtaaagtgttcttttgttgcagtggcagagatttcagcaatgggaggggaaatccagtgggccaagatgctt

SEQ ID NO: 5651 - DNA, 340 bp, Homo sapiens
  I.5651 (H06211)
  misc_feature (40)..(40): n is a, c, g, or t
  misc_feature (51)..(51): n is a, c, g, or t
  misc_feature (57)..(57): n is a, c, g, or t
  misc_feature (63)..(63): n is a, c, g, or t
  misc_feature (81)..(81): n is a, c, g, or t
  misc_feature (105)..(105): n is a, c, g, or t
  misc_feature (153)..(153): n is a, c, g, or t
  misc_feature (171)..(171): n is a, c, g, or t
  misc_feature (195)..(195): n is a, c, g, or t
  misc_feature (213)..(213): n is a, c, g, or t
  misc_feature (252)..(252): n is a, c, g, or t
  misc_feature (301)..(301): n is a, c, g, or t
  misc_feature (311)..(311): n is a, c, g, or t
tttttttttttttttttttttttttttttttttttttggnagagatggganagtcgnccaggngctggcaagagacacggngatttcccaagccttgggccaaanagggagtagctttggaagcggaaacacctagatgccttcctatgatgnttggttctggggcaggtnatgaagagcagcagaggagatggngaaaccccagagaagganttggggtcaagaggatttttggaggcagcaaggtttggntttaggcaaagacgtggaaagaaactctcagctgagaggtccttagaanccatctactntctgcttcttcatttgactgatgcctggg

SEQ ID NO: 5652 - DNA, 426 bp, Homo sapiens
  I.5652 (H06210)
ctttttccctgtaacattcctgtcacataatctagctgccacattcagtgcagtagagaaatgatgacgaagacaggagcagatgtttgttgtaacttactatgagccaccttttaagtatttcccatgtatcaactttcttaatccttacaatgactctaagagtccttttactctcctcattaagagatgaggaaattgagccacagagatgttaagtaatttcttcaaggtcacacagccagcgaagggcagagcttttaatcactaagccgtttgcaatgattctttcatttctaggtgatattgttagggaaaatgttttaagcttcatctgggaatctgccttcaagtgcctgtgatccgctgggtcctaattatccatccattttcaggaccaaaataaggcacgttactcttaaatgg

SEQ ID NO: 5653 - DNA, 401 bp, Homo sapiens
  I.5653 (H06009)
  misc_feature (337)..(337): n is a, c, g, or t
gagctgtccgccctgccacaggacctatcgtccttgccccttattagccctcatggggaggccagagctgatttcccaatagccactccttgtctcctcctgtcctgagacaccttggtttcctacatgccacagggactgtgaacagcttcaggggtcctgcccgatccagaaagagctgggctagttttaagggcagctgccttccaaggactgtccccaccctcctttcgcaggccttccagggttaatcctaggcttgcctgcatttcccaccctgacagaccccaaagatctatgcaaaatctcagccccagccatgtgggtgctctcactntcctccacccaagacccacatgggccagattctagggaatctttaggtttttacaaggccatcc

SEQ ID NO: 5654 - DNA, 481 bp, Homo sapiens
  I.5654 (H05959)
  misc_feature (299)..(299): n is a, c, g, or t
  misc_feature (367)..(367): n is a, c, g, or t
  misc_feature (373)..(373): n is a, c, g, or t
  misc_feature (419)..(419): n is a, c, g, or t
  misc_feature (428)..(428): n is a, c, g, or t
  misc_feature (444)..(444): n is a, c, g, or t
  misc_feature (460)..(460): n is a, c, g, or t
tttttttttttttttttgggcttcaagttcatttattgatgcattggttggacacaataaaaccacaattgttatcaaaaagtttccctcccctccccctttttctggttctcccattggaaatgtctttaaaaaacaaaaaaaagatacagggggatactggcagggtcccatattgtggggtggggagggggcagtgctgcagtggaaaggagtttgtgacattgacattgacagcatgaaaatgggtcttgccagtgcatgtgagactgcctcccaacactcagcttcacagtggncaggggctggttgggagaagggaaagctgaatttagtgctagggaccagtttgggagtggggaagctntagggngaaagctcttcctttggggagctcttcggggggtttccggtttttnagctgagtnccataattctgagggnagacccacacccgccntccaagattttgggtttcaag

SEQ ID NO: 5655 - DNA, 481 bp, Homo sapiens
  I.5655 (H05898)
  misc_feature (11)..(11): n is a, c, g, or t
  misc_feature (26)..(26): n is a, c, g, or t
  misc_feature (55)..(55): n is a, c, g, or t
  misc_feature (58)..(58): n is a, c, g, or t
  misc_feature (284)..(284): n is a, c, g, or t
  misc_feature (436)..(436): n is a, c, g, or t
  misc_feature (443)..(443): n is a, c, g, or t
  misc_feature (468)..(468): n is a, c, g, or t
ttttttttttnttttttgcaacaaangggtttagttgcacagtgcccagcatggntgnctgtccggcaactaaagtcgtggttgagagtatggagaagggatactgttttccttccatttccggtagttgctcactaccatgaccctgttgttgtgatagctctttgctgtcctttctacctcaccttcaccctatcctcagctataataccgtttagctttgcagattaggagctgggtgaatataatggttcgagtgaatggatgaatgagaatagtcattntaggcactgctgaggctttttcatacatccccacatttaatgtttacagtctagcccctccatttacctaatgggtgactgatactcagagaggttaagtaacttgaccaaggtcacacagccagtagggaggtgggagattggggtttgancccgggnttcccgttttgacgatagctccttngaccctaggtggg

SEQ ID NO: 5656 - DNA, 452 bp, Homo sapiens
  I.5656 (H05854)
  misc_feature (386)..(386): n is a, c, g, or t
  misc_feature (394)..(394): n is a, c, g, or t
  misc_feature (400)..(400): n is a, c, g, or t
  misc_feature (410)..(410): n is a, c, g, or t
  misc_feature (415)..(415): n is a, c, g, or t
  misc_feature (430)..(430): n is a, c, g, or t
  misc_feature (443)..(443): n is a, c, g, or t
  misc_feature (448)..(448): n is a, c, g, or t
ggtaagatttgcatacagtgaaatgcacaaatttaaaatataccatttggtgagttttgatctacaactgtgtagctcaaacctctgtcaagaattagaacaatatcacctcagaaagtcctctcttgcctgcttctaatcagtcttcttgcacgtcaggcaaccattgtcctaatttaaaaaaaattatagataagttttgcctattctagaacttcatgtaattgggaatcatacaatatgcatactttgtttctgtttttttcaccttagtgtttttaatattcatccatgtttatccatcctattaggtaggctcattggctttctgttggctgtgcaggtattccattggcataaatatacccacacttttttatccatancctttggnggggantctggggcanttccntacttggggctattngggtataaagggntcccngggg

SEQ ID NO: 5657 - DNA, 469 bp, Homo sapiens
  I.5657 (H05836)
  misc_feature (277)..(277): n is a, c, g, or t
  misc_feature (339)..(339): n is a, c, g, or t
  misc_feature (365)..(365): n is a, c, g, or t
  misc_feature (371)..(371): n is a, c, g, or t
  misc_feature (383)..(383): n is a, c, g, or t
  misc_feature (400)..(400): n is a, c, g, or t
  misc_feature (426)..(426): n is a, c, g, or t
  misc_feature (456)..(456): n is a, c, g, or t
aaaagtgagatcagataggaggagaacaaccagactgaagactcaacataagctgttattggtaagtgactcaaaggggagttttgaaaattaccagggatgtttaatagtcaggtctcaaagactgagtatgttgtatgggctaaaggaagcctaaagaatcatttcgttgtatggaagagatgaatgaacctggacagtagggataagtaagacaggagcctaatcttttggagatgaaagctcctgcttctgcaaaaatcccttctgaagtgtnggaaacgcatctagggccaggggttcttcaacacctaggaccatgacttcttagggtcactngatgccatgggttaaccaaaacccangttaantcttaagctccnttttgaggatttttagntcccccctttatggtttaaccatttnggactttttggaaaaattaaaggcaggccntgggggtttgagt

SEQ ID NO: 5658 - DNA, 322 bp, Homo sapiens
  I.5658 (H05747)
  misc_feature (220)..(220): n is a, c, g, or t
  misc_feature (223)..(223): n is a, c, g, or t
  misc_feature (279)..(279): n is a, c, g, or t
  misc_feature (302)..(302): n is a, c, g, or t
  misc_feature (311)..(311): n is a, c, g, or t
  misc_feature (319)..(319): n is a, c, g, or t
tttttttttttttaagattgaaacagtttttattacactaaaaagcatacaaacattaatatacaaatcccttcaaactgataatcactcacagttttcttatatctaagagattgaatgtgaactaaatataagtatcaataagtataaaataaacctagaagatatttctttgcattaaagatcattttcagaaattatgttttataagacgtagagnagnactacacatttcatatttcttcaatacctcatgtcagaggcatatatgcaactagntactaaaaaaaaaaaaaaaaaanccgggtaanctacaatnttc

SEQ ID NO: 5659 - DNA, 397 bp, Homo sapiens
  I.5659 (H05729)
  misc_feature (213)..(213): n is a, c, g, or t
  misc_feature (214)..(214): n is a, c, g, or t
  misc_feature (218)..(218): n is a, c, g, or t
  misc_feature (223)..(223): n is a, c, g, or t
  misc_feature (230)..(230): n is a, c, g, or t
  misc_feature (260)..(260): n is a, c, g, or t
  misc_feature (365)..(365): n is a, c, g, or t
tttttttttttaatctcaatattgggcatttttatttctaactcattttgggaaacaacaaatcataaaaacaaaaacaaaaattacgcagagaatgaagacatacaagaccattatcttggcaggcattttgtttataatttttacaatcaataatagaatgtccctgttttacataatatatatttatatatatttaatgtatatatattnntatnttcgnatatctntatttcaataggaaagagacataaaaaagnccttttcaaatgagggcatgacacgcaacactcggacactcttatttacaatataggaggatgtactttctacacaattataataggtggctcgggggccggagnggggtttacaaggacggcggggcacccctttt

SEQ ID NO: 5660 - DNA, 397 bp, Homo sapiens
  I.5660 (H05637)
  misc_feature (10)..(10): n is a, c, g, or t
  misc_feature (25)..(25): n is a, c, g, or t
  misc_feature (279)..(279): n is a, c, g, or t
  misc_feature (367)..(367): n is a, c, g, or t
  misc_feature (376)..(376): n is a, c, g, or t
tttttttttnttttacatgaatgtntcatagcaactttatttgtaatagcccaaaagtagaaagaacacaaatgttgttcaacaggtgaatagttaaactatggcacatctctaccatggaatactacacagaaattaaacatattgcattactgatatacacaacagtttggatgcatctcaagggaattgtgctgagtgacaaaagccaatctctatgtgttatatactgtatgatgacatttatataacaattctgaaataataaaattataaggntgaaggaacaggtttaggtgtttactaggcttttatggggtggaaaaagggatggacaggggaggatgttttataaagggattaggcnccaaggggntccttaggtggggtgacggga

SEQ ID NO: 5661 - DNA, 549 bp, Homo sapiens
  I.5661 (H05255)
  misc_feature (28)..(28): n is a, c, g, or t
  misc_feature (29)..(29): n is a, c, g, or t
  misc_feature (39)..(39): n is a, c, g, or t
  misc_feature (56)..(56): n is a, c, g, or t
  misc_feature (195)..(195): n is a, c, g, or t
  misc_feature (223)..(223): n is a, c, g, or t
  misc_feature (252)..(252): n is a, c, g, or t
  misc_feature (259)..(259): n is a, c, g, or t
  misc_feature (291)..(291): n is a, c, g, or t
  misc_feature (357)..(357): n is a, c, g, or t
  misc_feature (370)..(370): n is a, c, g, or t
  misc_feature (406)..(406): n is a, c, g, or t
  misc_feature (430)..(430): n is a, c, g, or t
  misc_feature (495)..(495): n is a, c, g, or t
  misc_feature (503)..(503): n is a, c, g, or t
  misc_feature (511)..(511): n is a, c, g, or t
  misc_feature (531)..(531): n is a, c, g, or t
ttttttttttttttttttttttttttanncccttttttnttttattaataaaaatngcattgttattatacacaacgtaacaaccaacattttaaaacctatgactggtcattgataacataaaatgatcatgagaatttcatgttaaaagtcaaagaggagatggctaatgcatgctgggcttaatacctaggngatgggtttataggtgcgtggcccagantccccttttctctgtgattggagtggatnccaacantgaggagaagccagacagtgggagtcgagcanttccaagacctttgggggtgggggaaccttcctgagccctccagagtgcagagatgcctgggtctncagccatggcggntgtgcccaggaggatgggcctcctgcctgttccagntcccaagagcacagggttcccagntcacctatgggtcaacccccaagaacatttatatttctctagaatggcataacccttcccaaaantgaggggncttggganttttttccaaaggtctgggncaaggtttttgcctggct

SEQ ID NO: 5662 - DNA, 424 bp, Homo sapiens
  I.5662 (H05189)
  misc_feature (12)..(12): n is a, c, g, or t
ctgtgtgatgtnttcaaccaatagccaaataattattgaacttacatgaaaaagagtgctaactataattttatttagattactttattctttgaaagtgactacaaggctattaagtacataatcattcattttatttactcagaagttgcctctccattactgttaacttgtttagtaatttatataattgcagtacttttaagtgttggacactgggattcaggttgtatacaaagtagtagctgacgaaaaatatgtatatttttgtgaaatgtatcaagccctaaagttcattttagagaaaggcccagaaaaacgtatctgtgtttaaaaacaaaggacaggtcattcgtcaatttgaatcatttttacttttgccactacaaactttttaattgggccatatccatcatccaactgg

SEQ ID NO: 5663 - DNA, 404 bp, Homo sapiens
  I.5663 (H05146)
  misc_feature (367)..(367): n is a, c, g, or t
  misc_feature (379)..(379): n is a, c, g, or t
tttttttttctatatttgtacactttatttaaaaacaaataatacacttagagccaccaaagatggatatcttaattagcttatccataccctgaatttacataagaaacttcttgcaccacaaaaattagcatttggattaatttacattaattgatgtaactaaaatttaaaatacctgaagatcaaacaatctggcccagggctcaccagctggaggactgggtgtggagagaaagggttatttaggaatctgaattgatgacaccctgtggtcagctctagtcaactgaacttgagaaaacataaagtaaccagcagatttcaatcttaaaaagaagtggttcctcctaaaaaaggtcttagntccatagagttngggattagggtaggggggtacccat

SEQ ID NO: 5664 - DNA, 443 bp, Homo sapiens
  I.5664 (H05055)
  misc_feature (395)..(395): n is a, c, g, or t
  misc_feature (421)..(421): n is a, c, g, or t
  misc_feature (436)..(436): n is a, c, g, or t
tttttttttcaagctttggcatttttattcaatgaaatatgcagcaataaaaagaaccaactactgacatgcagcaatatgaataaatctcgaaaacattatattgagcaaaggaagctagtcataaaattgtacataatttactacagtattttagttttatgaagttctaaaacagacaaagccaatcaatgatggagaaaaatttgaacagtagttttcttggggtgtggtcaggattggtgattgagaagggacacaaaagattttgctagggtgatagtaatgttgtataatgatgggctttgagttataaaagtatatacatttttcagaactaagtaaaatgtgtgtgtaaattaattgtgtattaattgtacatcaaaagggaaaanttgaaccttgaaccccattaatggcngagcctgtgggaagntccggag

SEQ ID NO: 5665 - DNA, 406 bp, Homo sapiens
  I.5665 (H05037)
  misc_feature (26)..(26): n is a, c, g, or t
  misc_feature (70)..(70): n is a, c, g, or t
  misc_feature (73)..(73): n is a, c, g, or t
  misc_feature (98)..(98): n is a, c, g, or t
  misc_feature (232)..(232): n is a, c, g, or t
  misc_feature (272)..(272): n is a, c, g, or t
tttttttttttttttttttttttttnatggatgaaccacagtttattaatttattcattatgtttatccnggnttcaatgttttctctcctactacanatacaacatcacaataaatcttacatacattccaatgcacagatgtttttattatagtaaaattcccaaactgagaccactggccatgaaaaatgaacattttaaatgcctgagatctttccaaaaagattggnaagaaagcatccatttccccacaccatcatcagaactggntgttatcagtcattttagtttttgctaggctgattaatggaaatgcctccttgggttactaatgagtttgatcaccttttgttagccttgctggccatttacatttcttcttctggtaaactgtccacgtccat

SEQ ID NO: 5666 - DNA, 485 bp, Homo sapiens
  I.5666 (H04977)
  misc_feature (279)..(279): n is a, c, g, or t
  misc_feature (425)..(425): n is a, c, g, or t
  misc_feature (461)..(461): n is a, c, g, or t
  misc_feature (480)..(480): n is a, c, g, or t
tttttttttttttttgagacaaagtctcgctctgtcgcccaggctggagtgcagtggtgcgatctcagctcactgcaacctctgcctcccgaagttcaagcgatttttctgcctcagcttcctgagtagctggggctacaggcatgcaccaccatgcctggctaatttttgtatttttagtagagacagggtttcgccatgttggccaggctggtctcgaactcctgacctcagttgatccacccacctcggcctcccaaaatgttgggatttcgggtntgagccactgcgttccagcctggggttgttagttttatcatcaccccagcacagtacgagggaggctaacacgaaatcctgtctctggggcccagggagctgcagggaccaggggtgagtaccagtgatgctctgaaatttaagantgggcaccctggggttggcagaggcaaaagctggtnggggacagggattgcttgnttttg

SEQ ID NO: 5667 - DNA, 503 bp, Homo sapiens
  I.5667 (H04976)
  misc_feature (380)..(380): n is a, c, g, or t
  misc_feature (451)..(451): n is a, c, g, or t
  misc_feature (458)..(458): n is a, c, g, or t
cctgcagtgtgccctgtgagcacacacactggcgcttgttcagacacaattgggggtaaactccatgccacttcgtttacttcctcctcttgttccataaccatgtacccctcatgggcctcggcatcggtggataccaggtcatgctgttacatagctacaagaatttgaaaatgagttaaacttttctctgtgtttcattataagactgataagttcttattgtttttaacatgtaaacaccagtgacagtcaggagtcccttttcccttcctctccaaccgtgctctcttctgagcctctgccagcccatctgccttcgcacatgtatgtactgaggattaacacagatggcgggcgtgggcttaggcatgtgcctntttccaccaagcagtggggtgttcaaccgccgagtggcacatcgggaaggttaccccagccattttaattnggccacngggggttcccggcagttgggccacctcggggacgtttgtttttaa

SEQ ID NO: 5668 - DNA, 445 bp, Homo sapiens
  I.5668 (H04931)
  misc_feature (66)..(66): n is a, c, g, or t
  misc_feature (341)..(341): n is a, c, g, or t
  misc_feature (385)..(385): n is a, c, g, or t
  misc_feature (411)..(411): n is a, c, g, or t
gcacatgctgtgatcccagctacttgggaggctgaggcgggagagtcgcttgagcctgggaggcgnaggttgcagtgagccgagatcgagccattgactccagcctgggcagcaagagcgaaactccatctcaaaaaaaaaagaaatttttttaatgctattttgctataggaaataaaaaatgagtttgggggatggatgtgaaaggtataggtttgtttaagataactccagcagcagggtggaaaataaatggaatgaattactagtggcaaaaactctcacctcacagtttctgtcaaaaagtcatgaatatctgaatttaggacaaagagaaggantaaggttgaaagagggaaaccttaggatttttaggaggtacatncttcgtttgggtgggtgtttaaagtnatttggacatgttaaacccttacccacttttatt

SEQ ID NO: 5669 - DNA, 422 bp, Homo sapiens
  I.5669 (H04826)
  misc_feature (193)..(193): n is a, c, g, or t
  misc_feature (216)..(216): n is a, c, g, or t
  misc_feature (401)..(401): n is a, c, g, or t
ttttttttaattttattgaaaaaaatggttttttttaaaccagcagtttgctcttacagacttctttgttgatgattattgtgatgtgacagcagaggaaaaacacagtctgagaggttctccctaagcaagaaataaaacttgaattttatttagcagaaaagttgataattatatttctgctctatttagncagactctgttccaaaattatgnactgaattaggatgtgtcccaaagtgtatttctactttctcatttctactgacagaatgttgattttttttttccttaacaggctattaacacctagaggtaatgaccattatttccgcaacctggtcttatgggctaaagtgtgggcctatggcaattttaaaattctaggcccaattttattntaaatggcggggttttggaaa

SEQ ID NO: 5670 - DNA, 374 bp, Homo sapiens
  I.5670 (H02385)
  misc_feature (338)..(338): n is a, c, g, or t
  misc_feature (365)..(365): n is a, c, g, or t
agaagaccaaccaatttcatatttatttaagattgattccatactccgttttcaaggagaatccctgcagtctccttaaaggtagaacaaatactttctatttttttttcaccattgtgggattggactttaagaggtgactctaaaaaaacagagaacaaatatgtctcagttgtattaagcacggacccatattatcatattcacttaaaaaaatgatttcctgtgcaccttttgggcaacttctcttttcaatgtaggggaaaaacttagtcaccctgaaaaacccacaaaataaataaaacttgtaggatgtggggcagaaggtttggggggtnggacattgtatgtgttttaaatttaanccctgtatc

SEQ ID NO: 5671 - DNA, 352 bp, Homo sapiens
  I.5671 (H02282)
  misc_feature (196)..(196): n is a, c, g, or t
  misc_feature (222)..(222): n is a, c, g, or t
  misc_feature (226)..(226): n is a, c, g, or t
  misc_feature (228)..(228): n is a, c, g, or t
  misc_feature (284)..(284): n is a, c, g, or t
  misc_feature (324)..(324): n is a, c, g, or t
ctttttatttaacataaggccaaagaagctatcaggcgttgctgaatactgtccactaactgtacaaaatattgactgcatgcctcgcaaacaccaaaatatccgctggaatgccatagaaataaataacttctgctataaacacatgaaaacatatcaaactgttatctctttaaacatattgtaaataaaaaanttaccagtacttctacacaataaatnttangnaaccattgacataggttgaaatgcactcatataaattaacaactttaattacattnggccaaacagacattgggttaaagaactggcatgtagggnatggccaaaaccaaaaccaaaaccaaat

SEQ ID NO: 5672 - DNA, 405 bp, Homo sapiens
  I.5672 (H00124)
  misc_feature (337)..(337): n is a, c, g, or t
ggagtgttctgttttcattactgcaccccttcccctaaagacaacgggactgccctcctccacagcgccttacctcaaacaggggaccgattcttgttcttctccaggttggacacctaatttgcacatcaggactgccatggaccatggtgcaatgaaggtgaagactggagcactcatcacccacgggtctcactttgttgcccaggctggagtatagtgccctgatcacagcttgctgcaacctcaagctcccatgctcaagcaagcttcctgcctcaacttcccaagtagctgagaccacaggcatgctccatgacacctggaactcctgaantcaaggcgatcctcctgcctcagcctttccaaagtgctgggggttacagggatgaggcccttgaaccc

SEQ ID NO: 5673 - DNA, 425 bp, Homo sapiens
  I.5673 (H00107)
  misc_feature (332)..(332): n is a, c, g, or t
  misc_feature (358)..(358): n is a, c, g, or t
  misc_feature (387)..(387): n is a, c, g, or t
aaaaaaggaaatagacattataaatactgggaaaaaaagaaccagaaagacctttataggtgatatgcttgaatacctagaaaactcaagatatgctaccaaaaaaaatctttcagacacctaaaagaatttagtaaggtggctaaatataagatagcatacaaagattagcagcttttctttatgtcttcgtaaattagaaatcaaagttagggggaaaatgtcatttatctttgtaccacacatttaaatatacagtaataaatatcacaagaaaggaacagaatctatgtgaaggaaaattgtgaaatttttattaaagggtagggatntaaaggcactagggtggatagttacnggagataccctgttttgccaaataagggnaattttatggatccaaattaccccgttctttaaccttg

SEQ ID NO: 5674 - DNA, 485 bp, Homo sapiens
  I.5674 (R80374)
  misc_feature (379)..(379): n is a, c, g, or t
  misc_feature (394)..(394): n is a, c, g, or t
  misc_feature (421)..(421): n is a, c, g, or t
  misc_feature (467)..(467): n is a, c, g, or t
ctcaaagctggatcaaactgtgtgtttaagaacagctccaaaagggactcttctgttgacaggggatatttttctttagatgtaagaaatattctgagcctcgagcctaggaaggaggccaacagcagctctccagccgggatcccgcccctttcgaaagccatcaccactacaggaaccctgggtaaagtagtagccttctttttttctctctctagtttttgaaactgtaatgacagaagacatttcagggttgttgtggggattttttccccccagttctaaaatggtcattgatagtgtcgatcttacctaactctcctcctatttaaaatttctgtgggatctaccagataacctaaagtggggcatgggttanttattatgggctccntttaatgcccaaataggcattcagttntaaaaccttaaaaacaaaaacaaaaaccaaaaacaaaattcagggnggggaccagccacctctt

SEQ ID NO: 5675 - DNA, 423 bp, Homo sapiens
  I.5675 (R80259)
  misc_feature (279)..(279): n is a, c, g, or t
  misc_feature (372)..(372): n is a, c, g, or t
  misc_feature (382)..(382): n is a, c, g, or t
ttcttaattcaggaagagttttctttttagaaaaaaatactttaatcaggctttcaacaacattatccatgggtcagtggctgatactattattcctatttttcaggaggtggctggtctctccttgatttttgtttttgtttttgtttttgttttaaggttttagactgattgctatttgggcattaaaggagccataataaataatccatgcccactttaggttatctggtagatccacagaaattttaaatagggagggagagttagggtaaggancgacactatcaatgaccattttaggaactggggggggaaaaaatccccacaacaaccctggaaatgtcttctgtcattacagtttcaaaaacnaggggggggnaaaaaaggagggccactacttttacccgggggtcccctagt

SEQ ID NO: 5676 - DNA, 366 bp, Homo sapiens
  I.5676 (R79510)
gtgagttcactctctcttcttgagctgggacgtcgttttctcctgcccttggacattggtgctcctggttctaggaccttcatattcagactgggacttacactgttggccccatggtttccatcaaagtctcctcagcctttgggcttagactgagctacgccactggctttcctgggggctccagcttggagaaggcaggtcatgggacttctcagcctcccctaattatggggagctaatccctcgtaataaatctcttgctatctctctattgtttctgtttttctaggagaactctggactaaatacaggggatcccaaattggcttcagtcttgtggggcacctttcattttcaataaac

SEQ ID NO: 5677 - DNA, 388 bp, Homo sapiens
  I.5677 (R79239)
  misc_feature (350)..(350): n is a, c, g, or t
  misc_feature (377)..(377): n is a, c, g, or t
aaagctcaagagctaaagtcagagagtggagcccagattcagagactggccttgctgactctgaagaccctgtttggtccccaagacttcattccgtcaccttcacttctatcccagatcctctcatttgtttccacgtatcttctgtgattttagtttgcgcaactaaacctattctgagtttttatttaaaaagataccctctctgatttaagaagaggcataggagacacaatcctattgggtgcctactgggtcacagtttcacaattcaatactggcaacggcatcgtaattcaaaggcattgctgggcttggggtaattcactttcattaacaggtccccgccnggcataaaatacaagggcaatgggggnattaaaccaat

SEQ ID NO: 5678 - DNA, 425 bp, Homo sapiens
  I.5678 (R78659)
  misc_feature (362)..(362): n is a, c, g, or t
  misc_feature (380)..(380): n is a, c, g, or t
  misc_feature (408)..(408): n is a, c, g, or t
ctctcaattggtttaataccacgatagaaaagataaatattttaggatggaatcttaaatatgtctgtccttttgtttcatatagttgaaatcaattcagtattgtttctacattaggtgtttcaaaaacagtcacctttgcaacagaagagctcttttgttgaaaatgattcacaatatatttcagttggaatgtcaggtggtatttctcttaccaacacctcacagaatctatgccaagctgctctaccaccaatgcaagtatttttttaaagctactaaaataaactttcttcaccagccaactctaatttggagacagtgtggcattggtgaaggacctcgtcagaataaagtttgantgtctactgaactaaggnggaattttgttcgtttggggggagagantaggatgggcttcagtt

SEQ ID NO: 5679 - DNA, 220 bp, Homo sapiens
  I.5679 (R78622)
  misc_feature (121)..(121): n is a, c, g, or t
  misc_feature (170)..(170): n is a, c, g, or t
  misc_feature (199)..(199): n is a, c, g, or t
atatctcacaatctaacttgaaatatttataaacactgcataaatgaatacaagggcactgtatgaattttagaaaggggactcttttatacaaataaatttaggtttaattctgccaganaaaattaattttagatatgtccaacacacaatcaaaagtattctgaaangttgtatatagatcaaatcatagtttaanggccattcacaaaataactgt

SEQ ID NO: 5680 - DNA, 313 bp, Homo sapiens
  I.5680 (R77616)
  misc_feature (40)..(40): n is a, c, g, or t
  misc_feature (123)..(123): n is a, c, g, or t
gttgcgcagataaaattcaaacttgaggtaaacagaagangaggaggaggaggaggaggaggggaggggggaggaaggggggactgtttccatttcgagatcccacctcttccctccgcgcanccaacatcccgaacctagagacaactcttgcctttctcccacgtcccccacctttgctgtcaacaagaaataaaggcggggcgggggggggggttggaggtagggggtggcgtgcttattaattagaaaggacgcggtgtctcggttctccactggaatcagcaactccctgggaactcgggcctctgcc

SEQ ID NO: 5681 - DNA, 367 bp, Homo sapiens
  I.5681 (R77615)
  misc_feature (267)..(267): n is a, c, g, or t
  misc_feature (302)..(302): n is a, c, g, or t
tgccacagacacagggaaaaaaaaaaaaaagcaaaaacagcagacgcagctctacctttgcgctggctttaaagcttttaagctccccacgtcatcctaccccatgcaacagacttaccgaatagcaatgcccaccccacacacctgctaggtaactcgccttctggaaacctgcgcctggggtggggttgaagagacactgtctggtatcctaaagtcagagggcgtgaggagaccagcgcccttcgccccacccaggcgcgctgnaccctccggtccccgtctctagagtgcaccaaggnatcctggcgttccctgccggaggaaaagaggggacgggggccagacgaggttttccaggggagtt

SEQ ID NO: 5682 - DNA, 389 bp, Homo sapiens
  I.5682 (R76271)
  misc_feature (167)..(167): n is a, c, g, or t
  misc_feature (289)..(289): n is a, c, g, or t
  misc_feature (374)..(374): n is a, c, g, or t
atcaggtgatcaatttttacaaaactctgctgggattttgattggaattgagttgaatcaatagatcaatttggggaggtttggcattttacagtatttagtcatctaatctgtgaatacaacacacccctttattagggtttccttcatttgtcttagtgttttgntggagatttttgtataaagtctttcacagcttatttaagacttattcctaggtcttcaagatttgcatgtggttgtgaatgggtattaaaatttttttacccttataattggtttgttaccngtatataggagctaaatttggatttttggtaccatggaaccttgtatcccatgaccctggccaaaaccggccttggttaaattcnaggcggtttatatgg

SEQ ID NO: 5683 - DNA, 317 bp, Homo sapiens
  I.5683 (R73713)
  misc_feature (25)..(25): n is a, c, g, or t
  misc_feature (28)..(28): n is a, c, g, or t
tggtatccccagaggcagccttcgnttnatccaagctttctatttaggagattcaagccatctccctgactaccaattaatgtgtttgttaatgctcggcttacagagttgcataaatgtcagtgatctgttccaatcctgtttttttctgtaagttaattttaatgcataattttgcagaacacaaggttttccaaagcatgtatatagtattacagtagaaatgtatatattttggggggggtcttctatttatcaggcatttttaagtaatggggaatttaggatgtggaaggaaaaccagggtaaaaaaattt

SEQ ID NO: 5684 - DNA, 490 bp, Homo sapiens
  I.5684 (R73637)
  misc_feature (131)..(131): n is a, c, g, or t
  misc_feature (169)..(169): n is a, c, g, or t
  misc_feature (215)..(215): n is a, c, g, or t
  misc_feature (412)..(412): n is a, c, g, or t
  misc_feature (419)..(419): n is a, c, g, or t
  misc_feature (426)..(426): n is a, c, g, or t
  misc_feature (436)..(436): n is a, c, g, or t
  misc_feature (463)..(463): n is a, c, g, or t
  misc_feature (473)..(473): n is a, c, g, or t
  misc_feature (487)..(487): n is a, c, g, or t
attcataattctacatggctcaggaggcctcaggacttacaatcatggcagaaggcaaaggagaagcaagcaccttcttcacaggtgtcaggagacggcacgtgcacaggggaaactgccacttttaagancatcagatcttgtgagaactccctcactatcatgagancaggatgggagaactgcccccatgatccaatcacctcccaccaggnccctccctcaacacgtgggaagtataattcaagatgagatttgggtgggacacagagccaaaccttatcacataccaaacatgctccggccttgggatctctgaactggctgtccgttttcccaaatcacattctctttaataaatatctacgtatctagttcccacattctccttcagatctttaattcaaatagnacttttncctgtgnaattttcccngaccagcaacttacttgggcaattccnaattcttctngcaacatgtttctntcc

SEQ ID NO: 5685 - DNA, 490 bp, Homo sapiens
  I.5685 (R73518)
  misc_feature (4)..(4): n is a, c, g, or t
  misc_feature (16)..(16): n is a, c, g, or t
  misc_feature (17)..(17): n is a, c, g, or t
  misc_feature (340)..(340): n is a, c, g, or t
  misc_feature (369)..(369): n is a, c, g, or t
  misc_feature (412)..(412): n is a, c, g, or t
  misc_feature (444)..(444): n is a, c, g, or t
  misc_feature (466)..(466): n is a, c, g, or t
  misc_feature (477)..(477): n is a, c, g, or t
  misc_feature (482)..(482): n is a, c, g, or t
  misc_feature (487)..(487): n is a, c, g, or t
tcanagtaaatggccnncaattttttaacgaaatctcactactgcaaatgcattgttgtcctagctaatgaatgcatagagtattgcctgcaaaataataattgagattctatttttaagaagcttagaacagtacatggtgcatagcaaagactctgtgtatgtgaagccagattttaaaatatggtaacaagtgtctgaaaatatgtggctcaatttgtctcccggttacttttccctctccccctttaaaatgtagaggaaggagaagaagagataagaggtttgtgagtgaagacaagggccctttaaggcctggggaagactaacgccatagggntctccctctgccttaaaaggcacagggantcttagtgggggaaaaagaagtgggtgataaatagccagtccntgtgcccgggatttccaagtcagtgcgtgccnggggtcccactgcgggtcacgngcactctgggnctctntttgnaat

SEQ ID NO: 5686 - DNA, 198 bp, Homo sapiens
  I.5686 (R73517)
  misc_feature (136)..(136): n is a, c, g, or t
  misc_feature (147)..(147): n is a, c, g, or t
  misc_feature (158)..(158): n is a, c, g, or t
  misc_feature (170)..(170): n is a, c, g, or t
  misc_feature (175)..(175): n is a, c, g, or t
  misc_feature (180)..(180): n is a, c, g, or t
  misc_feature (185)..(185): n is a, c, g, or t
cttataggactgaacctaaaggcatgacatttccatacttgtcacaagcacacactgattctgcccttgtcacttctgtgctcactcttgtggctctatcctcctcctgcccttccgccttccactcctcccttgnacccatcctgnacatatctccnttaaaacacagnggtanatacnttgtntattaggggggac

SEQ ID NO: 5687 - DNA, 400 bp, Homo sapiens
  I.5687 (R71452)
  misc_feature (6)..(6): n is a, c, g, or t
  misc_feature (8)..(8): n is a, c, g, or t
  misc_feature (15)..(15): n is a, c, g, or t
  misc_feature (16)..(16): n is a, c, g, or t
  misc_feature (55)..(55): n is a, c, g, or t
  misc_feature (94)..(94): n is a, c, g, or t
  misc_feature (104)..(104): n is a, c, g, or t
  misc_feature (109)..(109): n is a, c, g, or t
  misc_feature (198)..(198): n is a, c, g, or t
  misc_feature (342)..(342): n is a, c, g, or t
  misc_feature (372)..(372): n is a, c, g, or t
cgcggntngccagtnncggccgaatcgaactcgctgctgaacggctccgagccantgatggtcggaaagcacaggatctcggcgcccatcagcngaggctgcgngcgtnctccgggtaccactggtcccagcagatgccgatgccgatccgcccgaaacgcgtatcccacaccctgaagccggtgtcgcccggcgtgnaaatagaacttctccgtatagcccggaccgtccggaatatgtgtcttgcggtagacgccgagcacgcgtccgtccgcgtccgccacggcgatgcgagttgtacgcggcattgcccggtcggcttcgaagaagccgatcggcagnacgatgccgagcttcgccggccagcgccgngagaccgggcgatcttgcgcgtttgcct

SEQ ID NO: 5688 - DNA, 468 bp, Homo sapiens
  I.5688 (R71377)
  misc_feature (6)..(6): n is a, c, g, or t
  misc_feature (8)..(8): n is a, c, g, or t
  misc_feature (34)..(34): n is a, c, g, or t
  misc_feature (84)..(84): n is a, c, g, or t
  misc_feature (88)..(88): n is a, c, g, or t
  misc_feature (99)..(99): n is a, c, g, or t
  misc_feature (104)..(104): n is a, c, g, or t
  misc_feature (157)..(157): n is a, c, g, or t
  misc_feature (166)..(166): n is a, c, g, or t
  misc_feature (401)..(401): n is a, c, g, or t
  misc_feature (421)..(421): n is a, c, g, or t
  misc_feature (431)..(431): n is a, c, g, or t
  misc_feature (440)..(440): n is a, c, g, or t
  misc_feature (464)..(464): n is a, c, g, or t
agtgantnaaacaacaattttatttctctctcangggtctggagtttggctggattcagctaggtagttcttgctgagggtcantcanggggttgtcancgganggtggctggtgacggaagcatctgaagacttaccaattgcagccgggcatggnggctcatgnctacaattccagcactttgggagactgaggtaggaggattacttgagcttaggagttcaagaccagcctgggcaacatagtgagaacccatttcgatttatttaaaaaaaaaaattaaaaccaaaaagaaatgaaggcttactacttgcatatttgggagcctggggctggggaaggctcacacatttggtcctcttctctctctctgtggttcttccacatggtctttccagtnttgtgggcttcagggtaggnggttttcttncctggcagntcagggttccaaaggcactttttntgag

SEQ ID NO: 5689 - DNA, 421 bp, Homo sapiens
  I.5689 (R71104)
  misc_feature (5)..(5): n is a, c, g, or t
  misc_feature (55)..(55): n is a, c, g, or t
  misc_feature (105)..(105): n is a, c, g, or t
  misc_feature (144)..(144): n is a, c, g, or t
  misc_feature (155)..(155): n is a, c, g, or t
  misc_feature (157)..(157): n is a, c, g, or t
  misc_feature (178)..(178): n is a, c, g, or t
  misc_feature (392)..(392): n is a, c, g, or t
  misc_feature (410)..(410): n is a, c, g, or t
gcgantgccgtacttctgcctcgaccagaacgtgcgccatctcgaactcgcgcancgtgtcgaaggcaacggcagatcgcccggttcgcggcgctggccgcgagnctcggcatcgtgctgccgatcggttcttcgagcgcgcgngcaatgccgtnancaactcgatcgccgtggcgancgcggacggacggtggctcggcgtctaccgcaagacacatattccggacggtccgggctatacggagaagttctatttcacgccgggcaacacccgctttcagggtgtgggatacgcgttttcgggcggatcggcattcggcatcttgcttgggaccagttgtaacccggagacggccgcgcagctttcgcgttgaattggggcccgagatccngttgtttttccgaccatnattcggtttcg

SEQ ID NO: 5690 - DNA, 360 bp, Homo sapiens
  I.5690 (R70326)
  misc_feature (11)..(11): n is a, c, g, or t
  misc_feature (14)..(14): n is a, c, g, or t
  misc_feature (15)..(15): n is a, c, g, or t
  misc_feature (175)..(175): n is a, c, g, or t
  misc_feature (229)..(229): n is a, c, g, or t
  misc_feature (273)..(273): n is a, c, g, or t
  misc_feature (308)..(308): n is a, c, g, or t
  misc_feature (341)..(341): n is a, c, g, or t
  misc_feature (346)..(346): n is a, c, g, or t
gtgcagtggcngannctcggctcactgtaacctccacctcctgggttcaagcaattctcctgcctcagcttcccaaatagctgggactacaggcgcacgcacaccctgctaattttttttttttttttttgtattttagtagagacagggtttcaccatgttgcccaggctggtntcgaactcctgagctcaggcaatccacctgcctcagcctcccaaagtggtaggnttacaggcatgaaccaccgtgcccggcctcaaacatttttaatnttagcagagggaaatttcctctggggtaatggganttattattaggcttttattgtctttatattttnccatnctttcaatttttgt

SEQ ID NO: 5691 - DNA, 397 bp, Homo sapiens
  I.5691 (R70325)
  misc_feature (335)..(335): n is a, c, g, or t
  misc_feature (348)..(348): n is a, c, g, or t
tttactttccttcacagaagtgttttcctgctttgaagtatatttgacttaccatgcaagcaaatatttttcactgtgtggtatccttattttggaatgaccatgaaaaagataatcatatgtttaaatttgaagtgtaatgtttttctaagataaaataagatcttaaagtatttaataatgttctttttcacagtagtgttatgtgcaaactattgaaacaagtatgtactgaatcaatttgatttataagtatatgccaattatatgattattttcatttggtaggcttgagtttgaagaaacagaagaacctgattttactgcattatgtncagaaattaaagntaccagatccatgtgcagagagagagcttggttaacttggggagaaagt

SEQ ID NO: 5692 - DNA, 388 bp, Homo sapiens
  I.5692 (R70159)
  misc_feature (137)..(137): n is a, c, g, or t
  misc_feature (220)..(220): n is a, c, g, or t
  misc_feature (230)..(230): n is a, c, g, or t
  misc_feature (273)..(273): n is a, c, g, or t
  misc_feature (280)..(280): n is a, c, g, or t
  misc_feature (294)..(294): n is a, c, g, or t
  misc_feature (307)..(307): n is a, c, g, or t
  misc_feature (336)..(336): n is a, c, g, or t
  misc_feature (353)..(353): n is a, c, g, or t
  misc_feature (373)..(373): n is a, c, g, or t
  misc_feature (380)..(380): n is a, c, g, or t
agattagcttagtcaagccccagaaccgtgaaagacaatagacttgctatggaggtcgccacatgcctcttttttctccctttgtgaatgggattatttataatggttaccccatacctactccactatgtatattnggtatgagggagagataatttgtctcactagctgacagatttttcagacctcaaggaatgccacgtgagctgtactcacaggnccacacacangtatctttatccacacgtgacctgattttcactgataaaagtncctgggnccttgagcctgagnccaatgtccttanttaaatgaggaattttcagaagggtcttngggaagggggttaagtntaattttgccattgttgggnagggatnttaaatta

SEQ ID NO: 5693 - DNA, 335 bp, Homo sapiens
  I.5693 (R68015)
  misc_feature (12)..(12): n is a, c, g, or t
  misc_feature (251)..(251): n is a, c, g, or t
  misc_feature (267)..(267): n is a, c, g, or t
  misc_feature (279)..(279): n is a, c, g, or t
  misc_feature (302)..(302): n is a, c, g, or t
gaacaaacagtnatttactgtggtatcctttatttaaaaattgtgagctgactacagttgtagtgttctcatttaccattctgatggcataataaaccaagagaacattaacacaattccaagaaggcattaacctgtaacacacatatacgccacacatgcacacacacaacatacacgcacacaaaggttatattctgaacacaaaagtgataggaaaaaagctttgaatgcgctaaatcaaataaaanccctttattataatanactgtggggcantactgtgggctattcatggaaanatattggtaactatttttaaaaggccaaagggg

SEQ ID NO: 5694 - DNA, 425 bp, Homo sapiens
  I.5694 (R68014)
  misc_feature (338)..(338): n is a, c, g, or t
  misc_feature (353)..(353): n is a, c, g, or t
  misc_feature (399)..(399): n is a, c, g, or t
tccactgtttgtaaggtgcaacaatttaatatttttaagggactttttaagagttccttaagaaccaatttaaaattacttcagtgcaatcctacacagtatcaacattagaattttgatattagtcttatgttatcttccattctatttttatctgctttttgctgctagtttcaaactgccagtatttttccttttgcttttaaaatagttacaatatttttcatggataggccacagtattgccacagtttattataataaaggggtttttatttggatttaggcggcattcaaaggcttttttctatcacttttgtggttcaggaatataaccnttgtgtggcgtgtanggttgtgtgtgtggcagtgtgggccgtatagggtggttacagggtnaaggccctccgggggattgtggttaa

SEQ ID NO: 5695 - DNA, 428 bp, Homo sapiens
  I.5695 (R67161)
  misc_feature (319)..(319): n is a, c, g, or t
  misc_feature (327)..(327): n is a, c, g, or t
  misc_feature (377)..(377): n is a, c, g, or t
gactctaagaccaacaagataaaaaggcagccttgcatgtcacttggaccacagctgtctggccatgcagcatgccttcactgctgctgaagaaaagcagctgcttgttgagaatctcaaattctcagatcctaattgcctggccctgactctaagctgaaacctgctactgtctgccttgagctgttttagcctcaacacgagctatgctgaactgaaagcaggcacaggctcaatgaccagggactcagacgttggggccgttgggagattaaggaccccctccgtgggagcgctaaactatgaaaacgtcctgggnacctgggnttgaaaagggcttatttctcttaatggggaccattttaaggttcaagctngttgatagggtcttttgtcttcttaattacagagggttaatttgcatttcc

SEQ ID NO: 5696 - DNA, 403 bp, Homo sapiens
  I.5696 (R64300)
  misc_feature (200)..(200): n is a, c, g, or t
  misc_feature (206)..(206): n is a, c, g, or t
  misc_feature (281)..(281): n is a, c, g, or t
  misc_feature (297)..(297): n is a, c, g, or t
  misc_feature (362)..(362): n is a, c, g, or t
  misc_feature (391)..(391): n is a, c, g, or t
aagaacagtgaaaggactcgtctgaagttattccgacacggcccctagttgctagggcctatataaaaaagcagctcaaatggaaagtgtcacccaggacagcattgggaggaaatgacaccaggagaccttgtttcagtgagaaatcccaggcacagggctgatccagaagctggtctgggttctgtttccctgcgcantgggangggagacagaagcactctgggcctccgttgttgggcaaagtgagtcacactggacaggagagtctgggaagaatnggcaggcacagctttncaagcgcatcttgggaggtggccttggagagaaagtaagtggtcttttgccacatttctactttnaaaattaaaacgcatcgccccaagctttnttcaagccaggg

SEQ ID NO: 5697 - DNA, 455 bp, Homo sapiens
  I.5697 (R64299)
  misc_feature (325)..(325): n is a, c, g, or t
  misc_feature (350)..(350): n is a, c, g, or t
  misc_feature (386)..(386): n is a, c, g, or t
  misc_feature (399)..(399): n is a, c, g, or t
  misc_feature (444)..(444): n is a, c, g, or t
  misc_feature (452)..(452): n is a, c, g, or t
gcctccacttctagacgggagaagtacccaggaattttaggggccacctccagatagttgccaaacccctcccacccacacttcactgtcactttggagatggagtgaacgtgccaccttcctgcttgctgtctccataaaggctgtgcacaccctgcttgagaagcttgggcgatgcgttttattttcaagtagaatgtgggcaaagaccacttactttctctccagccacctccagatgcgcttgcaagctgtgcctgccattcttccagactctcctgtccagtgtgactcacttttgccaacaacgggaggcccagagtgnttctgttttccttcccagcttgcgnagggggaaacaggaacccagaccagttttttgggantcagcctgttgcngggggggtttttttaattgaaaacaaggttttccggggggttcanttttcctnccc

SEQ ID NO: 5698 - DNA, 472 bp, Homo sapiens
  I.5698 (R63757)
  misc_feature (392)..(392): n is a, c, g, or t
  misc_feature (405)..(405): n is a, c, g, or t
  misc_feature (424)..(424): n is a, c, g, or t
  misc_feature (442)..(442): n is a, c, g, or t
  misc_feature (454)..(454): n is a, c, g, or t
  misc_feature (464)..(464): n is a, c, g, or t
gcactagtggctgactgtgacatatctttccaatagttaaccccagactccaaatcttaagaatatgggcttttcttccactatcattcacattctgcagttactggtagtattttacagtattttcagatgtaattttactaatttctaaaaatagttcatatctttaaaaatcatgggaaaatcatgactaataaattcaccaactttaaaatatattgttcaaaagtgtttttccaatgactctgtaaattggtaagatctggccacatttcatgttattgtctaaaaataagctaactatgagacaatgggtctaaatcattctccaaaatattggatggatgttcttcactttcaaactgggctaaactgattaatttttactatcntatggccccaggntggagggagggttatattngtaatgtcccggggattnttttacccttantttaaaattncattaatt

SEQ ID NO: 5699 - DNA, 435 bp, Homo sapiens
  I.5699 (R63710)
  misc_feature (170)..(170): n is a, c, g, or t
  misc_feature (406)..(406): n is a, c, g, or t
  misc_feature (414)..(414): n is a, c, g, or t
gtaccataatattttaatagtagtaattgcgctagttatccaaagacaaccttctgcatcagagagcctaaaaggatgccagtgcagtttcttcaagtttgtattatgacccaggtatgaaaaacttaggttaaacatccagttatcacccagctaaggccacctggcanaaactaaggttatggatataacctaaatcccataccttgatcatatatcagagaaatcagcttttttgatcaacagtcactattattaatatgttattccatattgtccttttattgaattttaaattatagtaaatattcccggacattacaatataacctcctcagcctgaggcattaaggataggtaaaattattcagtttaggccagtttgaaagtgaaggacatcatcatnttttgggngatggtttaggcccttgtctc

SEQ ID NO: 5700 - DNA, 450 bp, Homo sapiens
  I.5700 (R62926)
  misc_feature (322)..(322): n is a, c, g, or t
  misc_feature (357)..(357): n is a, c, g, or t
  misc_feature (398)..(398): n is a, c, g, or t
  misc_feature (420)..(420): n is a, c, g, or t
  misc_feature (436)..(436): n is a, c, g, or t
gtaggcagccgcggctaccctctgcaggcccggcccgcacaacagaggctgtatgcgagaggaatggaaatgagcctcaggccctgccgaagagccccatccccttccccgcgcgggctgaggaatgctggccagccggaaaggaaccctcgctgggaacgccgctctcgcgcctctgaaaccccattgagaagaaccctttgatgcaattaaagcgcatttcattgcaggcctggggaggagggaacgaccggcaagcttttttctgtctcggacgtgtgtatgcacctttgtggggccgggttacttaggagaccagggngggaactttgagctccctcttttcgcagacgtttntgttaacattcaagaaaaagcgttaccccttaaacagattnggttttcaccaggggttggaantcaattttggacaagntccaggtttacctt

SEQ ID NO: 5701 - DNA, 448 bp, Homo sapiens
  I.5701 (R62925)
  misc_feature (378)..(378): n is a, c, g, or t
  misc_feature (395)..(395): n is a, c, g, or t
  misc_feature (414)..(414): n is a, c, g, or t
  misc_feature (436)..(436): n is a, c, g, or t
  misc_feature (442)..(442): n is a, c, g, or t
ttttttttttttttagaggtcccaataggatctttttgtttaccggagttccagacccacatatcttccacctgtgcaggtagataaagtgtccacctccaacttagaaagaattccacaagcacccagaacttcatcacattcgttctccggctttgtgatactcattttaacacacacacaaaaatactaagttcagagaggctatgtggattttctgaggtcacacagttgtctcaatgggaaaaagcagggaaatgttataaaataatacgagtatcaaaataggctgtcccatcgtcgtccttcaacacttgcaggttacatcattttgcaggtctgggctgtggacattcacttctgggatatggcggacanggcccaccccaccattnaggaaatggggaattgtgnggcgttaacctcaggaaacaanttcctnctggca

SEQ ID NO: 5702 - DNA, 365 bp, Homo sapiens
  I.5702 (R62659)
gttggggctgtcctggagaatctaaggtatctagtcatcatatatatgaaattcaacttttccattgtttgataaatgttcctgatgactcatgtgtctttagcactagtttatctgtcaaatggtcactggtaagagaaagagcgctcgctgtgaagggatgggattcctgaatggggatctggatacacagctgggtttgtgtgttcatgcatgtgcacaagcacctgcagctcagaatctacaaccaacagctcttagagtcagtgtgggccttgggtatactttgttttgtatcctttagggggtgtgtgtctccaactttaacgtacaagtcaatcaccggggggtcttcttaaaatgca

SEQ ID NO: 5703 - DNA, 427 bp, Homo sapiens
  I.5703 (R62610)
  misc_feature (8)..(8): n is a, c, g, or t
  misc_feature (12)..(12): n is a, c, g, or t
  misc_feature (278)..(278): n is a, c, g, or t
  misc_feature (364)..(364): n is a, c, g, or t
  misc_feature (382)..(382): n is a, c, g, or t
  misc_feature (408)..(408): n is a, c, g, or t
  misc_feature (415)..(415): n is a, c, g, or t
acagattntttnttattacaaatgaagaaagctgagtcgtctctttccagagaagttcctttctgcttgtttgaaattaggttctctatatttttgggtcttggggaccaagtccctgtggttagcgcttcctttcttagctaatctggaggcatgtttctcagacggcaattttgcagtactagagatttgccaaagtgtgagcctctggccagcagcacagatgtcacctgagtaaggcgctaattaggaaatataaaatctcaggaccccacccngggaattgggaatctgcattttaaggaagatccccagggtgattgacttgtacgttaaagttgggagacacacacccctaaagggntacaaaacaagtataccnagggccacactgactcttagggcctnttgggtntagggttcttga

SEQ ID NO: 5704 - DNA, 407 bp, Homo sapiens
  I.5704 (R62577)
  misc_feature (386)..(386): n is a, c, g, or t
  misc_feature (402)..(402): n is a, c, g, or t
acaaaattttatttttcaaggttgaacaatgattcattgtaggctttcagatgaaacaattagcagtcttgaagtacacattgaatacaaattaatttgatttcagtaggcacatttcttggaacaaactgaagagtacttaaaagatcccattgaatgcatgtggcattattcctagtttacggatactgtttgaactaaatgaatcttgggagagggcagttagtaattaatgcatttagaaactgataggcgctaaaatattaaaacttatggcattccaatgtttacatgtgtatgtgtgtgtgcacatgtgattctgctttgcctgttttactatcttaatgattatcccttcttactgtttcccctgaggggtcttatcntcacttctactggacnggtcc

SEQ ID NO: 5705 - DNA, 397 bp, Homo sapiens
  I.5705 (R62576)
  misc_feature (1)..(1): n is a, c, g, or t
  misc_feature (8)..(8): n is a, c, g, or t
  misc_feature (10)..(10): n is a, c, g, or t
  misc_feature (323)..(323): n is a, c, g, or t
  misc_feature (334)..(334): n is a, c, g, or t
  misc_feature (360)..(360): n is a, c, g, or t
  misc_feature (367)..(367): n is a, c, g, or t
  misc_feature (376)..(376): n is a, c, g, or t
  misc_feature (388)..(388): n is a, c, g, or t
nctggaancncaggcccgtcacagaagtgtggaggggggctcctgactagacaatttccctagcccttgtgatttgaagcatgaaagttctggcaggttatgagcagcactagggataaagtatggttttattttggtgtaatttaggtttttcaacaaagcccttgtctaaaataaaaggcattattggaaatatttgaaaactagaaaatgatggataaaagggctgataagaaaatttctgactgtcagtaggaagtgagataagatcctcagagggaaacagtaaggaaggggataatccattaaggataggtaaaacngggccaaagcnggattccaccatgttgcacacacacntaccacntgttaaacntttgggattgcnttaggtttt

SEQ ID NO: 5706 - DNA, 384 bp, Homo sapiens
  I.5706 (R62452)
  misc_feature (369)..(369): n is a, c, g, or t
  misc_feature (376)..(376): n is a, c, g, or t
tttttttttcccgtagacaatactggaaaaacagtaaaagcaaacaccagaaagaagtctacagaacacataaaacaatgtggatggttttgccttaattacctaacactctaaaaataaaaaggctcggtacagacagtggtgaacagagctgttttaaagtattttacatcaacacttgctaaaatgtaaaaagaagtaatttcaaaatattgctttaaatcagagcactgcctacttatgacaaatgtcattctgctactactgagacagaacacagagaaatgccatgggtccaaggctcacaggtccagtttctgggaggagtctcagtctactttaatacaaattcacaagggaaaggcactnggcagtncacttact

SEQ ID NO: 5707 - DNA, 450 bp, Homo sapiens
  I.5707 (R61889)
  misc_feature (293)..(293): n is a, c, g, or t
  misc_feature (415)..(415): n is a, c, g, or t
  misc_feature (430)..(430): n is a, c, g, or t
  misc_feature (436)..(436): n is a, c, g, or t
  misc_feature (441)..(441): n is a, c, g, or t
ttttttttttttagaaatacagaattaatttatttcagtatcttgccagcacccacagcatttatgatctttgaggccacagtagagcagcagcacagaagggtgactatagtcaataacaatttaattgcatatttaaaaataactaaaacaatataatcggattgtttgtgacacaaaggataaatgcttgaggggatgggtgccccagtctccatgatgtgctttttcacattgcatgtctgtatcaaaacatctcatgtaccccacaaatatatacacctactctgtgncccatggataattaaaaataaaaataaaaaatttttaatcagggaaacactggatccatggacctgttcctccccagttccctcccttcctgtgttcacaaaccgggggaccaaagggtctntggttccctttaccnggggtngggtnggcacgggc

SEQ ID NO: 5708 - DNA, 341 bp, Homo sapiens
  I.5708 (R61713)
  misc_feature (212)..(212): n is a, c, g, or t
  misc_feature (223)..(223): n is a, c, g, or t
  misc_feature (226)..(226): n is a, c, g, or t
  misc_feature (281)..(281): n is a, c, g, or t
  misc_feature (306)..(306): n is a, c, g, or t
tttttttttttttttttttaattttcttttttaaaaagacgccccctccagccccctcgccggtgaccttggccgcctcggatgctctgattccacgcggctcgctctaacttgcccccgcgccggccgggcccatggcgcgttcggaggacgggagcggctgcctcgtgtcgcggggccgttcgcagagtgaccccagcgtcctcaccgantcctcggccanctnctccgcggacgccggggagaacccagatgagatggaccaaacgcccgggggcgtncctgaatatctggtctcagggattngaactccccctgtgaggaggaacagcaaattgggc

SEQ ID NO: 5709 - DNA, 470 bp, Homo sapiens
  I.5709 (R61698)
  misc_feature (212)..(212): n is a, c, g, or t
  misc_feature (424)..(424): n is a, c, g, or t
  misc_feature (441)..(441): n is a, c, g, or t
  misc_feature (465)..(465): n is a, c, g, or t
ttttttttttcattttgaaaaatgtttatttaccttaccttttcttggccaagtcaattgctttggtcatctgcacaaagattctaaacactggctttcagcatttctttttccaagcaaatgaaatttatcataacaagacagagctctgattttagtctctgtggagtctgggctctgatgacctaggctagtcatcatctaagcctggnaatgactgtttgggacccccatggccagcttgaagctttccttcctcagccactctgggcccctgaagaggtcacatgcatctgtgggcagagactgtattataacaaagttgtttaccccaaagtcaggcaaacacatgtacctaggaactcatcccaattgtagggttgcttcaccagaacaggttacacggatgtgcaccagtttaacnggccttagggaaaattnacattccaaggaaaaaggcaaatnggttt

SEQ ID NO: 5710 - DNA, 482 bp, Homo sapiens
  I.5710 (R61697)
  misc_feature (403)..(403): n is a, c, g, or t
  misc_feature (421)..(421): n is a, c, g, or t
  misc_feature (465)..(465): n is a, c, g, or t
  misc_feature (470)..(470): n is a, c, g, or t
tttatgttgtgatgatgaatttctcccacttgtactttaggtggccaactgacgaactgtgttcacctgataaggagtcgtggctgcttggacaggctcaaaccaagagagcctttcgttttgtctcccctgtttttctgcctgcgttttctccacattagccactcaatttccagtaccatcctggcggatgacttcagcattagatggtcaggtgtatttttttattaataggcgcattcagtttggaaaagacagcttttcattaatgtcccacgtaaaggaatatggcctatacagtacgtacgctgctgctgggtcatatttgttcctgtgatcttattgtattttcaaagtttgggaagtatactcgtgtggctttgctgtttttttatggcttccngggatttgggggactccnggaggagacttgaggttaggagttctgcaagtgaggaagacacntacangggttgccagct

SEQ ID NO: 5711 - DNA, 328 bp, Homo sapiens
  I.5711 (R61183)
  misc_feature (233)..(233): n is a, c, g, or t
  misc_feature (249)..(249): n is a, c, g, or t
  misc_feature (254)..(254): n is a, c, g, or t
  misc_feature (290)..(290): n is a, c, g, or t
  misc_feature (303)..(303): n is a, c, g, or t
  misc_feature (321)..(321): n is a, c, g, or t
ttttttttttttttatttagtaaacccagtttatttacataatacatattttgtcatgcagcttactgaattgcagttagtgtaataacaaaaaagacaagcactgtcttgctatttgaaaatggcttaatatagaaagataattgtttcttaaatgagttaaccacaaccatataaattgctagacaatttaaaacagccataggtaattttaaaatgtaaaatctgtaggnaaaaagcttttatagntcacncattgggaaaattaaaaccagtcttttttaggaatnaaactgggtaggntaatcttactttaatctntaaaaac

SEQ ID NO: 5712 - DNA, 454 bp, Homo sapiens
  I.5712 (R61182)
  misc_feature (351)..(351): n is a, c, g, or t
  misc_feature (436)..(436): n is a, c, g, or t
  misc_feature (447)..(447): n is a, c, g, or t
agttgacatgagctgttttaaatactggtgtattttcagaacagtaaaattactgaatatcagaaaaaatgttaattgatgatgaagcttattcccaaaatgccttttgtgcatatgatacttggaaagtcactaatgtgcctcagttaatacatcagtaaaatgttgtgtttcttttccagtgtagtgtttttggaatataaattccccatgctagtatagtatctcagcaaagagaatttccccccagggaggctcagtaaaggaataccgtgtcttacccatcgttatgatgggaaggctgctttgaaaatgggctgttttaccttataaggttaaaattttgatccntatgttaagtgataggaaggttttgggtgcaacagtagtagggatatatttctcctaggaacatcccttattgggcttacctggntttattggccnttttaat

SEQ ID NO: 5713 - DNA, 418 bp, Homo sapiens
  I.5713 (R61176)
  misc_feature (355)..(355): n is a, c, g, or t
ctgtttctggcgtggcttccctgggagcgagttagggacacggaagctcacccgcttctgaatgggtccactcctggggatttccgcggccttccctgggagcgggttagggacacggaagctcacccccttctgaatgggtccactcctggggatttccgcggccttccctgggagcgggttagggacatggaagctcaccctcttctgaatgggtccactcctggggatttccacggcctttcctgggagcaggttagggacatggaagctcacgcccttctgaatgggtccactcccggggatttccacggccttccctgggatgatccactcctgggggattttccgcagntttccagatgacgtgcacgcacacttaaacacccagaatttaggggaggcattgatccagtga

SEQ ID NO: 5714 - DNA, 433 bp, Homo sapiens
  I.5714 (R61043)
  misc_feature (362)..(362): n is a, c, g, or t
  misc_feature (392)..(392): n is a, c, g, or t
  misc_feature (417)..(417): n is a, c, g, or t
tgaactatggattctgttttatggtggatacctaaggtttatataatagttgctggaaaacttaaagtagctggtgagcttcctgttatgtcactattaaagaatgatggctgatgtaactctgcccctgaaatctacaagggtcatgcccaaattaatacaggttaacctttgtagaggtatatatgttggcattatttattgacatttatgcttcaagcatgtcttattttatgtaattttaagaaatactctatttaacttgtgaaatatacctaaaagcatactagttaggctcttaggactctcacttaggggagggtaaaggaaacatcactgatgccaatatggaaggatctatnaaacaaatcctttgtttaggaacttttttnctcttcgtggcacctcacaacacanttaccctgggtacata

SEQ ID NO: 5715 - DNA, 493 bp, Homo sapiens
  I.5715 (R60924)
  misc_feature (300)..(300): n is a, c, g, or t
  misc_feature (357)..(357): n is a, c, g, or t
  misc_feature (388)..(388): n is a, c, g, or t
  misc_feature (406)..(406): n is a, c, g, or t
  misc_feature (437)..(437): n is a, c, g, or t
  misc_feature (450)..(450): n is a, c, g, or t
  misc_feature (455)..(455): n is a, c, g, or t
  misc_feature (467)..(467): n is a, c, g, or t
  misc_feature (473)..(473): n is a, c, g, or t
  misc_feature (484)..(484): n is a, c, g, or t
tttttttttgttttcaatttaatttattctatgcagtttaaagtgaaagttaaaacatcatacaaaccacagaagcttcatagtactgaccagttttaaaacaaaaacagtgaatgatcatttacacacattcctcatctttaattttacatcttgttatatatacaaaggtactattaaaacacgtaattctaattatttataaacctattgtcaagcaggcaaggatgggcaatgcatcataggcagaccacaggaatatttccttcaaggattcacaggcaggcagtatttgggtgnaatgggttatggcataggaaccaacttgggagggatcgtgtttaaacattccccatnaaaacagggtggcacatgttacaccaacaantggaaaatgttaactttnattggacatagggttaaaatgttactctttnacactttaggttnaaaanctttgggggcanttgggnggcgggcattnccggggggt

SEQ ID NO: 5716 - DNA, 478 bp, Homo sapiens
  I.5716 (R60786)
  misc_feature (182)..(182): n is a, c, g, or t
  misc_feature (269)..(269): n is a, c, g, or t
  misc_feature (341)..(341): n is a, c, g, or t
  misc_feature (386)..(386): n is a, c, g, or t
  misc_feature (415)..(415): n is a, c, g, or t
tttttttttgtggttccaaatgtcgcctttactgctgagacaatggtggtgcaggaaggggagcctgcagtctgggcggggggccaaggaaggggagcgtgtgcttggcccagtgccgccaccactggggagtgggaggctcaggcagacctagggccctgggaccgtggcccttggctttnttctagggagggcacaagacagcctgcaggtctttgggcagggagccgatgaccgtctcgatgtacagctgtgcccgctgcagctancttccttcacagggagctggtggccctgagcccgcaccagcttctcacgaatttcaggaccaggtccacganctccacctcggatttgtctttcatccaggttttcgatgtttcgcntcacagataagcctccagggtgcagggcntccagttttcagggccatttctttgttgccgttgcccgttaccagccatcaaaatggggggtt

SEQ ID NO: 5717 - DNA, 358 bp, Homo sapiens
  I.5717 (R60411)
  misc_feature (34)..(34): n is a, c, g, or t
  misc_feature (42)..(42): n is a, c, g, or t
  misc_feature (43)..(43): n is a, c, g, or t
  misc_feature (45)..(45): n is a, c, g, or t
  misc_feature (49)..(49): n is a, c, g, or t
  misc_feature (253)..(253): n is a, c, g, or t
  misc_feature (278)..(278): n is a, c, g, or t
  misc_feature (313)..(313): n is a, c, g, or t
  misc_feature (344)..(344): n is a, c, g, or t
  misc_feature (349)..(349): n is a, c, g, or t
tggaagaattcgccgccgcgagcttacgccgcgnctgccganncngcgnggccagccaccaggtagccagaggggccctggcgcaaacatttaatcctgggctgtgcggggccgaggcgctttgcttttccttccgggctctacagtggcatcaatgtggaggggtcattccgggcactgcgcgcggcttcgaatcccgactgggattgttggcctgcagacatcccacgcataagagcctaggccagaccgnccgctccgttgaagtcttgtgattngacaagacacagtgttggagacagccctaagcctnacagagatgaaggtaggcttggtccagacanggcanctacggaga

SEQ ID NO: 5718 - DNA, 418 bp, Homo sapiens
  I.5718 (R60382)
  misc_feature (405)..(405): n is a, c, g, or t
gaaggaataagggacttgatatttatctagcatcagcaatgtgtggacatcgtgtgaacggctttataaacatttcatttaattctctacatctagccattttttaacctgtgctttccctccctctcaaagtactgtttatacatttattagtccatattttaaacgctccatgctctcaactgtattaatgctatttgttaggataagtggcagatgtccatggaaaataagtggctgcaaagtggtaatgctgaccagatgagaaaagaagtgtaaaagggaagttctaaagattaaagccctgggagagggtgggtagacaacaccagtcccaaaatagtgctcttcattgagggctgtgtagattttcccgcttcctggggaaacttgggggcatatttnccacttgcatgtg

SEQ ID NO: 5719 - DNA, 445 bp, Homo sapiens
  I.5719 (R60352)
  misc_feature (132)..(132): n is a, c, g, or t
  misc_feature (206)..(206): n is a, c, g, or t
  misc_feature (214)..(214): n is a, c, g, or t
  misc_feature (254)..(254): n is a, c, g, or t
  misc_feature (262)..(262): n is a, c, g, or t
  misc_feature (327)..(327): n is a, c, g, or t
  misc_feature (354)..(354): n is a, c, g, or t
  misc_feature (367)..(367): n is a, c, g, or t
  misc_feature (396)..(396): n is a, c, g, or t
  misc_feature (435)..(435): n is a, c, g, or t
  misc_feature (441)..(441): n is a, c, g, or t
ttttttttttttttttgagaaaggttctcgctatgctacccaggctggtctcatctcaggctcatgcgatcctcctgcctctgcagtggctgggataagacacaactgccaccaggccctgcccctaggcantagtcttaatgcctgatggtggggggttggggaaggaaggggttgagtatcagggtaaatgctgcagagctgtnttaagganttaggccctggagtcaaatgcctctgctcacatcccactntgcaagantttgggcaacttaagcagcagcctctgtttccatcgcagtggctcttgcctatgaatcccagcantttgggaggctgaggcgggaggatcanttgcgcccaaganttcgagaccaccccatttttacaaaaaantccaaaaagtaatttgttttcctcatgtggaatgtcttntaaggntgtt

SEQ ID NO: 5720 - DNA, 453 bp, Homo sapiens
  I.5720 (R60323)
  misc_feature (432)..(432): n is a, c, g, or t
  misc_feature (443)..(443): n is a, c, g, or t
tttttttttaagagacagggtctcactctgtcacctaggctggggtacagtggtacaatcatagctcactgcagcctcctactcccagactcaagccatcttcctaatcctcctcaagcttgaggacaggccttgttacaatgctcagtgtgtacctctccccttctccactccccttgtccacattctgggctagatccacactctattgaggaactgtctctgtattttgattcccgagtgacacagtgttggagatcctgtggctagatacacaggttatttctgcatatggctactcctcaaccttgttgcctgtcttactctggtctgagagctgaaccccacagaaataacaagggtccccttcatccctttctttgaaaggttagtactagtcctaagtggttaggtcccagtttcctttagggncagaaaaaagngaaggagagt

SEQ ID NO: 5721 - DNA, 447 bp, Homo sapiens
  I.5721 (R60280)
  misc_feature (15)..(15): n is a, c, g, or t
  misc_feature (41)..(41): n is a, c, g, or t
  misc_feature (68)..(68): n is a, c, g, or t
  misc_feature (195)..(195): n is a, c, g, or t
  misc_feature (196)..(196): n is a, c, g, or t
aagagaacctgctgncagccccagtggttcttgctagcgtncacgagctggacctgttcaggtgcttncggcctgtgttgactcatatgcagacactgtgggagctcatgctcctcggggagcccctgctagtcctggcaccctcgcccgacgtgtcctcggagatggtgctggccttgaccagctgcctgcagnncctcaggttctgctgcgacttccgtccctacttcaccatccatgacagcgagttcaaggagttcaccacacgcacgcaggccccaccaaacgtggtcctgggagtcacaaaccctttctttatcaaaacactccagcactggccccacatcctccgagttcggggagcccaagatgtcaggagacctgcctaaagcaagtcaagctgaaaaagcctttcaaggtttgaagaccctgggacaccaagccagg

SEQ ID NO: 5722 - DNA, 426 bp, Homo sapiens
  I.5722 (R59980)
  misc_feature (25)..(25): n is a, c, g, or t
  misc_feature (413)..(413): n is a, c, g, or t
ttttttttaactatcatcctagganttcaagtagataaacgtttttatgcaacttaaccagaaagacattcagaaattggtaattatgtgtggagggttgaattatgtccccacaaaaattcatgctgaagccctaaccatctacctgtacctcaaaatgtgagtatatttgaagataggccctgaagaggtaactaagttaaaatgggattgttaggatgggccctaatccaacctgagtggtatccttattaaaagagaagattaggacacagacacccagacagagggaccatacaaggacacagtaaggaagggcagccatctgcaagccaagcagagaggcctcaggaagaatcttaaagctgttcgacaccttgtcctggggttttcagccttccagaactgcaggnagaataaggtttc

SEQ ID NO: 5723 - DNA, 616 bp, Homo sapiens
  I.5723 (R59802)
  misc_feature (418)..(418): n is a, c, g, or t
  misc_feature (437)..(437): n is a, c, g, or t
  misc_feature (455)..(455): n is a, c, g, or t
  misc_feature (484)..(484): n is a, c, g, or t
  misc_feature (499)..(499): n is a, c, g, or t
  misc_feature (519)..(519): n is a, c, g, or t
  misc_feature (562)..(562): n is a, c, g, or t
  misc_feature (587)..(587): n is a, c, g, or t
  misc_feature (598)..(598): n is a, c, g, or t
  misc_feature (609)..(609): n is a, c, g, or t
atgatgctgtgagacaatctgagaagaattaaaatttaaattcatgtattcctacttttttctctgttctctaactgtaaaatattttcattacagatggaggaacaaatagatgttagataaatagatatataatagatcatccaaaattcttattcttatggttttatgtagtcagtatttacctctatttttctacatgtttatccttccaatttagttcattacttcctgcacctttgatgtcatatacataaacaggaaataacacatggtgggctgggatgtagagagagccacaggacttgtgaatgaaatccacagggcaagggatgtgggcgattccttttggcaatattgggaggggaatgcccaaaccctatgtttggctgtggggaaaagagtatgggtagttccntcaaaacatccaaatgggnatttgccttatggtttcngcacccacatccccaggacagccaaaggntttgaaggcgggtcnttggaaaaatttttggcacntcctggtttgccggcggctttttgggccttgcttaaactgggnggccttggacgtccccacacggtgntgggtgggccnactggtttttncctcctg

SEQ ID NO: 5724 - DNA, 498 bp, Homo sapiens
  I.5724 (R59693)
  misc_feature (26)..(26): n is a, c, g, or t
  misc_feature (346)..(346): n is a, c, g, or t
  misc_feature (394)..(394): n is a, c, g, or t
  misc_feature (402)..(402): n is a, c, g, or t
  misc_feature (425)..(425): n is a, c, g, or t
  misc_feature (436)..(436): n is a, c, g, or t
  misc_feature (459)..(459): n is a, c, g, or t
  misc_feature (464)..(464): n is a, c, g, or t
  misc_feature (496)..(496): n is a, c, g, or t
tttttttttcagtttaaaaaagagantttattgaacatctaacacatacataaaaggcagtaaagacaaatgagaagagggcaggatattgaagtatacagactttaatgctgagttttgtatcttagtaagttactgcaccttacagagactcaatttcccctgatttaggaaggcgatgctaatgggtattgcataggtgtaagtataaaaatgttgtatttaagagaatcccacaagcttgggtataagggcagaaaataaatagatgtgacatgaatgagtactttattacatttgtatgctacctgcagactaggagggaaggaaaggaaacggcagcccnctatacttggattaggcattatattcctaatttggggaatgttaaggnggaaaggnggaaaaatgggaagcctatggcnttaaacccctngcttttaaaatggattttttgtngggcncctttccggggaatgttccccagggttttcantt

SEQ ID NO: 5725 - DNA, 433 bp, Homo sapiens
  I.5725 (R59653)
  misc_feature (393)..(393): n is a, c, g, or t
caatttaccatgtggcagtgtgctttccagctgttttcccatcaagacacacatgggaaataacatttgcctagtacactggggtaaactgacaaggtgctcacggccacaggtgaccatccagggcctccaatcatcccaggctcagccctgccactcaaagggctaaggtgatcagtagctttagtatttgtggcacacagatagagaagttcttccatacagcatatgctaaggaaaaaaacaatagtggtagaattctttggtgtaggttctcatttgtgcagcattgtttctcaaaaagacatttaaaggcattcaattgacttgcaatattaaatggcttttggaactattatatataattttacaaatatatatatattatagggngtttaactacatatatatatggtatccttaacacacaatt

SEQ ID NO: 5726 - DNA, 460 bp, Homo sapiens
  I.5726 (R59595)
  misc_feature (219)..(219): n is a, c, g, or t
  misc_feature (262)..(262): n is a, c, g, or t
  misc_feature (304)..(304): n is a, c, g, or t
  misc_feature (365)..(365): n is a, c, g, or t
  misc_feature (416)..(416): n is a, c, g, or t
  misc_feature (423)..(423): n is a, c, g, or t
ttttttttttttttttttttgtaaaacactttattaaaaatttctgaattaaaaagaaacttacattttggagtagaggaaacaggagttcagatattttaggagttaatatcactgcagcaacaattgtgtagtattgtaaaaggctcaggagcctcctgcttaccattggggaaggttgaaacaacttgtctcattaagttaagcttcttccctggngtgtcttatttagctttagttctcttaattctctttccctggngatttgggtagtgtctgaaaccactaaaggtaaaaggttgangcaatcccaaatttaataatctatcacctttctttaggtgtatctgagtgtaattcccagncagttcctttgtggaattcattaggaagacagccaagtcattaaaagttantaagganacctttgtttccgtggggtttgatacagcccctttgt

SEQ ID NO: 5727 - DNA, 405 bp, Homo sapiens
  I.5727 (R59412)
  misc_feature (339)..(339): n is a, c, g, or t
tgtcttcagaactgatcaacatggtcatgatcatcatcaaatttcttgtttccaaaggccactattgtagtacagtctccagcaggattttgtaccatgtgctgcctttggaataaagtattataatgtatcttgtcaccttcatcaacaccaccattaaatatgtaagttcctatatgtgactttttctgggcatatttgcatcaaaaatcacagtccttgcctccttgcttgcttttactccatgaaacgcttcatgaaggcagagcatggattgtcaagtgaccaggagggatggacatttgttaaggtggaacgtgggtatacttcacacatggntattacttcatacttacattaacttagttttctcccaaatccaactggcagtccgtttttttctat

SEQ ID NO: 5728 - DNA, 468 bp, Homo sapiens
  I.5728 (R59355)
  misc_feature (140)..(140): n is a, c, g, or t
  misc_feature (147)..(147): n is a, c, g, or t
  misc_feature (181)..(181): n is a, c, g, or t
  misc_feature (187)..(187): n is a, c, g, or t
  misc_feature (216)..(216): n is a, c, g, or t
  misc_feature (233)..(233): n is a, c, g, or t
  misc_feature (303)..(303): n is a, c, g, or t
  misc_feature (352)..(352): n is a, c, g, or t
  misc_feature (357)..(357): n is a, c, g, or t
  misc_feature (364)..(364): n is a, c, g, or t
  misc_feature (389)..(389): n is a, c, g, or t
  misc_feature (398)..(398): n is a, c, g, or t
  misc_feature (417)..(417): n is a, c, g, or t
  misc_feature (426)..(426): n is a, c, g, or t
  misc_feature (437)..(437): n is a, c, g, or t
  misc_feature (458)..(458): n is a, c, g, or t
tttttttttttttttatttcaaatagctttttattcacataggactagaggaaaatctaattcagtagaaaacacaaaacaaaaggggttattttattctattcaaaggagagtcatgacattaacaacaccaacaatantttggancacaccattgcattttcaaatacaaaaaaaggantcagangaaggtggacattccatgagcatgttcancaatggtattgttattngatattaatcctttattagattattatttttcacatctgggaaaataccactgggcaggcacaattttanggaaaagtttgggcaacatgtatttttctcaggcagcttctgggatggncagancttgggngatgtctaggccaaaaaaattttanggggcaaanccactggtggcacaggggncaacaaacngtccctttttncagaaacgggttttcagaccncattaggaaa

SEQ ID NO: 5729 - DNA, 455 bp, Homo sapiens
  I.5729 (R59329)
  misc_feature (211)..(211): n is a, c, g, or t
  misc_feature (432)..(432): n is a, c, g, or t
  misc_feature (445)..(445): n is a, c, g, or t
ttttttttcagctcatttctttaataaggatacgcattcattacaaaataacaatttgacaagagatcagacaagaacaagagtccacataagggagatggagagcattgccaagcagaagtgggaatgagagggccgggggcaagggctgtacatgtgtccttcctatggagacgaaggcagggctcctggtgggctgaccttggcgaantaggctctgccagggccctgattttgaagttttcagccccagggttttcagaaagcagcaaatcaagtccttagatgggcaggagtcagggcagaagggtcactatctttgaaggaggcccccctaaaagtcctgatcgcttaagggcaggtggggatgggaggaactcctgggtgccccatggcacacttgttcccatcaccttcaccagacagatgctnttttcaacttttngcctcaattt

SEQ ID NO: 5730 - DNA, 444 bp, Homo sapiens
  I.5730 (R59328)
aactggttgaggctgctcctttgattttatgtcgtgtaaagtctttgttccccagccccacccctgcctcctcccatcggaaaccccccatgggagtcatcagtgggcgggagtcggtgcctgctccagtccagccctgccttgggagatgctggaggaccctgtcgccctgaaggcctgtttgctgcacatctgcctgcagagccaaacctcagggcccggtgcagtgtccagcctggtatctggcatcccagtagcttccatgttctgtgtatgtgtgtggtgtgccccttcctcccactgtttgaattcactgaaaagccataaagggggcctcctgctggagatttgacctcccttgggttcctcccaggagcccccatgttttttccaaatgggttccccacagaccaatttttggaaggggttcaactgtttgttcat

SEQ ID NO: 5731 - DNA, 443 bp, Homo sapiens
  I.5731 (R59053)
  misc_feature (5)..(5): n is a, c, g, or t
  misc_feature (333)..(333): n is a, c, g, or t
  misc_feature (381)..(381): n is a, c, g, or t
  misc_feature (402)..(402): n is a, c, g, or t
  misc_feature (426)..(426): n is a, c, g, or t
  misc_feature (442)..(442): n is a, c, g, or t
gcctnaaggtcttggagcaagacagtctcaatgttgtatgggcttgggacctgcatctggccccaagcatctggaactgtgcacttaacctttcttcattacccagacttggatggccttgttggggttcaagggataggtcctctgtctcttcctttaaattattaactatttattacatccggaacctgtgagattcagcactcccaaccagaccctgggatgggtgagagaaaagcgggggtgtctctcccctccccactctgcccagctctcatcactgtcagacccaccagagctgagggcggagggattgggggctggggcagcctnggtccccatgcccctgctctgtgcctcggtctccccccttccatggtnggcgggggggaagctccattnttaacctacctcgttttgggggangggttggacgggtganc

SEQ ID NO: 5732 - DNA, 119 bp, Homo sapiens
  I.5732 (R59030)
ccagctactcgggaggctgaggcaggagaatcacttgaacccaggaggtggaggttgtggtgagccaagatcgcgccgttgcactccagcctgggcaacaagagtgaaactctgtctca

SEQ ID NO: 5733 - DNA, 378 bp, Homo sapiens
  I.5733 (R58995)
  misc_feature (23)..(23): n is a, c, g, or t
  misc_feature (38)..(38): n is a, c, g, or t
  misc_feature (146)..(146): n is a, c, g, or t
  misc_feature (201)..(201): n is a, c, g, or t
  misc_feature (290)..(290): n is a, c, g, or t
tttttttttgactttgtcacagnacatttcttggtagncagatctcgtgccccctcccccgatgacaaggctgggtctttggcccccatcctcccccaccacttcagcctgcactgacactaacaatattgaggtcacagactggncttagaaacaagatcaggaagatatatgttggggtgcctcccccaaatctggggnccaagcatccgatctgaggggcaagcggctgggaaattgggcctgggggcttccaggggtctgaggtctgcctgggctcccagggcggnccctccatgttacccctgatttggggggcaatgaaggggattcatgggatcagagggtgggttttcaggcaggggagcaggatttggg

SEQ ID NO: 5734 - DNA, 420 bp, Homo sapiens
  I.5734 (R58974)
  misc_feature (365)..(365): n is a, c, g, or t
  misc_feature (410)..(410): n is a, c, g, or t
tttttttttttttaacagagtctcactccattacccaggctggagcaagacttccactctcaaaaaacaaaaaaaacgttttaagcttttttttaacagagtaaaatggccttttaaagatatatcaatcaatcacagtgtactgcctttatttggatcctgtttcaaatgaacaaactatcataaaatcaatcataggaagtgtaccactgggaagggtgttcctaaaggagggaagctatgcaaatgtggggcaaggggaaatgcaaattctcagtgccttctggctcaattttgcctctggaacctggaaactgctgttaaaaaaataaaggactatttttaggaattggggaaataagganaacaatggaccttttttgaaaaattgggggaaatttaaacccctnttttaatagt

SEQ ID NO: 5735 - DNA, 457 bp, Homo sapiens
  I.5735 (R56890)
  misc_feature (283)..(283): n is a, c, g, or t
  misc_feature (423)..(423): n is a, c, g, or t
  misc_feature (432)..(432): n is a, c, g, or t
  misc_feature (446)..(446): n is a, c, g, or t
ttttttttattctaagaatataagtcatttaatactgttaattttatagcacaaaataaaacaagctatgatccccaaaaataattttaaaagcttacacagaaaatattattgcctgaagtttatgatctttaagttacaggtcaaaagagttttatgttgttgttgttgttgttgttgttgttgttttaaaacacacagtgaaggaccgtctaaggaaggcaaggccactgttcctcctgtaggggacaacgatcctgtctcagaggacctgtccttctgnctcctttagaaaacagaaccaggcacagcgttccacaccggacaggcagttactaggggggcatagtcctccggttcggcagaggggtgggagttgagggcagagcttcagtgggtgttccacaggaaaggcattagttnttagggtantgtgtttaaaacantcaaggatttc

SEQ ID NO: 5736 - DNA, 288 bp, Homo sapiens
  I.5736 (R56789)
  misc_feature (250)..(250): n is a, c, g, or t
  misc_feature (275)..(275): n is a, c, g, or t
tttttttttttttttttttttttcaattttagcagattaggttttattttaactgcatcgggaaaaccacatagataaaactatcttattgtttatcctttacaattttaaagcaaaacaaacacaacagcattttatttatttaattgtagtgcatccgtattttcacatattggattttaaaaaatctctgcttacaagaggaaacgaaagcccaaacaaggattgtagtatgtaagcgagtacaaantgagatagagtagaaggcaaactgnttacctaagtccc

SEQ ID NO: 5737 - DNA, 448 bp, Homo sapiens
  I.5737 (R56788)
  misc_feature (394)..(394): n is a, c, g, or t
  misc_feature (421)..(421): n is a, c, g, or t
  misc_feature (443)..(443): n is a, c, g, or t
aatcacatagagatattggttcaatatggacatctaaactataatgctaaaagccaataattagaataagttcattttaagaaaagcattaataatattagctaacgtttagtacctgtgccaaacattctacctatgttaccttgattttcatagccagcctaagaggtactattatgtatccccattttacaggttaagaaacaggctcagaggagtttaggatcttttccaagattacatagccagtaagtggtggcactagggaaccaaattcagactctgaatcgcatgctgtttatattatattgcactcattctaaatatgtggggaatcaggaatgaaggggcttgtatggacttttgggctcattttttggatggcatgtgaccnggggttattaaatgtggaaattagggnttacggaagggtcccgtgtccntgtgc

SEQ ID NO: 5738 - DNA, 460 bp, Homo sapiens
  I.5738 (R56781)
  misc_feature (37)..(37): n is a, c, g, or t
  misc_feature (171)..(171): n is a, c, g, or t
  misc_feature (207)..(207): n is a, c, g, or t
  misc_feature (208)..(208): n is a, c, g, or t
  misc_feature (215)..(215): n is a, c, g, or t
  misc_feature (224)..(224): n is a, c, g, or t
  misc_feature (258)..(258): n is a, c, g, or t
  misc_feature (312)..(312): n is a, c, g, or t
  misc_feature (344)..(344): n is a, c, g, or t
  misc_feature (391)..(391): n is a, c, g, or t
  misc_feature (422)..(422): n is a, c, g, or t
  misc_feature (454)..(454): n is a, c, g, or t
ttttttttttgaacaagcagattttaggctgtagcanattacaaaccacttttgaaaagaatccaagtaaaacaataatcatctgtgaatgacaaaagacttagaagagccatgattactgatgcaattgacaaagaaatttcattatttctgtggtatacaataatttancaggataacaattattaccaataacatataacaagnnctatcancattttagncaatatgatacaattttgggatgcatattaatancagatttatacaaatacaactcaaagaaatttaaacaacattttttcatttgancaggcttcctgtatggattttaatataccaanttaggcctaatatgtttcttttgggacttccggggccctatttgggnttccaaggggtttaatggccaaaagttaggnttgaggtcggaaacctttaagttaggattttncctttg

SEQ ID NO: 5739 - DNA, 467 bp, Homo sapiens
  I.5739 (R56780)
  misc_feature (369)..(369): n is a, c, g, or t
  misc_feature (453)..(453): n is a, c, g, or t
ttttcaagttcacagggcattagtaatctgtggtaaatgaagatagtttaaaatttggggtaaaataaaatagaaacattttctgaatttaatttagatatttttctgggtctatttgttagacaggtttacactatctctgctatttttttaaggacctaaaactgaatggacatagaaaattgaggaaagaaataaaaccgtaacaattataagaggttataaaaggttcatggaacctttttatgttttttcttgtgcagtcaaaaccaattgcaggctggatgcagtagctcacacttgtaatcccagcactttgggaggctgagatggggcagatcacttgaggctcagggagtttgaggaccntcctgggggcaacatagtggaaactcttcttcacttacccaaagtaccaaaagggatttggctggggcctggatgggtacacanttgttagtccccag

SEQ ID NO: 5740 - DNA, 503 bp, Homo sapiens
  I.5740 (R56736)
  misc_feature (4)..(4): n is a, c, g, or t
  misc_feature (5)..(5): n is a, c, g, or t
  misc_feature (338)..(338): n is a, c, g, or t
  misc_feature (377)..(377): n is a, c, g, or t
  misc_feature (460)..(460): n is a, c, g, or t
  misc_feature (489)..(489): n is a, c, g, or t
cagnnagtaccttgttttgccatgtagcagacaacacacaaaataatgcagttgtggtgtgccatgctatgtgcacagccccttggattactttgttttaaaaagcatcagagttgggggtactttagggaaacctttgcttaccttgttttgccagtgataagagcagtgggttggagggcacttggccagttttctgttcagcttttcagtgaatgtacccctttaaggttcagacttaaacttccttaaaaagtggcgttgttcatagaatcgttggactcattaatgaatcgttcaactccactcactgaagcccagacctccgtgcccagggnccaatctcgtcaggctgccagagaaagttgggtgctggntcatactggtctcacagtctaagtaagtgtctgtgatgctcccaaggcaaagggaaatgcaaggtctgggaaatttcgtttangtattttgatgtcttagtgttttagtgantaggggagaccttt

SEQ ID NO: 5741 - DNA, 299 bp, Homo sapiens
  I.5741 (R56541)
  misc_feature (209)..(209): n is a, c, g, or t
  misc_feature (211)..(211): n is a, c, g, or t
tttaaaagaatgacacttctggccaggtgtggtggctcatgctgtggtcccagcactttgagaggctgaggtgggttaatcacttgaggtcaggagttcgagaccagcctggccaacatggtgaaaccctgtctctaccacaaaatacaaaaattggccaggtgtggtggtgcatgcctgtggttccagctacttgggagcctgagggngnacatcgtttgaactcgttgaacccgggaggcagaggttgcagtgagccgagaacgcaccactgcattcgagagtgagactctgtcaga

SEQ ID NO: 5742 - DNA, 374 bp, Homo sapiens
  I.5742 (R56316)
  misc_feature (13)..(13): n is a, c, g, or t
  misc_feature (44)..(44): n is a, c, g, or t
  misc_feature (140)..(140): n is a, c, g, or t
atacatgcctggnagtttcactgaaatccacataggttacatcnaattgctatgtcttacgttatttcattacatagaaagcttatgaagatcaatacttagaattaagtttgtggatatctgaatcataactaaaaaanttcctaaaatgtaagaatgagtgatacatttcccataacctcacaaatatagcgtaatattttaagtcttcaattaattttcttttgttatcacatacaattactagtgtttgtgaaaccctaatttcctattcatgttctgtttccatttccctttcgggtttaatagcctctttcttccctgtttctaaggggcacatttatccttaaaggaaatctaaacttttgggccgg

SEQ ID NO: 5743 - DNA, 434 bp, Homo sapiens
  I.5743 (R56234)
  misc_feature (335)..(335): n is a, c, g, or t
  misc_feature (385)..(385): n is a, c, g, or t
  misc_feature (404)..(404): n is a, c, g, or t
aaacagtctccctggagcaaccatcagagcagtggctggggcactggaagtatgtcctggggagcaatgcatggcagagatcatcgtagaaccggaaacatgggaatcccaggaactatgaatcagatatctccattgaagaaaccgttttctggtaatgtcatagcaccaccgaaatttactcgctcaactccatcactgactccaaaatcttggattgaagataatgtgttcagaacagacaacaatagtaatacactcttacccttacaggtgagatctagtttgcagttgccagcttggggctcagattcactccaagtatagttgggtgnacttgcaggccgggaacatccagaattaggaccagggttcgaagttaggntgttttgacagttttgatnatggcattcttttgggaaatttcccttttt

SEQ ID NO: 5744 - DNA, 366 bp, Homo sapiens
  I.5744 (R56146)
tttttttttttttttttttaggaacaaagagatttattgcattttcaatatttctttaagcttactttatatttcgatctaagaggcaaagtttacttctttcaagacagtctttgtagagtaaatggtgtttcaaaggtcaggtttagggcaggtgcagtggttcaaacctgtcatcccagcagtttgggaggcccaggcaggaggactgcttgagcctagggagctcaaggaccgcctgagcaacatagggaggccccatctctacaaataatgtttaaaaattaggctgggtgtgggcagtgtgcacccgcggtcttcagctacttcagggaaggaaggcaggaaggatccgcccgagcctgg

SEQ ID NO: 5745 - DNA, 373 bp, Homo sapiens
  I.5745 (R55945)
  misc_feature (244)..(244): n is a, c, g, or t
  misc_feature (288)..(288): n is a, c, g, or t
  misc_feature (301)..(301): n is a, c, g, or t
  misc_feature (359)..(359): n is a, c, g, or t
tggttttcataacttttatgaaatatttctgtaccagtgttaaccttctttgttatagtacctgctcttaaaaacaacattaaaaaccttttatatcattattatccttggttatataaacttattggaaaaaatgttttgatcattaggtactgcaccagagggcttaattcaatccttaactgcagagatttgacattaactatgagtgaatatccaccttatctaatcaacaacaacaagntttttcatacaatagggggggggagtgtgaatgtgattataggnttctcactatagntttttactttaaaaactacataatgcggcatcctttacggcggtaggtgtgtaatccncttggggtttggta

SEQ ID NO: 5746 - DNA, 344 bp, Homo sapiens
  I.5746 (R55944)
  misc_feature (101)..(101): n is a, c, g, or t
  misc_feature (290)..(290): n is a, c, g, or t
  misc_feature (322)..(322): n is a, c, g, or t
ttttactgcacaggtgtctacaacaggggccaccatcatcgctaccgtcaacgtggttggatgtctgaaagaagaagctgagtatcaatgttgactctcantcatgtcatcttattaaaaaaaaaacagtttacaaaacaattgctactgataaatgcagtgtgaaagactggttttaaggcactggtttaaggcactgctttatgtccacccagataacttgagtttttaactaaaagtttcaaatcactatcttctttatacttactaaagttcgttttgcaggagcnggatagtttctagggatgatccattctggggngggggtataaattaaattaaac

SEQ ID NO: 5747 - DNA, 477 bp, Homo sapiens
  I.5747 (R55835)
ggccttttagcttttcagagaacttccacatgcattgattttttttttcctccttactacatttctgtgaggtgggttgaagttattattatcccttttcaccaatgaagataggctaaaacagcgaaatcaaagggcaaattagtggtggtgctaacactggaatccaaggcttataactccaaatctagttaaaaacagtggtttggcatctcactcccttattgatttgagctggacaggccaaagggatcgctgtggcgggagtcacctgatttcccttagacaactcctgatgcatcatgaggccaattctaaggaaaatagctggggagttaacctgggactgtattctgggaccacaaatacaagattcttctggagggaaattaaaactttttatttctggcccttttgtgggccacttttgttaaacccttaattatgggtcttggatgagggccagctatttttgta

SEQ ID NO: 5748 - DNA, 466 bp, Homo sapiens
  I.5748 (R55757)
  misc_feature (205)..(205): n is a, c, g, or t
  misc_feature (257)..(257): n is a, c, g, or t
  misc_feature (304)..(304): n is a, c, g, or t
  misc_feature (333)..(333): n is a, c, g, or t
  misc_feature (369)..(369): n is a, c, g, or t
  misc_feature (383)..(383): n is a, c, g, or t
  misc_feature (393)..(393): n is a, c, g, or t
ttttttttttttttttttttatcaggtagtcatttattgaagcaaagggtgcacaaaggaagagagtaggaaagaaaggtgaaagtaaagactaggattataccccaaaggaccctttgaaattcatagttggataaatctacaatgaaaattgttaagcagaatttagatatttagggtatattcaaaagttttaaggcaggtntcttggaagacggttatcccatttcatttaatgttagaagcaggatgctggngtagatgggaccacagccctgctgcccaggggacttaacgggcaagncttcaggagttcaatgccatttaggcctnttgccctattaagtattaaagtctgggcctggggtnagcagggaacagtncttctcccgnttccatccggggtttacaggaaatttttcaggagggagctttttgacaggcttttttccctgttattgaaagg

SEQ ID NO: 5749 - DNA, 418 bp, Homo sapiens
  I.5749 (R43203)
  misc_feature (178)..(178): n is a, c, g, or t
  misc_feature (218)..(218): n is a, c, g, or t
  misc_feature (241)..(241): n is a, c, g, or t
  misc_feature (271)..(271): n is a, c, g, or t
  misc_feature (373)..(373): n is a, c, g, or t
  misc_feature (402)..(402): n is a, c, g, or t
  misc_feature (416)..(416): n is a, c, g, or t
ttttttttttttgagattttgtttgtttttatttggggagaatgaaggaggagggagattttagactgaatcattctagagtatttgacgactacagctcctctctctttgtactacggagaccctgcttatagcccccaacaggaaatcctcatctgcggttgccagacagccagantatttccacctgtgccagaacaagacagaagaccccaggnagattcttcctgggggacaggtntcaagcagacccaatcccccatacagagantttcttaggatgaaaacagcctcaggcccttaggacccagcctctgggtctctcttctggggcccacaccaggcacaacacctggggagaaggccccaagcnttgcacaagtaccaaacccacccgggggnacagcaccaccttnct

SEQ ID NO: 5750 - DNA, 377 bp, Homo sapiens
  I.5750 (R42312)
  misc_feature (114)..(114): n is a, c, g, or t
  misc_feature (201)..(201): n is a, c, g, or t
  misc_feature (297)..(297): n is a, c, g, or t
  misc_feature (364)..(364): n is a, c, g, or t
ttttttttttttatggggaaattttcttcatttttaatttacagcagaaagaatataaagcattcagaaaacattttccatattttaagggcaattcaaaacattttgcatggnttccagcagctgagttcttcaacagatccattgattcaatgatgctttacatgcacaattacaaaaataaaacttacaaaaaaaganggacatctaggactagttttacatgcaagtgcttcaggggaccccccattggggcggccaactactgtgtgggaactgccataaggcggaccgtgncagccagagagggggttcgtattatttgtgctttattttcgtttcacacagttacagctgatttcgnatgggggtaacaa

SEQ ID NO: 5751 - DNA, 378 bp, Homo sapiens
  I.5751 (R42302)
  misc_feature (196)..(196): n is a, c, g, or t
  misc_feature (243)..(243): n is a, c, g, or t
  misc_feature (277)..(277): n is a, c, g, or t
  misc_feature (330)..(330): n is a, c, g, or t
  misc_feature (360)..(360): n is a, c, g, or t
  misc_feature (365)..(365): n is a, c, g, or t
tttttcttttttttttttagcagcttcaaacacaaacatttattatctcatagtttctgtaagtcagaaatgtgggaccaatttagctgggtgattctggctcatagtccccatgaagttctagtcaggatattagcagtggctgtaattatctgaaggcttgtttgtggctggaggacttggctttcaggatggntcacttcatgtgggttgttgctaggaaggctccagttccttgctggnttgttgggcagatgacctcaattcctcacatggntctcttcatacatctctgcctccagtgtccttccacgttataagtggcctggncttcttcccagaagtgtacccaagggcagnaaagncaagtatgggaaa

SEQ ID NO: 5752 - DNA, 424 bp, Homo sapiens
  I.5752 (R49695)
  misc_feature (198)..(198): n is a, c, g, or t
  misc_feature (203)..(203): n is a, c, g, or t
tttttttttttagagccataatttattttattttctatacataatatctacacatgatattggtggatgaaatgtctttgattcagccttcattggcctagcttgtgaaatttaggcaggaccaaatcaaacaatgaagcacatttaaaaagaaaagtgtgtttaggaaaacacaatgtattttcctatatcattggnatagncagctttttgaggaaaaacattgctcaaggacttggggtttgggatcccaactgtcttatttgggcaattaatgcttaacaggatttatggctgtaggtattctaaggtgtgtttaggaccgtggacttgtggggatttctggggccacttaaattttaaatatcctggtttaaactctatccaggacaaaggggggactttccaaaattaccttctggcc

SEQ ID NO: 5753 - DNA, 508 bp, Homo sapiens
  I.5753 (R55099)
  misc_feature (374)..(374): n is a, c, g, or t
  misc_feature (419)..(419): n is a, c, g, or t
  misc_feature (438)..(438): n is a, c, g, or t
  misc_feature (443)..(443): n is a, c, g, or t
  misc_feature (451)..(451): n is a, c, g, or t
  misc_feature (476)..(476): n is a, c, g, or t
actaagtatagcccacactcaaggatgaaggaaattagtttccacctcctaaaaggaataccaaagaatttatggatatattttaaaaatagcacatgatctgaagttgaagagctcaaggtaattataggtcagggtctgcaagtaggaagggctgaaactagcatcacagctacttctttctattgaaaattttttacagtcctttgaagcggcgtatgaggagagcatccagggaactataatactgggattccatagcctccatttattaatccaagttcaatgagacccaatactaatatttaggagaatgttatgaggaaggctataaaaacaggggagctgggaattaaatgatgtttaaagttccntccaactctttggggttgtgggagggttggctgatggacaatttnttcaggcctccagaaaggntggangtaatggntggactctggcacttttaaactggnaaggttcctgtgagggttccggcatgtttttt

SEQ ID NO: 5754 - DNA, 333 bp, Homo sapiens
  I.5754 (R44840)
  misc_feature (230)..(230): n is a, c, g, or t
  misc_feature (319)..(319): n is a, c, g, or t
  misc_feature (329)..(329): n is a, c, g, or t
ttttttttggcatgactaacaatttattcaatgtgtgtgtactgctatgtgtcctcatgcatgagctatgtcaacaaggacaatctactgataagagaaaatgaaaatgtacaagttgtaggagactaaacatggttttaacttagtacacatttttctgaaatgtcccccgtgattaagttgtgaacaaatgaacatgccacatgtcaacaaactgaacaaacatgggnttgttagtgacttagaggtggagggagggctagagagaggctagctgtgttggtctgccaatctcctgtgtcccacactggctacaaanttacaaccantggg

SEQ ID NO: 5755 - DNA, 192 bp, Homo sapiens
  I.5755 (R44837)
  misc_feature (128)..(128): n is a, c, g, or t
  misc_feature (150)..(150): n is a, c, g, or t
ttttttttttaataactgttcagctacaaaattttattggtatctttttatgttccctctagaggatgtaatgcacaaaagcattgccacggaacatataaaattacaaatgaaatttattgtaaaangtagaatgtcttctagactggngtcagtatttatgtcattcataaaccaaaactgctgtataat

SEQ ID NO: 5756 - DNA, 324 bp, Homo sapiens
  I.5756 (R44779)
  misc_feature (53)..(53): n is a, c, g, or t
  misc_feature (57)..(57): n is a, c, g, or t
  misc_feature (143)..(143): n is a, c, g, or t
  misc_feature (207)..(207): n is a, c, g, or t
  misc_feature (269)..(269): n is a, c, g, or t
  misc_feature (280)..(280): n is a, c, g, or t
  misc_feature (314)..(314): n is a, c, g, or t
ttttttttttttttttttttttttgtgacggagctgctctctgtcacccaggntgangagctggagtacactggcgcaatctccactcattgaaacctctgcctcccgggttcaagcaattctcctgcctcagcctcatgagnagctgggactacaggcatgtgctgccacgtccagctaatttttgtatttctagtagaggcggantttcaccacgttggctagactggtcttgaactcctgccctcaggtgatctgcccgtctcagnctcccaaagtnttgagattacaggagtgagtcaccatgcctgggntgctaataac

SEQ ID NO: 5757 - DNA, 447 bp, Homo sapiens
  I.5757 (R44747)
  misc_feature (378)..(378): n is a, c, g, or t
  misc_feature (415)..(415): n is a, c, g, or t
  misc_feature (439)..(439): n is a, c, g, or t
tttttttttcatcattacctagttttgtattataaaatggaatcaggaacataaataggaacaagtagcaaaaccccagccctgcgtaggaccattatcctctcagccacctctgcgtaggccaatgagtttggaaagtttctcacagttttcaagtttcagcgactctgctttctgtttcaatcgttcatctctgtataatcctgccaaatttgtcagctctgacttttgttgtttctccttccaacaactagtctgggatataatcaatgtaatccttctctattgttttctccaagtcatggcagaggaagctcctctgtagggccttggtcaaagtttttatccacaaagtaagggcacctggcagggttctgnggtttctctaggaaatgggtgtaggcccaagggtccnggaaacagggagagagagggctcngtggaggt

SEQ ID NO: 5758 - DNA, 376 bp, Homo sapiens
  I.5758 (R44551)
  misc_feature (99)..(99): n is a, c, g, or t
  misc_feature (319)..(319): n is a, c, g, or t
tttttttttaattctcaaattttttattggcataaataattcagacattggtttctcactaaacattgcactaaacacaagaaacaacaggcttgccgnctcagaggcacacaaactgtccaacagcccaagttagaaatactttttttagaagtgtagaaaactttataaatgattctgtacaaatatacacagtgggaccctccatccatctgggcctttctttcctggatgggcatctggaataggagtgttccttctcaggcaacaaggacattgggcaacaaggtgaggaaagaggaggaggacagaggacggnggacaggacagaggataggaaacgggaaagggaaaaggaaggaggtgggccccccaa

SEQ ID NO: 5759 - DNA, 380 bp, Homo sapiens
  I.5759 (R44493)
  misc_feature (152)..(152): n is a, c, g, or t
  misc_feature (282)..(282): n is a, c, g, or t
  misc_feature (304)..(304): n is a, c, g, or t
  misc_feature (332)..(332): n is a, c, g, or t
  misc_feature (343)..(343): n is a, c, g, or t
  misc_feature (348)..(348): n is a, c, g, or t
tttttttttttttttttttttttgtttgaaaattaaagtttattaggatatattaatgtatgatattatagtattactcatcacatgtaagctttacatctgaagcaattcatgcttactgggagggaagtttgagtacttacttagctttncctgctattcctaggtaaaggccctcctgtggtcattctgaacagaaggagtgagcttactgcaaaccacagggctgggacagtaggaggggtgccatatcctcactgagtgggagctcaggaaaagganttagggattctgcacacatttnttccagactcagttccccactgttgggnttttatattgnggttnttttaaaatcttttcggaaatataatttattt

SEQ ID NO: 5760 - DNA, 376 bp, Homo sapiens
  I.5760 (R45627)
  misc_feature (265)..(265): n is a, c, g, or t
  misc_feature (289)..(289): n is a, c, g, or t
  misc_feature (299)..(299): n is a, c, g, or t
  misc_feature (318)..(318): n is a, c, g, or t
  misc_feature (370)..(370): n is a, c, g, or t
ttttttttttttttccttaaatacatgtttattttacttcaatatcgctcagggttgtatgtatttgaatacttcagtactattttgaacattctaaatatgaaataccataaagcgttcaaatttatcaaacagtggtacaatatggttactaaacttgcaacttaatttacaatgacgttcaatttttcctcttcaaataaaatcactgactttggtccatttgatgagaaactaggacatatgccatgacagcatacttctnggcactctatgtaatagggcaaanggataatttnggctaatataggacagggntacctggactgaaattctacttttctgcttaattgatcacgttccaagggtnactaca

SEQ ID NO: 5761 - DNA, 479 bp, Homo sapiens
  I.5761 (R45611)
  misc_feature (216)..(216): n is a, c, g, or t
  misc_feature (224)..(224): n is a, c, g, or t
  misc_feature (295)..(295): n is a, c, g, or t
  misc_feature (353)..(353): n is a, c, g, or t
  misc_feature (367)..(367): n is a, c, g, or t
  misc_feature (375)..(375): n is a, c, g, or t
  misc_feature (396)..(396): n is a, c, g, or t
  misc_feature (421)..(421): n is a, c, g, or t
  misc_feature (426)..(426): n is a, c, g, or t
  misc_feature (448)..(448): n is a, c, g, or t
  misc_feature (469)..(469): n is a, c, g, or t
  misc_feature (475)..(475): n is a, c, g, or t
tttttttttgccaatctggaaaacttaaatataaattcagtattacatgttaaacttaaacttaagtttgttatatataataatagtgttgtatccgggagtggtggctcctgcctgtaatcccagcactttgggagggtgaggtgggtagatcacgaggtcaagagattgagagcatcctgggccaacagggtgcaaccccatctctactaaaantacaaaanttagctggggcgtgggtggtgcacacctgtaggtcccagctacttcagggagggctgagggcaggaaggantaggctttgaacccggggagggcagagggtttgcaggtgaggccgagatccatggccncttgcacttccagnctgggggnggaccaaaaccagactttccnttctttcaaaaattaaattaaattnaattnaatttaaaatttaaattaaatngtttttttgtggtttttaggnggaggntttt

SEQ ID NO: 5762 - DNA, 470 bp, Homo sapiens
  I.5762 (R45118)
  misc_feature (363)..(363): n is a, c, g, or t
  misc_feature (395)..(395): n is a, c, g, or t
  misc_feature (423)..(423): n is a, c, g, or t
  misc_feature (439)..(439): n is a, c, g, or t
  misc_feature (447)..(447): n is a, c, g, or t
  misc_feature (457)..(457): n is a, c, g, or t
ttttctttatattcttttatcgaattcatatcttctcatttatgccagtaatgttctcacccataaactctaccctaaggtcaaaatgtttccttcctcctcttttaaataactgtcaatatgggctctcccaataaacaaaccaccgccaaaaaaagaacaacaaaaagcctgtatctgggatgctatgtgagaaataattacccttcacaaaccctatcttcagatatttctgtattttaaggccacaccaacatagggtggatgtatttgtgtgtgttatgtttttccaccttggaaatatttttagggaggttgggatatattatccttaaatttcattatcggagtgaggttaggggnattaaatacattggtatttttaaatggacccnaggtggattccccaaacaatccttaatnctattggggggggggncagggggncccgggggtnttcttttaggggg

SEQ ID NO: 5763 - DNA, 496 bp, Homo sapiens
  I.5763 (R45094)
  misc_feature (70)..(70): n is a, c, g, or t
  misc_feature (72)..(72): n is a, c, g, or t
  misc_feature (131)..(131): n is a, c, g, or t
  misc_feature (142)..(142): n is a, c, g, or t
  misc_feature (234)..(234): n is a, c, g, or t
  misc_feature (278)..(278): n is a, c, g, or t
  misc_feature (344)..(344): n is a, c, g, or t
  misc_feature (367)..(367): n is a, c, g, or t
  misc_feature (372)..(372): n is a, c, g, or t
  misc_feature (390)..(390): n is a, c, g, or t
  misc_feature (397)..(397): n is a, c, g, or t
  misc_feature (411)..(411): n is a, c, g, or t
  misc_feature (434)..(434): n is a, c, g, or t
  misc_feature (439)..(439): n is a, c, g, or t
  misc_feature (454)..(454): n is a, c, g, or t
  misc_feature (459)..(459): n is a, c, g, or t
  misc_feature (478)..(478): n is a, c, g, or t
  misc_feature (492)..(492): n is a, c, g, or t
tttttttttttttttttttttttggagttgaatctaagtttaatattcttttttcaacagctgctggcananaaccaactatggggtgacagcctttcctcacccctttggcatcccagtgaggttgagantataagttagncccctgtagcttcatcaggtggggtggaaacctaccttggatgtcatcattgaacatgcagtacttgttacggtatttgttgagcaggcggnaaggcattggcattggcgaagtcttcaaattgggatgagggcantttattccaaacctgtgtgggaggggagagggaaggaaacccatggattgcctctctgggggagtntcccctggacagtattcccaggntttgncacagtgggggttggggngagggtncaggcctggggggntggggagggtgggccatgggctnccttncaaccgtgttttttngccantggtttgggctccccgggntttcccggggtttnggaa

SEQ ID NO: 5764 - DNA, 448 bp, Homo sapiens
  I.5764 (R44428)
  misc_feature (400)..(400): n is a, c, g, or t
  misc_feature (447)..(447): n is a, c, g, or t
ttttttttttggagatgagacaatatttattaaatgcacacatgaatcatttagttgtatttttattgatttctagccaaatttcactgtattcgaaaacatagtatttcagtattttgaaatcccatatcattttactcatttgtacaaatcttatgtgcgcctgaaaagatgtgcattttaatttttgctagaatctttctttcccccagcttcatataggtgtcaaaagtgctgcagagattctagggcttttcagatcctaggactaggaccatcatccccggggggaaaagtaggccccaaatggcatgactctcccaactgtttctggaattttgggcccaccatttctccattatcttgtcttttggatggtcttttggacattttaaaaggnttggctcacctttcctctggctacaggtttggttcccaaatcactcnt

SEQ ID NO: 5765 - DNA, 292 bp, Homo sapiens
  I.5765 (R45976)
tttttttttggcactggcaacaaaggaatttttaatgagtttgacagggaaaggacacccacacaggattttttggttttcttctacacaggtttttaaaagcctggtttggtttcagcacattgagcttacagaaaaaataaaacgctagcaagtcatcagactcttcaatgaaaatgtatttcacattaaacacaaggtacatatcatgcaaatgagggcatcaccatgggtcacaatgggtgctgtgagggtacaacaaattcacaaggaaaacaggacatttaggcaa

SEQ ID NO: 5766 - DNA, 383 bp, Homo sapiens
  I.5766 (R40861)
  misc_feature (285)..(285): n is a, c, g, or t
  misc_feature (351)..(351): n is a, c, g, or t
tttttttttagacggtctgccttcatcttttaatggccggtgcggtacagttagtggacagacgggggatgggacacagcaggggtgaaacagggcagtcacagccggggccggggatctggaagcgggggcgttcctccccctgggaaacaccgtctctggaaggacacccttaggatcccctgacctcagggtgccacccacacgggcctgggtgttctgggaggcccgggctgggagtgacccccagcccctccctacgttccaggggacccttgggtcttnttcgagtcccttgctgggatgagggtcaagaccttagggtcaagctgactttcagccaggggtgtngggggtcccggctttcgttaggcccccagaat

SEQ ID NO: 5767 - DNA, 397 bp, Homo sapiens
  I.5767 (R46712)
  misc_feature (270)..(270): n is a, c, g, or t
  misc_feature (293)..(293): n is a, c, g, or t
  misc_feature (346)..(346): n is a, c, g, or t
  misc_feature (356)..(356): n is a, c, g, or t
  misc_feature (374)..(374): n is a, c, g, or t
ttttttttgtgatttgtagattttaaaaagtttctaataaaatttgtcatttaagtttatttacaatataccctgccacgtatgtaaatgcagttaaatataaagcacatctcttaccacaaagggctgaaaattcatccggctttgcataagtcaatactgcagctaaagcctctctccaatttttaagatcacaagactcaacaatctctttccagttcttcatcaccactgcagtgatgagcttgagaaacgaaaacaaaggaaganttaaaagtctttaacataggcantaaaaattaattctgactaattaattgtgtcaagtatttcatggccaaatgcnggcggcaaantggaggtatatttttggnttcaaatggacataatattgggg

SEQ ID NO: 5768 - DNA, 375 bp, Homo sapiens
  I.5768 (R46794)
  misc_feature (21)..(21): n is a, c, g, or t
  misc_feature (121)..(121): n is a, c, g, or t
  misc_feature (320)..(320): n is a, c, g, or t
  misc_feature (340)..(340): n is a, c, g, or t
  misc_feature (372)..(372): n is a, c, g, or t
tttttttttttttttttaggngaattgatatttattcagaatgatttttaatgttgttattctaaaacttccaaaaattccatctggtataggagtcgttgaaatagtcgtagatcatggnatagttggtgaggggttgctgggttttatttaaagtgctattcaaaagttaacatacaggtttcattcaaagtttaagaaggaaaaggaatgaacaaccaggaaacaagggtaaggatgtgggggatatgggataggatattttatacataaggacttctggcatcccaaaatatcaggcttgttacaggaattctgtncatctattcttgcttcagtncaaaacaaacaaaccaaaaacagtccaaaacngtt

SEQ ID NO: 5769 - DNA, 388 bp, Homo sapiens
  I.5769 (R46612)
  misc_feature (178)..(178): n is a, c, g, or t
  misc_feature (203)..(203): n is a, c, g, or t
  misc_feature (207)..(207): n is a, c, g, or t
  misc_feature (231)..(231): n is a, c, g, or t
  misc_feature (238)..(238): n is a, c, g, or t
  misc_feature (271)..(271): n is a, c, g, or t
  misc_feature (357)..(357): n is a, c, g, or t
  misc_feature (362)..(362): n is a, c, g, or t
ttttttttttttttttcagaaacagataaacagtatatttattaaatgagttaagacaaataaactttacaaatagacaaataataaaaggctcagtggctaaaatagatggtaagcatcattgaaagaaatcaacaccatcacggtatctcagttggcttacacgtgtaaaaagaanttttcaaagagcattttcacagaantgangccagtttttttcttataaacaantcaccanttcttggttcaaaactgacatctgttatgaaanttaccatatcacatatttgtaaggatgacaggggtaactcatcttcaaagtgcaagtaggtctattttacaacccccaaaaagggncatgntgaggggggaaagggttttttaaaaa

SEQ ID NO: 5770 - DNA, 434 bp, Homo sapiens
  I.5770 (R46384)
  misc_feature (379)..(379): n is a, c, g, or t
  misc_feature (414)..(414): n is a, c, g, or t
  misc_feature (426)..(426): n is a, c, g, or t
  misc_feature (432)..(432): n is a, c, g, or t
tttttttttccctgtatgaatacactaaagcttgaagaagccagaattatattccatcagccaatatcaagccatgggaaaacctgatccactgaggctgagctatcaaaagattaatccaggctggtgcagtggctcacaactgtaatctcagcacttcgggaggccgaggtgggaagatcccttgaggccaaaagttcaacaccatcctaggcaacacagcgaaaccccgtctctacataaaaaattagtctggcacggtgacctgagtctgtagtcccagctgcgctgaagggtgaggtgggagggtcgcttgagcccagggaggtcaaggctacagtaagccatgatcacaccactgggactccagcctggggtnttcaaaggggaaacactgtcttttcaaaaaagatnaggaaaaaaagntttgantg

SEQ ID NO: 5771 - DNA, 370 bp, Homo sapiens
  I.5771 (R46128)
  misc_feature (44)..(44): n is a, c, g, or t
  misc_feature (160)..(160): n is a, c, g, or t
  misc_feature (233)..(233): n is a, c, g, or t
  misc_feature (245)..(245): n is a, c, g, or t
  misc_feature (293)..(293): n is a, c, g, or t
  misc_feature (326)..(326): n is a, c, g, or t
  misc_feature (331)..(331): n is a, c, g, or t
  misc_feature (339)..(339): n is a, c, g, or t
  misc_feature (346)..(346): n is a, c, g, or t
  misc_feature (355)..(355): n is a, c, g, or t
tttttttttggtagctaaaaatatatggattttctccatgtccnctctttctaaaagagacctaattcttatattcccaacctcaagacttctatcatctcccactggccacagatcatcatcacgttcagcccatctcaaggggcacttgcctcccctntcagccctcacctgacaccatctctggacccacactgagctctgtcaccactggacccctcaccagggcaggntcccatctcctntgtgccttgccacatgctcttccctactgtaagttttgggcccaatgncactacctctgaggaagccttccaggaaccctngtttnccaccagntaagttnttccaggcntttccctttgttacc

SEQ ID NO: 5772 - DNA, 477 bp, Homo sapiens
  I.5772 (R45322)
  misc_feature (49)..(49): n is a, c, g, or t
  misc_feature (51)..(51): n is a, c, g, or t
  misc_feature (96)..(96): n is a, c, g, or t
  misc_feature (98)..(98): n is a, c, g, or t
  misc_feature (99)..(99): n is a, c, g, or t
  misc_feature (340)..(340): n is a, c, g, or t
  misc_feature (380)..(380): n is a, c, g, or t
  misc_feature (385)..(385): n is a, c, g, or t
  misc_feature (456)..(456): n is a, c, g, or t
  misc_feature (469)..(469): n is a, c, g, or t
  misc_feature (475)..(475): n is a, c, g, or t
tttttttttggcaaaacaatactttaataagtgtataggaaattacaangngaaagttgcaaatacagcacatatatatatatatatatatacttngnncttaattaacatggacaaaccccagcttcaaaatctttctaaaatcaatcatatgcaaaatacctggtttctgaaagggcatatgataaagtatatacaatttcttaaactgtgatatggcttatttaataacatgtatttattgagagaagcataaactttccaaatatacagtatcttccagggtagaaagatgacatactgggcacatttcaattttgtgttgcagttatctgaggantatactaaattgcactatttaagtgggacactgtcatagntttanctggggaaagtctcccttaaatgttttccattcttatccaaaaaggcaattgggcccccatggttgggtcngccggttaaaccntttacnag

SEQ ID NO: 5773 - DNA, 432 bp, Homo sapiens
  I.5773 (R45305)
  misc_feature (419)..(419): n is a, c, g, or t
  misc_feature (427)..(427): n is a, c, g, or t
ttttttttggaagctttgttctttaatgagccatggggtgatttgttcatcaagctgcttttgtgtagccatacagtgcatattttgagtgacacaaactgcactttatacagatggtatcttgttacccctcaaccccccagcaaagaaaaaaaaacaaaaaggaaattacaaagtgcctattgattgcatccggaatgtaatcagttccgtgggtgagataaatcattcttcttatagaattattctattaaacagtaaaatgttatatttcacaggatatgtccttttataatacagtttttaaaaaaaatttacactcaggcatacttataaattacttaaaatccattaaaataatataatacggaatctgtaggtccacacctttcccataggtaaatacaaatacttgggtncaaaaggnggcac

SEQ ID NO: 5774 - DNA, 549 bp, Homo sapiens
  I.5774 (R45692)
  misc_feature (146)..(146): n is a, c, g, or t
  misc_feature (243)..(243): n is a, c, g, or t
  misc_feature (290)..(290): n is a, c, g, or t
  misc_feature (407)..(407): n is a, c, g, or t
  misc_feature (437)..(437): n is a, c, g, or t
  misc_feature (453)..(453): n is a, c, g, or t
  misc_feature (467)..(467): n is a, c, g, or t
  misc_feature (478)..(478): n is a, c, g, or t
  misc_feature (483)..(483): n is a, c, g, or t
  misc_feature (504)..(504): n is a, c, g, or t
  misc_feature (525)..(525): n is a, c, g, or t
  misc_feature (530)..(530): n is a, c, g, or t
  misc_feature (545)..(545): n is a, c, g, or t
ttttttttttttctttacaacaaggttttatttattcttttcttttatcccccccaaaacattaaagtttttcatctttcttttatttttaatggttttccttttggatccaaacgagcatctatattataggatatccgcctggncaacatgcagtgctgaactgtggctttaggagagatgcaccgatactctgggtgggccagcatcagctgccattcaaacaccgtgactgcaggggtntcaggctggcacaccacagtgggatgctgccctaaggaggtgtcttntgggggcatgacttgcacgttttaggaatgcaggtaggcagcattttaacagcctgagggcaggagcacccaattttccctcctgatctcatctttacatgcttcatcctctagggngcaaaacaaaggggggattgggcctgaccntggggcccccaagggncagagggttttggnccccttaggtnccacntccttggcaaagtttggtttnttttgagggttaggaacccgntgcancccgcagggttttgnattt

SEQ ID NO: 5775 - DNA, 318 bp, Homo sapiens
  I.5775 (R44186)
  misc_feature (50)..(50): n is a, c, g, or t
  misc_feature (168)..(168): n is a, c, g, or t
  misc_feature (229)..(229): n is a, c, g, or t
  misc_feature (306)..(306): n is a, c, g, or t
  misc_feature (314)..(314): n is a, c, g, or t
ttttttttttttttttttagtgaccaatcacttattttctttaaaaacanataaccacattaactttttgctttatacaaccatctagaaactataaaacagtaccacattgtgcatttaacctacttatcaagaagggaacttcataagtcataagaattctacccntataggaaggaaaaaggagacagctaatagcatagtcacagatacaacatgagttccaagncaagtcatcaattcttcgtacattcaccttttccatttaccagagtgggagactgaggaaagagaggtgaggggagnacaaaagngggg

SEQ ID NO: 5776 - DNA, 429 bp, Homo sapiens
  I.5776 (R43987)
  misc_feature (136)..(136): n is a, c, g, or t
  misc_feature (198)..(198): n is a, c, g, or t
  misc_feature (233)..(233): n is a, c, g, or t
  misc_feature (308)..(308): n is a, c, g, or t
  misc_feature (325)..(325): n is a, c, g, or t
  misc_feature (366)..(366): n is a, c, g, or t
  misc_feature (378)..(378): n is a, c, g, or t
  misc_feature (410)..(410): n is a, c, g, or t
  misc_feature (417)..(417): n is a, c, g, or t
  misc_feature (425)..(425): n is a, c, g, or t
tttttttttttgaaataaacacaatttttattgttaatctttctgaagaaactagtatatatctttttacacaaaatctatcagtaagagattgattggttaaagaaaaaaagcaaagcaaaacaagttgagagantccaggctttatcaatataagtaataattttttagaatggtgatttgatttcaccatttcanttcagcagagcctgtatatatatatatatatattncaatgatctgtatttcctattgctagaaggatgaaagtgaatccatataaaccataccaacgccgttatgtgtanctggtggtaaaactttnttattcaagtttaggatgtaacagacatctttgctgcctgntggattgtttgncataaggaatacaccaaggaacatgtttgtgngtaggantgaacctngcac

SEQ ID NO: 5777 - DNA, 482 bp, Homo sapiens
  I.5777 (R43910)
  misc_feature (393)..(393): n is a, c, g, or t
  misc_feature (440)..(440): n is a, c, g, or t
ttttttttttttttggtgtctaatacttttacttcccagcagcataataccactttggtcaggttgaaccactgcacaattttgcagctctttcagaaaaataatgaaaacaattggaaagacatgatgtacatgcaaatggtgagaaaatgatactattgtccaatcctttcccgtaaatgtaaaatatccttagttcatctccaaactgtgtatttattataagcccttacatcagggattttgtttctttcagtttttgtagcaccaaatagacacagcggctaacaagaaataaatctgaaaagtcactgaaatatttatcacatgtcaggaaattttctggtctgtacctttaaccatgttcctgggcttcacatattcttcttaagngtaagctataacataaggttgagttcccacccgtgtttggctaccgntgtggtttgtttacctggataatactttgttaatatcctttg

SEQ ID NO: 5778 - DNA, 379 bp, Homo sapiens
  I.5778 (R43722)
  misc_feature (376)..(376): n is a, c, g, or t
ttttttttactcttccacatccttttatttactattttctgatttttaaaatgacagtggcaattaccatttatactgtgttatttgtataagctgttaaacacaacattgttaaacacaacgaaaattcatttttctacctgaaagctgtatcatagaaaattattttcaagtttatattcaacagcttaataatgttcaaaccagggctgggcgcggtggctcccagcactttgggaggccgaggcgggtggatcctgaggctaggagttcaagaccagtccggccaagatgggtgaaaccctgttctctaccaaaagtacaaaaattaggctggggcgcggtggtggggcgcctggcaattcccagcttaccnggg

SEQ ID NO: 5779 - DNA, 449 bp, Homo sapiens
  I.5779 (R43301)
  misc_feature (439)..(439): n is a, c, g, or t
  misc_feature (448)..(448): n is a, c, g, or t
ttttttttcagcaattgccagttccttatttatttcttgaaatgaatgaactaagaaaaaagtgccaattgttctttccagagatcatgcattctgatagagaagatgcaggaatcccttttctaaaatgtgtctgcaaagctgcttgctccagagttgagcatgtgctgctcaggccacctggtgagggtagaggcgtcttagttagacatatgtatatttaaaaatactccctcaccccatgacatgcatggcagaggcccttttcttaaattttttttccagggagtgataaccactatttaccactttttatttcaatatctggggtctccttggctctccctcttttgactgggtgtgtgtgtgtgcgtgtgtagaggaggagaggaggaggaatatggaatgaatgaatggaatgtgaattaggtggactttncaggccctnt

SEQ ID NO: 5780 - DNA, 448 bp, Homo sapiens
  I.5780 (R43296)
  misc_feature (154)..(154): n is a, c, g, or t
tttttttttttttttttttaaacgttaaacatcgtttttattcccagcacctaccattgtgccccccttataatagacagtaatggtatagtgaatgaatgaacaaatgaatgagttgagaaatccagaataatacatcacaagctacagcganatttttcttgctagtgctcaggacaggtgaaatgaatcataacaggttggtgtctgtgaaaagctgacagagatgtgagaggtcccaccctgaggccaacaaagactctgcagctctggcagaaccactaagctctcagctcctagttcatcacatctttttcccttaaccctgccaagtcaaccaggatgaggagtgtcttcagggtggggtctgttgcccctctttgcccatggccgtcatttgctgtagggagtgagggcaagtcccttatggccttttaaggaaccgttt

SEQ ID NO: 5781 - DNA, 469 bp, Homo sapiens
  I.5781 (R43258)
  misc_feature (199)..(199): n is a, c, g, or t
  misc_feature (296)..(296): n is a, c, g, or t
  misc_feature (367)..(367): n is a, c, g, or t
  misc_feature (417)..(417): n is a, c, g, or t
  misc_feature (428)..(428): n is a, c, g, or t
  misc_feature (437)..(437): n is a, c, g, or t
  misc_feature (446)..(446): n is a, c, g, or t
  misc_feature (465)..(465): n is a, c, g, or t
ttttttttattttcataagttgatatttgtattctcttaataccttacttattttatatatctttacatataaagcatattaatagaatttgtggccaatattactagttattacatcctttttatacactaatcattgctgaaacagtcttttatgcactgtatcattaatcgtcagagccatgttaagtatgtaggntagcagttatgttctatttactttcttattttggggggtttatttatataggatgtataatttatttatttatataggcaaggatggggggtcttgnctctgtctcccagtctaggaggtataggtgggccgcgatctcaggctcaccgcagccctcaaccctcccangggcccaaggcgggatccctccctctcttcaggcctctcaagtagggctnggggtctaacntaggggccnggtacccanccaacccccgggttaactnttaa

SEQ ID NO: 5782 - DNA, 428 bp, Homo sapiens
  I.5782 (R40569)
  misc_feature (19)..(19): n is a, c, g, or t
  misc_feature (37)..(37): n is a, c, g, or t
  misc_feature (164)..(164): n is a, c, g, or t
  misc_feature (187)..(187): n is a, c, g, or t
  misc_feature (227)..(227): n is a, c, g, or t
  misc_feature (240)..(240): n is a, c, g, or t
  misc_feature (298)..(298): n is a, c, g, or t
  misc_feature (300)..(300): n is a, c, g, or t
  misc_feature (304)..(304): n is a, c, g, or t
  misc_feature (336)..(336): n is a, c, g, or t
  misc_feature (406)..(406): n is a, c, g, or t
  misc_feature (425)..(425): n is a, c, g, or t
ttttttttttttttttccnttggtgagacagggtccngactctgttgctcaggctggagagcagtggtacaatcacagctcactgcagacttaacctctggctcaagtgatcctcctgcctcagcttcctgagtatctgggactacaggcgggtgacaccacgnacggctggacttttcttgttttntaggaggacagggtttcacccatgttgcccagggctggtnttgaactcctagncctcaagtgatcctcccaccttgggcctcctaaagtgctggggattgcagggcgtgancnttgncggcccagcctgtttattttcacgtttcacantgccccggggtgggccaccgtatggcttccttcccattccccccgtgtttattttcaacaagttttcctncatcccaggcaattttttncat

SEQ ID NO: 5783 - DNA, 391 bp, Homo sapiens
  I.5783 (R49731)
  misc_feature (341)..(341): n is a, c, g, or t
  misc_feature (389)..(389): n is a, c, g, or t
ttttttttttactgtttggaaaaatttttattcactggaaaaatgtttataaagaaatattaagtgaaatgttgagaaatatatagaactttacataaaatatattagccatgcaaatacatgagtgtacgctttctgtggatagacataaatattgctagagaaaaaaatagaaaagaatccatcaagggcattaactacacatttttctacgttaccagtatcttaggtgttctagggtgtaggttattaaaatttccttctctgtactttctaaaattttaataatagggatgtgctttttaaaataatttttttaacttggatatctcacctggtcncctgaggttccccttttctccaacttaatggggggcttaaccggcccnct

SEQ ID NO: 5784 - DNA, 363 bp, Homo sapiens
  I.5784 (R49580)
  misc_feature (12)..(12): n is a, c, g, or t
  misc_feature (206)..(206): n is a, c, g, or t
  misc_feature (295)..(295): n is a, c, g, or t
  misc_feature (342)..(342): n is a, c, g, or t
  misc_feature (353)..(353): n is a, c, g, or t
  misc_feature (358)..(358): n is a, c, g, or t
tttttttttttntatacaaaagtatttattatagcaagaaagaaagaaagaaaaaaggatgtttagaaaaaggatgtaaccttttttagtctgtttactaaattctaatacatttgtataatgaaatactagtaaatactatgcagttacaacaaaacataagctgaactggaaacttattgacgttttgttatatgaaaaaggangctacagaacagtctataggcatatgttttcatttgtgtaaagattaaaacatgtgcacattcatgtatatgtgcagattttcaccaanttgcttatgggtaatgacctcttgggcggaggcaggattccagcagnttgagggagcngaggncaggg

SEQ ID NO: 5785 - DNA, 445 bp, Homo sapiens
  I.5785 (R49474)
  misc_feature (69)..(69): n is a, c, g, or t
  misc_feature (129)..(129): n is a, c, g, or t
  misc_feature (161)..(161): n is a, c, g, or t
  misc_feature (183)..(183): n is a, c, g, or t
  misc_feature (236)..(236): n is a, c, g, or t
  misc_feature (257)..(257): n is a, c, g, or t
  misc_feature (349)..(349): n is a, c, g, or t
  misc_feature (364)..(364): n is a, c, g, or t
  misc_feature (388)..(388): n is a, c, g, or t
  misc_feature (403)..(403): n is a, c, g, or t
  misc_feature (420)..(420): n is a, c, g, or t
  misc_feature (427)..(427): n is a, c, g, or t
  misc_feature (438)..(438): n is a, c, g, or t
tttttttttagatggaatttagctcttgttgcccaggctggagtgcagtggcgcgatctcggctcactncaacttccgcctcttgcattcaagcaattctcctgcctcagcctcccaagtagctgggantacaggtgcaagccaccatgcctggctaattnttgtattttttctagagagggngtttcactatgttggtcagtctggtgatccacctgccttggcctcccaaagtnctgtggattacaggcatgagncaccgtgcccggcctataacagtttcttatacatacgttactggccagcagtttcagctaggcaacacaaatcaggtgagagggtgaagtgngtgataacctcattncacctttctcacttcgacagcttntatctgttcttgtcntttaatgggtcaacagnagttttncttacttgatnttcttga

SEQ ID NO: 5786 - DNA, 211 bp, Homo sapiens
  I.5786 (R49451)
  misc_feature (60)..(60): n is a, c, g, or t
  misc_feature (134)..(134): n is a, c, g, or t
  misc_feature (158)..(158): n is a, c, g, or t
  misc_feature (186)..(186): n is a, c, g, or t
ttttcttttttttttccaaaaacaccattttaataaggaaacaacagaaataaaagattnttctctggctggagcccagaccccatataatacattacatgtacaaagtggctttcagcaggctcctgggcgtntccctggggctctcctaccacctnttccatgccaaattcctgggtccttggnctctgctcctctccagaatatgccc

SEQ ID NO: 5787 - DNA, 340 bp, Homo sapiens
  I.5787 (R49132)
  misc_feature (186)..(186): n is a, c, g, or t
  misc_feature (285)..(285): n is a, c, g, or t
ttttttttttttttgtaacaaaattcagatgtttaatttttttcaaaacttaactatactaatgaaaataaattatatgtagaccaccttcaatatttttacatcatctttatacaactgtaacagtgctttcaaaagacattttgtgaaggacattaatttcacatttaaaacgtgtttcaaaantaagggaacattaaagaacatcaaattagtctgaaatatatctcacaatgctgagaggcatactcttctttatcaaattaactgtatgtgtgctcaagntaacatgggcttttaactaatgacatttcttgtccatttcaggtattttcttggg

SEQ ID NO: 5788 - DNA, 402 bp, Homo sapiens
  I.5788 (R49126)
ttttattatttatttatttatttatttatttagagacagagtctggctctgtcacccactgcactccaacctgggtgacaagagcgagactccgtctcaaaaaaaaaaaaagaaaaaaactgcaggcaaagttggatttgcggcctatgaataaaaccattactttaaaaagtaatacccccaaaaaagttacacctggaagtttcatcttcatgcctttgtgtaatattactataatggtgaaatgatgatttaaaaaaaacacatcaggaactgacacatcctcttgggatgatggggtccttcagtcaccttgtgaggcccatgtacttattccgttggatacagcctgtgcttattaaactgtgggggggccctccttgtgtggggctgctttggatg

SEQ ID NO: 5789 - DNA, 446 bp, Homo sapiens
  I.5789 (R43088)
  misc_feature (381)..(381): n is a, c, g, or t
  misc_feature (390)..(390): n is a, c, g, or t
  misc_feature (442)..(442): n is a, c, g, or t
ttttttttttaatagagatgggggatctcatcgtcacccaggttggaatgcagtgataccatcacagctcgctgcagcctccacctcctgggatcaacccctacctcattctcctgactgggactacaggcactcaccaccacactgggctaattaaaaaaaaaaattcttttttgtagggaagtggtcttgctatgtcacccaggttgatctagaactcctgacctcaagtcacccgtccgcattatcctcccaaagtgctgaggattacagacgtgaggccactgcacttgggcctatttaggggcttctaattcactttccttttccttcttgtctaaattcttgtgtttttagaatctggcattttattttaaggtnatcttcaantccttttgggaagtagtgaggggagtaaatgcttaacctgtgtaggaaaccntttt

SEQ ID NO: 5790 - DNA, 328 bp, Homo sapiens
  I.5790 (R42999)
  misc_feature (233)..(233): n is a, c, g, or t
  misc_feature (317)..(317): n is a, c, g, or t
tttttttttttttttcagagtaaacaaacataactttcttcaagatgtaggaaaactgtatattcaaaaccaatctcaaactttaaacaacaaaagatatcaaacattttaaactgtacaaagcaaattagcaggatttgaatattggcagttttaaaatgtcacccatccaaaacacaaaacagggagatagccaagtcttagctccatcctaatcaaagctgtcatgcagntccagttccactcttctcatctccagcaggtacttcactcaaggaggtgacacccaaggggagtaggatgaaccggaaacaggngtgccacatag

SEQ ID NO: 5791 - DNA, 540 bp, Homo sapiens
  I.5791 (R42998)
  misc_feature (17)..(17): n is a, c, g, or t
  misc_feature (59)..(59): n is a, c, g, or t
  misc_feature (386)..(386): n is a, c, g, or t
  misc_feature (428)..(428): n is a, c, g, or t
  misc_feature (434)..(434): n is a, c, g, or t
  misc_feature (477)..(477): n is a, c, g, or t
  misc_feature (483)..(483): n is a, c, g, or t
  misc_feature (500)..(500): n is a, c, g, or t
  misc_feature (512)..(512): n is a, c, g, or t
  misc_feature (519)..(519): n is a, c, g, or t
ttttttttttgcacttnctagacaatcaaccaacttccatttattttcacaactgtggnctaaaccagaggttcatccaatggtgacaatggaaaacctagtaagcaaagagtaaatctggttatagtcaacacctgggatccactctaagggaatggtgcttatgtgtgatagtgacagcttcttggtccaaaaggctgacagatgaagagcacgtttctggggtttcccctttcctatcttgtctggtcatgacaagcagttctcatgtatttctttaactgaagtgttaaattgcatggtttctctcagggagcacttgatagggccaggagtttctcctccacactttctgttgggacaccttatccttcccactggatccntttacttacccacttttggaatcttaagggcaaacatttttngggacntgggcctgcagtttttaactggtaggggggtttgtggaaaggnaaaggngtaacagttggaacccntctttttattcntgggggntgagggcttaggttttcggac

SEQ ID NO: 5792 - DNA, 474 bp, Homo sapiens
  I.5792 (R43460)
  misc_feature (352)..(352): n is a, c, g, or t
  misc_feature (402)..(402): n is a, c, g, or t
  misc_feature (421)..(421): n is a, c, g, or t
  misc_feature (427)..(427): n is a, c, g, or t
  misc_feature (457)..(457): n is a, c, g, or t
ttttttttctttctttctttttttttttttttttttttagagatgggggtctcactttcttgtctaggctgtaaattttcagtttaacaagtttcttatgtgatttgtggccacactgaagactcaccagaacagggtggggtggggaatacttaatcaatatttgtggaatttacccgatgaaatccagttattcctgctgaatttctctctcctccgggggggacataggcaaacgagctgagggaagggtgaatgctgcaaccctctctcctcagccctgcaggccgatccctggacataaactccttgaagttcagtgggcctctttccatgcacctaccacctacanctgctgcttttcaaggaaaccacaaccgggggaccggggaacaggaactngggacggtgcccaaaatgncctganggggcattttcatcggttttggggtcgggntttaagggggaagttgg

SEQ ID NO: 5793 - DNA, 447 bp, Homo sapiens
  I.5793 (R43415)
  misc_feature (12)..(12): n is a, c, g, or t
  misc_feature (384)..(384): n is a, c, g, or t
  misc_feature (399)..(399): n is a, c, g, or t
  misc_feature (408)..(408): n is a, c, g, or t
  misc_feature (421)..(421): n is a, c, g, or t
tttttttttgcnttttgttttttgagatggagttttgcacttgttgcccaggctggagtgcaatggcacaatctcagcccactgcaacccccgccttccaggttcaagtgattctcccgcctcagcctcccgagcagctgggactacagacatgcgccactgtgcccaactaatttttgtattttcagtagtgtgagatttcaccatgttggtcaggctggtctcgaactcctgacctcaggtgatctgcccgccttgacttcccaaagtgctgggatcaaaggcgtgacaattcacacccggccctaaattcatacttttaaggcttctctatgggaccctttgaaacaactttaactgggtcttccttctaaggaggtttgnctttcttcctctagntccgtgttnccacaacagtagncctggatttattttttcccaaaaaaa

SEQ ID NO: 5794 - DNA, 423 bp, Homo sapiens
  I.5794 (R43339)
  misc_feature (371)..(371): n is a, c, g, or t
  misc_feature (394)..(394): n is a, c, g, or t
  misc_feature (404)..(404): n is a, c, g, or t
tttttttttaaataagaaattttactttcaactcactgattttatacttagaggctttaaaattttttagaatatgtgaagaccggaattaaaccattctcaccatatttttccaggactgtttgctaactggcttgtttttacataaagctttaaacatgtctaccatgggtagtaaacaagaaggactatttgaaactataaaacctaccaaacaaagtgccaaatgcattatcactgctttttccttcttttataaggaatcattactatggaactcgtactcgttgggtgcacagagggatgctattttcatactctctttctttgtaaagggtcttctctatagctccggggttccaaagtaacanctgtggcatcttctcctcccggncaacaaggantcatcttggcacatttccc

SEQ ID NO: 5795 - DNA, 255 bp, Homo sapiens
  I.5795 (R42949)
  misc_feature (11)..(11): n is a, c, g, or t
  misc_feature (80)..(80): n is a, c, g, or t
ttttttttttncaggtgaagttcttgtttattgttgcagcaactcttatacagacattagcgttcagttaaataaaggangatagatagcacagtaaatacatcacaaccccaaactggatgactgtggccacgggacggaggagggagggagggagggaccagtgaccagactgtcaaggaagtacattcagtgggtgtgcggtgtccacattccaggctcacgtgtagatatatttaatttatatatttataa

SEQ ID NO: 5796 - DNA, 300 bp, Homo sapiens
  I.5796 (R42922)
  misc_feature (9)..(9): n is a, c, g, or t
  misc_feature (272)..(272): n is a, c, g, or t
caaccaggnaccatcagctttccattcatcataacctgttagaatgcaagtgatcttaatgaaacagtcctatttgtttgcctttgatttttaaattcttcagatgtttgcctaaatggcttgctcatagtctttgtccaccacctacagggctcatcatgtgttggtctgccggcgcatttccagctttatcttcactgctgtccacacgcatttggtgctttagatattcaacacctgaagttccttgaaatgccacctattcagttganactctttgtggcttaatcttacttcctc

SEQ ID NO: 5797 - DNA, 504 bp, Homo sapiens
  I.5797 (R42906)
  misc_feature (287)..(287): n is a, c, g, or t
  misc_feature (434)..(434): n is a, c, g, or t
  misc_feature (458)..(458): n is a, c, g, or t
  misc_feature (479)..(479): n is a, c, g, or t
  misc_feature (487)..(487): n is a, c, g, or t
  misc_feature (502)..(502): n is a, c, g, or t
tttttttttctgagacagggtctcactctgccacccaggctggagtgcagtggtgcagtcacggctcactgaggtcccgacctctccaggctcaggtattcctcccacctcagcctcccacgcagctggaactacagataacatgccaccacgcccagctaatttatacattttttttgtagagatgggttcttgccatgttgaccaggccggtcttaaactcctgggactcaagcagtctaccagctttggccttcagaagtgattggattacagggcgtgacacncacacctgggtcagaatgatttttaagactctggaagtttccaaaatgtatatggatgacatataggggagcatacttgctttcttgctctttttaaaaaacttattcattcatatttgggaggccaaggaaattcagttttataantgtggatttacggtggaaaagggnattttttctattacattaaantgaggaantgattttggcaaagntt

SEQ ID NO: 5798 - DNA, 432 bp, Homo sapiens
  I.5798 (R42902)
  misc_feature (130)..(130): n is a, c, g, or t
ttttttttctttttgagacagggtttcattctgtcgcccaggctggagtatagtggcatgatcatggctcaatgcagcctttgcctcctgggttcaggtgatcctcccacctcagcctcctgcgtagtgntgactacaggcatgtgctaccacacctggctaatttttatatttttagtagagacagggttttgccatattgcccaggctggtcttgaactcctaaactcaagtgatctgcccacctcggcctcccaaagtcctggggattacaggcatgagccactgtgtccagcctagggatgtttttgagaagccattttttctgtctaccacactgtggcaaggcagtgggtcaaggaggcatagctctttgaggtttacctgttctgtgtttcaccatttacaattgggtgaccttggggcaagtta

SEQ ID NO: 5799 - DNA, 475 bp, Homo sapiens
  I.5799 (R42778)
  misc_feature (444)..(444): n is a, c, g, or t
  misc_feature (453)..(453): n is a, c, g, or t
ttttttttttttataatttaattttcataacagtatttttatttgtgaaatttttttacaatttgctttttttttggtatgttctacatttttttccatgtactaagtatcgtgggaagttccaacctcatacttatgctgcttttctacttgctaatattggatgcttcttgccaggctccttaaattgtgctgtaacctgggaagaaaccttcctactctccacaaaccctgaataatcctgagagtttaaacctcacctaattattctctatcatttagaaactagaggggtggaggactgagagagggacagtataaaattcgaaaccagtgatgcattggctgaaaaacactgacatgaattgtgagagcaaagaaaccacagctggttttgcaggtgcagtccaggtgggccttggcagctgatgttgaattgtacgnttgtagccntatattttctgggctacagctg

SEQ ID NO: 5800 - DNA, 460 bp, Homo sapiens
  I.5800 (R54803)
  misc_feature (389)..(389): n is a, c, g, or t
  misc_feature (442)..(442): n is a, c, g, or t
  misc_feature (447)..(447): n is a, c, g, or t
  misc_feature (458)..(458): n is a, c, g, or t
ttttttttatggtttgatacaatgggttctgacaactttattaatgaatgcacatcaaatctgaaagaaccatgtgaaagtttttatccttgggttctatctgtctactgcaccttataaaaatttggcattcccaaaagccattctggttacatttaaaataatcagcatggcaaatctatactgctttagctcttccaagttactttttttcccagtcaagatacatcctagggaaggatattgacaataatgggaaataattgattataattatatgtaagaagacatttttgggcattcagtgccttctactaattttctttgtttcactctcccatgggctttccctcaagaggcaaggaaattctttgacaagagtcaggganggggaaaaccaaaaaggccgttaaaaaaaaaaaaattgtttaccatcactccnctttnttcatacatcngg

SEQ ID NO: 5801 - DNA, 421 bp, Homo sapiens
  I.5801 (R49025)
  misc_feature (20)..(20): n is a, c, g, or t
  misc_feature (374)..(374): n is a, c, g, or t
  misc_feature (404)..(404): n is a, c, g, or t
tttttttttttcctagcagnaacacttcccacattgcactataatttctgtttttatgtctgtgtcccttatgctttgtgaggttaagggttttttaccagtcattattcctatttgctctgtgcacaggacaaatgattggacacagagggcctacaatcctataatattgcagggttgggaaggatgcaggaaaacaggcattctcttatgccttttgtgggaaggatcaattgggtgcatgcactttaggggacaatttgggcagtagctgtcaaatttcaaatttcagtcaggcaaaatattttttggaaaatttattctataggatacccacacatatacaaataaataaattcagggctattcactgnaggccttgtttatatagcccaaggtggaantaatctaaaattcatcc

SEQ ID NO: 5802 - DNA, 406 bp, Homo sapiens
  I.5802 (R49005)
  misc_feature (335)..(335): n is a, c, g, or t
  misc_feature (359)..(359): n is a, c, g, or t
  misc_feature (385)..(385): n is a, c, g, or t
  misc_feature (403)..(403): n is a, c, g, or t
tttttttttttgaaaaccatagacacatatgttttattttagtaaaaatttcaaattatgactttagtagtctttaaaaggttacaaccatatcacagaccttggcaaagctgcagtgtattaatttttatccccagtttccattctttaaccttcaaggaacgaaaatgaaatcaaaattttaaaacacatgattataagcctttgtatcaactgaggaattaaggaatttaagtcatggaatctttttcttaataaggctacttgacgtaacaaaaaggtaaaaaaaaagggaatcttactaacctctggtactcttggagtttggaaaaatnttggattacggctcttcctacggnttcacgggtcaccttccaaatggctntcccccattttaaggganttt

SEQ ID NO: 5803 - DNA, 418 bp, Homo sapiens
  I.5803 (R41771)
  misc_feature (179)..(179): n is a, c, g, or t
  misc_feature (181)..(181): n is a, c, g, or t
  misc_feature (185)..(185): n is a, c, g, or t
  misc_feature (201)..(201): n is a, c, g, or t
  misc_feature (204)..(204): n is a, c, g, or t
  misc_feature (208)..(208): n is a, c, g, or t
  misc_feature (249)..(249): n is a, c, g, or t
  misc_feature (315)..(315): n is a, c, g, or t
  misc_feature (322)..(322): n is a, c, g, or t
  misc_feature (341)..(341): n is a, c, g, or t
  misc_feature (402)..(402): n is a, c, g, or t
  misc_feature (411)..(411): n is a, c, g, or t
ttttttttttttcatgtacaaaattaatgtttatttaaaaagcacttttcttatcccctgataaaagcactcaaatatggtttcacaatatagaaatgattgacttatgatttttagtttattgatgatgccctgaggcataacaatcccaggagctgcaggaaccacagatcctattncngtgnaaggggatactttccnccnattnttcagaaaagttccattgaactccggggtgggatgaaacantggtgcaagctccgggaagccgcaatcagggagagggctgggtgaaagagccaatgccccgggcanttctagncaccttcagctttaaaatntccactgggaactctgccttgacacagcctgatctaacacaaagttgtggttttttaggantttgacagntccaggg

SEQ ID NO: 5804 - DNA, 416 bp, Homo sapiens
  I.5804 (R42543)
  misc_feature (292)..(292): n is a, c, g, or t
  misc_feature (358)..(358): n is a, c, g, or t
ttttttttttttttttttttttttatgcaaaaaatttattttcatcagtgaaatacaacccccatgaaagctcccacacaatctcagtaggctggtggtacagtgccttggaaagagaaatcaggagtgacattcaatagccagcaaccccagaaaaccctctatcttgatggaaagggctacttgttttctgtctcctcatcctcacatgtacattccatctgcctaatgctttcctctcttaattgaaaaacaaacaggacatgacacacacaaaaaaggcatttcttgnccccatttcttaggcaaggcaagggtcaacttatggccggcacttcgggctgtgttggtagggtgncgggaaaatgtttttgtggattttcttggaggcacagcttttttacacggtgtgggcc

SEQ ID NO: 5805 - DNA, 487 bp, Homo sapiens
  I.5805 (R42511)
  misc_feature (12)..(12): n is a, c, g, or t
  misc_feature (276)..(276): n is a, c, g, or t
  misc_feature (300)..(300): n is a, c, g, or t
  misc_feature (367)..(367): n is a, c, g, or t
  misc_feature (384)..(384): n is a, c, g, or t
  misc_feature (390)..(390): n is a, c, g, or t
  misc_feature (475)..(475): n is a, c, g, or t
tttttttttttntctatttttagcagagacggggtttcaccatgttggtcaggctggtctagagctcctgacctcaggcgatccacccgcctcagcctcccaaaatgctggtataacaggcatgagccacagcgtctggccagaatcatatcttaatagcaatcccataatgtagttttaccagaaataccatagtcaattttacagggtgggttcagtttttcttaaattacttacccctaagattaaagaatattttaaaatattgttataagngacataactaaactattaggtttntgcaaaagtaattgtagtttttgccattaaaaggcaattataaaggaaaacggggatattaataggngttacttctaggcttgnaagggntaacattcttttttggctacttaaaagtaatgggcaaaaactggcaattgtttttggcaccaacctattagggcaagagaacccnatgggctttttg

SEQ ID NO: 5806 - DNA, 368 bp, Homo sapiens
  I.5806 (R42480)
  misc_feature (317)..(317): n is a, c, g, or t
ttttttttttttttttaaatctccacttccattttcaaacaaaatttcctttgagatttttttccccctctttgggaatagggtctcgccctgttgcccaggctggagtgcagtggcgtgatctcggctcgctgcacctctgcctcctggctttcaagctgaggtgggaggattgcttgagcctaggaggtcgaggctgcagtgggctgtggtctcgccgctgcactccagcctgggactacagagtgagaccctgtctcaaaaaaatttatcatgggcatgacaaatgctgtgattcggtgtactgattgggtccnaaacatttgctacaaatataggaaaatgtatatactccctaaggattaaat

SEQ ID NO: 5807 - DNA, 383 bp, Homo sapiens
  I.5807 (R42422)
  misc_feature (59)..(59): n is a, c, g, or t
ttttttttttttttttgaagcagtattggattctttattgggagtacatttttttaggnctcttaaactttaatttcacacagtaaattttgaatctcataaggaagcatatttgaacctagtcaatttaatcttagtgttcccttgaaaactttttttccctacaaaattttaagtgaaaaatacaataggtaaattaaggattacactgggggaaaaaaatgcaggtatcactttactccattgttatctgacctaggaggcttaattaaggttttaggaaatatgtaataccttccatcattccatcatccttaaattctggttacccaaataatgggcctaatggttacaaaaggttatactccaggggaccccaaggc

SEQ ID NO: 5808 - DNA, 404 bp, Homo sapiens
  I.5808 (R42224)
  misc_feature (11)..(11): n is a, c, g, or t
  misc_feature (25)..(25): n is a, c, g, or t
  misc_feature (113)..(113): n is a, c, g, or t
  misc_feature (151)..(151): n is a, c, g, or t
  misc_feature (155)..(155): n is a, c, g, or t
  misc_feature (236)..(236): n is a, c, g, or t
  misc_feature (238)..(238): n is a, c, g, or t
  misc_feature (325)..(325): n is a, c, g, or t
  misc_feature (366)..(366): n is a, c, g, or t
  misc_feature (377)..(377): n is a, c, g, or t
  misc_feature (388)..(388): n is a, c, g, or t
ttttttttttntttttttttttttnccggaaatgagcattttaatgcagaaagaaaaccatgataatttacaaatgaatcactttctgggccagagccaggaaggccccaggngctgtgagggtagaaagggaggtggaggcttttgagtntccnggcaaccagtttagtcagcacctttctgatgggatcctgcccaggctctcccacgataggccctgggggccctgggcaacncnccatcctcttggctccctctagtcattccagataggaagacctcgggtcagcttcaggacataaagtagagctggagagacatcccnggaaggagggccttagggcaggggagggaacaaggcagganacttctggttntcgttttttgnccaccttgaccttttg

SEQ ID NO: 5809 - DNA, 468 bp, Homo sapiens
  I.5809 (R41627)
  misc_feature (33)..(33): n is a, c, g, or t
  misc_feature (133)..(133): n is a, c, g, or t
  misc_feature (136)..(136): n is a, c, g, or t
  misc_feature (166)..(166): n is a, c, g, or t
  misc_feature (239)..(239): n is a, c, g, or t
  misc_feature (290)..(290): n is a, c, g, or t
  misc_feature (306)..(306): n is a, c, g, or t
  misc_feature (317)..(317): n is a, c, g, or t
  misc_feature (334)..(334): n is a, c, g, or t
  misc_feature (359)..(359): n is a, c, g, or t
  misc_feature (387)..(387): n is a, c, g, or t
  misc_feature (413)..(413): n is a, c, g, or t
  misc_feature (464)..(464): n is a, c, g, or t
ttttttttttttttttttttttttttgtaggtnagatggttattaataggtttttgcacaccgaaagcctcctggggagtagggagcgggcagagggcaaggccttcaaccatacagcaaagtaggcaagganttntgcttggggagggtggaaagcctaggcttntgatggatgcaggttttgcagaggcagagtgagcctgaaggggcctccagcttcctgccacttcctctcggtntcaccccagggcatcctcctgaactggaccaagggtttcaaggcatcagantgcgagggccaagatntcgtgagtctnttgcgggaagccatcantcgcagacaggtagggagccttttntagggggtgctttggggctttggcaggnctttgagggggagcaaagagtttccnacttttttgaggggggagccttttgcggtagagaccctttggggcccaatnctgg

SEQ ID NO: 5810 - DNA, 231 bp, Homo sapiens
  I.5810 (R41576)
  misc_feature (96)..(96): n is a, c, g, or t
  misc_feature (152)..(152): n is a, c, g, or t
  misc_feature (198)..(198): n is a, c, g, or t
  misc_feature (227)..(227): n is a, c, g, or t
ttttttttttttttttttttttttttagcatgtaaggagcagttttatttgattggtatattcaggtttctaaccagctgaaaaattcaaatacangccctttaaggattaagtttaaaccacactaccaaaagagaaaagatttatatgancacatataagcaatggaatcagcaatatgagtacttttcacaactntacaaatcaaatttaataatctccaggancatt

SEQ ID NO: 5811 - DNA, 309 bp, Homo sapiens
  I.5811 (R41518)
  misc_feature (27)..(27): n is a, c, g, or t
  misc_feature (202)..(202): n is a, c, g, or t
  misc_feature (217)..(217): n is a, c, g, or t
  misc_feature (283)..(283): n is a, c, g, or t
ttttttttgataggatgtgtttatatntacacggtacattttaaagcaatggctacattggtcatacatattagaaaccataaaaaaaagttaagaactaaaatgtacatcatacacttgtatatatattttttacacagaggtaaaaaggcttattataaaaaaatcaatacaacagggtttttagtatacaggtaaaggntgaattatggcttcngggcacttttaatttgttaatgtgaggcaaataggcttggggggtcggggaggcttctggggcagnaaatcttttggggtaatgttttgtta

SEQ ID NO: 5812 - DNA, 426 bp, Homo sapiens
  I.5812 (R41506)
  misc_feature (284)..(284): n is a, c, g, or t
  misc_feature (312)..(312): n is a, c, g, or t
  misc_feature (367)..(367): n is a, c, g, or t
  misc_feature (373)..(373): n is a, c, g, or t
  misc_feature (379)..(379): n is a, c, g, or t
  misc_feature (394)..(394): n is a, c, g, or t
  misc_feature (410)..(410): n is a, c, g, or t
  misc_feature (417)..(417): n is a, c, g, or t
  misc_feature (423)..(423): n is a, c, g, or t
ttttttttgaggtaatttctgctagatagagataaagcatacataaatcagagaactcagatgaccacaatcatcctaccaaagtaccttgaaagaaaggatcagtcgagccagtttgattgctgtcctttatggcccatgcccacagaacggctttgtgggtctctgatccaatgtcttcacaagctttaatatatggcagggcaacacctcctggatcagggtacattttgttgctgggacggaacgcatgggccattttacactcatgggtttcggcattntcaaaaggctaacatacgaggggagganttttttgaggcatgctcatccggggacagttttttcaaccccgttttgtaatttnaggctnaaaaantcggggttttaattncttgtgcaccttgttnaaacagnaggggnttt

SEQ ID NO: 5813 - DNA, 416 bp, Homo sapiens
  I.5813 (R41450)
  misc_feature (342)..(342): n is a, c, g, or t
  misc_feature (377)..(377): n is a, c, g, or t
  misc_feature (403)..(403): n is a, c, g, or t
ttttttttttttttttttttatcttcttcaaggactactgccagaaaatattttaataaattctcttagtggagcttttaaatacagtgtataaagcatctcacagcatacaaaagagagttttcccagactttaaatgagaaaagagaggtttccatggacctttcaaaaaccactcaacacaagcattcctttgtatacataacacaacaacaactgggaaagtccttaccataaaactcatacacatgtgacacaggcacgtctaacttctttgtttaataattcaaaaataccatgtttatggaaatgaataataaggcggccacttcttcggagtgnggttaatttttaggtccttttgaggaggagtgggntaaaatgggactggctttgggccaancccaatttttttg

SEQ ID NO: 5814 - DNA, 374 bp, Homo sapiens
  I.5814 (R41295)
  misc_feature (13)..(13): n is a, c, g, or t
  misc_feature (16)..(16): n is a, c, g, or t
  misc_feature (27)..(27): n is a, c, g, or t
  misc_feature (33)..(33): n is a, c, g, or t
  misc_feature (35)..(35): n is a, c, g, or t
  misc_feature (37)..(37): n is a, c, g, or t
  misc_feature (41)..(41): n is a, c, g, or t
  misc_feature (42)..(42): n is a, c, g, or t
  misc_feature (45)..(45): n is a, c, g, or t
  misc_feature (51)..(51): n is a, c, g, or t
  misc_feature (54)..(54): n is a, c, g, or t
  misc_feature (60)..(60): n is a, c, g, or t
  misc_feature (62)..(62): n is a, c, g, or t
  misc_feature (77)..(77): n is a, c, g, or t
  misc_feature (78)..(78): n is a, c, g, or t
  misc_feature (82)..(82): n is a, c, g, or t
  misc_feature (85)..(85): n is a, c, g, or t
  misc_feature (89)..(89): n is a, c, g, or t
  misc_feature (90)..(90): n is a, c, g, or t
  misc_feature (91)..(91): n is a, c, g, or t
  misc_feature (97)..(97): n is a, c, g, or t
  misc_feature (100)..(100): n is a, c, g, or t
  misc_feature (103)..(103): n is a, c, g, or t
  misc_feature (106)..(106): n is a, c, g, or t
  misc_feature (107)..(107): n is a, c, g, or t
  misc_feature (109)..(109): n is a, c, g, or t
  misc_feature (110)..(110): n is a, c, g, or t
  misc_feature (130)..(130): n is a, c, g, or t
  misc_feature (202)..(202): n is a, c, g, or t
  misc_feature (213)..(213): n is a, c, g, or t
  misc_feature (217)..(217): n is a, c, g, or t
  misc_feature (358)..(358): n is a, c, g, or t
  misc_feature (364)..(364): n is a, c, g, or t
ttttttttttttnttncagatagaagntcactntntncctnnggntggaantcnaacaanangagcggggaccagtnnaacncancccnnncagggncanagnatnntnncagtctcaaccacccaagtngcggggattacaggcatgcaccaccatgcccagctaatttttgtatttgttagtagagttggttttgccatnttggccagggntggntctcggtctcctgggctttaggtgatctgcccaccttgggcctcccaaagtgctgataccctgtcttcaaacaaacaaatgaagaatgtataggcacttacttatgtgccaggggactgctcttaaatctttttacatatnttaacncattttaatc

SEQ ID NO: 5815 - DNA, 312 bp, Homo sapiens
  I.5815 (R49120)
  misc_feature (269)..(269): n is a, c, g, or t
acattggatttctaattttaagttgaagatatatataacagaaattctatatttgcttcccctaccccatagattgtctcagacaccctaccctggagacaccaagtccagaaggtgacttatgctagtaatccacagatgagggataagggggaccagctgcagagcttggtggtatcagcaaacatgccaaaggaggatcaaaatgatcagatagagatgaaggaaaagaccagctgggtatttgatcagatttagtagagaaaggngaaaggatttcaaaatggttccaggtttttactccaaaaaaca

SEQ ID NO: 5816 - DNA, 447 bp, Homo sapiens
  I.5816 (R48999)
  misc_feature (237)..(237): n is a, c, g, or t
  misc_feature (256)..(256): n is a, c, g, or t
  misc_feature (261)..(261): n is a, c, g, or t
  misc_feature (365)..(365): n is a, c, g, or t
  misc_feature (405)..(405): n is a, c, g, or t
  misc_feature (437)..(437): n is a, c, g, or t
  misc_feature (446)..(446): n is a, c, g, or t
gggagtgggaacgtgcacctcagcggtcgagctcggccgggaccctaggtgcgggggaggcggggtcccggctccgctgcctgcccagacctggcggggatggcccgtgcggctccgggtgtgggacgtatcctgggagcgcccggggttattcccactgactcccgggagtgggtgtgcgcccttcgccccctgcctggtctgtggggatccatcgttgctggagactggaggtcnggggccatgggagcccggnggcanacggtgcgggcctgggtcttgtggaaaggaggagcgaccgcctgagcttgcagcagggacgtcctcctgacctggtaataattaggttggaaggatggtttggngccgtttgcgtaactcagggaacaatggttaaaattgttncccaaacgattacagtttgattttttcccgtnagaaatttnc

SEQ ID NO: 5817 - DNA, 328 bp, Homo sapiens
  I.5817 (R45291)
  misc_feature (136)..(136): n is a, c, g, or t
  misc_feature (293)..(293): n is a, c, g, or t
  misc_feature (314)..(314): n is a, c, g, or t
tagctgtaggtttagtgggttttttccccctgattacactgggagtttttaaatattctatcaacggtcacattggtacagaactgccatatctgatcattgccctggtgtctgattggtgtgaatgtggaggagnctttggaatcccaggccttccaagaaaaaactttaaaagctcagggaattgctggtgagagcctgtattcctccatttccttaattgagtccagcagctacagagtaaattcaaacacaggttaattaagaccactccattcactttcccaattttnccaagtgacaaaaacacttgnttcttgagccagtg

SEQ ID NO: 5818 - DNA, 483 bp, Homo sapiens
  I.5818 (R45210)
  misc_feature (161)..(161): n is a, c, g, or t
  misc_feature (387)..(387): n is a, c, g, or t
  misc_feature (393)..(393): n is a, c, g, or t
  misc_feature (401)..(401): n is a, c, g, or t
  misc_feature (476)..(476): n is a, c, g, or t
ttttttttttataaataaacagttaacagtttattgtatcagaaaataatttaggaaaatgaaaataaaaccagttttggtatacatgggtgagggggcgggggaataaagttctaaaacattcaatgcaaaacctgtgaaaaaagaggccatgtggcgtntgctgtttaatttcttgtcctgtggttcagcttcaggtttgtgaatttctagttccatgggtgagctgaggaggaggggggacaatggggctccatctttaaataaatgcaatgagacctgggtgaattcaaggggttatttgaacgcactagggaggcatccacacgggacctggggtccttctatttctcagattctgtgacttctttaggacaggatgccccntggggnaaaatccngttcaatagtttggggtgttttcactgaggtatccccgttttatttcccttacccattgccccacatacggcccnttgggcc

SEQ ID NO: 5819 - DNA, 261 bp, Homo sapiens
  I.5819 (R42663)
  misc_feature (100)..(100): n is a, c, g, or t
  misc_feature (104)..(104): n is a, c, g, or t
  misc_feature (107)..(107): n is a, c, g, or t
  misc_feature (110)..(110): n is a, c, g, or t
  misc_feature (115)..(115): n is a, c, g, or t
  misc_feature (119)..(119): n is a, c, g, or t
  misc_feature (154)..(154): n is a, c, g, or t
  misc_feature (157)..(157): n is a, c, g, or t
  misc_feature (159)..(159): n is a, c, g, or t
  misc_feature (167)..(167): n is a, c, g, or t
  misc_feature (220)..(220): n is a, c, g, or t
  misc_feature (221)..(221): n is a, c, g, or t
  misc_feature (231)..(231): n is a, c, g, or t
aatgaactgtttatattatctccgttgagtcaatacattataatgtattaaaatggaaaggtacaaaattgaaataaatactttctgattcatgtataantctntgnggnggggntgtngtcaagatgactttgatcatcagtacatgtcacanganancatttaanatgacactgaaacaatcattgaaatcatggtgcatgggggaaaaaggtaaagnnaacaactttngggcttgttttgggcatgagaccttgatac

SEQ ID NO: 5820 - DNA, 348 bp, Homo sapiens
  I.5820 (R41952)
  misc_feature (243)..(243): n is a, c, g, or t
  misc_feature (296)..(296): n is a, c, g, or t
atgggcttatacacaacagaaatttatgtctcatagctctggagtctgggaagtctgcaatcaatgcaccagcagattcgatggctggtgagaacccactttcttgcttataggcacctgctggctgtgttctcatgtggtggaaggggcaaggcagctctccaggggcctcttttataagggcactaatcctattcatgggggctccaccctcatgatctcaccacctcccaaaggccccanctcccagtaatattcactttgggtaattagggtttcaaaaggatggaattttngggggagacacaaacatttcaggacaataggcagggatgcaaactttacttt

SEQ ID NO: 5821 - DNA, 294 bp, Homo sapiens
  I.5821 (R40320)
  misc_feature (45)..(45): n is a, c, g, or t
  misc_feature (52)..(52): n is a, c, g, or t
  misc_feature (66)..(66): n is a, c, g, or t
  misc_feature (109)..(109): n is a, c, g, or t
  misc_feature (197)..(197): n is a, c, g, or t
  misc_feature (209)..(209): n is a, c, g, or t
  misc_feature (249)..(249): n is a, c, g, or t
  misc_feature (259)..(259): n is a, c, g, or t
gactttggacaagtttattgacttctttggaacctcagttttctnatttganaaaactagatggtnaagaagcgtctaggattattgggacacgtaaataacataattntaacacagcccccccaactctgggttcctgggtatggggtaagtttttagtaaatgtgagatgctgtgattagtactgtggaatatgnatgggctatttnaacagaaggaattataaagaaaggggcttcagggaagggnttggggagtnactcagccgggcaaccatcaagcactttgtccaaa

SEQ ID NO: 5822 - DNA, 467 bp, Homo sapiens
  I.5822 (R54540)
  misc_feature (97)..(97): n is a, c, g, or t
  misc_feature (325)..(325): n is a, c, g, or t
  misc_feature (390)..(390): n is a, c, g, or t
  misc_feature (419)..(419): n is a, c, g, or t
  misc_feature (425)..(425): n is a, c, g, or t
  misc_feature (436)..(436): n is a, c, g, or t
  misc_feature (442)..(442): n is a, c, g, or t
tggtagattggattgaaagaaaggagaaagaacattagcagaaggcactttcccattttcttccaggaatgacttattcctggggtggtgagaattngtgggtggtaaccatccatagtataaaattgttagaaagaatataaactgccaaacaagcatgttatcttcaggcttttccaagcaagaatgaagtcttttgatgtttatgttcattttaagaagacaaacaaactaaaattttaagaccagacacaacccaagttgaattgtgatctcaggaggtgaactctcattcaccatgtgggcatattactacctgtatttntatcatgggatttcagggtatttgtgaacatgtctagtatgactcaggtaaaccttttaaaggantgtatgttacttaccatttttgttaaggnggcaanccggggctggnttgttnacccaaactgtttccttacctgggt

SEQ ID NO: 5823 - DNA, 457 bp, Homo sapiens
  I.5823 (R54485)
  misc_feature (418)..(418): n is a, c, g, or t
ttttttttactaacacaatattttgtatttacagtattctgaacagtgcttaaacctgcactggttatataaaagacactcccccacgctacctcccaccccaggctgacagcatgcttagttctctcatttacaccacactgcaataacataaagaggggcttactattaatccaggttttactacaaagcgacccgttatttctctgtcaaacacttgcaagagtgccaagtgtctgtcatccaattcaagggattaagtcttcttttatagtctgatacttgtaccaatttataaaaatacagatatagtttcttagagttgggtcacagtctatattttgggcttgggatttcagggcagcagaggttggactatggacaggctgggcagggaaactgagggggaggattacancctcccccttcagttcaccacatttcagttggccttagt

SEQ ID NO: 5824 - DNA, 404 bp, Homo sapiens
  I.5824 (R54474)
  misc_feature (10)..(10): n is a, c, g, or t
  misc_feature (277)..(277): n is a, c, g, or t
  misc_feature (400)..(400): n is a, c, g, or t
tttttttttntagagatagggtctcactctgtcatccaggctggaaggcagtggcatgatcatagctcatgcaacctctgtctcctgggctcaagcaatcctcccacctcagtcttccaagtagctgggactacaggcacatgctaccatgcttggctaattttttatagaggttggtaggggggtctcactatgttgcccaggttggtctcaaactcctgtcctcaggcaatcctcctacctcagcctcccgaagtgctaggattataagcgtgancgccaccctggccttttttcattttttaatggttgaaaaaaagtcaaaagaagatacttcataacaaatgaaaaattatatggaaaatccaaatttcagtgttccataaataaagtttttatncagg

SEQ ID NO: 5825 - DNA, 417 bp, Homo sapiens
  I.5825 (R54442)
  misc_feature (353)..(353): n is a, c, g, or t
  misc_feature (365)..(365): n is a, c, g, or t
  misc_feature (377)..(377): n is a, c, g, or t
  misc_feature (390)..(390): n is a, c, g, or t
  misc_feature (404)..(404): n is a, c, g, or t
  misc_feature (415)..(415): n is a, c, g, or t
ttttttttttaagatccttaaaaagtatctttaattgatgccaaatatgaacagatcgtaaagtgacagaagcaagtaaaattgcatagatgaaaactatgcgcatcaattaggttctcaattcataacattcaatgtccttgacctgacatattacacagttagagaagggagaatgcgcagtaggtgaagatgaggacacgtccttaactcaaggtgggaaggcaactgggcaaacttcaaggaaataaaataggcgttttttcaggcttaaatgggtttgttgtcctgatgggtggcactttaaattaatactacttcaatttttattttttaacctcagtaatactttntctttactattngggggcatgtcncctgggggtcccntgttggtctacttnccatctgctgnct

SEQ ID NO: 5826 - DNA, 335 bp, Homo sapiens
  I.5826 (R54264)
  misc_feature (68)..(68): n is a, c, g, or t
  misc_feature (316)..(316): n is a, c, g, or t
gttggttttctttcccctcatccttttgcctgctcccggcgagggttggctttgatttcggcgatgantcccagaaaggcaacgtggctcgttccagacctcagaagcaccagaatacgtttagcttcaaaaatgacaagttcgataaaagtgtgcagaccaagaaaattaatgcaaaacttcatgatggagtatgtcagcgctgtaaagaagttcttgagtggcgtgtaaaatacagcaaatacaaaccattatcaaaacctaaaaagtgatggagtctccctctgttgcccagggtgggagtgcagtggcaggntcttgggctcaccacaacc

SEQ ID NO: 5827 - DNA, 370 bp, Homo sapiens
  I.5827 (R54252)
  misc_feature (207)..(207): n is a, c, g, or t
  misc_feature (327)..(327): n is a, c, g, or t
  misc_feature (355)..(355): n is a, c, g, or t
  misc_feature (362)..(362): n is a, c, g, or t
agaacataaaagtttgggaaatttgcagtctggcaatgcaatagaaaataaaatcccattttctgaagagaaattcaagccagctgcagaaatttacctaataacgaggagccaaatgttaatccccaagacaatggagaaaatgtctccagggcatgtcagaggtcttcacagcagcctcttccatcaaaggcccagaggcttagnggggaaaaaatggtttccaaaggcccagggttcccattctgtgtgcagcctagggacttggtgccctacctctcagccgctccagccatggctttcagagggtgcaagccccaagccttngcaggcttccacatggtgtttgaacctngggagtngcacagaa

SEQ ID NO: 5828 - DNA, 441 bp, Homo sapiens
  I.5828 (R54243)
  misc_feature (407)..(407): n is a, c, g, or t
ttttattgtatataaattatatctcaattgaaatgtgaaaacaaagcaataaaacatcccctgttcccatttcaggagtcatgtctgggctgcctgggaggacaacaggaatactgatcgctagagcaaataaaagactcttggcagtgggcaacttggtcctcctaaggctttagaaattgtcttgctccatgaaaatgacatgttctgaggccccagtctggggtatactgactttcattagctaacgtcaccatccgtggtgctccctcacttgccaacactgcactgtagatttgactcccaagagcctaaggatagtctctgccaatcctccagtaggccaccatcatagtagtttttacccccatcagtcaggcagtccagtgttttacttaacccctccnttaatttcacaggcagttttttaaccaccccttt

SEQ ID NO: 5829 - DNA, 365 bp, Homo sapiens
  I.5829 (R54147)
  misc_feature (88)..(88): n is a, c, g, or t
  misc_feature (175)..(175): n is a, c, g, or t
  misc_feature (281)..(281): n is a, c, g, or t
  misc_feature (289)..(289): n is a, c, g, or t
  misc_feature (331)..(331): n is a, c, g, or t
  misc_feature (337)..(337): n is a, c, g, or t
  misc_feature (348)..(348): n is a, c, g, or t
  misc_feature (361)..(361): n is a, c, g, or t
tgccaaaagtgacacctgagaccccttgtgaaaatgagtttgctgaaggcagtgcttgcttccaggcagcgaggctggcgtttctgtncagcagggggctcaagtcttcctcttggtggctgcagagttgtgagtgactctcgcttagcaaagactagagatggcctgtccgtgncaaaacacagtgccgggtccggagcagaagaatccaacagcagctccactgtgcagaagcagaatgagccaggggctacagacagaggatgtgcagaagccaccanttcagatnggacaacagcgtctttctaagatgacgacagcattcagccantgcccntgagccggttntttgggaaacttntagt

SEQ ID NO: 5830 - DNA, 487 bp, Homo sapiens
  I.5830 (R53961)
  misc_feature (32)..(32): n is a, c, g, or t
  misc_feature (39)..(39): n is a, c, g, or t
  misc_feature (51)..(51): n is a, c, g, or t
  misc_feature (454)..(454): n is a, c, g, or t
  misc_feature (487)..(487): n is a, c, g, or t
ttttttttttgaaatgggatgtcattctgagnactcagnaaacccctgagncttgttagatggacagacatcctttccatcttatgtggatgagtgtttcttcagtgtctttagtatcaatttacccagatactgattttgaaagcctcattcacaccataaactttgttctaaacctctgtcttttacattgtccttctccaatgccttacctcttagttacgattctgaaaccaagagtacatctcaagtatgtaggctgcaatgggagctctgcttcacgactgtaggctagtgtttaatgctgagtaaaaaatgtgccttaaagggtagcctgagtcctgttcatcaaaataatcacatggctgggctgagggaccctcaaggctggatggacagtgtttcccaagtttaaacaggcccaactaaaaatttttttctcccttatttgggnttttgaggaaaccttacaaaatcctggggctan

SEQ ID NO: 5831 - DNA, 475 bp, Homo sapiens
  I.5831 (R53954)
  misc_feature (454)..(454): n is a, c, g, or t
tttttttttgaagggagtctcactctatcccccaggctggagcacagtggcgcaatcttggctccctgcaacctccgcctcccaggttaaagtgatcctcatgcctcagtctccagagtagctgggattacaggcacctgagatccagtaaatgagaaataggaatctatagccctgctgaacatttcataaggcctggcataattcaaattctgccctgtaatcaggctgtcccaggcaacacaggcaagattaaagaaatatttaagtttatttgctttgggctggaatatatataactcagtgtagttccactggttaccttatgttctgttgatctgcatttctaagtgggcaattgattgtatgctgttaattcatttttttaaataaaatcgattagtacttaattaatgtattttgttttggccggcaaaacacacagtataccctngacggtaaaaagccgcaggtt

SEQ ID NO: 5832 - DNA, 394 bp, Homo sapiens
  I.5832 (R53935)
  misc_feature (309)..(309): n is a, c, g, or t
tttttttttattatatatggaaaaagtattatatttattattagagaagttaatatgaatatatgaaggtaaccctgctcattatgaacatgcgactctctggaatatataaagatttgtaaaaagtttcaagaaatggtcaactttataaatgtatacaaatgaaaacagatataagctatcacctcatacctattaattggaagaaaacagattaaaatgataaaacccagtgctagtaaattacaatgaaacagatatatttatatattcctgttgacaatgtaagttattaaaatgttttaaggntaattatttaggccttttattaacaaggcaacaaatgcccagcaaatccagtccattgtacatgtaaggcattgttgtccagggg

SEQ ID NO: 5833 - DNA, 430 bp, Homo sapiens
  I.5833 (R53734)
  misc_feature (1)..(1): n is a, c, g, or t
  misc_feature (402)..(402): n is a, c, g, or t
  misc_feature (411)..(411): n is a, c, g, or t
nattcggcatgaggggaagaataagtccatgtactgtaccacagaagttctgtctgcatcttggacctgaacttgatcattatcagcttgataagagactttttgactctatatccttgcagttaagaagaaagcacttttttgtaatgtttgttttaatggttcaaaaaaaatctttcttataaagagcataggtagaattagtgaactctttggatcctttgtacagataaaggttatagatttcttgtgttgaatattaaaaaagcaaggatgtctaaccattaaggattatccactgtgcctggccccaagttttgcatcttttaatgccctctggaacaaatacataggggaaaactctcaggaacaattaaaacctggcggggcaacagtgttccntccctgtcntaggggttccaggtttggc

SEQ ID NO: 5834 - DNA, 435 bp, Homo sapiens
  I.5834 (R53676)
  misc_feature (381)..(381): n is a, c, g, or t
  misc_feature (427)..(427): n is a, c, g, or t
atgaaatgaaggtcagagatgagatcccgcagcagggacgtgggggcctcccaggggcatttacgcaccagagtcaagattctctggccatcaagggaaatagcaaacagaagcctttgtcctggggcacagcacctaccacaaagcatcagactccacgtctggccagaaagttcctggagtcccatcaggccagtgggtatgtaacatgtgcctaattgtacagctagagcctgcaagttcaacgtgagggaaggtgggaaatgtcttgagtgaggcgagcagctcctggctgggctgggcagactcagctaccacgttcactgccttcctcttcacttaaagccgagagggaggctgcttcagcttctcagggaaaantctttttgaaccctggggcacctgctgttccttcagtttgggcatnttcccacc

SEQ ID NO: 5835 - DNA, 506 bp, Homo sapiens
  I.5835 (R53660)
  misc_feature (377)..(377): n is a, c, g, or t
  misc_feature (405)..(405): n is a, c, g, or t
  misc_feature (419)..(419): n is a, c, g, or t
  misc_feature (467)..(467): n is a, c, g, or t
  misc_feature (483)..(483): n is a, c, g, or t
  misc_feature (495)..(495): n is a, c, g, or t
  misc_feature (503)..(503): n is a, c, g, or t
tggaatcccagcaagttgtgaaatggaaagactagtcggccagagagctgaggtctcacagtgtgcaaagaccagtcctcagtatctgcacccatccatttgagtttcaggtgaagcctaggatttgggagctcaatacaaagatgccagcatgaaggagggtgggtgccaactaggtttggatttagagacatcctccttttgggaaaggaaaaaatcctgattccacttaggtttccagggaagaaggcatccccatttcagaacagttttctaagccaccctcatggaggtttcacctgcagctttcagtctgctttgtctgatgtttgaggatgcaactgcccaaaaatggggtctaaagtaggcatcccgtncacgtttctgttaaaaagtaatactgcntttaagggtaacanttatggggattgaatggattgcatgattgattgagttcagttttgggnggagtttgcccccaantagggtcttaanttttaggnttc

SEQ ID NO: 5836 - DNA, 518 bp, Homo sapiens
  I.5836 (R53649)
  misc_feature (399)..(399): n is a, c, g, or t
  misc_feature (458)..(458): n is a, c, g, or t
  misc_feature (500)..(500): n is a, c, g, or t
  misc_feature (517)..(517): n is a, c, g, or t
ctcttaacaccaaggagctgaaattcttggctgggtgcagtggctcgcacctgtaatcccagcactttgggaggccaaggcaggtggatcacctgaggccaggagttcaagactagcctgaccaacatggtgaaaccccctctctactaaaaatacaaaattagccaggcacggtggcgggtgcatgtaatcccagctactagggaggctgagccaggagaatcgcttgaacccgggaggtggagattgcagtgagttgggatcttgccattgcactccagcctgggcaccaagagcgaaactctgtctcaaaaaaaaaagctgaaattctcaaattgggtaaacatagttcacccttgtcttctggcccatttgcagttaaaatgccacagcctgggngttcaatttccctttcctaaatgggggttggtgcttgctgttagtgttcaggtgataanttttcattctagtgacttgacagttttcccaaaagggctttnttctttgctcaggaaant

SEQ ID NO: 5837 - DNA, 487 bp, Homo sapiens
  I.5837 (R53564)
  misc_feature (464)..(464): n is a, c, g, or t
  misc_feature (474)..(474): n is a, c, g, or t
  misc_feature (485)..(485): n is a, c, g, or t
tttttttttgcatatctcaaatttaagtttatttaaaaattacaaaaatgtctccactcaagttgtccttgaaaaaaatttagaagcagcaacaatcatcttggttagttacaagcagtctagtgcaatttataaaatcgagcaaaatttggatgtgtgtcttatccctctgtagacacgggacccttttttgaggtctctttctttagggtctggtagcatcatgactgggacactttccaaagccttcttcctttggactctatgtaaaataattctatagacccctgtgattgaggctgcgagcatctctcccttgggttatttcgaatatggctcttctgtaatgcccaaatgttctaaagtgcttttggacctcattttcttcttccttggggagtgctgggtttccgacaaatgtttggggatccagttgggaaaggttccaaaggtgtaggggtttnggcacccctngcatcccttcntt

SEQ ID NO: 5838 - DNA, 485 bp, Homo sapiens
  I.5838 (R53549)
  misc_feature (314)..(314): n is a, c, g, or t
  misc_feature (406)..(406): n is a, c, g, or t
  misc_feature (480)..(480): n is a, c, g, or t
ttttttttttgccgactttagaattaggcattttatttaactcatcaaataatacaagttattccaggaaacaacaatcaaaatgtattacttgtactaacgatatgtagagccacatttccaagaaatctcatgaaaataaattacttgatggaataaagcaaataaatagattttttacaaacaataaccctgtgaatattagaaaaaaaatgtgagggttctggggaaggtgccacacggtgctgggggaaaatggaacttgaaactaatgcctgaatgagatgtaggaaacagcagcacgttaacaaaanttagtaacagacattctaactgctttcctccatctccccggttttaggagtgacttctcccatccccaccgaggagaggctccaagtaccgntcctggacacccacagcctaagtggttccccttattgtaattcggaccttcttagggacctggaatttgcattnctctt

SEQ ID NO: 5839 - DNA, 478 bp, Homo sapiens
  I.5839 (R53538)
  misc_feature (11)..(11): n is a, c, g, or t
  misc_feature (447)..(447): n is a, c, g, or t
  misc_feature (471)..(471): n is a, c, g, or t
ttttttttttnttaaaggtacaaatttattaaaactttgcagttaacaattattgaagaaattagtatgttaactataaaaacctagaagtcccaggaattagatttcaaaggatttggtttcaaagaattccttataagtgattttaacattacattctttgttaaactgggactttttctactttggggattattttgccccagctgtggccatgtttaaaattagtcagcagcacatgaagttgtggagagatgagaggttcgcactcttatccaagttttaggcaaatagcactgtatttcccatttaatgggaatgcagtttcttctgcggttctttgggcataaagaggctctaggactccccatttctttcacttcaagggaaggagccatttggcattcttgtcctcacacctgagtacttgttcacaagttaaaacangggccaaatcaccacctcagggcntcctgta

SEQ ID NO: 5840 - DNA, 474 bp, Homo sapiens
  I.5840 (R53358)
  misc_feature (458)..(458): n is a, c, g, or t
  misc_feature (467)..(467): n is a, c, g, or t
acagttgtgttacatggatatattgcttagtgttgaaatctgggcttttagtgtacccatcaccgaaatagtgtacattgtacccaataggtggtatttcatccctcaaatataattttaaacacacactcgtgcccacatggacaaattatatcacatgactgaggaaacttagaaattccttttccctgaagatctgttaagaataggtctcatctcctgccctggttaggtgctatattatatggagaagggtattgagactttgggggtcatgtttgggctgtgataactggcttgaaccagtgaccatcctttctgcctcgccaaggtctcttataccagcttcttcacatatgctggcttcctcccaggctttcccttctggacttcttgttaactctggcaactatgtgttcaagggccttacctttttcccgatgtttttcaaacctccnggcattaanttggatc

SEQ ID NO: 5841 - DNA, 461 bp, Homo sapiens
  I.5841 (R53351)
  misc_feature (428)..(428): n is a, c, g, or t
tagagacagggtttcaccatatttgccacgttggtctcgaactcctgacctcatgatccgcccaccttatcctcccaaagtgctgggattacaggagtgagccactgtgcctggcctattttttatttttttgagacagtgtcttgctctgtctcctaagatggagtgcagtggcagattctggctcactccagcctcaccctccggggtttcaagcgatcctcccacctcagcctcctgagtagcttggactacaggtgcataccaccatgcctggttgcttatttttatttttgaagagatggggtctcactatgttgcccagggtggtctcaaactcctggggcttcaaggcagtcctcccaccttgggcctccaaaatttctggggatttacagggcagggagccaccacacccaggcctgtanttgatttatttcaggggatgttttccccacctt

SEQ ID NO: 5842 - DNA, 469 bp, Homo sapiens
  I.5842 (R53330)
  misc_feature (436)..(436): n is a, c, g, or t
  misc_feature (442)..(442): n is a, c, g, or t
  misc_feature (462)..(462): n is a, c, g, or t
acaatgtaacctgacagaaaggagaaatcaatacagctccatgaggtagctccatttgctatgtttctgtttctcagcccagactccggaagcactggcaagaatcttcaataggtttcaatgtggtggtccttcagctttttagagtctactgaccttatccagagctgcctgtacctcagcttcactttctgtgtccaatgctgacgtggcctcatccagcagaaggatcttggggttgcgaaccagggcacgtgcaatggcgatcctctgcttctgcccaccactcagctgggcccctctctctccaaccagggtgtcaaatttctaacacagaaaacatggatcagctcttggaagtaacttaaatttaaaaaggctagggaattctattaggaactacattaaaggacaacatgggagctttgtttttaantttttnatgtattcttaaagtatggntaggtta

SEQ ID NO: 5843 - DNA, 354 bp, Homo sapiens
  I.5843 (R53296)
  misc_feature (1)..(1): n is a, c, g, or t
  misc_feature (29)..(29): n is a, c, g, or t
  misc_feature (236)..(236): n is a, c, g, or t
natgtataagacatgaggccagggcgcgnctgggtggctcacacctgtaatcccagcactttgggaggccaaggtaggaggattgcttgaacccaggtgtttgaaatcagcctgggcaacatagcaagaccctgtctctacaaaataaaatagattagccaggtgtagtggtgatgcctgtagtcctagctactcaggaggctgaggcaggaggattgcttgagcccaggagtttnaggttacagtgagagacaatgattgtgccactgcctccagcctgcgtgacagagtaagaccctgtctctctaaaaaaagagaaaaaattatatatatatatatatatatatatactct

SEQ ID NO: 5844 - DNA, 498 bp, Homo sapiens
  I.5844 (R53275)
  misc_feature (307)..(307): n is a, c, g, or t
  misc_feature (328)..(328): n is a, c, g, or t
  misc_feature (356)..(356): n is a, c, g, or t
  misc_feature (369)..(369): n is a, c, g, or t
  misc_feature (415)..(415): n is a, c, g, or t
  misc_feature (441)..(441): n is a, c, g, or t
gtaaacaacagtaacaacaatgacaacaaagcctatggttatgtctataatcttttggtgcaaaaccttcttgtcttgtctttttctgcttatcaccaccctctttcttattttcaccaatctggagatgcatatacaaaaacattttaaaatccactttttggccgggtgcagtggctcatgcctgtaatcccaacactttgagaggccgaggcgggaggaatgcttgagcccaggagttcgagaccagtctgggcaacatagggaaaccctgtctctgcaaaaataaaaaaattggctgggcatngttgcacatgcttgtggtctnggctactgaccactgagctactgaagtnggaggattgcttngacctaggaggttgaggctgcagtgagctgagatcgtgccttgcantccagccgggtgacagagcgagaccngttcacattcacacacacacacacacacattccgtttgtttctaatctgtggcacct

SEQ ID NO: 5845 - DNA, 317 bp, Homo sapiens
  I.5845 (R53258)
  misc_feature (51)..(51): n is a, c, g, or t
  misc_feature (73)..(73): n is a, c, g, or t
  misc_feature (175)..(175): n is a, c, g, or t
  misc_feature (258)..(258): n is a, c, g, or t
  misc_feature (312)..(312): n is a, c, g, or t
ttttttttcaaacccagctcttttattttatcaccacagtgtattttacangcttaaaataagttgaaatganttttcccagctaaagtagtttgccattaggaacaaccaacatttctcaagtctcttgtaaaataaaaagagcatcaagtgaatttaagtagactaatcagancaatagaagaggcaggaggaggagataccgtctgctgactctctgaatgaaaggagacggggtttacaaaggagctttggaantattatacacagacaactagagacaaacatcaaactggaattctaatataggantattg

SEQ ID NO: 5846 - DNA, 379 bp, Homo sapiens
  I.5846 (R52949)
  misc_feature (13)..(13): n is a, c, g, or t
  misc_feature (230)..(230): n is a, c, g, or t
  misc_feature (235)..(235): n is a, c, g, or t
  misc_feature (238)..(238): n is a, c, g, or t
  misc_feature (242)..(242): n is a, c, g, or t
  misc_feature (292)..(292): n is a, c, g, or t
  misc_feature (301)..(301): n is a, c, g, or t
  misc_feature (328)..(328): n is a, c, g, or t
  misc_feature (352)..(352): n is a, c, g, or t
  misc_feature (371)..(371): n is a, c, g, or t
  misc_feature (376)..(376): n is a, c, g, or t
cacttggtataanttttatttgcatgtgtaaaaagtgtatataacaggaaacctcttaaaataaaaacatagtaaagttttaggaaaaatatgaatttagaaaatgggttgctttttcagatcacaaaaatactgatatatgtgtactaaattaccttaaactgttgaggtgttagagaaacatttttcaaaaaacaaaaaaagttggaggttggaggagacacaaaatntagangantganggtactgatatatgtcacacatgttttaaaatgaccacacagggcaggantctacaaanggattcaaattctttaaaattacaggnattgctaggaggattcccctaatnggtgttaatgggccatacntaacnttc

SEQ ID NO: 5847 - DNA, 433 bp, Homo sapiens
  I.5847 (R52726)
  misc_feature (335)..(335): n is a, c, g, or t
  misc_feature (381)..(381): n is a, c, g, or t
  misc_feature (397)..(397): n is a, c, g, or t
  misc_feature (426)..(426): n is a, c, g, or t
ccgcatcattgacgtggacgccctgtgtatggagaacaggtaccttcaagagagattaaagcaactccatgaagaggtcaacctcttgaaatcaaacattgccaaatacaagaatgctctggagagacggaaaaactcgaagggccagggtaaatccagcagcagtgctctgacaggagtcctgtctgcaaagcaagttcaggatctgctatctgaggatcatggatgcagcctcccagctactccgcagtccatttctgacctgaaatctctggcaacagccctgttggaaacaattccacgagaaaaacatggtcatttcagccaccagaggncaaaccaacaaaatcctaggggaattcgggtggctggagctggganaaaaaatttaaggaantctgggaagttttttggtttgtgggagtntttccgg

SEQ ID NO: 5848 - DNA, 359 bp, Homo sapiens
  I.5848 (R52679)
  misc_feature (42)..(42): n is a, c, g, or t
  misc_feature (44)..(44): n is a, c, g, or t
  misc_feature (48)..(48): n is a, c, g, or t
  misc_feature (265)..(265): n is a, c, g, or t
  misc_feature (301)..(301): n is a, c, g, or t
  misc_feature (346)..(346): n is a, c, g, or t
  misc_feature (354)..(354): n is a, c, g, or t
ttttttttttttttgaggacctacatttaataaatcaaactntncttntttcatcagaatattcacagtttgcaacaggatcagcgcgttttctcacttgcagactcggaggtatttcaggagaaggcgacgtgagcgcaccattccgatgcttcattcttgaccctctctggggctttcaatgtgtcattgtgtcagatccctctccccttcaggttttcacggtgctcctcatgcctccgccctctgggatccctttgccgtnttccggtgtggaagctttggctgctggccggctggnttcggaaggagtccaggggagatttagggagctccccctgggatngccagggnctggg

SEQ ID NO: 5849 - DNA, 230 bp, Homo sapiens
  I.5849 (R52641)
  misc_feature (12)..(12): n is a, c, g, or t
  misc_feature (130)..(130): n is a, c, g, or t
  misc_feature (220)..(220): n is a, c, g, or t
tttttttttttnggatattatgtgcattttattgaatgttaattatacatcaataaaaatacaaagtagcaatgtgcttcaagatacagactaacaattttgtttcaaatgaaattcaagactacacaantgcatcttcagttacacagcattttcaatcatgtgccattctgatttattcacacttctattctttgatcattgtaaataagctaatggnttacagacac

SEQ ID NO: 5850 - DNA, 405 bp, Homo sapiens
  I.5850 (R52621)
  misc_feature (310)..(310): n is a, c, g, or t
  misc_feature (366)..(366): n is a, c, g, or t
  misc_feature (380)..(380): n is a, c, g, or t
  misc_feature (394)..(394): n is a, c, g, or t
ttttttttttttttttaaggtctgctgaaaaggcatgattttattgcacactcacaatatgacaggtgctgtgctactcatcaacactcttttcaaaacaggatttggagacaggattcttcaaaagagaactgcacattcaactaaacatgtccaaaaaacttcaactcttttgaattagtctccaaatctacacaaaccatagaaaatagaagatcattaaaatacatgattatacacagacaaatggacaaatgaaacagtaattaatattgcttgagctcagattgctcctgtaagatctggcagnaatcgtatgatggggtaaggttttctaggaacatttttcatcaggggataatggcngtatctcattaggnctaaaagggggtgntaggtgctggg

SEQ ID NO: 5851 - DNA, 408 bp, Homo sapiens
  I.5851 (R52576)
  misc_feature (364)..(364): n is a, c, g, or t
  misc_feature (398)..(398): n is a, c, g, or t
aatactttaaaaataaagatacacaatttatatttgaaaataaaaactttctgctggtgggattatttatagttctttatttttaaagaaaatgttttcctttttatattgctcttgaaagtttaatgagcagaatacaatactggttataataaaaatatggtaaccacacagtactcagcctttcaatatgtttttggtcaaacttcatttaggcactagcatttagaagaataccaatcacagtgatgcttttgttatttaatatgaaggaaatgggaactaaaacatttatgtcatcaaattttatttcacttctttatatttgacttgctgggttgatacataatgggttgatggaacntatatttgccttaaattcactaatgggggtgggntgttaaaggt

SEQ ID NO: 5852 - DNA, 303 bp, Homo sapiens
  I.5852 (R52528)
  misc_feature (182)..(182): n is a, c, g, or t
  misc_feature (233)..(233): n is a, c, g, or t
  misc_feature (282)..(282): n is a, c, g, or t
  misc_feature (295)..(295): n is a, c, g, or t
tttttttttttttttttttttgcaaacacaacttaaccatactttatttgactgcatcttatttagacagcttgcacatttcaaatcccattaaatctctctccaaaaggatatgggacaatagaagaaaattatgcagcaatatccagtcaaacagcagtccaatattttgagatacacgngatattttataggatactcaactcatatctgacgtcaatataatttatggntatgtttttacaaacctgaaagccctgtaacattacagcactcattttngtgatgtcatggngcactgga

SEQ ID NO: 5853 - DNA, 341 bp, Homo sapiens
  I.5853 (R52321)
  misc_feature (265)..(265): n is a, c, g, or t
aaatcagtacacaaataacagttgccacagtgtaccagtatttcaatttctaaagaataccatagagtctgaattagaacctttaactagattgcaaaggaatatactaaattgaaaacttgtaaaagggaagtaataaacaccataatcctagataagatcctatggtctttcagagtttttccatatacagtaattatttgatgtacagtaattattgataaccaaaatgacaaaaactgaatctactcttcaaattcaaccntgtatcttaaaaaggagtaaaatgtactgttttcagtgtttcctttggtttcttacagtttataattttataaatt

SEQ ID NO: 5854 - DNA, 550 bp, Homo sapiens
  I.5854 (R52312)
  misc_feature (437)..(437): n is a, c, g, or t
  misc_feature (445)..(445): n is a, c, g, or t
  misc_feature (514)..(514): n is a, c, g, or t
  misc_feature (542)..(542): n is a, c, g, or t
  misc_feature (547)..(547): n is a, c, g, or t
gtcgtggagagatcatggagctaggaagtagcctagcagggcttcacccaggctctcaccagcacaccactctcctggtgccccacagacgtctgcacctgcagggttgtcttggggttggttaagtgatgtcaagctgtggagcactgctcagaggcatacagtcggcactacttaaatgctagactctatcatgacttgacgactgtacttcgtcacacttgttgcctgttaagtccaagtttcatgaccgtctccctcctccccacactctaactgctctatttccaccccaactccctcgaaaggcaaatggtaacgaagtgcttccaggtagaagccggattgatttcatgtaattatccctgacaaaattaaatattacttggcaattagtcttggggcaatttctctgctgagacacagcgaggcagttngggtgaanaagggctgagttggcccagcccctgtttgggctgagggctgagtctgttggcagctgtgtgtgctctgncccgagaatgccctttgccagggcttanacccncag

SEQ ID NO: 5855 - DNA, 421 bp, Homo sapiens
  I.5855 (R52301)
  misc_feature (15)..(15): n is a, c, g, or t
  misc_feature (372)..(372): n is a, c, g, or t
  misc_feature (379)..(379): n is a, c, g, or t
  misc_feature (387)..(387): n is a, c, g, or t
  misc_feature (401)..(401): n is a, c, g, or t
  misc_feature (416)..(416): n is a, c, g, or t
ttcattaaccttttnagaagacaaacagatccctgataaggaataaaattttaaacacatttttaaaacaaattttaaatgttaagcaaatgtgaaacattgggctagttttctttgttcattaatttctaggctcagacaacattttgcattgtatcaggcccaggcagtcagtttttgtggttacttttggggctgtgttggccctccctcatggtggtgtgaccctaggaacataggcccctaaaccgtttccctgatcttttcccagtaataaggcatttattgcaacatagcatcaactccattatgttgtatacacaagaactgttttgcttttttgaggcttggtcatgggatactgattatgancagacanaaattctncagcatgtcccgcnttaggagaagttgtncttgg

SEQ ID NO: 5856 - DNA, 458 bp, Homo sapiens
  I.5856 (R52072)
  misc_feature (5)..(5): n is a, c, g, or t
  misc_feature (303)..(303): n is a, c, g, or t
  misc_feature (401)..(401): n is a, c, g, or t
  misc_feature (440)..(440): n is a, c, g, or t
aacanttgtattttttttattaaaaataaaaaattataataacatatggcctatgaaaatatggtataggtatacacagagaacactttcatagaacagcaaagggctacttccccaatcctacaaaaggaaggatcatgaacaatttgctaaagaagagaaagtcttacctaaatcataatcggaaagtagaaattatcctactggaaatgaagaggtagaggaaggttaatcaaccttgggcaatattgacatttggggccagataattctttgttatgggaaggggtgacattcttgggnctctatggcactatgtcccaggtaggcacccctccccaaggttatggaccaaacaaaaatgtctggcggatgttgcccactgttctctttcagggggncaaattgtccccgggggttggaaattcccgggggtaggnttttttagggtagggggg

SEQ ID NO: 5857 - DNA, 466 bp, Homo sapiens
  I.5857 (R52071)
  misc_feature (367)..(367): n is a, c, g, or t
  misc_feature (379)..(379): n is a, c, g, or t
  misc_feature (465)..(465): n is a, c, g, or t
cacaactcaacccttccaaacttttttcttcccagcaaggaaggtgaaagcccatccttctgtcttctcttttcttcagctgtgggaccatccacccaggcttcctacatacaattcagcccctccctgtccctccttccactcctccagttcaggtgcattttctcatctctatcttgatttctgacatagctcctgagtggtccagctgccaaaagtcttactcttcccatatcctcttaccatctgtctgaaattcaaatctgactgtgtcattccctttctgaggacttaccatcaccataggggatgccattccattaacatctggcaatcccggaccaggatgttccattattcagggttnccatatttggtncattgcttattcttcccatttatggcccgggcattggcactttgtaattgaggtaatataggaactatgtgtaggtttttcggatng

SEQ ID NO: 5858 - DNA, 383 bp, Homo sapiens
  I.5858 (R51871)
  misc_feature (208)..(208): n is a, c, g, or t
  misc_feature (361)..(361): n is a, c, g, or t
ttttttttttttttccagcatgtttgtttatttacatacatacagagacacaagtacatacatacatatatcctattactggcatctcactttgacttaaagatgatgaaagccatttcagtcactatctcaggggatgccacttcccttacctcccctgtcacgttggacatacccacaatagacccaatacagaggaaaacaaaanttcttagaagttcatactgacttacctactgaaggcaatgtaccaggattacgtgttctttacatgccttccaattctaaaaatctataaggaaatcacaactggcacacacaacagggtggctcttacagttttggtaaatggatggcggtntggtggcccgggggtgggccag

SEQ ID NO: 5859 - DNA, 435 bp, Homo sapiens
  I.5859 (R51857)
  misc_feature (10)..(10): n is a, c, g, or t
  misc_feature (11)..(11): n is a, c, g, or t
  misc_feature (25)..(25): n is a, c, g, or t
  misc_feature (188)..(188): n is a, c, g, or t
  misc_feature (285)..(285): n is a, c, g, or t
  misc_feature (288)..(288): n is a, c, g, or t
  misc_feature (329)..(329): n is a, c, g, or t
  misc_feature (340)..(340): n is a, c, g, or t
  misc_feature (433)..(433): n is a, c, g, or t
tttttttttnntttttttttttttnatttacaaaagaaaggtttaattggacttacagttccacatggctggagagggttcacaatcatggtggaaggcaggaggagcaagtcacatcttacgtgaatggtggcaggcaaaacaaaagagcttttacagagaaactcccgttttttaaaatcatcagntctcatgagacccattcactatcatgagaacagcataggaaagacccatccccatgattcagtcatttcctaccagggtccctcccacatgtgaganttntggggagctacaaggatgagttttggggtaggggacacagngccaaaccatnttcattccacccctggggcccctcccagttttcatatctttcacattttcaaaaccagttcatggcctttccccaacagttcccccaaagttntc

SEQ ID NO: 5860 - DNA, 315 bp, Homo sapiens
  I.5860 (R51849)
tttttttttttactgacctagttcaaatctttatttttataatttcctattttttaaactttattgagatgtaattcacacacgtacagtacaattcatccatttaacatcacaattaaattagctttagtacattcagagttgtgcaaccatcacaatagaattttagaatattttcatcacccccaagagaaacccagtacctgtgagcagtcactccatttctaccacctacccccacccgagttcctaggacaaccactaatctactttttgtttccccagttttgcctactctgggacatttcatataaa

SEQ ID NO: 5861 - DNA, 431 bp, Homo sapiens
  I.5861 (R51547)
  misc_feature (345)..(345): n is a, c, g, or t
ttttttttttaatgtttatagcacctttattcataatcagaaacaaccccactggaaaatggataaacaaacagtagtacatccacatgatggaatacttctcagcaataaaaagggatgagcagcgcctggtaaacccaacagagatctcatatgcattctgctaagagaaagaagccagactgaaaggctaaatattgtatgactccacttacagcattctgggaaaagggcaaaactatagtgatggagaatagattcatggttaccagaggttaaggattcagggaggctttgactccaaaggggtcgcaccccaggataattttgggacggactgagggnaggaaactgttctgtgcctttattgtgggtgggtaggtaacatggattctgcttgtggaaattcttaggattgttttgtccaaagg

SEQ ID NO: 5862 - DNA, 445 bp, Homo sapiens
  I.5862 (R51546)
  misc_feature (2)..(2): n is a, c, g, or t
gntgaagtctgtgatctcagtgacaacagattggccggtcttattggaacattcaaagagacgagactggacatctaggatttcctgctgaagtctgcaatatagtccatttaagggcatcaagctgcttagaaatgtttttaaaactgaggttttagcctttgtgcaattcacaagcctggcaggcagggggagcccagaagagggggaggctgtgttcccataccttttatcattggcatagggagttttccctcccagtaggtcccagaactcggctggctcctgggcctcggcacaagtgttctcgctgccatcacagagaaggctggccagctccttagccattgcccgctcatccccactagacccctgaggagttggggcgaggagagcacagatgtttagtttgcacaggggcatttcgatgttgggaaggaaaagc

SEQ ID NO: 5863 - DNA, 469 bp, Homo sapiens
  I.5863 (R51432)
  misc_feature (435)..(435): n is a, c, g, or t
  misc_feature (447)..(447): n is a, c, g, or t
  misc_feature (455)..(455): n is a, c, g, or t
ttgtggagatcgggtttttcactgtggttctcaaaccctgtgtgccagggtccctgtaggcttggagccagctctcacagtgtctcattcagtaggtctaggctggggcagaggatttgcatttcttacaggttcccaggtgatgctcatgctgcacatctcaccacactctgaaaaccactggcctcaagtatttatttaaattgtgcaccaaaaatatcactgattgatatgaaaataacagtaataattgcttgacatttataaagtctccatctttcaagaagccagagacctctaataaatgtaaccttaaaatacatgatttgtcttcaattggggatggggaaatgggggaggcataggtctctgcccagcacccattttaagggactgatctggaagtccaaggcttcaagttccatggaaactctnggggtttagggntccgggtnttccgggagccaca

SEQ ID NO: 5864 - DNA, 478 bp, Homo sapiens
  I.5864 (R51416)
  misc_feature (61)..(61): n is a, c, g, or t
  misc_feature (77)..(77): n is a, c, g, or t
  misc_feature (79)..(79): n is a, c, g, or t
  misc_feature (88)..(88): n is a, c, g, or t
  misc_feature (98)..(98): n is a, c, g, or t
  misc_feature (100)..(100): n is a, c, g, or t
  misc_feature (131)..(131): n is a, c, g, or t
  misc_feature (133)..(133): n is a, c, g, or t
  misc_feature (140)..(140): n is a, c, g, or t
  misc_feature (145)..(145): n is a, c, g, or t
  misc_feature (150)..(150): n is a, c, g, or t
  misc_feature (422)..(422): n is a, c, g, or t
  misc_feature (432)..(432): n is a, c, g, or t
  misc_feature (453)..(453): n is a, c, g, or t
ggaaaaggaaaaatgtggaaggcatgcagggaaaaaaaaaaaaaaaaaagcccttttctgnaaaaatgtccatgccnanacttgcttnagaccatccnanatcctcctgcctccatctcgagtctttgttnanattccanaccanaaganagtgagggaggactgtacttttcagtaccatacagaagggagagcctgttctaaagctgacgtgggtctcaatagtacatgagaagcacaattcccaaatgatctgggatctcctgtttataaatatattaccaaattcaagtgtgggttcttcttctatttccactgtaagattgagggtgttgaaaaaacagtagtccttgaggcaaatctgtgagggaatcttgttcagattgtggatctttcctggggactagtttagttgtgagganctacatctgnttgttctggggattagggttntccccgggtcctgccctcggtgggc

SEQ ID NO: 5865 - DNA, 343 bp, Homo sapiens
  I.5865 (R51321)
  misc_feature (30)..(30): n is a, c, g, or t
  misc_feature (340)..(340): n is a, c, g, or t
ttttttttaaaggacaggggactctcaagnaaaatgatgaatattattatttctttgaattcttgaaatcaacataaagttgtgtgattcctctcctcctacccccaattttagcataactggtagtaatataaaagaactagctctttgctaactgtgcataagaaataattttttccccagaaatcagaaatgaagacaagtgccacacatcattgatcgccccaacatgggattttcgcacaaaagaaatacagctacccagtatgcagtttacctgactgggagaaaaactgggatcgtcgccaagagttctgaactctaaggcggaacactggcngtg

SEQ ID NO: 5866 - DNA, 330 bp, Homo sapiens
  I.5866 (R51304)
  misc_feature (319)..(319): n is a, c, g, or t
ttttttttttagaatgaaaatgatttccgtatttatgtttgtcagcaatatagttatttacaaataacccatatgaaaatgtaaaaaagcatattacatcttcacatgccatctgtattgactgaataaagcttagtgacattatttgcaaatctgtagttaattgtacatagacattttgtgcgttaaaaaggaaatgtacataatgtaaaataaattacattacgcaatttacaaagtaatattaacaaaaattcttaggacagctgcctccttatttaaacaaaataaatattcaggtagttaaattaacataaantacacatttag

SEQ ID NO: 5867 - DNA, 388 bp, Homo sapiens
  I.5867 (R51162)
atgatgctgtgagacaatctgagaagaattaaaatttaaattcatgtattcctacttttttctctgttctctaactgtaaaatattttcattacagatggaggaacaaatagatgttagataaatagatatataatagatcatccaaaattcttattcttatggttttatgtagtcagtatttacctctatttttctacatgtttatccttccaatttagttcattacttcctgcacctttgatgtcatatacataaacaggaaataacacatggtggctgggatgtagagagagccacaggacttgtgaatgaaatccacaggcaaggatgtgggcgattccttttgcaatattggagggaatgccaaaccctatgtttggctgtgg

SEQ ID NO: 5868 - DNA, 322 bp, Homo sapiens
  I.5868 (R51047)
  misc_feature (173)..(173): n is a, c, g, or t
  misc_feature (174)..(174): n is a, c, g, or t
  misc_feature (190)..(190): n is a, c, g, or t
  misc_feature (201)..(201): n is a, c, g, or t
  misc_feature (237)..(237): n is a, c, g, or t
  misc_feature (255)..(255): n is a, c, g, or t
  misc_feature (310)..(310): n is a, c, g, or t
  misc_feature (318)..(318): n is a, c, g, or t
tttttttttcagtttaaaaaagcgattttattgaacatctaacacatacataaaaggcagtaaagacaaatgagaagagggcaggatattgaagtatacagactttaatgctgagttttgtatcttagtaagttactgcaccttacagagactcaatttcccctgatttaggnnggcgatgctaatgggnattgcataggngtaagtataaaaatgttgtatttaaggggaatcccncaagcttggtataaggcngaaaataaataggatgtgacatgaatgagtactttattacatttgtatgctaccngcagactngggg

SEQ ID NO: 5869 - DNA, 542 bp, Homo sapiens
  I.5869 (R50881)
  misc_feature (46)..(46): n is a, c, g, or t
  misc_feature (79)..(79): n is a, c, g, or t
  misc_feature (89)..(89): n is a, c, g, or t
  misc_feature (90)..(90): n is a, c, g, or t
  misc_feature (93)..(93): n is a, c, g, or t
  misc_feature (362)..(362): n is a, c, g, or t
  misc_feature (397)..(397): n is a, c, g, or t
  misc_feature (426)..(426): n is a, c, g, or t
  misc_feature (431)..(431): n is a, c, g, or t
  misc_feature (440)..(440): n is a, c, g, or t
  misc_feature (459)..(459): n is a, c, g, or t
  misc_feature (470)..(470): n is a, c, g, or t
  misc_feature (500)..(500): n is a, c, g, or t
  misc_feature (511)..(511): n is a, c, g, or t
gctcagtggcgtgcagtttcctctcgaatttctttcttcccgcagnctttctgggcgggcgtctcccgtctgtttctanccatcttaannaantatcatcctgggactggataattcttgaatagtctgggaggtagcagggaacccgagttcggagcctcgaccagaacctccagacgggaaattggagcaggtggtgtcgttccaggacgctgaggaccacctcctcccctaacgcacagcccaacgatcctaaaagtaaaaaccctgagtttctgagtcaagactgagctggtggggtggggaccgagtagggcgtggatggggagcccagcggtccccaggcggagtaaaatggggtnagacgcctgggggccgcggtctccagaatttcgcntgggaggggagagttggcgttacgccgcnctttncctgggggngagccgttttcgggcttcnggattgttccntttggggccccaacgtttgggttccccaangcgcggtttcnaattttccaggtttttttcccagggaacagt

SEQ ID NO: 5870 - DNA, 460 bp, Homo sapiens
  I.5870 (R50874)
  misc_feature (401)..(401): n is a, c, g, or t
  misc_feature (425)..(425): n is a, c, g, or t
  misc_feature (455)..(455): n is a, c, g, or t
tgtgtgtatgtactgggggagtatagcttttattctgtgctcaattcgaaagagagtattataagttttcccagcccatccacccgctaaaaaagaacatatccaaattttaatatgtatacacccaacctgtacctatgtacgtgaatatacatgcactgggaaatctacttaagagtcttcactgagaagttcactcgatagaaaggtcttgatagagaagagaagaggaaagcaatggtctgaaggcaaatcctgctttaacttggtggtccatttcccattcattcctgaaccaatgaggaggcaggaaaggaaacaagtcaacccaaacaaggcaaactagggggctgggacggcgggcgaatgggatgctgggttcagtttggggcaatttcacntgaaactccttccagggaaccccngctgggaacttggctttcccaactttcccnccatt

SEQ ID NO: 5871 - DNA, 407 bp, Homo sapiens
  I.5871 (R50761)
  misc_feature (404)..(404): n is a, c, g, or t
tttttttttaattggacagatgtttattgaatcactgcatcagatgctggggatacaaccctgcacaaagtctccaccctcacagggcacagtctagtaggggagacaagtccaccagcaatgatgtggggagggcagagtgctgccaggagcacctcgacagttaaaccactgaccagagggatttcggcagaggagtaacttgatcggatttctgtttataaaagattgccatggctggcacattgcatttgggtcaagagtgggaggccgccgggaagtaggacgctattcccgagtccggtcacaagatgggcggacttgtcccgcagaagacgagcaggggacgagggaagcggggctaattgaacctgaggatacagttttggaaggctttggacagnttt

SEQ ID NO: 5872 - DNA, 444 bp, Homo sapiens
  I.5872 (R50755)
  misc_feature (312)..(312): n is a, c, g, or t
  misc_feature (424)..(424): n is a, c, g, or t
  misc_feature (441)..(441): n is a, c, g, or t
ttttttttcctaagatattgttctgtattacaaaagaagaaattagactcaattgccctattataaatttgctaaaaatacatatatatatatattttatctgaacagaaaaatagactactctgagatgcgtggacattctatgacatagtcgcgcatcagatacttctagagccagaaaaatggcaacagaaaatgcagaggtaactcttatttctgggtgtagccagggactgggtttgggttgcctgggctgagtgacatgaaaggcatttgggatgctgtcctataaggcagtgatagggtgagggnaacatcagctcggggctgggaagcttttccattgtccctgcccggggtcttcagggggagccccttcttcctcctgcccactttggcagcttaccaggaaaaagtccctttncccaaaggaggcatgtnccg

SEQ ID NO: 5873 - DNA, 438 bp, Homo sapiens
  I.5873 (R49730)
  misc_feature (77)..(77): n is a, c, g, or t
  misc_feature (79)..(79): n is a, c, g, or t
  misc_feature (362)..(362): n is a, c, g, or t
  misc_feature (406)..(406): n is a, c, g, or t
  misc_feature (415)..(415): n is a, c, g, or t
ggttttttaacatagaaatatctgcccttaaatgagaactgaaaacggagcttcttggaggccacctgctggcgagntngatctgaccgctgtttaagctttctttgaactcctttttttaaaacagcctccataatcaatggtgtacgatctactctcgtggtaaaacttactcagtgaagagtgtgttttattttctgaggagctgaactgttccaacctgagtattctgaataaggacagtggtcgagcatgagtgatgccatctggggcttaggaaataagtggggcctaaaatctgattgtttttcatacattgttcaggatattgacggcaaataggcaatttattttgttaaaanatggttgggtatccgggaacttggccaacagctgtgtgtgggcnttgaggggnggtggagtgggtgagggcccggg

SEQ ID NO: 5874 - DNA, 395 bp, Homo sapiens
  I.5874 (R39878)
tttttttttttttttatggaaacacctttatttctttcaagcgaacactgcctgacttcagctgggtcaaaccatgggggaatccagatttgaatatttcaaggtctctgcccttgcagaatcagacagaaacaagtgacaacatcgtagttaagtgtgaaaacagtatgttcagagaacggtacagatatgttagaaagttggctttagtcattaaaccttaagtagatgtgatttttttaaagttaatgagattcatgagtttattttcttgtcagaagcaccaacagacaaacctatacatttttgggtgtgtgtttttctgttttttaatcacagtgcttttattataggattatcttcagaagttaggtgcaggtggccatgtgggaagg

SEQ ID NO: 5875 - DNA, 389 bp, Homo sapiens
  I.5875 (R39730)
  misc_feature (258)..(258): n is a, c, g, or t
  misc_feature (330)..(330): n is a, c, g, or t
  misc_feature (352)..(352): n is a, c, g, or t
  misc_feature (365)..(365): n is a, c, g, or t
gtcgagttaggaagggccctggtcacccctctaagcctgcagctcactgctggcccctccctgtcaaatggctaaaggagatgagctgggggtgggggtgccctggtgattcctagggggaaggggtgagcctgcgcatcccttctgagaaagcgggagtcacagccctgaggttttgagtggagacagcatggagattcttggccctgtctgctggtgcgcatccctttctgcacacaggagtccaccgtgcgtgangtttaggtacagccctctgtccctccttgccctctcttgcaccttcccacccctcctttcacttttcagatnacatattgaggaaacagccctngttctgttcagcntagatgggggttcatccccagcct

SEQ ID NO: 5876 - DNA, 478 bp, Homo sapiens
  I.5876 (R39685)
  misc_feature (71)..(71): n is a, c, g, or t
  misc_feature (177)..(177): n is a, c, g, or t
  misc_feature (199)..(199): n is a, c, g, or t
  misc_feature (233)..(233): n is a, c, g, or t
  misc_feature (260)..(260): n is a, c, g, or t
  misc_feature (408)..(408): n is a, c, g, or t
ttttttttatgacttttaaattcatctaatttttattaatgattatgataacatataaaattatgctcaanagtacaaaatagatccatttaagctcatcaagcgttttacacatttataaattttataaaatatgaataccaatttcacagcattttctgataatgcctcactagngaataaaatttctatttttggnaaaaaccaacaacaacttttgaagctgacctggnttgccatgtttatttcgggtctgtggntatgcttatctctgattccagagtgaagggaggtgggcaagggcgtgggtgtccattaaggcacctctgtccttcctgcaggccaaatcctgccctgggttgtcctgtgtcaagggacaatgtcctgctttacaaagtcaaggctgtnccataggaagccttgtaatcttttgggttctccgtttccttatgagtgatgacaggctctgatgattgca

SEQ ID NO: 5877 - DNA, 458 bp, Homo sapiens
  I.5877 (R39456)
  misc_feature (51)..(51): n is a, c, g, or t
  misc_feature (306)..(306): n is a, c, g, or t
  misc_feature (396)..(396): n is a, c, g, or t
  misc_feature (407)..(407): n is a, c, g, or t
  misc_feature (421)..(421): n is a, c, g, or t
  misc_feature (451)..(451): n is a, c, g, or t
ttttttttgagaaggagtcttgctctgtcgcccaggctggagtgcagtggncgttctcagctcactgcaagctacagctcctgggttcatgccattttcctgcctcagcctcccgagtagccgggaccacaggcgcctgcaccacgcctggccaattttttgtattttcagcagagacggggtttcaccgtgccagccaggatggtcttgatctcctgatctcgtgatctgcccacctcagccccccaaagtggatgcattaaatttaagatgcctgttagatgtccaagtggagagtcagttttntggggaagaggcgaatctggaagtcaaaggagatggtcaagttgaagacataaactttgagtttataaattgactaataaaacagacctncgaggaccatnagccaaaatttttntaaagctttcatatacggatggctataatnattactt

SEQ ID NO: 5878 - DNA, 425 bp, Homo sapiens
  I.5878 (R39427)
  misc_feature (300)..(300): n is a, c, g, or t
  misc_feature (313)..(313): n is a, c, g, or t
  misc_feature (353)..(353): n is a, c, g, or t
  misc_feature (390)..(390): n is a, c, g, or t
  misc_feature (398)..(398): n is a, c, g, or t
tctggtagtgcttttctcatctttctcatcccccttcctttcaatcattttttttttttcatagcacagattttgtgctgttgttttaaataattttgttttagactttgaacttttaaattatacaattttatgttctgtgatatttaggggtcttattgtggcctaaggactcctgttctaattttttttctgtctacatagttttgttaggaaatagggtaatattttctttccttacactgtgttttaaggtaagggggaaataaggcagtgtatgtcaggaattgcttttaaggnttttaggaaatcncgttttccataatagggggatccattttggctaaccaggnaattttttaaaaccccaacttccaggctaggtttttngttccatngtaccaggtgggaaccatttcccggcc

SEQ ID NO: 5879 - DNA, 396 bp, Homo sapiens
  I.5879 (R38925)
  misc_feature (10)..(10): n is a, c, g, or t
  misc_feature (272)..(272): n is a, c, g, or t
  misc_feature (292)..(292): n is a, c, g, or t
  misc_feature (337)..(337): n is a, c, g, or t
  misc_feature (365)..(365): n is a, c, g, or t
  misc_feature (376)..(376): n is a, c, g, or t
  misc_feature (391)..(391): n is a, c, g, or t
tttttttttngttgattggtcatcttaccaaagaatatgggaacatactatattcagagcctactgaaagacaatgccatttttacagtagaagtcactggggaaaaacaatttgcttaataaacattcactttactgcaaactttaagggaatgcatccattacacaactgggaacaagagccacatgttcacatacacatatctatcctatgttactcgtgtgtgtgacggaggcaaaaaaaaaaagcagtgtttttactgaaaaaaaantgtacctgttttgttgcagngccttgaaaaaggaaagcttaatccactctgcattttcacaaggnaacaaattttgtggtcactgtgtatccnctgataatctntttttaagggggccntttca

SEQ ID NO: 5880 - DNA, 271 bp, Homo sapiens
  I.5880 (R38821)
  misc_feature (218)..(218): n is a, c, g, or t
tttttttttattgtaaccataaaaagttattaagatatgtgccataatgttatgcttaaaatctaaaacaaacacattcaaaatttacaaaatcagcacaaactgatgccaggcaggtatatataaaatatttacacggtatacaagcaagtgatgtgggatatggcatgaagggagtaacttattttaagagtttggagaacagacggaaggaagantcaaaacaaatctactctatcttagtcaatataggctactataacaatgtacc

SEQ ID NO: 5881 - DNA, 384 bp, Homo sapiens
  I.5881 (R38757)
  misc_feature (69)..(69): n is a, c, g, or t
  misc_feature (172)..(172): n is a, c, g, or t
  misc_feature (274)..(274): n is a, c, g, or t
  misc_feature (356)..(356): n is a, c, g, or t
  misc_feature (374)..(374): n is a, c, g, or t
  misc_feature (379)..(379): n is a, c, g, or t
ttttttttttttttgtgttatattaactttatttaatcctcacaatcactccatgaaacagataactangtattacacttgttctgtggattaggaaatggagacataatttaagcagcttgtccaaagtcacccaacaggcaagtggcaaagcaggggttcaaatccaggnagtctagctccggagcccatgctctgaaccactaactagatatgagtcctgctctgccacttactggttctgcaaacttgaaggaaccactccccctctggncttggcttcctcttttggaaacggactaccgttcggttcaacccactagaatccccaagttagaactggcagagacactctnatccattgtgtctctttnccctnttcaa

SEQ ID NO: 5882 - DNA, 469 bp, Homo sapiens
  I.5882 (R38432)
  misc_feature (377)..(377): n is a, c, g, or t
  misc_feature (466)..(466): n is a, c, g, or t
tttttttttattgaagccaatttttattagttatacatcactaccttgttttatattttttcctaatgttaaagggtcagttcattcttttcaactccaaatattttacagaaaataaatgggaaaaaaaccagagtatttatataaatgatcctcataaggataagcctttacatttaaaactttagtcaacaataataactacacataaaggttgataagaatatcttgctactaagaggataatctgccactagaattaaaaaaattcatacttcctaggaaacatcaattcaatcaggtgatcctacacaaaggagttagggatatacccaggttccattaattcttgttcttaggggttttccattaaattnatttatccccagggcaatgggccatcctggcttgggccttttaaagggccttctgggggagggaggggccccttttaatatcctccccntcc

SEQ ID NO: 5883 - DNA, 137 bp, Homo sapiens
  I.5883 (R38369)
  misc_feature (93)..(93): n is a, c, g, or t
gtaagggaaagaagttttattttcaagcttttaagagaatattacaaacaacaagagagttttaaaaaaccctaaaaactaagtttaaaaaangtacttgacaagtgtccttttaatacccatggatgacgcgacca

SEQ ID NO: 5884 - DNA, 480 bp, Homo sapiens
  I.5884 (R38342)
  misc_feature (15)..(15): n is a, c, g, or t
  misc_feature (296)..(296): n is a, c, g, or t
  misc_feature (340)..(340): n is a, c, g, or t
  misc_feature (374)..(374): n is a, c, g, or t
  misc_feature (384)..(384): n is a, c, g, or t
  misc_feature (440)..(440): n is a, c, g, or t
  misc_feature (463)..(463): n is a, c, g, or t
  misc_feature (471)..(471): n is a, c, g, or t
gtaccgagatgtttntgctgtttctaaattttattgaataaaaagaacgtcctactttgcagtcactctatttgccttccagatctgcatagagttccaggattaacacaacttcttctgcttacttattacaatctagcgcctacttgaggatggaaaactgaaacaagaaataatatgttttcaaaggataaacagttgggcttttcttttaccctcatattcctggattaaggatcgcccttgtctggaatttgccaatgggaaaatggtctaaggctggcaaaaggataccngagggctaggatggtacaattaggtaggctgtttagggtacggnaccctaggggttggattaaggggtaattaggggnaatacacccnagggggttaatttaaggggtaattttttaaaggggggttaatccctttttccaacnttgggcaaccttctctccccttnggaatttngggggggtt

SEQ ID NO: 5885 - DNA, 517 bp, Homo sapiens
  I.5885 (R38161)
  misc_feature (8)..(8): n is a, c, g, or t
  misc_feature (147)..(147): n is a, c, g, or t
  misc_feature (194)..(194): n is a, c, g, or t
  misc_feature (338)..(338): n is a, c, g, or t
  misc_feature (411)..(411): n is a, c, g, or t
  misc_feature (449)..(449): n is a, c, g, or t
  misc_feature (455)..(455): n is a, c, g, or t
  misc_feature (460)..(460): n is a, c, g, or t
  misc_feature (469)..(469): n is a, c, g, or t
  misc_feature (480)..(480): n is a, c, g, or t
  misc_feature (494)..(494): n is a, c, g, or t
  misc_feature (504)..(504): n is a, c, g, or t
  misc_feature (512)..(512): n is a, c, g, or t
tttttttnttttttttttttgccaaagcaaacatccaatgttagaaaatgtaagcacaaactgaaaattcatagggttttaaattctaaaattcggaatactaagaagtaatcaattaagaccagttaggtttggactttcaaggantgaactcaaatatgatcaaatattcacatctctggtatcacctaggnttggctaacattatgcttaaatatattaacttgtaactgcttctgcatcccagagacatatatgcctgcttgtctggcaaggttgggacatcctgttacaatctatattcagggtctctccacttttgaaaagggaactaggantcaatcaagggaggctgtgacctactacccaggtcaccattaaaggtatttaattaggttttcacacttgggnaagggatcccagggctatttttcccaggggccccagtntcgggncaccncttttactntttggaccatntttttcagggtctncccctggggntttccccnttggg

SEQ ID NO: 5886 - DNA, 318 bp, Homo sapiens
  I.5886 (R37580)
  misc_feature (16)..(16): n is a, c, g, or t
  misc_feature (170)..(170): n is a, c, g, or t
  misc_feature (174)..(174): n is a, c, g, or t
  misc_feature (237)..(237): n is a, c, g, or t
  misc_feature (243)..(243): n is a, c, g, or t
  misc_feature (245)..(245): n is a, c, g, or t
  misc_feature (254)..(254): n is a, c, g, or t
ttttttttttttaagntgacttttaatgagtaaaaataaaaacccctcacaagtcaaagtttactcagtaagccaataagcctaaaatgaaattttaattttgcttgttcacataattttgggttttttttccccttctctgttctgacttctctcagtcgagccttggntcanggaaaagaaaaaaaaaaaggcgtatttctcttcatgcccctctcaccccagtaaaaagtaggngaaaangngtacacagnttaaaacagaattgtattatacattcacttttgaggttatcaggtgaacttaattcactccagg

SEQ ID NO: 5887 - DNA, 406 bp, Homo sapiens
  I.5887 (R37329)
  misc_feature (12)..(12): n is a, c, g, or t
  misc_feature (14)..(14): n is a, c, g, or t
  misc_feature (20)..(20): n is a, c, g, or t
  misc_feature (27)..(27): n is a, c, g, or t
  misc_feature (33)..(33): n is a, c, g, or t
  misc_feature (35)..(35): n is a, c, g, or t
  misc_feature (42)..(42): n is a, c, g, or t
  misc_feature (92)..(92): n is a, c, g, or t
  misc_feature (160)..(160): n is a, c, g, or t
  misc_feature (168)..(168): n is a, c, g, or t
  misc_feature (172)..(172): n is a, c, g, or t
  misc_feature (177)..(177): n is a, c, g, or t
  misc_feature (226)..(226): n is a, c, g, or t
  misc_feature (242)..(242): n is a, c, g, or t
  misc_feature (338)..(338): n is a, c, g, or t
  misc_feature (371)..(371): n is a, c, g, or t
  misc_feature (376)..(376): n is a, c, g, or t
  misc_feature (382)..(382): n is a, c, g, or t
  misc_feature (393)..(393): n is a, c, g, or t
  misc_feature (402)..(402): n is a, c, g, or t
tgggctgcgggnangcgggnatctctnctccancnaacccgnccggtttcctttcccttctccgcaagctcgggacctcgaaaccccgagangcgctgggagctcgggcagcggaggtcggggtctttcatccgtcaaggatggtgaagtttgaaaacancctgcggntgangaaantcggaggctgaagcaacaagcttgctttggaggggacttctcgagtttntttttcaaaccttttnggttgtccgaaaatgcgttgggattcccagttcctgtgttgtgaaacacttattagatttatataaggcttttgagtagcttaagcgttttaactnctgctggccccctttgaagcccaagtgcctctnattanctgctntaagggacttnttaaggatngaaa

SEQ ID NO: 5888 - DNA, 46 bp, Homo sapiens
  I.5888 (R36760)
  misc_feature (24)..(24): n is a, c, g, or t
  misc_feature (38)..(38): n is a, c, g, or t
atggagtctcactctgtcacccangctagagtgcagtngtgtgatc

SEQ ID NO: 5889 - DNA, 438 bp, Homo sapiens
  I.5889 (R36732)
  misc_feature (381)..(381): n is a, c, g, or t
  misc_feature (397)..(397): n is a, c, g, or t
aataaggcataagggggaataaatatattgtaaccaatgttatgtaaacccatatccatacaggccaggaaagccaaatgaagtcatttccagaattctagtgtgaaaaacctatttttgaaaagtggggagatggctttgtgtagaactgggtgggttttctctgcagactaagtctagccatgagcttccagatcctttagttttatcagccttgtgcttaccccattttcataaatgctactttaacagccagtcttcataagtcatggttcctaggttttcctgtcacctcattgtatttcatctgtgggtagggatattaacgggcttcatttcaaccaaatgttaatgtgtggccttcaggacctattttaggcngggttgggggggggcntcaggcagggacaaacccaacagggtacttcccgcaagtgt

SEQ ID NO: 5890 - DNA, 301 bp, Homo sapiens
  I.5890 (R36650)
  misc_feature (207)..(207): n is a, c, g, or t
  misc_feature (211)..(211): n is a, c, g, or t
  misc_feature (213)..(213): n is a, c, g, or t
  misc_feature (214)..(214): n is a, c, g, or t
  misc_feature (295)..(295): n is a, c, g, or t
gccgcatgggaggcatggccccggggtcctggtggccactcgtgcctggtggagagcgagggcagcctgacggagaacatctgggccttcgctggcatctccaggccctgtgccctggccctgttgcggagagacgtgctgggggccttcctgctgtggcctgagctgggtgctagcggccagtggtgtctgtccgtgcgcacgagngcgntnngttgccccaccaggtcttccggaaccacctggggccgctactgcttggagcacctgccggcagagttccccagcctgggangcttct

SEQ ID NO: 5891 - DNA, 422 bp, Homo sapiens
  I.5891 (R36292)
  misc_feature (3)..(3): n is a, c, g, or t
  misc_feature (5)..(5): n is a, c, g, or t
  misc_feature (320)..(320): n is a, c, g, or t
  misc_feature (363)..(363): n is a, c, g, or t
  misc_feature (417)..(417): n is a, c, g, or t
agntngaaataatgtttaatccttttaaacagatggtctttgctgaaaagaataaacccaactgaaaatagcattagaaagtacttaaaagaactatgtttgacagtttttggctcatagcacttttatgttaaattcatgtatactgtttacagacttcataatgaattttatattgtaccagtaagctctgcagaaggcattcaccattactgcatggaatgcccaaacatgcccatgaggaaaattaaaggtaaaacaatttaagtaaaagtctctctaggaattctattactgggctattttatcactacctgggnaaaattaaaattaatctttcagtaaagccaactggatctaagngaggaaatatttacactttatatttttaaaattcactttaaattggggtgtgcnttaca

SEQ ID NO: 5892 - DNA, 417 bp, Homo sapiens
  I.5892 (R36050)
  misc_feature (375)..(375): n is a, c, g, or t
  misc_feature (387)..(387): n is a, c, g, or t
  misc_feature (397)..(397): n is a, c, g, or t
  misc_feature (411)..(411): n is a, c, g, or t
cctggccctctaaccaattctgagtgcccgtagaaaaatgtacatgtaaagacaccagattttagggaagtaattctaaatgtttattttagctactgaatgtgttcattcatagtttttgtgtcatatccatgtctgccaactcacctttcacaacagaatcttcttttcagggagatgtcctttgcttctcagatgtaaatgcactttaagtttgttattcaacagtgaaaatgagtcatacagagggtaatattttcgtatgttctgcatcttcaggggttcctgggttttttgtttgtttgtaattatgtgggcttcaggggtaattttattttccaactttcactgtgggggagggcagtataggcatangtggggttaagngccgaggggntcctaggagccagnctaccc

SEQ ID NO: 5893 - DNA, 353 bp, Homo sapiens
  I.5893 (R36046)
  misc_feature (303)..(303): n is a, c, g, or t
  misc_feature (334)..(334): n is a, c, g, or t
  misc_feature (339)..(339): n is a, c, g, or t
tcccccatatcattcatatagtgtgatagaagttcattaaaataattttttaaaaagccatgtgaaagtaaataccacaaggttacaaaaggtacaaaaatgtgtgaaacatttaaatttcagagggaaatccacacttctgcaaggttgaagtttctcatatcaaattctcattcccagtggaaaacaaggtggggagggttgggaggtttttgtcctcagtagcctgctttttcccacgtagggactccactttatactacttcacactgactcgcagtcatttttaagggcatatgactnccgaccagggcacagatctcacacatgcttncccancaccaggggtaatg

SEQ ID NO: 5894 - DNA, 438 bp, Homo sapiens
  I.5894 (R36039)
  misc_feature (239)..(239): n is a, c, g, or t
  misc_feature (289)..(289): n is a, c, g, or t
  misc_feature (340)..(340): n is a, c, g, or t
  misc_feature (347)..(347): n is a, c, g, or t
  misc_feature (428)..(428): n is a, c, g, or t
tcagagcaggaaattgagaaactatatcacagatctgatgtccagggccagagaattaacatgttcatctccaagcctggtaccaagtcccttcacaaaaatacagatgccaccttcaggaagcctccacgagaaagtggaggagccagggaagccttggcaagggaaaccacacagcggcgccgtccccagcgcaagtttgccttggttcaggagctcagtgggcaagccctgggggntggacttggggaaaggaagttgatgagcagctacggaggggcgtccagtnttgcattgagggattcagagctttttcagggcagagagccatcttgagccntcatgtngggccataacgtgacttcactcttggggtccatttgagagcatcatcccgcttgggccttaccttcaaacctttttttcanccagcatttc

SEQ ID NO: 5895 - DNA, 475 bp, Homo sapiens
  I.5895 (R35960)
  misc_feature (329)..(329): n is a, c, g, or t
  misc_feature (386)..(386): n is a, c, g, or t
aaggaggactgcagggtagagaagcaagcacagtgggcgcctctttaggaagtgacacttacagcctgcatgtgcagtatggctgtgaaggggcagatatcatagcacacctaactcaacaggatcttacttgaactgctgtgagttggtcaagtcagggcacttctgctcttcaggctcctctaggtcacacctttgaccaccctacatctgtttcctctttcaggctccagtagtagtcttaaaagtgaagtttatctaaggataagcacatgcctatcttgctcactgctgtgtccccactttttaggcacagcgcctgctgcttnacaggtacttcaaatatctggctggactttaattactttattaatttaaggctcttnattttccagttcatggggacaaatccttggggttttggactccctaaaactcttttaagggtacccaatggaggaacgtgggttttgtt

SEQ ID NO: 5896 - DNA, 426 bp, Homo sapiens
  I.5896 (R35934)
  misc_feature (353)..(353): n is a, c, g, or t
  misc_feature (364)..(364): n is a, c, g, or t
  misc_feature (376)..(376): n is a, c, g, or t
gagactggatctctttcctttgcaggagacgagagaatatgaagtctccatctaggtgggggcagtctagggaagtcaactcagacttgcaccacagtccagcagcaaggctccttgcttcctgctgtccctccacctcctgtatataccacctaggaggagatgccaccaagccctcaagaagttgtgcccttccccgcctgcgatgccaccatggcctattttcttggtgtcattgcccacttggggcccttcattgggccatgtcagggggcatcttacctgtggggaagaacatagctgggagcacaagcattcaacagccagcattccttgagcctccttcattgccnggggaccagcntggggaacacanttaggcaggagcagggagttaccttttctttccacatggaccaccattcc

SEQ ID NO: 5897 - DNA, 307 bp, Homo sapiens
  I.5897 (R35742)
  misc_feature (219)..(219): n is a, c, g, or t
  misc_feature (278)..(278): n is a, c, g, or t
  misc_feature (302)..(302): n is a, c, g, or t
ggcacatttgcttagccctttccttcccaccaagggggaaagtcttcctctagacaagaggcagagggctcctcagagtcagatcctggtgtgggctctcacgtgctgctgctgaatcccagggaaggagggaggaagggcagttgacacccaaaataagggtggggaactgtcagcagaggaggtctgtgtcatgtttttcagcgctggggttggggnggagcccagggagagcaggaagatccagagatcccttcgccccagctcggccatgtgtntttttgggacagagcctttaggtnggcct

SEQ ID NO: 5898 - DNA, 267 bp, Homo sapiens
  I.5898 (R35639)
  misc_feature (133)..(133): n is a, c, g, or t
gaatttttaggccatctattcaggttgaaaagaacccatatttttatgtatatattttttttaactcaacatcatctctgcttcaagtatctattcaagttgtggcagaaaacaacattgctaggttccaggnaaacaaggacagcatgtcttgttaaatacaatcatttcaggatcctccccaagtctcaccctgcagggctgctaagtgcagggagacaatgcagtgttggggacattgggagggcagggactatgggaggctgt

SEQ ID NO: 5899 - DNA, 378 bp, Homo sapiens
  I.5899 (R35394)
  misc_feature (367)..(367): n is a, c, g, or t
aatagtttaaaaatattccctttttcaccctattttcagatagcacatgagcccaacactcacttaattctcattatgaagatgtttttagaggggcaaaaatattttgcaagctctggaattgttgaatgtattcttttatataactacattaaaagctttagattgaaatttatgactagcaaacaaaaatagaatatataaacgatatatgtaaatatacagcatgaggattgtacattttttacttttttaaaattgtgttcttaaaatattgtgtaaggaatcactggcacttaggctgttgggaatgttgttaaatgctatggggaaatacatttaggacctggcatttagggacaggacnggcagtatgga

SEQ ID NO: 5900 - DNA, 456 bp, Homo sapiens
  I.5900 (R35365)
  misc_feature (367)..(367): n is a, c, g, or t
  misc_feature (423)..(423): n is a, c, g, or t
  misc_feature (428)..(428): n is a, c, g, or t
  misc_feature (438)..(438): n is a, c, g, or t
gctaccaaagcattcactgacttctcaaagccatttctactcagaaaagttaaggccactgacatattgaaatcctttgttttatagatgagaaaacttgctcccatggaaagcgggagacctctccagagcgatcaagccagtcagggacccatgcatgggccaggccactgtcccaaagactttgtgcacagcccctcagtgctctctcaagacaaccctactgaggcagccacagtcatcacctctcttgtacagaagagcatgctgacgcccagagggtttcagttacttcaggaatcatgttgcctcatctccagggctatttgcacttacactgtgttgtccctacacaaaaataaaaccnggggctgtgctgtggtggtgaagaccatgggcttgccacagccccacacacattcntttcntaatggttcntctcttctttcagggccc

SEQ ID NO: 5901 - DNA, 443 bp, Homo sapiens
  I.5901 (R35343)
ctgtgctgatgtaccattaataatttaagccagtggttcttggcaggtgatcccaagacctgcagcttcagcatcacttgagaagttgttaggaatgcatactagtgggccccgccccagacatagtgaatcagaaaccaacagggaggcgcctagcattgtttttttaacaagtgctgggttattctgatgcacagtctagtttaagaaccactactttgggtaaacgttttgactgtttaaagtttatgggcggtgaagtgggcgtcttcaaagactagtacttacacagtttaggaagatttcaaggtactgctgacagtagtttattatgtcagtatacatacatgtgtaggagatcataatttagttcccttcttaatgttacatttcttagtttacttttcctaaagggccatagcctaattcttggatcccgggtg

SEQ ID NO: 5902 - DNA, 513 bp, Homo sapiens
  I.5902 (R35337)
  misc_feature (431)..(431): n is a, c, g, or t
  misc_feature (456)..(456): n is a, c, g, or t
  misc_feature (462)..(462): n is a, c, g, or t
  misc_feature (494)..(494): n is a, c, g, or t
acctacacaaatccattatattttaagagatgctcaatttgcatcctttaagtttctcatgcttccccttctccacttcttaaattcttaaaaagctataaactgcataagttcgaggaacttaggtcgtccataatattgctaatgaccagccttaaactagacaaccactgaagaacctggcctatgagctgagaaacttgggttcttttatggctggccattaacgacaagtggggctgtaccactgtgctggtcacttgaagttctctgagtcacctgaaaatgagggagtaattggagccaaaagaggtctgtcgtcatagggcagccaatctaggaattctaggaatcctccaaatttagtttaatattcacatactatactggggttacttcaaaacagtgttcatctgggctggggggtggtnggctcacggctgtaattcccaacantttggnagggccgaggcaggtgggttcacttgaggttnagggagtttccagaccagc

SEQ ID NO: 5903 - DNA, 163 bp, Homo sapiens
  I.5903 (R34578)
  misc_feature (11)..(11): n is a, c, g, or t
  misc_feature (12)..(12): n is a, c, g, or t
  misc_feature (14)..(14): n is a, c, g, or t
  misc_feature (77)..(77): n is a, c, g, or t
  misc_feature (119)..(119): n is a, c, g, or t
  misc_feature (157)..(157): n is a, c, g, or t
atttttgaagnngnttcgatgtcttactgttatgaccataaaaccaataaagctactttgaaaagttaaagccaggngtaattaaacaactcatacttgattgttaaagtcagtctctnaaaagtgtaattttaaaaaggtaataaaaaaggtatancattat

SEQ ID NO: 5904 - DNA, 328 bp, Homo sapiens
  I.5904 (R34577)
  misc_feature (300)..(300): n is a, c, g, or t
caagttttcagtgtccctgtttcagtccagctaagtggataagggcatttatttttagttgaaagggacattttatcaactttaaagttatatgcattaaatatttaaatatgttgacttctttatccattcaggtgttgaatgtttgttttctaaaggagacaatgattcataatttgtgacactgtaaatcctgaggtttataggaaagggattcatggactttgtaatgggagggtatgttttgccattttttgtattttgggtcacatctcttgggttgaggagtacccggggggnaatccattatttcccagatcccgggggg

SEQ ID NO: 5905 - DNA, 298 bp, Homo sapiens
  I.5905 (R34454)
  misc_feature (63)..(63): n is a, c, g, or t
  misc_feature (259)..(259): n is a, c, g, or t
  misc_feature (266)..(266): n is a, c, g, or t
gctacataataggtaaatgcataatggcatgaaaaaaacatagcataaactaaaaaattattngtctttgtcagtgcagtaacaattattccattggattaatagattatattgaaaaagaaagagaaccactactttttctaaaccttcggtgggaattggattccttgttcaggcaatcttttgagtttcctttgttgggaagttttaggagcatgaggaaggtctattttctgccttaaattaaattaaatatttnatgggtnaggcctacagggtatttgcccaaaagtttaaa

SEQ ID NO: 5906 - DNA, 417 bp, Homo sapiens
  I.5906 (R34343)
  misc_feature (15)..(15): n is a, c, g, or t
  misc_feature (373)..(373): n is a, c, g, or t
  misc_feature (405)..(405): n is a, c, g, or t
aacttgaaagaaaantcaggggtacatgtgctggtttgttacacaggtaaacttatgtcatcggggtttattgtacagattatttcatcacccaggtattaagcctagtacccatttcttatgcagaaatagagacacaagaaggtcctataacttaggcagatttataaagttagtaaaggaaggagctaggatttaaaccaacttctgactgcagaaaccgatactctttaatatactttaatgcttatgttggggtagtgtttaggacatatgaggaatcattcttgaggctaaaccctgtttttattttctttatataggaccataacggggtatttccaaaattattttattgggggatatttggggnaatattccttttaccttttggggccaatcccngtgggggcttac

SEQ ID NO: 5907 - DNA, 325 bp, Homo sapiens
  I.5907 (R33923)
  misc_feature (1)..(1): n is a, c, g, or t
nagactctttcatgcttcctccttagcttctgatggctcctggcagtccttggcttgtggctgcatcacttcagtttctccctccgtcttcacatggccttctgtgtctgtgtctcgcatggccttcttccctgtgtctgtgtctttccatggcctacttataaggaccccagtaattggatttagggcctgcctaatccagtctgatttcatcttaactaactagatctgcaaagactctatttccaactaaagtcacattctgaggtttcaggtagacatgaagttttgggggacaccacttcaacccattgcagaacccaaa

SEQ ID NO: 5908 - DNA, 384 bp, Homo sapiens
  I.5908 (R33779)
  misc_feature (279)..(279): n is a, c, g, or t
  misc_feature (330)..(330): n is a, c, g, or t
  misc_feature (346)..(346): n is a, c, g, or t
gctccatctcataaaaaaaaaaaaagtaaataaaaaaaagaaaatgtctttatttcattttctttcctaaagaatatatttgctggataaaggattctgtgttgacagttttgttgctttttaaaagcactttataaatgttgctccatggtttctgatgagaaatctgccatcactgaaatctttggttctcctatatacaaagtgttgttttcttccagttgttttcaaagtattttctttacagttgggtttcatcactttgattatgatgtgccngggggtgtggggtttcccttttggggggtttgctgtgcccaggcagacccnggctttaaaataggangttatggtaaatgtatgggggaatatttgttttttgcc

SEQ ID NO: 5909 - DNA, 344 bp, Homo sapiens
  I.5909 (R33743)
  misc_feature (336)..(336): n is a, c, g, or t
ggaaaatttgataagaaaatgtaatgaattttatcagatatccaaagtaaaggaaatgttttaaaactgcaacaagagacacagacagtaaaatcaaagtattattatgatgactaaataaattataaagtctgtgagaatatcaaccatagatagttctttctatattatgtttttgcttttgtattttaagctttacttaggatattcaaaacctgggtatatcaagtctctgttagtactattgggcatttaggaagactttaccattatttcagtgctagggcattattgattagggtcttgggctccactgtttacctcttgctatggtantttctccc

SEQ ID NO: 5910 - DNA, 131 bp, Homo sapiens
  I.5910 (R33664)
  misc_feature (7)..(7): n is a, c, g, or t
  misc_feature (77)..(77): n is a, c, g, or t
  misc_feature (125)..(125): n is a, c, g, or t
gaaggtntcaacacaatgaagatgactgagggaagagtcagtaaatttgaagatacatgagcagaaattatctagtntgaatgacagagaaaaaagtgaaaaaaatgagaagacctttggggatntgtggg

SEQ ID NO: 5911 - DNA, 296 bp, Homo sapiens
  I.5911 (R33632)
  misc_feature (12)..(12): n is a, c, g, or t
  misc_feature (15)..(15): n is a, c, g, or t
  misc_feature (247)..(247): n is a, c, g, or t
  misc_feature (258)..(258): n is a, c, g, or t
  misc_feature (263)..(263): n is a, c, g, or t
  misc_feature (289)..(289): n is a, c, g, or t
aaatgcatgacntanttatattaaatttggaaattcaaagcattaatagaacagagaaaccagctaaaacaaattgtagcttttaaaataaacaataaagcccgttatttattatctaaaagccagtaaatacatttacttctttgggtacccattaaaatagttgcatttgcagaggatgtttaggggcagcgaaactatactatattataatgatgcatacatatcatcatatatttgtcctctngcatgtatacnccagnggggggcctctaatgttaaccctggnctttggg

SEQ ID NO: 5912 - DNA, 381 bp, Homo sapiens
  I.5912 (R33202)
  misc_feature (375)..(375): n is a, c, g, or t
ctaggaatgcatgcattattaaatatatcccagtagtacctgaatatctattcatcacaaagactgtgcatgaacttgtgaaatttgctagttgtcccttgataatatttacttttagaaataaatatttagttattctagatgtcttcctctacatctccatttccctttccgtttcttttttttcgtgccatactgttcatgatatatacctctttcatattttgatatcaataatgataatgatagattaaaagtaatgcgatcatataattaattatacaaagggggaattttttcaagtgtaaaaaggggtatttgtattaacctcagggactatagggtggaaaactggggggacagatgttttacccntaccct

SEQ ID NO: 5913 - DNA, 457 bp, Homo sapiens
  I.5913 (R33105)
  misc_feature (8)..(8): n is a, c, g, or t
  misc_feature (350)..(350): n is a, c, g, or t
  misc_feature (378)..(378): n is a, c, g, or t
tggagatntgcttaaaactttattaagatattttaaagtaaaatatctaatataaaaacagtttgtgttgtttcagcttatcttcctttaaacctgtgatttcccttcacctgtaatagaaacataacaggtggaacattactagcagaactgtatttagatcacattaagatatgcaaatgacaccaaagtttttgtttcgtacagtggactaagaccataaacccaagagtcaccctctggcttacattcaattagacctctgtgggagactttgggagataaacttccaaacatatacattattaatattttttaaacacaccctgctttctaggtgctacaagggnaacccaaaaggcagtccgagggtcaggnacacatttaaatcaaggtggaaactctttaaaaagggggttttaatggttaaaggccaaaaattggtggtataattttt

SEQ ID NO: 5914 - DNA, 372 bp, Homo sapiens
  I.5914 (R33035)
  misc_feature (142)..(142): n is a, c, g, or t
catacaactgatttttattccataaatagtaataaagtactgattcatgctacaacataaatcttgaaaacatgttaagtgaaagaagccagtcacaaaagaccacatattctatgattccatttatatgaaatgttcagantagacaaatccaaacagacagaaagtaggattactgattgcccgggggtagggggcgttgagggaacggggaagtgactgctaatggggttctgcaatggggttgagtgggtgtcccccaaaacttcatgtctaccctgaaacctcagaatgtgactttagttggggaaataggaggtctttgcaggatctaggttagtttagggtggaattcagactgggattaggggg

SEQ ID NO: 5915 - DNA, 381 bp, Homo sapiens
  I.5915 (R32647)
  misc_feature (372)..(372): n is a, c, g, or t
actgaagcagatcagtggccctgacttcccaacctcttcctgcattttagctgcctgtgaagtccagtgactggggctctcaagggacctactcccgaccccggagtcacactggaggtgaatctgggacctggcacagcttcccaaacttcgcatctatgaagagattttggttgggcatggcagctcacacctgtaatcacagtgaggaccccatccctgtcataaaatcaaacaaaaacagaggttctataggctatgttgggcaaaagtctccatgtttctgatgggccaaataaattaacgtgggggggccaattttgattttttatggaaggttaacaagatcctttttagggaaaaggggagganttgagggag

SEQ ID NO: 5916 - DNA, 349 bp, Homo sapiens
  I.5916 (R31734)
  misc_feature (289)..(289): n is a, c, g, or t
  misc_feature (337)..(337): n is a, c, g, or t
cagttcttacaggcaggcttcaaaattgaaaagccagaaacttaagcaaagaagaaaaatttaagttgaaagaactgttcatcaaattcaatgcaatacgaactctttgaggagttattttcaactgctgtgtttaaaaataccacttttcccacagttagtagttagggtttcatcataaaatactcccataaaaactattttaattttctaggtacaggggagggggggatttgatccccttgtttaaacatttttggggggaagtcttaaaagtgcttttcatttntttattcggatttgaatctggggccttggggactgctggggctttcancacacacacaca

SEQ ID NO: 5917 - DNA, 374 bp, Homo sapiens
  I.5917 (R31692)
  misc_feature (293)..(293): n is a, c, g, or t
  misc_feature (359)..(359): n is a, c, g, or t
tttcattattatcttttaatgactttgttccttttcatatgattatttggaaattacatagttattgttcctcttagtgaattgcaaaaattttctaacacaatgacattctaatgaaaaaaaacaaacctagtaagatactcgtatcatcctttggatattttgacaaagcatgacttaaaacaattctatggggaacaatgaaccaaaatgacacaagtgtaccacaaaacgatttcatttttgatgttccctgctaatatttttattgaccttttaaggtttatctaggnggctttttaatgcaacgggctatggttggtgggggctgtgtgtgtgtggtatatatatatatatanggtaaaccttttttt

SEQ ID NO: 5918 - DNA, 305 bp, Homo sapiens
  I.5918 (R31514)
  misc_feature (230)..(230): n is a, c, g, or t
  misc_feature (291)..(291): n is a, c, g, or t
tacagtgatcttaactttatttagctctctgtagaattaacatctttgcaaatatattattcaaccaagcatttgccataaagataagcatcaactttcccattggacaagtgatagtgttcaagctacttgacttgtgaaaaacaaaaaaccaccatgacttctcaacaaatacattttaaaatgaaatatgctcaggctgataaacaaacaaggatattaaaatgggngactgacattgaacctacataggtcaacttggaaaaaccccaggagggccattgctccctntaaaatggttttat

SEQ ID NO: 5919 - DNA, 527 bp, Homo sapiens
  I.5919 (R31024)
  misc_feature (399)..(399): n is a, c, g, or t
  misc_feature (431)..(431): n is a, c, g, or t
  misc_feature (470)..(470): n is a, c, g, or t
  misc_feature (475)..(475): n is a, c, g, or t
  misc_feature (483)..(483): n is a, c, g, or t
  misc_feature (496)..(496): n is a, c, g, or t
attcggcacgagggtgaaagtgatcattattcagatgatcttcaccaacactgcatttgcatatatctgaccaaactttatgcgacataggcaggtctctggcacttcaaaaatgaatgttaaatagaaaataataaataatagctgattagggtaatcatttatttaatcagaataaagattatatccataaaatttacttgcagagaagtactttctttttgttttaaagacagggtctcactctgtcacccaagctatggtgcagtggcacaattcacagctcactgcagccgggacctcctgggccttcaagggggatgatcctcctactttcagggatttatgccaccatgcccggctagttgaggaagtacttttcaataggcaactggaggncttttccttttaccttttggaaattaaacctngttgttaaacttaaccgtttgtctttgttaaggccatanttttncttttttngggggcttgtctnctgtgtttttccaggtggcctgtgggtcctt

SEQ ID NO: 5920 - DNA, 328 bp, Homo sapiens
  I.5920 (R30836)
  misc_feature (294)..(294): n is a, c, g, or t
  misc_feature (311)..(311): n is a, c, g, or t
  misc_feature (326)..(326): n is a, c, g, or t
agtttctgtgttcaagtttgaatactcttgaagtcttatttttttcattttcagattttaaaattttcaaagaaaaggcgttgctgatgtctgaaatctcagatgcctgaaattcaattgacaattactgaacaacagtctcttatttacataaaggtggggttgtcaatcttgggctctcaggaattttctcttgtagggcactgtgtaggctaaaggttatttaaggtgatttcagaggtaggataggattactcagtggattactaccctgttgccaaggttaattccggnaggggtaacccccgttnccagttcacgttagngt

SEQ ID NO: 5921 - DNA, 402 bp, Homo sapiens
  I.5921 (R27947)
  misc_feature (1)..(1): n is a, c, g, or t
  misc_feature (333)..(333): n is a, c, g, or t
  misc_feature (338)..(338): n is a, c, g, or t
  misc_feature (363)..(363): n is a, c, g, or t
  misc_feature (372)..(372): n is a, c, g, or t
  misc_feature (381)..(381): n is a, c, g, or t
  misc_feature (390)..(390): n is a, c, g, or t
  misc_feature (396)..(396): n is a, c, g, or t
nattaatgcattaagcactcatctatgcacttttcatggcatagagccatttcatcctcatggcaactcaacggtttaagtgccaggtgtagccccatttcacagatgaactagttgaggcatagagaagttcatctgactgtcccagggtccctcgttagtaactaggcagagcctgggatttgaactgcagcattctgactccacagcctgtgctcccccccaccggattccacttgccattggggtggggttttgtgtctatccacaggtacctctttgaaacaggttgggggcagttttgttcatgtgatttttgagcaagttgtttcnttttnttcagggcttttgcaccctttcatngggtcagtntcagggatntcatggggncttttnccaaaa

SEQ ID NO: 5922 - DNA, 436 bp, Homo sapiens
  I.5922 (R27837)
  misc_feature (12)..(12): n is a, c, g, or t
  misc_feature (13)..(13): n is a, c, g, or t
  misc_feature (14)..(14): n is a, c, g, or t
  misc_feature (422)..(422): n is a, c, g, or t
agaaaaaaaatnnnagaatctgcgtggtatatctggggtaaaatcatatgatatttttagtactttccttatgctttctggtttctgtaagaaaagataacatcccaatccaattaaacaaggtaaatcctccagccttggatgtctggatgaaagagagcaggatgggatggtaggcacggaactcagaatccactaaggagtgtgtaacaactcacctgccaaatcaactagcccttacattttttttttaattttgtatagtccatgaggatcctgatactgacctatggaaagggtgcaggaagcctgaaggaaaaggaaacaacttgctcaaaatcacatggacacaactgccccacctgttttcaggaggggtcctgtggggatagggacaccaaaaccccaccccatgggcagtngggaatccggtggg

SEQ ID NO: 5923 - DNA, 443 bp, Homo sapiens
  I.5923 (R27747)
  misc_feature (143)..(143): n is a, c, g, or t
  misc_feature (208)..(208): n is a, c, g, or t
  misc_feature (220)..(220): n is a, c, g, or t
  misc_feature (234)..(234): n is a, c, g, or t
  misc_feature (243)..(243): n is a, c, g, or t
  misc_feature (317)..(317): n is a, c, g, or t
  misc_feature (355)..(355): n is a, c, g, or t
  misc_feature (362)..(362): n is a, c, g, or t
  misc_feature (375)..(375): n is a, c, g, or t
  misc_feature (387)..(387): n is a, c, g, or t
  misc_feature (399)..(399): n is a, c, g, or t
  misc_feature (406)..(406): n is a, c, g, or t
  misc_feature (435)..(435): n is a, c, g, or t
  misc_feature (442)..(442): n is a, c, g, or t
tattttttcccttgacagtactttattaattttcatccatattttacttgactaaaaatacaatgtatgaaaatttatctttaatagcattttccataagctactataacaatttattgatacatctgggattcagccagggncttataggtatttaaatttataacccctgccatgcttaggcattaaggtaaatcaggtatggcangcaggtatttangggcaaagctttanggaatactnttaaatttcatttggtaaatacatgggatggcaggactgtttccctgggggagggtcaccaaatccctcaaacngggaaatatggtggtggttcctccaatggttacccccnggatacnggggaatccactngggggggggggnattttttttacntgggggnaagggggccccgggtttaggggggggggnaaccccnt

SEQ ID NO: 5924 - DNA, 397 bp, Homo sapiens
  I.5924 (R27746)
  misc_feature (284)..(284): n is a, c, g, or t
  misc_feature (343)..(343): n is a, c, g, or t
  misc_feature (354)..(354): n is a, c, g, or t
  misc_feature (371)..(371): n is a, c, g, or t
  misc_feature (379)..(379): n is a, c, g, or t
  misc_feature (389)..(389): n is a, c, g, or t
cttttaatcagtcttatcctctaagtcaacttcattttcctctttgtgaatacccatagcaatatgtaagattttattgaagtttcctgtgataactgaggaacactttgctatgcctcactgcccaatagggtgggtcatcaattaggagaaatcccaaattataaaagccaacatatgccgtgacctacgtagggaaaagatgtatttgtggcatcttctttctggggtagttaaaaattactccctcttttctctaggcatttgacatttcaggacttcanggctctgatctctagggggagtgtggattattccaaacttatgaggagggccaggaggncacagtttttnggatctactgccggctnaagccccntttaaaacanccgggggt

SEQ ID NO: 5925 - DNA, 426 bp, Homo sapiens
  I.5925 (R27734)
  misc_feature (10)..(10): n is a, c, g, or t
  misc_feature (14)..(14): n is a, c, g, or t
  misc_feature (212)..(212): n is a, c, g, or t
  misc_feature (229)..(229): n is a, c, g, or t
  misc_feature (263)..(263): n is a, c, g, or t
  misc_feature (315)..(315): n is a, c, g, or t
  misc_feature (326)..(326): n is a, c, g, or t
  misc_feature (356)..(356): n is a, c, g, or t
  misc_feature (364)..(364): n is a, c, g, or t
  misc_feature (373)..(373): n is a, c, g, or t
  misc_feature (379)..(379): n is a, c, g, or t
  misc_feature (405)..(405): n is a, c, g, or t
  misc_feature (411)..(411): n is a, c, g, or t
  misc_feature (418)..(418): n is a, c, g, or t
  misc_feature (426)..(426): n is a, c, g, or t
tagtccagtnaaanactttaatttcgcttttccataatactggtattccatagaagaaaatcttttattaatattctatactactacatccgacaccagatgactaaagtttgcaatggtccaaaattctgtaaacccattaaatgcaattcatactttattttgggcagtattcatttcatcattactttatttgggatggctaacggcangtacttctaggggaaangctggtcatataattactttaggtcaggcattcngtaggggccaataatcaaacctctatccccaacatttttacacttggtaacnggatggagggngggggtaccacatacctttttggcaatttncctattanggggggccntaatcntttggggggggcttaggggccccttntatatnatatatnatttttgn

SEQ ID NO: 5926 - DNA, 390 bp, Homo sapiens
  I.5926 (R27733)
  misc_feature (364)..(364): n is a, c, g, or t
  misc_feature (369)..(369): n is a, c, g, or t
  misc_feature (380)..(380): n is a, c, g, or t
  misc_feature (387)..(387): n is a, c, g, or t
ccagtaataacctgggaagcttttatattcaagcgttttaatatgattcaccaacttcgaagtttcctttggaaacggttgtctaatgaatgttgtttatcaaaaagccaaacctgttctaccacacctttgctcatcacttttcccttaaaatgtggtgtaagtggcttacgatatgaaatcacagggttctttttatcattatgtttgttaaaaagtactgaggatttttgcctgttaatgggcacggataattgccataggcgttctgttaattcaggaaaggaatggatggcagcggaatttaaggtcaccaggctggctttaatgggggaaacacaaacttggccttcgggtttttaantaccnggccttttctncataaantgg

SEQ ID NO: 5927 - DNA, 360 bp, Homo sapiens
  I.5927 (R27666)
  misc_feature (298)..(298): n is a, c, g, or t
  misc_feature (305)..(305): n is a, c, g, or t
  misc_feature (338)..(338): n is a, c, g, or t
ttgattatccccataaattggcatttcggttaaataaaaagaatgaccaatttgtatatcctgtacaattctaacctaattcttttgcaaatgaataaccatatcttctaattaattttaatctaaataataattttaaggctacatacctgaatttctgaactgtaaagtgagttaatcatttaaaggcatgatctgcacaaatctacttttgattctatggaacaaataaaacatttatattttgagggggatctccaattcatggcattatgcccttattaaacattcttaggtngggggcnttggttttttttggactctcccggagtctgggnggaggcccctaccttgggggcc

SEQ ID NO: 5928 - DNA, 359 bp, Homo sapiens
  I.5928 (R27606)
tacacatgtgtatgcatgaaaaatttctagagggtcatattaatgtaagaaattgtgaagggtggtctctagggcatggagcttagcagctagtgataaagaaactcacttgtcattacacttactgtttgaatttacaatgtcatgtttcattttcataatttaaaaaagtcagtgccaaaacacttacataactacttacatttcttatgtatgatttgactgcttattttaaagtttactgtatttaaagttcaacatcaaaagaaagggctaggaaaagtgggtgggctaggacctaggttctttcacactacttcatttctaggcttccacatggctctggtaatagccaaggc

SEQ ID NO: 5929 - DNA, 254 bp, Homo sapiens
  I.5929 (R27568)
  misc_feature (11)..(11): n is a, c, g, or t
tccaagccttngccagtagcccatttatttaaaaatgtatctaatgcaatgaaaatttcagcacaatgaaagtattagaacatgtggcattgtcagaaatggtggggttaaaatgttcttcttgcctacattttacctagtatacatggttttatgtgactatcaaagggttatacttttagggttatcctaaaaattaggaagtttaaaggcctaaaagaatgaaatgtgaatttttaaaaatttaggtgtaa

SEQ ID NO: 5930 - DNA, 337 bp, Homo sapiens
  I.5930 (R26635)
  misc_feature (291)..(291): n is a, c, g, or t
  misc_feature (314)..(314): n is a, c, g, or t
actctatcgtgattatatttttatgatgggaaaataaaaacacttccatgtttttataaatagtctctgcaaagatttcagatgttattggtatctcggtttggcagtatctgaaaaattgagattgtctttgaaatgtttgtgctacttttacttaagtaaacccccactgtgcaagacccagggccggcttcagctaataccaaggtttctgtgtgcataatagtttacagaggaacttaaggagtaaggactgcgggattaaaaacaaaactttttttaactttaaanttttagtttttgttcaagtaccnggggttattaaagtcaaatttct

SEQ ID NO: 5931 - DNA, 419 bp, Homo sapiens
  I.5931 (R26169)
  misc_feature (74)..(74): n is a, c, g, or t
  misc_feature (93)..(93): n is a, c, g, or t
  misc_feature (116)..(116): n is a, c, g, or t
  misc_feature (124)..(124): n is a, c, g, or t
  misc_feature (188)..(188): n is a, c, g, or t
  misc_feature (205)..(205): n is a, c, g, or t
  misc_feature (217)..(217): n is a, c, g, or t
  misc_feature (220)..(220): n is a, c, g, or t
  misc_feature (247)..(247): n is a, c, g, or t
  misc_feature (256)..(256): n is a, c, g, or t
  misc_feature (276)..(276): n is a, c, g, or t
  misc_feature (277)..(277): n is a, c, g, or t
  misc_feature (315)..(315): n is a, c, g, or t
  misc_feature (332)..(332): n is a, c, g, or t
  misc_feature (381)..(381): n is a, c, g, or t
  misc_feature (392)..(392): n is a, c, g, or t
  misc_feature (415)..(415): n is a, c, g, or t
tcactgttaatccctcaaagaaagggatattatttatttttgtctttcccatagcattttgtagagtacctttnacttattcaaatatttgtnggttattatgccatatatttganattatttngtggcctattaaatatacataaatcagagggcttagaaaaacagattaaaacagtactataggngaatctttctgaaactnggaaagcaaaanctnttaacacaggccctaaactttaaactngttatcctnggctgccattggggccattnnaatctctctctctcaaaatgttgtcatgaggccaccanaaccattctggaacaantggcaatcataacattaattcccttaaatttccctctttggcccttttnggcaatcttcnggggtttttgacccggcaaattntttc

SEQ ID NO: 5932 - DNA, 369 bp, Homo sapiens
  I.5932 (R25795)
  misc_feature (156)..(156): n is a, c, g, or t
aagagcaaaactttgtctcaaaaaaaaaaaaaaaaaaaaaaagaaagaaaaagaaaagaaaagaagtaagagttcacccatagtgaagggcttctctaggtactccataccacttcctcccaaactatatccagacactaaatacccctaggtttnaaagaagaataaactcacctcccagaggaagagctgatttatcttcaggcattcagcactttccatcctccctcaagtatatgtcaaccagacaaggcaggtaattgctacatgatttatgaacaaactgcaactgacatttgtacaaaatttttaacctccatctgtcatttactggctctccaagggtaacattatttaaggcaactaatt

SEQ ID NO: 5933 - DNA, 386 bp, Homo sapiens
  I.5933 (R25708)
  misc_feature (295)..(295): n is a, c, g, or t
  misc_feature (366)..(366): n is a, c, g, or t
gtggctactgacctcaagtgagccacccacctcggcctcccaaagtgctgggattacaggtgtgagccaccgcacccggctgtttctgttatttttgtacttttttgagggtatctgaaatggttttggtttgtgtattttaaatgttatttaaatggttttttgtttcttttttgtttttgagatgaatctctctatgtcgcccaggctggagtgcactggcacgattcttgggctcactgcaacctctgccttcctgggttcaagcgattctcctgcctcagcctcccagggnaggctggggattacacgtgtgcaccaccatccccagctaattttttgtaattttaggtaggagacgggggntttgccatgctggccagggg

SEQ ID NO: 5934 - DNA, 440 bp, Homo sapiens
  I.5934 (R25555)
  misc_feature (377)..(377): n is a, c, g, or t
  misc_feature (392)..(392): n is a, c, g, or t
  misc_feature (403)..(403): n is a, c, g, or t
  misc_feature (426)..(426): n is a, c, g, or t
  misc_feature (431)..(431): n is a, c, g, or t
tcataggggtttgttgtacagattatttcatcactcaggtattaagccttggacccattaattattttttctgattctctctctcctcccaccctccaataggccccagtgtgtgttgttcccctccatgtgttcacatgttctcatcatttagctcctatttgtaagtgagaacatgcggtatttggttttctgttcctgtgttattttgctaaggataatggcttccagctccatccatgtccctgcaaaggacacgatctcattcttttttgtggttacttgatgttatttctacatcataaaaaaagtaatttttattgaaattagttttcataaaagttgtaccagtattgagtcccattaggcctcatctncatctcaggtctctncctcgggttantcttttagggccacagtggggcnggccntgttaggtt

SEQ ID NO: 5935 - DNA, 394 bp, Homo sapiens
  I.5935 (R25259)
  misc_feature (64)..(64): n is a, c, g, or t
taattaaccatatgctagaatgcccacctctaagccaattggattctttagctctctttttctntccttcatctaccttcttctcttttttgcctctgtctttaccctttagaaactggcatgtgttagggcccagatttcaccagatacacaatcctcaggctgacataaagtttacgaggactgctactataactgagagtgctgaccaagcaaagaaacatttagttgatggtgcttgatatttttggtgggtgggggaaatctttttctcaccatcaaatctttgcagtaatcctctggcaggtcttaggaaacacattgggctctgtcagcatttgtaattgtacatttatttcatcagggtatttataggtggaatcatactgttaaa

SEQ ID NO: 5936 - DNA, 467 bp, Homo sapiens
  I.5936 (R24947)
  misc_feature (352)..(352): n is a, c, g, or t
  misc_feature (367)..(367): n is a, c, g, or t
  misc_feature (388)..(388): n is a, c, g, or t
aaacatgtgcctagtttgcagcaccaaatactggtcttctcagaagtgtttctgtttttttgtttttgtttttgtttttgtttttgtttttgttttgtttaatttcctcttctggcatcccaatttggatcatttcctctctttctttcctggagaaacaggatggcaggtgctggagcccagagaggctaaatgacatttagcctccagctaaaatgatttaaatggaaaggagaatgacagcaaagcctcacgtgaactttaatgaccttatcaatgacctttactaactgactcttgggtacccgggattgttgaggagggtgagtgggggactaaaaagccagggatncaaggatcagggttngcttccacacattttgcaggntcagggaaccccggggaatatggagttaggaccccaggaaagtatttggaactggggacatttgatggaggctttgagg

SEQ ID NO: 5937 - DNA, 409 bp, Homo sapiens
  I.5937 (R24848)
  misc_feature (97)..(97): n is a, c, g, or t
  misc_feature (383)..(383): n is a, c, g, or t
  misc_feature (398)..(398): n is a, c, g, or t
tgagggtctctaactaaacatttcaggtatgatgggcaaaatgctggtttgttacagaaatgactgaagaagacctaggggccatagtgggcacagnaaggcctgcaatacagcctgaagtgtgggaaagaatgtatcagtcctgttgatggagtggtgtgtttgctgtctctataaatatgtcagggtttgaaagacagaaaacaaagcatctttgctgaccgccagactcccagggtatatgtgggctactgcaaattaggcgaggcttgtttatctgcttcaacttgactcaatttgcatttcttgagccactgtctattgtgggataatggtttcatcaacactttctcaggcatcagcagcccctccagagtattccntggattttcttaggntttgtgccaac

SEQ ID NO: 5938 - DNA, 292 bp, Homo sapiens
  I.5938 (R24472)
ataattagcttaatgcacagggtttttttgtaccttgcccattcgctgaacttttaaaccctcctacatatgaaagaggaacagtactctttagtattacatcactgaaattatagaattgctcagacttgagacttttgacagtttttcatgagaagtcagttacattaaatcaccctttgtttgcttttctgggacctatttttgctcaatcccaggataaaactcctaacccgggggttggggctcagcactgatttggggaggctaaacggttttggggataaataca

SEQ ID NO: 5939 - DNA, 423 bp, Homo sapiens
  I.5939 (R24471)
  misc_feature (1)..(1): n is a, c, g, or t
  misc_feature (141)..(141): n is a, c, g, or t
  misc_feature (154)..(154): n is a, c, g, or t
  misc_feature (159)..(159): n is a, c, g, or t
  misc_feature (170)..(170): n is a, c, g, or t
  misc_feature (176)..(176): n is a, c, g, or t
  misc_feature (181)..(181): n is a, c, g, or t
  misc_feature (214)..(214): n is a, c, g, or t
  misc_feature (327)..(327): n is a, c, g, or t
  misc_feature (365)..(365): n is a, c, g, or t
  misc_feature (414)..(414): n is a, c, g, or t
  misc_feature (419)..(419): n is a, c, g, or t
nggggctgcggacggacaacatcagactgaatcagaagtgcggccttctaggaaggactcacttcttcgggacttgtaagaaaaggtggacaagaccgaactgcttcaccggcgcctggaatccctgaagagccaccacgntagcctcactttntcctncagaggccatnaggcancacgntcagggaggccaaagcctttatcccttcttgancagatcgatgagaagagtctgccaaaccactttcatcctcaggacgtgctgtcctgctttattttaccttcgttgctatttaaaaaggcctgtgttcatttggggacggggantcttatttttgtatttattcttcaaaacgtttttaggnttcccaaatcagtggctggaggcccaaacccggggtttagggatttttnttctngggg

SEQ ID NO: 5940 - DNA, 349 bp, Homo sapiens
  I.5940 (R24089)
  misc_feature (241)..(241): n is a, c, g, or t
  misc_feature (262)..(262): n is a, c, g, or t
  misc_feature (271)..(271): n is a, c, g, or t
  misc_feature (284)..(284): n is a, c, g, or t
  misc_feature (299)..(299): n is a, c, g, or t
caaaggtttgccagccaataaagtgcatcccaagtatacaggggagaaagctagactcctacagggtcctagagtttaagtaatttttttgttattaatataggtaataatttttctaatttttattttttggttccaaatgtaaagctccttgtgtttacctctgtttatgtcattcttgacatgtttatctaaattatgtgtgctctgtgacagggtgaaatgtaaatctggggatccntagtcaaggatatcataaggnccctacttncccagcctacccntccttccctctaccnggataatggataatactccaaaataaccaccattcaaaggggaacacaag

SEQ ID NO: 5941 - DNA, 423 bp, Homo sapiens
  I.5941 (R24039)
  misc_feature (332)..(332): n is a, c, g, or t
  misc_feature (358)..(358): n is a, c, g, or t
  misc_feature (382)..(382): n is a, c, g, or t
  misc_feature (393)..(393): n is a, c, g, or t
  misc_feature (404)..(404): n is a, c, g, or t
tgttatttacttccaagaagaacatttttctgtttattcttagaatgtaaattttttttttcaactcagggccaagtacaaacttttgatttttgaaattttttcaactcagggccaagtacaatcttttgatttaaaaattttttttcatgaacaaaccatcagtagttattaaggagcccaagaaataggagatgtgaaagcaggatttctttgtgtttcctttgaatgttgttattttgagtattatcattatcaggtagaggaagaaaggtaggctggggaagtagggtcccttatggatatcttgactatgggatccccagaatttncatttcaccctgtcactgggggcccnaccatattttaggtttaaccatgnccagggattgnccataaccagnggggtaacccccagggagc

SEQ ID NO: 5942 - DNA, 318 bp, Homo sapiens
  I.5942 (R23952)
  misc_feature (9)..(9): n is a, c, g, or t
  misc_feature (10)..(10): n is a, c, g, or t
  misc_feature (11)..(11): n is a, c, g, or t
  misc_feature (12)..(12): n is a, c, g, or t
  misc_feature (40)..(40): n is a, c, g, or t
  misc_feature (171)..(171): n is a, c, g, or t
  misc_feature (248)..(248): n is a, c, g, or t
  misc_feature (311)..(311): n is a, c, g, or t
tacttgacnnnnattgtgtcacatatatccatgccagggntataacctcaaattctcagccactgattgcttatgaagaactggttttaatttaaaaattcttaaggcagtaggaatttgagactgagaaggaagccttttaattctttcattctctttcttctttatcgngcctcataccttgttacaggtttctaagggtttcaattaaacatttcatttggatatggaacctactgtggtcaccnaggacagggaatctttggctccattcaccataaccaccttctcagggggaaggcagggggggnaccaaat

SEQ ID NO: 5943 - DNA, 311 bp, Homo sapiens
  I.5943 (R23951)
  misc_feature (308)..(308): n is a, c, g, or t
gtaaaattatactaaaaatgcatttgtcaggacttgaaagacagtgagagtgattcaagctcagaggaagagcggagagtcactacccgagttattcgccggcgtttgattataaaggtatcctgtagctggatcattatgtggcattgctctactattagaaactccttccttgtggttgtaggaaactccttccttgtgggttgtgaaatttcagcatgcttgataatgaaatggctttgtgtaatttttttggcacccttggaaagcttgtaaaaacaacaacccaaaaaggaaaaggagcccangtt

SEQ ID NO: 5944 - DNA, 353 bp, Homo sapiens
  I.5944 (R23810)
  misc_feature (1)..(1): n is a, c, g, or t
ngtttagcagaattgtaaagtgaatacttgtgtaaacactatctggaccaagaaataggatctactggcactgcagaagttccccttactgtggatttcaatcccatccacaaccctctccctgtatcccaaaggtgatcactagactggctctttacatttttactacctttgtatgtatccctaaactatagtttcgtgtggtctttttggggagcctaacaaataggaatcatatgggtatactttaaaggaattaattgaagtgtaatgtacatataggaaggaatccacagctcataggcataggaggcttcaattgttcataaggaacacaccagtctaggctatcc

SEQ ID NO: 5945 - DNA, 307 bp, Homo sapiens
  I.5945 (R23755)
  misc_feature (268)..(268): n is a, c, g, or t
tccttcagacagttactgtttatttagctctttcatttcatttagagtgagaataaagaaatgtattacagcaatgaaaataacaaattacagctaccctcttatggatacaatgttgagcagaaaaggcaagatcataaaaaaatgtacactaactagatgatagctagactggtgtgttcttatgacaattgagctctatgctatgagctgtgggattcttctatatgtacattacacttcaattaattctttaaaggtatacccntatggattctatttgttagggctcccccaaaagggcccc

SEQ ID NO: 5946 - DNA, 377 bp, Homo sapiens
  I.5946 (R23616)
  misc_feature (371)..(371): n is a, c, g, or t
ctgaaatcagagatgggctctaccactgctttaatatgcgactttagtaacccactgattctgttgtagaattcttggacttgaagtactgttagttatcatttttcagtccagatagtattgcatcaaacaaaattatgaaatatatacaaatttgagacattatgagcagaggcattgatgaccacatgctatatcttaaaattttactgatagttgattttagcaagtcttatgaaacactaagaacaatgtctggtgcctagcaaattctcagtaaatttcagctagtattattacagttagtattactttactatgctccctggataaaatttttataattaaatgggttaatgactttcccttgngggtct

SEQ ID NO: 5947 - DNA, 474 bp, Homo sapiens
  I.5947 (R23574)
  misc_feature (315)..(315): n is a, c, g, or t
  misc_feature (392)..(392): n is a, c, g, or t
  misc_feature (419)..(419): n is a, c, g, or t
  misc_feature (433)..(433): n is a, c, g, or t
  misc_feature (442)..(442): n is a, c, g, or t
  misc_feature (448)..(448): n is a, c, g, or t
  misc_feature (469)..(469): n is a, c, g, or t
gacattgctctctggataaaggatagacttaggcactgatcagaaacggtctctgtttaccaaaattccttctttgcacacagagctgtgtagtgaaaatgcccgtcctacacaaataatgtgttatagcaaaatgagccagttaacatgtcagctcaaatcaacctaatttgggttaaaaattcttccttttctgtttttttttcttttcccccctccccctcctcaattcttccttttctaaaaggatcttgttacttcataaaaatcaaattgggccccacgttaatttatttgggccatcaggaacatggnggacttttgccaacataggctatagggaacctctggtttttgtttggatttttatggacgggggtggggggtctcantgtggattacaggtgtggagctggccnggcccaacccaaantctcttccnaggtgncgaggtttgggggaggtgtgncgggg

SEQ ID NO: 5948 - DNA, 411 bp, Homo sapiens
  I.5948 (R23402)
  misc_feature (2)..(2): n is a, c, g, or t
  misc_feature (231)..(231): n is a, c, g, or t
  misc_feature (302)..(302): n is a, c, g, or t
  misc_feature (353)..(353): n is a, c, g, or t
anagaagaataaatccaatttatcagctttgttcatattctttttctgagtgatctaaatttttcttgcttgtgatcattagctaagacaaggagtgttaaaggttttctaaatgcaaacacatacgtttctgcatttcagaagtcagtcttgatagtaaatcctacaaactctcaactttctgcattgtattttaagtctatacaatgttagagcacatggtaatgtggngacagagttgattatatgatagcatgagaaatttgcactggttggtgttacaaaccaatgatctaaccagncatactctccaaatatggaaaaagtaaaaacatctgcattaggtttggganggagcctaaggtagtccatacaggaagttttgcctgaggaacagagagggagcctgtt

SEQ ID NO: 5949 - DNA, 457 bp, Homo sapiens
  I.5949 (R22711)
  misc_feature (334)..(334): n is a, c, g, or t
  misc_feature (341)..(341): n is a, c, g, or t
  misc_feature (352)..(352): n is a, c, g, or t
tgtaatgagttttggaactcagtaccctaaataataatactaatgttgtaaatgttaaagatacagaattatgaataagagtcataaattagaattatagagacagttgtagcagctgatggctttgctagttggggggcagagagggtggagttgcagtggaaaccaactccggacagccaggagctggactggcactattagctaggcatttgtggtactggcagctgtcctgggcattctcagttctcattgttttgtcaaatataaacagtcccacaaaacatcaacatcagttatagttcactttatgactacaatagggcaagacaanaataagncccctccacantcatgtctggaacacagccaattaccaggaccagtcttcttaaacccaccaaaatggaccaaccttctgggttaattttgggggcccccttttttttggggccct

SEQ ID NO: 5950 - DNA, 356 bp, Homo sapiens
  I.5950 (R22087)
  misc_feature (284)..(284): n is a, c, g, or t
  misc_feature (308)..(308): n is a, c, g, or t
tacatcatggtcattttctagttttttaccagactcccatctcacaataaaatgcatcaacaagcctgaactgctgtcattcttttcatcattatcagtattttctttggaaaactgtgaaatggggtacattgtcatcctgcatttgattcatcttgagctgaatttggggtaacactaaatgttttaggacattctccactaaattatgggattttcttgtgggctaaatgtttctgggagagggtcagagttggacaaaacctcttcacagggttgctccntcttcccggaaatcccttaatccntccgcatttcatgctttcagggtcatttcaggggagccggggggttag

SEQ ID NO: 5951 - DNA, 475 bp, Homo sapiens
  I.5951 (R22034)
  misc_feature (8)..(8): n is a, c, g, or t
  misc_feature (20)..(20): n is a, c, g, or t
  misc_feature (97)..(97): n is a, c, g, or t
  misc_feature (112)..(112): n is a, c, g, or t
  misc_feature (118)..(118): n is a, c, g, or t
  misc_feature (140)..(140): n is a, c, g, or t
  misc_feature (267)..(267): n is a, c, g, or t
  misc_feature (293)..(293): n is a, c, g, or t
  misc_feature (334)..(334): n is a, c, g, or t
  misc_feature (373)..(373): n is a, c, g, or t
  misc_feature (399)..(399): n is a, c, g, or t
  misc_feature (418)..(418): n is a, c, g, or t
  misc_feature (458)..(458): n is a, c, g, or t
tttttttntttttttttgtntgagaaggcataatttattgtgtctattatgactagtgtttaataagacttataagaaaataatcaaattattagancatttaacatatatnctgganttagaagcaaaaaaagtgagancatagctgagctccataaacatgcaaattatatttttattcaacaaatatctgttgtcccaacttatgccagggcaccctgttagggcagtgagggaatgtgagagtgactatgacaaatgtgggtnccctgttccctagtgggggaagggantataaataataggtatcagagggtatggatgacaggaggtncagggagcctgaggagtcaggaagggcatcctaaccccngggggttccccctggaaatgaccccngaggccattgaatccgggnaggggattaggggatttcagggaggaagggagccaccccnttgaggggggtttttaa

SEQ ID NO: 5952 - DNA, 293 bp, Homo sapiens
  I.5952 (R21603)
  misc_feature (169)..(169): n is a, c, g, or t
  misc_feature (285)..(285): n is a, c, g, or t
ttgctggagctcggtacaggtccacccagctgaagtggggttctttttcccactaccactggggcaagggagtgagcctaggtatggtcacctcagcagccacagtcttaaaagcaagtcgctagattttttgaaagtcccaagagaagtggtggtcttcccttctgtnatcccagtatatatagttatacatgtaaatatctaaataccccatgtaattggaaggctatgtacagggcagccttcccaaacgctgtgaggggcacagagctgctgtggctgctncaccaggg

SEQ ID NO: 5953 - DNA, 427 bp, Homo sapiens
  I.5953 (R21337)
  misc_feature (231)..(231): n is a, c, g, or t
  misc_feature (288)..(288): n is a, c, g, or t
  misc_feature (395)..(395): n is a, c, g, or t
  misc_feature (407)..(407): n is a, c, g, or t
  misc_feature (413)..(413): n is a, c, g, or t
tgaagacagcatgcatccttccagcatcttccactcctttgaaatcagcatccctcatcttacttctccaggataaaaattaacatagctgttaccatatttgcaaaggccaaactttatttgatagatagatagatagatagatagatgtatttatgtataaaatatgtatggtgtgacaggtaggaattacgtattggaacaatgggaccatgggaccaaatatattanatggggagcaactgcaggcaaatctggaggaggaatagtgtgcaggatacatacggntaaaagctacaagctaatctcttagttatttgccccctacatgttaaaagtaagtgattgggaaagggatttatcctctaaaatttggggaatgctacatggaaatntttgttaaagtngggatnccattaccgggtta

SEQ ID NO: 5954 - DNA, 348 bp, Homo sapiens
  I.5954 (R21011)
ctttccctaattctccaaacggttcaatctccagttttattcagggactgggccattttgttctcagagggacaaaactgatctctccatgaaatcccctgcacctcactctgggcagctctaggctcagcagatgtttttctgccattaggaaacagccccttactctcagctcctgtgctaacacccatacccaccagctgggcgttgggacctctcccgtcatatgggctgccacttgcttggggaaggaattctccagactccttttactttgtatgtgtttctaggggggaattctgaggggaagaagctttgcaggcaacctctgtggcccaggaacatacg

SEQ ID NO: 5955 - DNA, 233 bp, Homo sapiens
  I.5955 (R20502)
  misc_feature (158)..(158): n is a, c, g, or t
  misc_feature (185)..(185): n is a, c, g, or t
acgtgagcttctctctcattttaatgtgaggaaaatcatctttcagagacaaggcaccgcttagaaatgtatgtccaggtatgaaagaacctttttaaaatggctggttgttccagatccagatttctctgcacactggacttcgtagagtaagtgtngtagacaaagagactacactgcacaancaccagtgaatatcattgctaagacagacttttggtcgtgtttctcag

SEQ ID NO: 5956 - DNA, 365 bp, Homo sapiens
  I.5956 (R20482)
  misc_feature (314)..(314): n is a, c, g, or t
  misc_feature (336)..(336): n is a, c, g, or t
  misc_feature (345)..(345): n is a, c, g, or t
aatcacttatgaaactgttagcccttaatatgcatcacatttgtggttccatagtgcttctcctttgcttgtttgatctctgcatggcagcagtggggcagctccacatttggagcccatactccaaaatgcagagcactcttctcacagcacacattcccagccccaaacaaaacctgaattttcaactctgcccattaaagtgaatgtatccctgtaatttagtatgtacttattatgggaaaatgtaacaaaaggcagagaagtgtgattttcattctgtattcacaaattgaggcaaatcaacaggcaantacaggcagggatttcaggggngggcttggntttgcaacggtacttttgtt

SEQ ID NO: 5957 - DNA, 413 bp, Homo sapiens
  I.5957 (R20340)
  misc_feature (328)..(328): n is a, c, g, or t
  misc_feature (355)..(355): n is a, c, g, or t
  misc_feature (368)..(368): n is a, c, g, or t
  misc_feature (387)..(387): n is a, c, g, or t
  misc_feature (402)..(402): n is a, c, g, or t
attatgaaaaattagaagctaaattacagattcattgatggagtcaattatgcaaagtggtcagtggttgttgaagcatgcattgcttcaacaggatttgcgtgcatttcccatgatcctgcattcttgtgttcttgatagcatacagacttactcagaatcaacagttgctgcttaatttgtctattttgtaagcttaggctactattttattaaaactgggacataggatacttgggctgaaaacaaatagttttgcagattgcaatataataaagggaaacagtaaaaactagtggggctatgcttagggttttcttggaaaccntaacattgctttagggctggggtgccntggctccgtgccnggttaatcccagtgctttngggagggctgaggtngggagggtcca

SEQ ID NO: 5958 - DNA, 468 bp, Homo sapiens
  I.5958 (R20213)
acaattctaagatgggaaaaagcatggacaactgtaaggggaagaaagggatcctcacccttctccctaatgacacgctttgggcttagtcttttggggctgctataaccaaatatcctaagttgggtggcctataaacaacagaaatgtatttctcactgttctggaagctgggaagtccacgatcaaggctctggcagattcgatgactggggaggccctgttttctagttcgtacttggcaccttccagctgtgccctcacgtggtgcaaaggacaaatgagcttccttgggcctctcttacaagaggtctgtcttcatgacctaatcacctcccaaaagccccaccccctaaatactatcaccatgggggtttagggattttcaacatggaatttgtgggggatacaaatattgggaacatagcactctcctcatctatgatttcggtgctgtggaattgggag

SEQ ID NO: 5959 - DNA, 360 bp, Homo sapiens
  I.5959 (R20146)
  misc_feature (354)..(354): n is a, c, g, or t
ctcggtcataaggcaaacattaacccccagcgaacacgcaacattaaccccccgcgaacacgccgggaatggatggattcccctcttctttcctcccctcccctcttttggattagaagaggagaaagaaaatcttccgcattgtattgcaatccagggaagaattattcctatatgtccaccaaagccgcggcaaatagaaggaggccttcgcagttaatccaagacttcgatgtgtgatcataagcctgacgatttagggcaaaacaaatttaaacaaaatccactagggaaaaaataaaaggcaagcttcattcctgcttacatccttggaaagtaggttttcgggttttnttttta

SEQ ID NO: 5960 - DNA, 372 bp, Homo sapiens
  I.5960 (R20026)
  misc_feature (356)..(356): n is a, c, g, or t
aaataaaaagtagggaagagcttctccatgggatcagatcacagctttggggagtgggatggggcctctatgctttgatctatgcatgagctggggtgagaagttcccacctgcacctgactgcaatgactgtaatggctggaattgtcacctcttctccctgataggctcttcctcacctggaggatcggggctggtgggagggcagggaaggggaggccatcagccagaatgtattttctttcagttccatttcctgaggaagaacttgcttttaaaggaggaaagggacagaatcagacctaaataaaattcctgagtatgcaatatttctcttttagtgtctctttcacctncctttctgagttttct

SEQ ID NO: 5961 - DNA, 258 bp, Homo sapiens
  I.5961 (R20022)
  misc_feature (3)..(3): n is a, c, g, or t
  misc_feature (186)..(186): n is a, c, g, or t
tgngaaagcttacaacagtgactttgaggaatcagatgaattcaagttatttatgaaaaggctacctatgaattatttcctcaacacatctactataatgcatttgtggacaatggattctaattttcagcgccgttatgaacaactggagaacagcatgaaacaacttttcctaaaggcgcaganaattgtacacaagctttttagccttagcaagaggtgtcataaacaacccctcatcagcctgccaagacaaaa

SEQ ID NO: 5962 - DNA, 477 bp, Homo sapiens
  I.5962 (R19995)
  misc_feature (355)..(355): n is a, c, g, or t
  misc_feature (469)..(469): n is a, c, g, or t
aaatgttttgtgggccatttcagtgctcctcactccctcatagccaccagcctcatcagaaagatgccccgagagcacaggaagccccccaagcatgtgccccacccaccttctctaacaaggtaataaatatttccacagccagtcccaagctgctcccaagcctgtaggtcaccaggttggaagggcaggccacttctacctgttacatgccctgacacctcttatggatcaatcaggacattttttctcaatgacatgacctcagatgctgttactcagccacaaattgacccatgaggtgaaacctatttttatccatgtattaagtagtttttaataatccatactacanttggtttacagaaagggttaaagacacaaacaaaattttcaaacaccagcatcaaaggggcaggatgggggttaaggggggaatttgttgtggcggagggcccacggaggttgngggggggc

SEQ ID NO: 5963 - DNA, 428 bp, Homo sapiens
  I.5963 (R19941)
  misc_feature (276)..(276): n is a, c, g, or t
  misc_feature (295)..(295): n is a, c, g, or t
  misc_feature (333)..(333): n is a, c, g, or t
  misc_feature (354)..(354): n is a, c, g, or t
  misc_feature (395)..(395): n is a, c, g, or t
  misc_feature (401)..(401): n is a, c, g, or t
  misc_feature (416)..(416): n is a, c, g, or t
gctcactgtaatccccttctcccaggttcaagcgattctcatgcctcagcctcctgagtagctgggattataagcatgtgccaccacacctggctaatttttgtattttttagtagagactgggtttcaccatgttggctgggctggtctcgaacgcctgacctccacctttcttggcctcccaaagtgctgggattaccgtcatgagccactgcacctagccttcatagagaggtttttgccatcaggccacactggcccgattccctctgtttnccagcttctcatgtttttncatatgggcacttttagcttttcttttcttgttgaggncagcgggggtaagcacggganctggcttctggtaagcttccccccaaaacctttaggagttnaggggngaagagccagtcatnggctttcagctt

SEQ ID NO: 5964 - DNA, 452 bp, Homo sapiens
  I.5964 (R19897)
  misc_feature (386)..(386): n is a, c, g, or t
  misc_feature (405)..(405): n is a, c, g, or t
  misc_feature (420)..(420): n is a, c, g, or t
  misc_feature (448)..(448): n is a, c, g, or t
cttcacttggtttgacatcagcagcttatttcttgcaatctatttaattgagacttttctgctgtttatcctaaaatgcagataaatggctttcagcacactgtttatagtataatagctcctgaagtgagtcagcattatcagctagagtctccatgtcataactaatggtctctctgcttatactttcctgctagtgaggagccactgaactccacagagacaggagcctgggcatagttgggggtgggtagattattttgatggtgcctataggacaaggcttttttcctcctttattgggtgtgaaatgagaagagaaatatgtccttattcatgattttaggcatgcttcaaaagtgccatgtttctaaggactggggggncaaagaaccttttaggggntattaattgatcccnaggagggatttgttttttatttcccagnttat

SEQ ID NO: 5965 - DNA, 433 bp, Homo sapiens
  I.5965 (R19642)
  misc_feature (191)..(191): n is a, c, g, or t
  misc_feature (280)..(280): n is a, c, g, or t
  misc_feature (284)..(284): n is a, c, g, or t
  misc_feature (372)..(372): n is a, c, g, or t
  misc_feature (396)..(396): n is a, c, g, or t
  misc_feature (410)..(410): n is a, c, g, or t
acaaaggagagaacggagaagcttgcaatacaggaagaaaaaaaaagaattacagaatggaagggatgtgtgcgctaaaaatgcaggtacttaaaggaaattgggctgatttgtactggacaccgaatttgaggaatacaggatctcaacctttctttgactggattacttttttattccattttggtgtngacgcgtctgaaactgatagtgctgctgctacctaccataatgtgtttgttgcaagatccacaagaacgtggatgccaagaatccacanaaanaaaacagatgcaaccgttgatgaggccataagcaggaaacagtaagtggttcccacgtttcctctgctttgaactactggatgatggnaatgccaagttcttaagggcaaanaggaaggggctgtnactgtattacagaccaaattgtt

SEQ ID NO: 5966 - DNA, 509 bp, Homo sapiens
  I.5966 (R19229)
  misc_feature (334)..(334): n is a, c, g, or t
  misc_feature (348)..(348): n is a, c, g, or t
  misc_feature (357)..(357): n is a, c, g, or t
  misc_feature (375)..(375): n is a, c, g, or t
  misc_feature (403)..(403): n is a, c, g, or t
  misc_feature (414)..(414): n is a, c, g, or t
  misc_feature (446)..(446): n is a, c, g, or t
  misc_feature (452)..(452): n is a, c, g, or t
  misc_feature (471)..(471): n is a, c, g, or t
  misc_feature (477)..(477): n is a, c, g, or t
  misc_feature (496)..(496): n is a, c, g, or t
  misc_feature (509)..(509): n is a, c, g, or t
cagacaaaaaggaaaatcgggttctacatcagcaatctgtcttaacttcagcatcacacaactacctatgaagaagacagaacaagaattcagttcttctggtctgtacttctcagaaatgtataaacaatttttatcaacattaaaactgtcctagcaaaaccaaacaatcactatcttttcacacagctgacactttcccaccatttgccatctcatcgctgggaggggcacaggaaaaacggacacttcaaaatgcttgtgcttttgagggtctgctatatacacttaggtggaactactgggcttccagttgggggatgggaggggctgnggggacacccttanttcagtggnttccggcagctagggcantctttcagccttccctggcgtttccccnttacctggagntggggggggtggaggaggcaggggttgacatngggggngttaggtacaggtttcctncaggcnttgggtaggcctagggggnaagttttgggggn

SEQ ID NO: 5967 - DNA, 493 bp, Homo sapiens
  I.5967 (R19113)
  misc_feature (400)..(400): n is a, c, g, or t
  misc_feature (405)..(405): n is a, c, g, or t
  misc_feature (437)..(437): n is a, c, g, or t
  misc_feature (450)..(450): n is a, c, g, or t
  misc_feature (464)..(464): n is a, c, g, or t
  misc_feature (473)..(473): n is a, c, g, or t
  misc_feature (480)..(480): n is a, c, g, or t
tctcttctggttttgaaattatcattaggaataaagaactcattgctttctcctagctaaccgtctatagcataatactaaataccctttcaaaatgatgcttctatttgcatttatgttacttcattctactaattttccctatgctttcactcaaaaagctatggatacctccacactgtgtttttcggtatttctccccgtgttcttctgctgggatttgaaagtatacacttgaacttgaaataaataatagtaattcatgcaatgtaaggaaatatgctgctattatagggataggggagagaggataacttaggaaaggacataatttgtaacaataaaagttttgaggtatttttccttcttgggctggacttcgttagtaactatcataggnggccnttggacacttccatttttaaggtacagtagtnccccccttatttncccggggggttttntagggaggnccccccngtgtagccggggg

SEQ ID NO: 5968 - DNA, 387 bp, Homo sapiens
  I.5968 (R18925)
taggaaaagcaaaggccaggcaggacatgaggggcccttgcactggctggttctccctgccttcaccaccctccaggtgaatgactgggtgaataatgattgactgaggaggtaatgaataatttatggacactgctggacctcagtctcctcatctgaaagatgagtggttggagaagtttaatggttttcaaatgctttttttttcagtcttcaaataagtgtttacgtaggaagcaccatatctgaaacaggtgacagtgggaccagtctgaatgaaatgagggttgggcaggcctgagctccaaaaccttctgatttgccccaagccctccttgtctttgctttggattatcttccacacaaattgggggaacttggacaagg

SEQ ID NO: 5969 - DNA, 511 bp, Homo sapiens
  I.5969 (R18800)
  misc_feature (24)..(24): n is a, c, g, or t
  misc_feature (415)..(415): n is a, c, g, or t
  misc_feature (425)..(425): n is a, c, g, or t
  misc_feature (441)..(441): n is a, c, g, or t
  misc_feature (462)..(462): n is a, c, g, or t
taggttctggaaatgcaacagaanacaagacagacacaatccctcttggaggttactgtgagaaactctccaacatttactctagcaataactagagagtttactgtccattgggtcctcttcacacctgatagaaaaaataaaattcctcaccccatggaagtcatgaaatactccctgcacagatttgtgtgagcttgcttttctaaaaccactgctcaaaaatgctgcttagtttatctataaaccacggttataccccagtgaggtaggtaagtaatttattcataactaacatttatgcaggctctattttctaggccactgtgctgagtgcttttatgggacttatctcaccaaatccctttcaacaacttctatttcagtagggttcccttttattggatacaaaaantggaggcacnggtatattatgtggantgttcccagggttcacacggntggcggtggggaccgggggttttgaaccctggcatttggacacaggggt

SEQ ID NO: 5970 - DNA, 360 bp, Homo sapiens
  I.5970 (R18766)
  misc_feature (313)..(313): n is a, c, g, or t
  misc_feature (357)..(357): n is a, c, g, or t
ggtaggatcctttaagaacagtctatcctcatagtaattttaaacacggcagctccttctcatttgatttgccctcctctacccaaattaaattgcctaattcatgagtaaacagctaataagagctcacggaagtcaatgagcccagcctcagaaaaacacaattttcaaattttggtagtcactgagtaaggctgcactaagtatagggtcccatttcaggtccaaagaaaaagagcatttcatccttctctgattgcatctgtccctgctgttgagcacctcacaaaccaggggcaaacaatgggctttngagggagatgggggctggggccgacatcccagaccccccagggncag

SEQ ID NO: 5971 - DNA, 418 bp, Homo sapiens
  I.5971 (R18584)
  misc_feature (318)..(318): n is a, c, g, or t
  misc_feature (353)..(353): n is a, c, g, or t
  misc_feature (386)..(386): n is a, c, g, or t
acttagaagagttcatatcaaatagtgttattgaagtatgcagaaattatatttcacccacatcagtaaggtcaaatgccttatcctcagcaatgtgtaccaggttgataggacattgccacagtcccaccctgtctgatctattggcaatcttatacagtccgattacatagtagaggtaacgtggggtggggtcaggagcctgtgcgtgggttccagcccactggaccctgcatggcagagacaaggggcatgctcattaaggggaagggtaccccttgctatttactgtctttgaaaaatatgcttcccttactngttagtcagagtctttgctgcttcaaaaccacatncagcacaagagtgtttttttcagcagacaaccncgtgttttatgttcgtttcttttaacaaacac

SEQ ID NO: 5972 - DNA, 420 bp, Homo sapiens
  I.5972 (R18528)
  misc_feature (181)..(181): n is a, c, g, or t
  misc_feature (204)..(204): n is a, c, g, or t
  misc_feature (303)..(303): n is a, c, g, or t
  misc_feature (320)..(320): n is a, c, g, or t
  misc_feature (346)..(346): n is a, c, g, or t
  misc_feature (351)..(351): n is a, c, g, or t
  misc_feature (357)..(357): n is a, c, g, or t
  misc_feature (376)..(376): n is a, c, g, or t
  misc_feature (388)..(388): n is a, c, g, or t
  misc_feature (404)..(404): n is a, c, g, or t
  misc_feature (418)..(418): n is a, c, g, or t
cacggaggaggcttctaattagctggaaaagagtatttttctaatacgttgcaaggattagccaaatcttcttattgaagaaagaagaaaagtgaagagtggttacctatacctagcatagtacaatcagaacctcgtggagaccaccggggacaggcttgcggacgccgggctgttcttnccgccacgatctttctgcggtanggcccagcaggaaggacacggccttgctccccactcccttttccccactccttctttatttggcacacagggacaccagtttttcaagggaaaggggantttttttcccagtcttnccaattcatatttgggggaaagttgntaggntgttgnttcaactttcatggggggntgttttcccagnttcgtttccacaaggntcattcgatttttntt

SEQ ID NO: 5973 - DNA, 372 bp, Homo sapiens
  I.5973 (R18512)
  misc_feature (1)..(1): n is a, c, g, or t
  misc_feature (213)..(213): n is a, c, g, or t
  misc_feature (270)..(270): n is a, c, g, or t
  misc_feature (310)..(310): n is a, c, g, or t
nacaattcacctataattctgcaggcccttccccctcctctgcagcccctcgccctcctgtcgtttcagttcctcaaccggtcactttgccatccactcaggctgcttctctgtacccttcttcacacatggataccagtaatcaccagtgcacttctgcctcttctgctcccccaatgcccctttctcacactctcataccggtccgacctnctcaaccttagtttcccttatctacacatggtttttcctgtcacttctatggtggantccgtctcagggtggcctaattcttggaaacttcaatggnaaatttttatttaggggcaaacaaaaggggaaacaagtggggataggagggggatgggggtt

SEQ ID NO: 5974 - DNA, 439 bp, Homo sapiens
  I.5974 (R18417)
  misc_feature (437)..(437): n is a, c, g, or t
gccaatctaatgcctgtttttgaaacattctatgcaactagtctattttctattttattgttcagattttaccacatttctaatcaggctgccaaataaatttttagaaaagaaagttataagcccagaaaaaaaaattatatatttttctagaactctgtacaataatccctaaagaaatcttttatgtgcataaaaaaaatctcaaaacaaattctactgaaattacgttgagactatcaataaccattgccaataattatcaatggacattttaagggataggaatagaggaaatacaatacattccatgggcgtttccaattaattaggaacatggacaactggaaggcacgctttaatttcccttcctttttagggtggcatgtgtgggggaagggttttcccttcttcagggggaggccctactttttacntt

SEQ ID NO: 5975 - DNA, 453 bp, Homo sapiens
  I.5975 (R17970)
  misc_feature (397)..(397): n is a, c, g, or t
  misc_feature (426)..(426): n is a, c, g, or t
aagtggttgggtctacaaacatacccaattcctctagtgggatttgatctacaaaaatcaagagataagcacattttttttctgagatatgttattgacattaagccacctctcctgtctaacttaatggatggataatgctttatcagttgggacctacatgtgtgatttcctcatgcattgtcaattccaataaggatatatcatcatgaatggtttctttaggatccagttttattgctgacatcctcagtaacagccaaaaggtcgttttcagagatctaaggctggagcatgatggtcaaggatacccctaaggactgtgtgcacatcattattaatgggacttttcccaccatgtttatttattgggttgatgtatctgttcactcccagnggggacacagggggccttaagggaggagnggattctcctggccccgggccggggca

SEQ ID NO: 5976 - DNA, 214 bp, Homo sapiens
  I.5976 (R17617)
  misc_feature (146)..(146): n is a, c, g, or t
  misc_feature (177)..(177): n is a, c, g, or t
  misc_feature (183)..(183): n is a, c, g, or t
  misc_feature (194)..(194): n is a, c, g, or t
gtatgataccagcaactggtctattatatcatttaaaccacatggctatctaaagaggtatttggctattataaataaaatagtgatgaacacgtgtacaggtgtttgtacggacataagttgtcatttctcttgagtaaataccnaaaagtgggcttgctggagttttactacccnttgatntctgctgttgncatgtttgagtttggggggc

SEQ ID NO: 5977 - DNA, 443 bp, Homo sapiens
  I.5977 (R17565)
  misc_feature (399)..(399): n is a, c, g, or t
  misc_feature (422)..(422): n is a, c, g, or t
  misc_feature (438)..(438): n is a, c, g, or t
aagcaaatgtagacaacttttgattgcctaactctcagtgaaacttaaccatcatagaggtattctccctattataacaaagttagattccaaaagcttgtaagtaagctgtgtataacttggacatatgttttcctatagcaccatttctgcatgtaagactgtgtttcgaacctcagcttggagcttggacaatcaagaagaggtgtctttgctggcctcagctatgagaatcctatctaggtaccgccatctctaggctatctgtaggcaccaaccctctgctactactggctgccttctcccgtggggatggaatgtgggtgaattgtggcattcatattttcagggaatgatttaacattcaaggttggggaggatatttcccagaattcacantttggatttttattaaggatgcntttgcaggaaatatcnttagg

SEQ ID NO: 5978 - DNA, 430 bp, Homo sapiens
  I.5978 (R17561)
  misc_feature (389)..(389): n is a, c, g, or t
  misc_feature (415)..(415): n is a, c, g, or t
  misc_feature (423)..(423): n is a, c, g, or t
gttttcatgagtcagttttgcctctagaaacactctttgaacttccatagttatatgaaagcataaaatgctatatgctatttttaactcatgtgttctgaattgtaattgtatataatttttacttgagatatagtctttctagaaaccaatttctcagcatcagctagagccaagacttttcagaattttaaggaaaagcatatttcatacgttgaagtcataggtcccttaagacaagttctattttgggtatctacatttacaatgggctgaggactgtcacaatcgttcaccttcatcattaaaaaggccatattaaagttcctttctcctctaaacttaggaatgttaatgttgggccttgttaaactaactttctaggtccnttagggtttatgtccgggggggtgtngggggctngggtaac

SEQ ID NO: 5979 - DNA, 502 bp, Homo sapiens
  I.5979 (R17432)
  misc_feature (368)..(368): n is a, c, g, or t
  misc_feature (427)..(427): n is a, c, g, or t
  misc_feature (477)..(477): n is a, c, g, or t
agggaatgtttgtgaatacatctggtgtgtactaaaaagctggaaaacccctaagtaaatgcaatatcgatagaaagcgagtttcttgaagagtcatctgctaaactccactagagtcatctctacaataacaatatcaactgaatataaaatattaatgccatggatgatctcagaaatgatttcctacaaagtcccaacctatcctggaacatttcttatgtgtgcttgggagattgcaagaggacaactcggctctaaaatcgatgcattaacatgtcattggaattgaccttgccaaaagatgcctccctaaatccacaagaatctccttgtttgaacacagtttctaatccagctgtaatgangacagacaacagtcaaatttaacaactgatcaggaggggaagttcatactccttggagntgggatctattctggcacatgcaccggggcccggggtggtggaatggggngatctgatgaggcagtgggaggact

SEQ ID NO: 5980 - DNA, 415 bp, Homo sapiens
  I.5980 (R17429)
  misc_feature (161)..(161): n is a, c, g, or t
  misc_feature (312)..(312): n is a, c, g, or t
  misc_feature (391)..(391): n is a, c, g, or t
  misc_feature (408)..(408): n is a, c, g, or t
aacttagaaaatatatttaaacacatatcaaagtcgaattgtacgataaagttccacagccctacggactggttttgacaacgatcattaaatcttatgttgttcgtatcctcacagtttgattatcacattcactttattaatttattattataattctnagattcctgggataaaatgacacccatttttcttagggatcaaaacaagatggcttccaccagaggaaaggaaaggccaggcacgggaactgggtccccacgtgggctgggccatttacaactggctggctttctccctgctcccatcttnatccccacggaatgtcccacttcagggggtgggccctgaggtcattcgtagggaacagtgttgttccatggcctctggntttccctcagggccccnggggatt

SEQ ID NO: 5981 - DNA, 476 bp, Homo sapiens
  I.5981 (R17277)
  misc_feature (335)..(335): n is a, c, g, or t
  misc_feature (421)..(421): n is a, c, g, or t
  misc_feature (437)..(437): n is a, c, g, or t
  misc_feature (456)..(456): n is a, c, g, or t
ttattagtgtcatcatgagaagcccaataagcagtatgccctaacagttagtaggccaggctctggagctaagctgcatgggttcaaatcccagctccaccattcagcctgcagagaccatgagcgagttacttaagccaggctctggagctaagctgcatgggttcaaatcccagctccagcattcagcctacagagaccatgggtgagttacttaagccaggctctggagctaagctgcatgggttcaaatcccagctccaccattcagcctgcagagactgtgggtgagttacttgagctctctgtgccaatattttctcacctataaggtnggaggtgaaaataaactctattaacatgacaaggaactacttcacagttagtttgcagttgagggtttcaacggaggattgaacantttagttactttgggncacagcagttggcccggtnttaaaatggggttatttgtt

SEQ ID NO: 5982 - DNA, 284 bp, Homo sapiens
  I.5982 (R17216)
  misc_feature (53)..(53): n is a, c, g, or t
  misc_feature (84)..(84): n is a, c, g, or t
  misc_feature (179)..(179): n is a, c, g, or t
  misc_feature (186)..(186): n is a, c, g, or t
  misc_feature (219)..(219): n is a, c, g, or t
  misc_feature (249)..(249): n is a, c, g, or t
  misc_feature (261)..(261): n is a, c, g, or t
aggcatccagtaccctgctgactctgacatgcccccagcctcccccagctctncagggagccctggtccccagagaccttcctnccatttctccctatgggtgcctgacctgagggcagagacatctgagtgtgtataagcacagcaggacaccaggacctggcctgaagacatttccntctcctnccctctggatttctcagagactgttctgcgatnaccacagccaaggtacccgccccacctggnacctggcccttnacccgctggtgtcttcccaagct

SEQ ID NO: 5983 - DNA, 353 bp, Homo sapiens
  I.5983 (R17162)
  misc_feature (261)..(261): n is a, c, g, or t
  misc_feature (289)..(289): n is a, c, g, or t
  misc_feature (302)..(302): n is a, c, g, or t
  misc_feature (325)..(325): n is a, c, g, or t
agtcatctaacccatctctcagacagccattcaaggctgcctatgtctttctcaggaggagatagaatggttaagctgtcattatcttctagtgccactgaaaggacaatagtttcaatgccatattgcctgacatttaaactgatataccttgggatattgagaaacagaagggactaggggaaggagagagccagtttttaaattgttactatataaggaagattctagggattttttcccactctgaattttaacttngcattccatgttaacaaaaaatagaccntgttaaaatggantatcatcattttatgtctattcnttttatatcaccgtggaaaggaaggcca

SEQ ID NO: 5984 - DNA, 395 bp, Homo sapiens
  I.5984 (R16861)
  misc_feature (354)..(354): n is a, c, g, or t
tctgacacattaattacaaaaccattcccagttcccctggaaaaccaaatgttttataatttctaattctagtgtgagctcattagcttgtttgttatcagattgactgcatataggaagttggatgataacagaaacgcaaaatgttggtccagtttgtttctgcccaacagaacttccaagactttgtgcctgcaatttgagagagcaatttgagagtcgcaccaggatatttagtccacagtttgatttacaaagcctacttacaaaatttatacgaacctgcaaagaaattagagtggacatggagaaagcatgcattcagagtagccacattaagttaggtccatgggntctatttccaaaaggattaggttttaaaaaattaaaatcca

SEQ ID NO: 5985 - DNA, 353 bp, Homo sapiens
  I.5985 (R16817)
  misc_feature (204)..(204): n is a, c, g, or t
  misc_feature (224)..(224): n is a, c, g, or t
  misc_feature (270)..(270): n is a, c, g, or t
  misc_feature (278)..(278): n is a, c, g, or t
  misc_feature (291)..(291): n is a, c, g, or t
  misc_feature (304)..(304): n is a, c, g, or t
ttaaaggaaagtggatcatctctgatggtctctgcaactctaaggttccgtaagtgaaggcattcaggaccctctagggcagcactgagctcaagcccgtagttggagcccagaaagctgaaatttggcactgcaagtctacaaaacaaatgggctatgcagcaggctaggcagcactggcccagagggctactaagccatggntgcacccccctccgccccgnccccaccagagatggggtccctgggctgctccatcccacagaaaantcccaggnaagtgaggtcttncttcaccaggggnagaggcacatattcttgaacgaggaacgttttgctttccgtttccttaa

SEQ ID NO: 5986 - DNA, 378 bp, Homo sapiens
  I.5986 (R16756)
  misc_feature (6)..(6): n is a, c, g, or t
  misc_feature (169)..(169): n is a, c, g, or t
  misc_feature (252)..(252): n is a, c, g, or t
  misc_feature (335)..(335): n is a, c, g, or t
ttgttntcttaggaagccattaaatacacacaatcgcatataagcatagtatcccacactcatttaatatattttggagatggttctacatcagggcacagagttgtaagttgtccctttttctttttttttttttttctaagatagggtcttgttctgttgcccaggnacactcaaacgtgacaggcaaaatcagtaagctcagcctttctaatagacaaggcagacttgaaaaagcaagtccagccaggntgacccatctaccggctccttaaagatgtatcactcaggaacaggtgtttactggccactaaactacattttaggaacaaccnaactggacttaaggaggagctgacagtgatcgtgggagaccgc

SEQ ID NO: 5987 - DNA, 405 bp, Homo sapiens
  I.5987 (R16722)
  misc_feature (8)..(8): n is a, c, g, or t
  misc_feature (384)..(384): n is a, c, g, or t
  misc_feature (399)..(399): n is a, c, g, or t
ttcaaganatgaaggtagttttaaatttcttcatcaggctgtcagtgttcactggctaagttcggacgtctatccaggcttttttctaatataatgccattagttacagcctgggaagccaggtaactaaactaattagaattacaggtaaattaataaggacttcctgagtaagcactagaggccctcctataagaaataccatacattgtttgccgtcgattttggctgctgaggatgatttagcttcccactgccttttctctctagtaccccaagatgtttttttcaatgagctaaggccgctctacaactctaagttaactccagacaagtcagggtgttgccatctacagtggatttctagctgggatctgactccgncacttcatttacggngtaaaa

SEQ ID NO: 5988 - DNA, 110 bp, Homo sapiens
  I.5988 (R16647)
  misc_feature (14)..(14): n is a, c, g, or t
  misc_feature (34)..(34): n is a, c, g, or t
  misc_feature (75)..(75): n is a, c, g, or t
gagctttgagtgtnctaagcaggacaggtaaganctgcgtctgacacagtcagccaggtctccttaccctctgcngccctttctgcctgtgactgaatgggcatgtcaag

SEQ ID NO: 5989 - DNA, 418 bp, Homo sapiens
  I.5989 (R16646)
  misc_feature (338)..(338): n is a, c, g, or t
  misc_feature (354)..(354): n is a, c, g, or t
  misc_feature (376)..(376): n is a, c, g, or t
  misc_feature (395)..(395): n is a, c, g, or t
tgcttttggcagtatggtcattttcacaatattgagtctacccatccatgagcatggaatgtgtttccttttgtttttgtcatctatgatttctttcaacagtgttttgtagttttccttgtaggggtctttcacctccttggttagttacattcgtaagtattttatttttacagctatcataaaagggtttgatttgattctcagcctgggtagatgttggtgtatagcaccgctactgatatgtgtacatagattttgtatcctgataaataggattttttgtgtatttctaaataggcaataaggatttggaaatattccccaacacaaagganatggtccaatgtatgngggtgattaatatccctaaagncccctggatttggtccttnacaccttggctggctgtacccgg

SEQ ID NO: 5990 - DNA, 384 bp, Homo sapiens
  I.5990 (R16627)
  misc_feature (244)..(244): n is a, c, g, or t
  misc_feature (255)..(255): n is a, c, g, or t
  misc_feature (313)..(313): n is a, c, g, or t
  misc_feature (320)..(320): n is a, c, g, or t
  misc_feature (328)..(328): n is a, c, g, or t
  misc_feature (350)..(350): n is a, c, g, or t
  misc_feature (355)..(355): n is a, c, g, or t
  misc_feature (375)..(375): n is a, c, g, or t
aattacaaaagacagtataatgacatatttcttcactgttctctcaactcatttaaaagcaaatgcatacagcaatttgtgtataattgtatttaggccctatgacttattagaatgtaatgtatatgatgataacagcagaaaggaggtgcatggcaacaaagctctattggagtgagtaagaaaaggacaccagatggtaaactaaattcacaagatgaaatgaagaaaaccagaaatggtnaaattaagganggatttaattattaattaaactcttttaaatgcttgtaggtcctaggctacttggggngggctgnggccgggnggattcgcttggaacctggggnggccngaggtttgcagtgaggcccnggtccttgc

SEQ ID NO: 5991 - DNA, 338 bp, Homo sapiens
  I.5991 (R16568)
  misc_feature (217)..(217): n is a, c, g, or t
  misc_feature (226)..(226): n is a, c, g, or t
aagattttctatatgcaaaatgtcatctacaaataagagtagtttcacttctttccaaccttaatgccatttctttctgtttattgcttatttgctgtggctactaaaattttcagtagaaatttgattacccctagattctgagattgtctcctatgtttttcataaaagtttcatcgttttacatttaaggctgtgatccatttactcgattttngtatcaggntcaaggttcactttttgggtcttttgggccacttttcacttttgacgtcatgttgccacaggcaacatttttgaaaagggctatcttttcaccaattaggttgggctttata

SEQ ID NO: 5992 - DNA, 329 bp, Homo sapiens
  I.5992 (R16520)
  misc_feature (46)..(46): n is a, c, g, or t
  misc_feature (62)..(62): n is a, c, g, or t
  misc_feature (207)..(207): n is a, c, g, or t
  misc_feature (214)..(214): n is a, c, g, or t
  misc_feature (280)..(280): n is a, c, g, or t
  misc_feature (287)..(287): n is a, c, g, or t
  misc_feature (302)..(302): n is a, c, g, or t
  misc_feature (307)..(307): n is a, c, g, or t
  misc_feature (313)..(313): n is a, c, g, or t
tggagacgggtctcactatgttgcccaggctggtcctaaactcttngcctcccaaagcactnggattgcaggtgtgagccaccgtgccctgcctcttcttcttttgagctagtcggtttctgaggttgccttctgctctattgttgctgtggttttcaggatgtagttagggccctacaggaaagtgcctgggtggcccttaggtcnggctttnaccttccctatgcttcctccaagaccttgggcccatgggatatttgtcctggggtctcaacaattncctgggncgcctttggggaatnatccntaaaangtagaggaatttcagg

SEQ ID NO: 5993 - DNA, 281 bp, Homo sapiens
  I.5993 (R16367)
tgcaaaaaaaaaaaaaaagagctactgtatttagacttaggaaaaaaggcagagtaacattacttaaaaaaaaaaggatatgtttacatttaattttggctaccaggagtttagtttattttatttaaaatttttttgccaatggtgccaagtaatgtgaatgctaatactgcttaagaaaattaagttacttttgcaaaacagataatcataaggatgaatcagtatgtaggcttaacaccatccacttcactccaacaaggaacacttaggaatggatt

SEQ ID NO: 5994 - DNA, 439 bp, Homo sapiens
  I.5994 (R16355)
  misc_feature (340)..(340): n is a, c, g, or t
  misc_feature (370)..(370): n is a, c, g, or t
  misc_feature (407)..(407): n is a, c, g, or t
  misc_feature (417)..(417): n is a, c, g, or t
  misc_feature (436)..(436): n is a, c, g, or t
gctaaggagttttcaagcaaaaggttgaagctgtttgcctgatttcttcttactgcttatgataaacagtaaatgagagaagtaagctaaggaagggctcctaaacaaaaagaacccagggctttgctggttttgaaaattctcagtttctcagtatgtcaaatggctaagattaagaaatggcttctaagcaaagatcaaatccaggggccttcttaggaaaagcattgtctaaggatgtgagtgtaaattcctttgttaaggacctcagggagggtttaaggtggaacctcaggggaaactttccgatttgaaggtaggtagggtccctatacggagnggttaaaatgttatgttccactttagggcnggaagtttttaagggtttgagggaggagtttttttcncccattttantggagtgttgccttttttnatc

SEQ ID NO: 5995 - DNA, 518 bp, Homo sapiens
  I.5995 (R15326)
  misc_feature (39)..(39): n is a, c, g, or t
  misc_feature (480)..(480): n is a, c, g, or t
cgtgaatgaggtggattactgcctgtacccggcgcggangacccagctgcagtggctgcactactacctgcaggcacaaaaggggatggccgtgacccccagggaggtgcaaaggctctacgtgcaagtcaacaagtttgccctggcgtctcacttcttctgggctctctgggccctcatccagaaccagtactccaccatcgactttgatttcctcaggtacgcagtgatccgattcaaccagtacttcaaggtgaagcctcaagcgttcagcttgggagatgccaaagtgaccagccaccccatccctcccctacccatctgtctggccagacctgttctccagagctcaattcttgcactctgggatccacacccttgggacagggtggggagaggggacacatgggtgttcaggggagaaaggctctgttccctgccgccagaccccagtggtttgccattgaaaggacttcattnttcctgttttgggaggggttgattagggaccccttttt

SEQ ID NO: 5996 - DNA, 534 bp, Homo sapiens
  I.5996 (R15176)
  misc_feature (19)..(19): n is a, c, g, or t
  misc_feature (410)..(410): n is a, c, g, or t
  misc_feature (422)..(422): n is a, c, g, or t
  misc_feature (430)..(430): n is a, c, g, or t
  misc_feature (444)..(444): n is a, c, g, or t
  misc_feature (452)..(452): n is a, c, g, or t
  misc_feature (499)..(499): n is a, c, g, or t
  misc_feature (517)..(517): n is a, c, g, or t
  misc_feature (532)..(532): n is a, c, g, or t
acacagcttcagtaccagngaaggtgggctccttgctggccccacctggagctcctctgtccagctgtttatgcacacagcaacctgggcatgcctctcccaagtgcctaaccgtgccaggtgctgggttcaaaaacctccccctcaagagaggctgccacatgcctcgtgttgagagaccaatgccccaggagctgtgggatccctcctccccaacagagccaaatcctttctttcagggctttcaagttccactcatcctggggacccactccttcctgatcttgggcctcgctgctgcccacgtgtaggaatcaagtcactctctggaccgttacgtgttgttctggggttaaacccttgctgagtgggtcggttctgaggaaggcagaaattgcctcttgttttantgtgtctttccnatttcctntgttccagttcccngttggaanacagggtagggtgttttaataaggatgggaattttgggattgttttnaagggaccttcattgttnaattgggtcccctgncc

SEQ ID NO: 5997 - DNA, 390 bp, Homo sapiens
  I.5997 (R15155)
  misc_feature (150)..(150): n is a, c, g, or t
  misc_feature (344)..(344): n is a, c, g, or t
  misc_feature (349)..(349): n is a, c, g, or t
  misc_feature (364)..(364): n is a, c, g, or t
aatttcatttcatttattttattgtaccaaactaccaggaccattaatttaatctacagctaaatctattattctttcatgttagaaattcaacaagaaaatttttccctaatgaaacctcacatttcaagcataaggagcctgggcgangttggctcacacctgtaatcccagcactttgggaggccgagacaggtgcatcacttgaggtcaggagttggagactagcctgggcaaacatgatgaaaccctgtctctactaaaaacataaaaattgggctgggcgtgggtgggcatgtgcctgttaatcccagctactctgggagggctgagggcaggggaantaggnttcaacctggggganggcagagctttgcagttgagcttgag

SEQ ID NO: 5998 - DNA, 301 bp, Homo sapiens
  I.5998 (R15004)
tttttaaggaaacttcctgtttaatggaatctgaatccaagatttgctttaatttcactctattcttcccattttcccttattcttcttgttgtctctctaattaaaaaaaaaaaaaacctaggcttttttttttctatccagaaagttgggttttcatgatctgagcttccttatgtctccttctctttgtgcaaacttaaaccagtcataggattgtcacccaggacatattctccaacccaggcattgggaaatctggaacggaatctttttctctttttgtccctacaagtttgtca

SEQ ID NO: 5999 - DNA, 435 bp, Homo sapiens
  I.5999 (R14773)
  misc_feature (296)..(296): n is a, c, g, or t
  misc_feature (336)..(336): n is a, c, g, or t
  misc_feature (388)..(388): n is a, c, g, or t
  misc_feature (414)..(414): n is a, c, g, or t
  misc_feature (429)..(429): n is a, c, g, or t
cttgagcacttacattaatgggagaagagataaagagggaaacacggggagtgtgggatgtgtgagactgcatgttcacagggaaaagtaatgttgtgcagaaagcctgccactgctaatgaacctggtaagaggacaggaaggaaagggattatttctgttatcccttttgggaaacaattttccatgtgtcttacatttttacatctggcaggtgctgacagtccttgtgctgggctctctttttaagggatgtttccatagtgggaaacatattatgggaaaaacgggagctngggctgggagcataggggcaggtgcactttaggggtcccntttattgcaaaattttggggtttttctattactccaggggctttctctgctncattaaggcccacccccaccagggtnttgccagggtatttnccctgg

SEQ ID NO: 6000 - DNA, 506 bp, Homo sapiens
  I.6000 (R14734)
  misc_feature (405)..(405): n is a, c, g, or t
  misc_feature (414)..(414): n is a, c, g, or t
  misc_feature (421)..(421): n is a, c, g, or t
  misc_feature (503)..(503): n is a, c, g, or t
tttcctgtgttgtggattcttcctcaagaaatgtttgcttagtccactgtccaagagagttttccccaaagttttcttgtagtagtttcatagctttaggtcttagatttaagtgtttaatccattttcgtttgatttttgtatatggggggagataggactctagtttcattcttctacatgtgggtatccttttttcccagcacaatttattgaagagactgttctttccctaaggtatgttttttgcacttttgtcaaaaatgagttctctgtaggatgtatgggatttgcttctggggtttctctgttctgttccattgggtctatgtgtctgtttttatggccagtatttgatcattacttttatggaaatctactttttgagtaggtaattactattcntttatggcntttcccnctaaaaaggtttttcaggggaaatatccattcatggcttaaggcaatccaaaggtataggggattaaataatccgtaaccgncgg

SEQ ID NO: 6001 - DNA, 451 bp, Homo sapiens
  I.6001 (R14700)
  misc_feature (365)..(365): n is a, c, g, or t
  misc_feature (423)..(423): n is a, c, g, or t
  misc_feature (433)..(433): n is a, c, g, or t
ttacattacgtaattaaaaaacaaaattttttaaccaattttatgtgccatgtcacgtttaatgctatcttgtgtgaccagatcccaccagtaatgacaaaactgtcttaaacctcatttttttttttttttgagacaagagtttcactcttgttgcccaaacgagagcaatggcaccatctcgactcactgcaacctctgcctcccaggttcaagcaattctcctgcctcagcctcccaagtagctgggattacacgcatgcgccaccatgcctgggctacttttgtatttttaatagagacagggtttcttcatgttgggtcaagctggtcatggaactcccaacctcaagtgatccgcccancttgggccttccaaagtgctgggggttacagggcatggaggccaccgttgccccaggncctttaaatntcattttttaggggaacc

SEQ ID NO: 6002 - DNA, 431 bp, Homo sapiens
  I.6002 (R14646)
  misc_feature (65)..(65): n is a, c, g, or t
  misc_feature (302)..(302): n is a, c, g, or t
  misc_feature (357)..(357): n is a, c, g, or t
  misc_feature (390)..(390): n is a, c, g, or t
  misc_feature (412)..(412): n is a, c, g, or t
aaactcacgacctcaggtgatccgcctgccttggcctcccaaagtggtaggattacaggcgtgcncgggcacccagcccttaaatggcttttatgaggtaatgtgaaaggaaaatttgcctttgacctggaagtcaactttatagtaagctgaaattataaataactgatcatggaactattgcagatcacctttgagccaaaaatttggcctggattttggttatgcctactactatgtgcctctcatttgtatttatacctggaattggcattattaactccttttcactcctgcctagnaaaacttaaagtgtcaccagacccaagggcggagtggtcctataaaaacaaactncgtagcctgtctgaaggactagctacttagctnccttgggctgtttttgggcatnatttcatctttgattttta

SEQ ID NO: 6003 - DNA, 382 bp, Homo sapiens
  I.6003 (R14625)
  misc_feature (98)..(98): n is a, c, g, or t
  misc_feature (215)..(215): n is a, c, g, or t
  misc_feature (291)..(291): n is a, c, g, or t
  misc_feature (325)..(325): n is a, c, g, or t
  misc_feature (363)..(363): n is a, c, g, or t
tagaaaagtaatacacctaaaaaaatgtctgattctaaatactggttttaacctcactactatgctgccattctatacttattttgaaactttaaaangaaattgtaatgacaagagtattcagttatttaagaaactattgttttctttaattgggtctgtgattacatgcatgggaagtttcaaaacatctgaaaagcttcagtgtggacaangcacaactgatgcttttgacattttgtcccattttgttaggaattcagcagcccagctaaaacataataggaaatnccaataggagccttgagcctgtaggctgccaaangccttttttttttttttttttttttttaatcatctggnggaaattctactgcagggc

SEQ ID NO: 6004 - DNA, 338 bp, Homo sapiens
  I.6004 (R08558)
  misc_feature (6)..(6): n is a, c, g, or t
  misc_feature (7)..(7): n is a, c, g, or t
  misc_feature (312)..(312): n is a, c, g, or t
  misc_feature (317)..(317): n is a, c, g, or t
  misc_feature (330)..(330): n is a, c, g, or t
ttaagnngtgcaggacctatgtaccatgctgtggtttgaagtgtctcacagacctcaagaggctctccttagaaaacagataggtctaaggtagtggttcttatgcattggtgattttgctccccagggaacatttgacaatgtgcagatatatttctgatggtcacaactggggaggttactgacatccagtgagtagaggttaggaatgagactaaacattttacagctcacaagacagctgtctactttcccaaggaaaggagttatctttatctgggcccccaaatgtccaataggtgctgagggctnagganatgctggatcctnaatggggg

SEQ ID NO: 6005 - DNA, 481 bp, Homo sapiens
  I.6005 (R15994)
  misc_feature (435)..(435): n is a, c, g, or t
  misc_feature (442)..(442): n is a, c, g, or t
  misc_feature (469)..(469): n is a, c, g, or t
ttttttttagcagaacaacatgatcctatagatgataggtaaagttcactaaagattttttcatccaagcctaagtagaccgtattttactatcaagtgcagataaacaatcccacttaacagatgataacaattaagtagagatgaaattactggaatagagatatacagtaaaacactagtatagctgccttccagctatacaatttagtaatgcaatgccaaaacagaaggatattttgattgaattaggttcatcctaggattctgaagtcagactatgggttctacccacatacccaactgtatgagcttgagccaaatggaccaacctggcttaggacctcggatcttcttctggttaaaataggaggatacccactttagggggaatatttttgagggggttttaaaaaatattttttacttgccccnaaccatncgggggaattgctggcaccttcttttnaaagggttcctt

SEQ ID NO: 6006 - DNA, 434 bp, Homo sapiens
  I.6006 (R15947)
  misc_feature (343)..(343): n is a, c, g, or t
  misc_feature (380)..(380): n is a, c, g, or t
  misc_feature (422)..(422): n is a, c, g, or t
tttacactgcccttctgtacatatgcatatatactgccttcttcaaaatctaacggtcaggttaagtatacggcatcctgttacaatgtgaaataagagggctgataaactgtgagaaataaggaaagtgggcatagtacatgatgaataaaaatacaggaatgtagccaggcacggtggcatgcacttgcagtcctagctactcaagaggctgaggcgagagaaaggcatgaacgcgggaggttagggatgcttgagctatgactgcaccactgcactccagccagagcgacagaacgagaccctgtctcttaaagaattaacttaaaaaaaaaacagggantacacactatattttgccagactgtattttaaggaanttgagttgttcttaccacttgttaccaaaggggagggggccntccatgttctgc

SEQ ID NO: 6007 - DNA, 416 bp, Homo sapiens
  I.6007 (R15946)
  misc_feature (402)..(402): n is a, c, g, or t
ttttttttttatgtatttagatatattttataaaaatcacactataacagtatcagtatttaatacatacttttaaagtgctagatgtgttccatccagagctagagaataattaaaatgtgtgattaaaatgtgagagattgcagtattttgacgtatacacacaacattaattatatagatagaaaagaaatctcagtgtgaggattataaagaagagttcagtgccttcattcctatatagttttatcttctagtcaagccccagccccaagagattgggttaccttagggaaccatctctagttcagtctgggatgtgggtcccttagggcctttttgggctgggaaatctgccctctttccttcttccctatcttcattaggccattttattggggnaggtccagtttttg

SEQ ID NO: 6008 - DNA, 418 bp, Homo sapiens
  I.6008 (R15853)
  misc_feature (285)..(285): n is a, c, g, or t
  misc_feature (305)..(305): n is a, c, g, or t
  misc_feature (353)..(353): n is a, c, g, or t
tttttttttttagaacagttcttgccatgtaattccataaacaatatacagaagcagatgaacaaattagtgaatattatgtttctgcatatctttaatactgatgcacagttgcttcccagtagtgaagataaaccacagtttagagttcaatggtactgttatcattatattgtcaatggacaattacataagtttattgaatagaaattgagaggtgttccatcaaagcacattacaaactttcaactcaaatcctgttgaaaacatatttaaatacccagngcattaaactatgacatagnacaccattaaatctgttttgtactcaacgcaagtaaacttgcaatggntttacttttcttgggttgtgtggataccttatatgttgggttttggaattttctacattctccct

SEQ ID NO: 6009 - DNA, 227 bp, Homo sapiens
  I.6009 (R15445)
  misc_feature (67)..(67): n is a, c, g, or t
  misc_feature (75)..(75): n is a, c, g, or t
  misc_feature (87)..(87): n is a, c, g, or t
  misc_feature (97)..(97): n is a, c, g, or t
  misc_feature (101)..(101): n is a, c, g, or t
  misc_feature (109)..(109): n is a, c, g, or t
  misc_feature (110)..(110): n is a, c, g, or t
  misc_feature (125)..(125): n is a, c, g, or t
  misc_feature (130)..(130): n is a, c, g, or t
  misc_feature (136)..(136): n is a, c, g, or t
  misc_feature (156)..(156): n is a, c, g, or t
  misc_feature (158)..(158): n is a, c, g, or t
  misc_feature (159)..(159): n is a, c, g, or t
  misc_feature (162)..(162): n is a, c, g, or t
  misc_feature (163)..(163): n is a, c, g, or t
  misc_feature (173)..(173): n is a, c, g, or t
  misc_feature (178)..(178): n is a, c, g, or t
  misc_feature (186)..(186): n is a, c, g, or t
  misc_feature (187)..(187): n is a, c, g, or t
  misc_feature (200)..(200): n is a, c, g, or t
  misc_feature (210)..(210): n is a, c, g, or t
aacatggaggcggaggtcgataagctggaactcatgctgtcaccactgactaaagaagagaaaactncggcacanaatttcacattncacatgccanattnatgaaganntggacttggaaaggnaatcntaacanagaagagcttaattccgganannttnnggaagatgtnttgtnaacccttnntgtctagagattnggggctggtnaagggggtttggtttca

SEQ ID NO: 6010 - DNA, 255 bp, Homo sapiens
  I.6010 (R15444)
  misc_feature (29)..(29): n is a, c, g, or t
  misc_feature (122)..(122): n is a, c, g, or t
  misc_feature (146)..(146): n is a, c, g, or t
  misc_feature (148)..(148): n is a, c, g, or t
  misc_feature (160)..(160): n is a, c, g, or t
  misc_feature (185)..(185): n is a, c, g, or t
  misc_feature (198)..(198): n is a, c, g, or t
  misc_feature (205)..(205): n is a, c, g, or t
  misc_feature (212)..(212): n is a, c, g, or t
  misc_feature (220)..(220): n is a, c, g, or t
  misc_feature (225)..(225): n is a, c, g, or t
  misc_feature (253)..(253): n is a, c, g, or t
ttttttttttttttttttttttttcaggnaggggattttattggaaatacggatctagagctagtggaagaagttatatttaggagtcatccacaaagaggcttgagaaacaaatgaaaatntattgagaagtgcatagagaacantnttaagggggctntggggaaaaaacaacatttggaagntaactgaaggaantcatagnggaaaantagtacantctantttttctccctaactgaaagcaaaaccnct

SEQ ID NO: 6011 - DNA, 397 bp, Homo sapiens
  I.6011 (R14277)
  misc_feature (266)..(266): n is a, c, g, or t
  misc_feature (359)..(359): n is a, c, g, or t
tgcgtggacgattctgaagctgtattctgagatggaaaaaactagaaatacatcgtggatgatgagagccaggtgtattgagctcctgcttttctaacgtacaaaggtaactggatagagaaacggagtaatcgccctcacctggccagggtgtgctccgagaccccagcaggtgccgaagccgcggatagtcccgaatcctgtccagggcgctgttttttcctgtacgtacctgtgatcaagtctgagatgtgacagcaaaactngacagaactttcgtgcttccctctttcaaaatgttcacagatggggcactgtgtttctttacccggagatctttaggcaacctcgggcatctnggctgttttttctttataagggtcagggatttttccac

SEQ ID NO: 6012 - DNA, 457 bp, Homo sapiens
  I.6012 (R13577)
  misc_feature (20)..(20): n is a, c, g, or t
  misc_feature (22)..(22): n is a, c, g, or t
  misc_feature (24)..(24): n is a, c, g, or t
  misc_feature (380)..(380): n is a, c, g, or t
  misc_feature (389)..(389): n is a, c, g, or t
  misc_feature (433)..(433): n is a, c, g, or t
  misc_feature (448)..(448): n is a, c, g, or t
  misc_feature (455)..(455): n is a, c, g, or t
gctgcccatcacatggacantntnctgtgacttaatgacaataataaggtcatgaagtctcctatacagggtcttgctctgtcacccaagctggagtgcaatggcgcaaccatggctcactgcagcctcaaactcttgggctcaaatgatcctcctgcctcagcctcctgagtagctgggactataggcacatgctgccacgcccagctgaagtcatgctctctatccatgaggcatctttataacttggcataggatatatttggggtgaaatcctgtcttgggtctttcccgatttctccctgaggcaggttccaaacattgtttaggggctcaaaggggaaattaggtcttcaggagttttctcccaataaaggtanttacggggngatcggggtcatttatttccaacaggattgggggtggcctaccntggtggccccaggantgtggcngg

SEQ ID NO: 6013 - DNA, 274 bp, Homo sapiens
  I.6013 (R13346)
  misc_feature (97)..(97): n is a, c, g, or t
  misc_feature (199)..(199): n is a, c, g, or t
  misc_feature (213)..(213): n is a, c, g, or t
  misc_feature (265)..(265): n is a, c, g, or t
gggccgacatgctctccatcgccgtgacctacttcatcacgctgtgcctgttccccggcctcgagtctgagatccgccactgcatcctgggcgagtngctgcccatcctcatcatggctgtgttcaacctgtcagacttcgtgggcaagatcctggcagccctgcccgtggactggcggggcacccacctgctggcctnctcctgcctgcgtntggtcttcatccccctcttcatcctgtgcgtctaccccagcggcatgcccgncctccgtta

SEQ ID NO: 6014 - DNA, 416 bp, Homo sapiens
  I.6014 (R13239)
  misc_feature (336)..(336): n is a, c, g, or t
  misc_feature (413)..(413): n is a, c, g, or t
tggaagaagggagtgagactgctcagagaggcaggattcctgctgactccagggggacacctggcacctcagcttcctttcccacttctccaggctgcatggaggggtgccgggcaggggcctcctggaagggaacctcctgcagcctcaagcaccaggtcatgacatgacatctatccctttcccaggtgaccgactcctgcaggtggatggagtgattctgtgcggcctcacccacaagcaggctgtgcagtgcctgaagggtcctggggcaggttgcaagattggtcttagagagaagagtccccagggagtacacagcagtgtccttcttgntaatgacagcatggggagatgaacgcacggctgttttcctttggtaacagccttgccttgggcaagccttttcgagnttt

SEQ ID NO: 6015 - DNA, 147 bp, Homo sapiens
  I.6015 (R12859)
  misc_feature (24)..(24): n is a, c, g, or t
acatccaggcaattgcatactctnttactatttggcctcaaatacccatgtgatttccttctctgtgtgatgaacaaggttaactagtgtttgagcctgaggactccttttgttaagtccagagtcaccctctgtttttgcctttgt

SEQ ID NO: 6016 - DNA, 401 bp, Homo sapiens
  I.6016 (R12559)
  misc_feature (322)..(322): n is a, c, g, or t
  misc_feature (330)..(330): n is a, c, g, or t
  misc_feature (343)..(343): n is a, c, g, or t
  misc_feature (375)..(375): n is a, c, g, or t
  misc_feature (393)..(393): n is a, c, g, or t
  misc_feature (399)..(399): n is a, c, g, or t
ttttaaaatagtataatagatctatttacagatttgaaagtatttcataatagtttgttagataggtacacttctaaatgtttatatacttacatgtatgcataagtatacatacaaaaatagaaaaatatctagagagctacctgtaaagtttttaacaatagttaacatttgtgttaacttacagggaaagactttaactttttactttatataccctcccaaatgtttattaattcataaggagtgagtgcctgggggtattttaaaattccaatacattgcttgagcccgggggggtttgaggcccagcctggggggnaaacgggnggaatcttgtctnctccggtagggccaaaaatgggccccagtttngggggggccatttccccngtaggncc

SEQ ID NO: 6017 - DNA, 348 bp, Homo sapiens
  I.6017 (R12442)
  misc_feature (321)..(321): n is a, c, g, or t
tgtgggagaaaaaaaatacgactatataacactccaagataatgagttagttaaggactcacagattcatcatttaatcactgaaacgacaggcacgcaagaacaagatcaagcttaatacaataacgctagattatatcaacaaatggatgccaacgggttaagacgggaggcctacataaaatgggttcaattcagagtgtggactcacacaaagttgcgaaactcgctttattggttctacaaatccaagtaagtgactaggacccagggcttgcaaagctatatgttcaggacacacttttgtttgccaaggttgcnaaaggtgttcttcctacccctttggaa

SEQ ID NO: 6018 - DNA, 382 bp, Homo sapiens
  I.6018 (R12411)
aaagataggaaaaaaaagtatatttatatgctgaggagaagaatccagttgaaggggaatactgtggcttcaggagacaggaaaactgcctaagccacatccttcagcaagtgagtgttcaagtggagggtttgtctttgcttggggcacgggcggttcatccacagtgaaaggagagaaggcagggcatgtggggttggctgtagaaagcgggcagacggggtgggaacttatgaagactcttctgattgttattttctctgttaagtaaaaggaaaggtcattggctaagaattgaagatggacgcgcaggtgcttgggagtccatccgaagagaattgaaagaattgaataaaataggaggaaaaatccaattcctatt

SEQ ID NO: 6019 - DNA, 376 bp, Homo sapiens
  I.6019 (R12401)
  misc_feature (329)..(329): n is a, c, g, or t
  misc_feature (340)..(340): n is a, c, g, or t
ttaagtagttttaagtacttcatatgtacattattggttttcttctgtctgccgagcagttagatgagaaagagaaattcttttgcacattttctatagaacactgagctgctagtttgacaagccgatgccttttgggacaggccgacttggaaaatttttcctggggcctgtgcctctgctaccagcaatgggtgttgtccccgttaagggacaggcctgtccagggagttggaaggcctgcagcacacacatcttctcacctgggcacaatccagggactggctcgggtggctccacctggggccccagcccggccccagcacagntactccagggnaaaggattcctgggggataaaaccctttttcccagg

SEQ ID NO: 6020 - DNA, 432 bp, Homo sapiens
  I.6020 (R11627)
  misc_feature (337)..(337): n is a, c, g, or t
  misc_feature (412)..(412): n is a, c, g, or t
  misc_feature (419)..(419): n is a, c, g, or t
ttctgtgaggagcatttattgatttcctttcatcccagaagtggtgttggcttgggggttctcccaaggtctgttagcaaagcatttggaacaagaaagcaccaagacacccctaagtgtctgaagtgcacacatgggagagcttccagagggagtttcagagtgagctgaaggagaaaagtatcctaagctcctgagggtgtggataaaaggcccaaactattaaaaaaaactaaattcctaaattccctgctattttatgaacaaggaaactcttaacagggtgatgcattcaggaatttgggggttcccagtgggtgggaggatgggattgccnatcccatcccatgctccctccctgctcttggggggtgaccacccataggccccaccaggtgtgggcttaagtttngggggantaatatgacccct

SEQ ID NO: 6021 - DNA, 484 bp, Homo sapiens
  I.6021 (R10794)
  misc_feature (348)..(348): n is a, c, g, or t
  misc_feature (354)..(354): n is a, c, g, or t
  misc_feature (360)..(360): n is a, c, g, or t
  misc_feature (387)..(387): n is a, c, g, or t
  misc_feature (414)..(414): n is a, c, g, or t
  misc_feature (425)..(425): n is a, c, g, or t
  misc_feature (431)..(431): n is a, c, g, or t
  misc_feature (445)..(445): n is a, c, g, or t
  misc_feature (454)..(454): n is a, c, g, or t
  misc_feature (480)..(480): n is a, c, g, or t
agagagctgttaccgttgatctctggagcctccctgaaggccaggtggggcaggtgttctcatgctcctgccagggaaattggccatcagagacacagagtatcttgcttagggtcccacagcccccagcagcagggactggaaccagagactggctgctcctgctccccagcagttccttcctggcacatcaggggcttctccacctgattcaaggcgacagggaaccccctgtgcatctttcatcctcctgctgggttcagcctggcccttaaacagatgtggaccgggggccagggagttgcattgaagggcagggccctgtttgttccttgcattgccgccagntgggantgggtngggcctttccgtgtttttgttcaaggnttgggttgattgagggaagaagtttcntgttaggcagncttccnttttagggttttgncacaagaantgtttcaaatttttgggcgtcttatntttt

SEQ ID NO: 6022 - DNA, 269 bp, Homo sapiens
  I.6022 (R10757)
  misc_feature (146)..(146): n is a, c, g, or t
  misc_feature (157)..(157): n is a, c, g, or t
  misc_feature (236)..(236): n is a, c, g, or t
caccaatctctaaaaaccaagcggtttctttcatgcataaatctcacttcccacttctcttgagacgtcggaagctctggctgtgcgggtgtttacgtgctgcggcaacaatgggcagaagctgagcaggggccgccccagggtgnaggcctgccgnggtgacgacatctgtcacccgtgctcactgcctctgccttgggtccagccccgtccccccttcccatccctgcggcctnttcacagctgtcctgcctccggtccccacggcc

SEQ ID NO: 6023 - DNA, 346 bp, Homo sapiens
  I.6023 (R10702)
  misc_feature (296)..(296): n is a, c, g, or t
  misc_feature (343)..(343): n is a, c, g, or t
gtcattcttctatatttttgccacagtgggtctgcttggcccgcgggagagggacagcagtgtgcaggggaatgtgagaggcaggctgacgtcttcataatgtccttacctaggcttgcacagtggggaggctgaggaacgcatggggttagaatgggaagggtggggagacaggcttctagacagcagagtgccacagtgtcctgggctgtgaggttctccctgtggcccaggcctctgaggccagggctggcttcagggcagaatcttggtgttcccaagatggtacatttgtncccagaaaggcggtggcatttttcccaagtttaagttgaacaccctncaa

SEQ ID NO: 6024 - DNA, 336 bp, Homo sapiens
  I.6024 (R10301)
  misc_feature (4)..(4): n is a, c, g, or t
  misc_feature (6)..(6): n is a, c, g, or t
  misc_feature (7)..(7): n is a, c, g, or t
  misc_feature (218)..(218): n is a, c, g, or t
  misc_feature (271)..(271): n is a, c, g, or t
  misc_feature (293)..(293): n is a, c, g, or t
  misc_feature (320)..(320): n is a, c, g, or t
tttnanntttatcagtaactagattaaatttatttatttataattttaactttttattattaaatttaaatgtttcaaacactaatgaacaacaaagaaagactgaataaaacaacaaaactttaccatatgatgtttataacagacaagctttaaatataagacaaagaagggctgaaagtaaaagatttgaaatatatataatataaatacaaganagaaagctgatatagctatattaatgtacaaagtaggattttaaggcaagganggtattatgaggagggtaaagngaggccatttccattatggataaaacnggtccaattcagccag

SEQ ID NO: 6025 - DNA, 417 bp, Homo sapiens
  I.6025 (R10300)
  misc_feature (395)..(395): n is a, c, g, or t
  misc_feature (408)..(408): n is a, c, g, or t
  misc_feature (415)..(415): n is a, c, g, or t
tgacccataggctatttagaagggcattgcttaatttctaaatatttggagatcttctagttatcattctttcattaattcaatcatttgagacatggtttatggcccagaatatggatgattttggtaaaatgttacatatgcacttgaaaagactgtacagttattttgtttcattttctagaaatgtcatttaggaaaatgtggtttagaacagactttttttctccctccacttgttctctcagttatgggaggaagcatgtgtaaaatatctgtattagtttcccggggctgctgtaacaaattaccacaaacttgggtggcttcaaggaggggaaattttactctcttcaacagtttggggggcccggaatcccgttagggtgtccatngggttgggtcccnctggcantt

SEQ ID NO: 6026 - DNA, 239 bp, Homo sapiens
  I.6026 (R10255)
  misc_feature (172)..(172): n is a, c, g, or t
  misc_feature (192)..(192): n is a, c, g, or t
  misc_feature (206)..(206): n is a, c, g, or t
  misc_feature (216)..(216): n is a, c, g, or t
  misc_feature (231)..(231): n is a, c, g, or t
  misc_feature (237)..(237): n is a, c, g, or t
aattcctgtgggtccagtcttggttctcaaaagaagctgcccatgacctatctccctttcctggctcttctttcctctgtggaggcttcattctcaggcaagttctctgtcttcacagtggtgaaacggccaccagcagctccaagctaacatctcaccagtttagccactnccgaggcacaagagtggctncttctacagagctncagcaaaagnctcaggttcaaattnttattngc

SEQ ID NO: 6027 - DNA, 408 bp, Homo sapiens
  I.6027 (R10177)
  misc_feature (161)..(161): n is a, c, g, or t
  misc_feature (335)..(335): n is a, c, g, or t
  misc_feature (338)..(338): n is a, c, g, or t
  misc_feature (370)..(370): n is a, c, g, or t
  misc_feature (391)..(391): n is a, c, g, or t
aagcagtgattttccctcccctgcctctccatagcctggtcttttgccctctcctttgctcttctcttcccccatagccacctcaaatacctgcagcctgatatcttcatcccttcatccagaccttttctctcctagtggtattgcaaactgaaagtggnacaaagacttaaggtaaacctgctcctcatggtggaatgcttccaaatgctggaaggaggactttagggcagagttcactaaggaggcttgtgcttatagatcagtggggcctgaaaggaagtttctctaggttctggttgtgttgctgttacggaggtgtaggtagtaattantantctttgttcagccacagtgaaggccccaaggntaggccgggatagggggggantgaccttgttacagggc

SEQ ID NO: 6028 - DNA, 423 bp, Homo sapiens
  I.6028 (R10080)
  misc_feature (45)..(45): n is a, c, g, or t
  misc_feature (175)..(175): n is a, c, g, or t
  misc_feature (259)..(259): n is a, c, g, or t
  misc_feature (264)..(264): n is a, c, g, or t
  misc_feature (370)..(370): n is a, c, g, or t
  misc_feature (379)..(379): n is a, c, g, or t
  misc_feature (396)..(396): n is a, c, g, or t
  misc_feature (401)..(401): n is a, c, g, or t
  misc_feature (412)..(412): n is a, c, g, or t
ctcgctctgtcacccaggctagagtgcagtggcgcgatctccaanaactgcaacctccgcctcccgggttcaagcaattctcctgcctcagcctctcgagtagctgggactacaggtgcatgccgccacacctggctacttttttgtattttagtagagacagggtttcaccgtnttgctcaggctagtctcgaactcctgagctcaggcagtctgcctgccttggcctcccaaagtgctagggattacagggcgaaanaaccngtgggcccagccctggggtatcttcttttatcttagggctctagacttcttgatttcacagccttgaaccctatcttcatgcttggaaaacaacttcccacctttnccaccaagngcctttaacgtgggggncccanaacgttaaggnccaaggacttg

SEQ ID NO: 6029 - DNA, 449 bp, Homo sapiens
  I.6029 (R10039)
  misc_feature (393)..(393): n is a, c, g, or t
  misc_feature (403)..(403): n is a, c, g, or t
  misc_feature (440)..(440): n is a, c, g, or t
aaaggtaaggaaatagcttctaactaagcaaagttgctcaaagtggcacatagagtgaggtctgcggctgttctcttactccaaatgtggggtatctcagaaattgccatcctccagaaggctacagtctagctcagactgtgcaaattgttctccatttgccatgcccccatgcactcaacactattccatgtcttccgtgtgctctgggaagctgacccttgtcatttgcatgactgggactctctgctctctgtgtttgtcttggggtggggcctatgggaaggctttagcagggatattgggaggggcagggaaggaggaaaggaagttcaggggtatttctttctttcatgttcctaactttcgggcccttgtggcgctgggcccgtngatccatgtnccttttcagggatattaactccctttcggccctgttnctcccctgt

SEQ ID NO: 6030 - DNA, 405 bp, Homo sapiens
  I.6030 (R10007)
  misc_feature (1)..(1): n is a, c, g, or t
  misc_feature (307)..(307): n is a, c, g, or t
  misc_feature (314)..(314): n is a, c, g, or t
  misc_feature (326)..(326): n is a, c, g, or t
  misc_feature (354)..(354): n is a, c, g, or t
  misc_feature (367)..(367): n is a, c, g, or t
  misc_feature (384)..(384): n is a, c, g, or t
nacttgaatagcacacaacagttctctaagggtcagtttccaaagtaattcctaatatttaatgaatttttaagtgatagaaattgcagtaggaaagtctagcttgaaatctaatttgtgttaggttgaccaggtgacaaccacccacccctggattctgctcagttaggtcagacctggggccagttgcccatttagcatctcaggcctcaggatcctcatttataaacctggggtttgaactgcggtctccacgatcactgtcagctctccttagtcagttggttgttctaaatgtagtttagtngccagtnaaacacctgttnctggagtgatacatcttttaaggggccngttaggatggggntcaacctgggctggganttagctttttttcaagttctg

SEQ ID NO: 6031 - DNA, 386 bp, Homo sapiens
  I.6031 (R09976)
  misc_feature (71)..(71): n is a, c, g, or t
  misc_feature (280)..(280): n is a, c, g, or t
  misc_feature (355)..(355): n is a, c, g, or t
tgtgattcgcgggctgtgattgacggcctcgctcccagcctgtggagggccagggcccggcccgggcgcanaaactcggaggtcctcgaaccctggggagggcccgcagagccgcggggagggaaaaccactttgcctgtgggaagcccacagaatatttcaaaacttccggtgcgtcggggagtgctcgcttgcacagaagttggttctaactcctgtgctaccctcattctctctttcagagataagatttaatgttcatagcttagttttcctgttngggatgatttagaaacccattttagtcttggatctgctcctgtggccagagccagcaagaaatatttgaagttanttgagttttgtaacaaaaggggtttaagatt

SEQ ID NO: 6032 - DNA, 342 bp, Homo sapiens
  I.6032 (R09908)
aaccagattcctgccggcttctttgaaaacaggtcatattgtgctcttctgtttacaagaggaaacaagatggaataaaagaaattgggatcttgggttggagggacagtgaagcttagagcacatgaactcaaggttagtgactctgcaggacttcacagagagagctgtgcccatcattcagtccaagtgctttctctgcccagacagcacagaactccagccccgcttacttacatggatcatcgagtttccaccttaaaatatgattctatttattttgagttcactgtttaccaaattaggaacttaaaacaaagttacataaaagttattgtggac

SEQ ID NO: 6033 - DNA, 286 bp, Homo sapiens
  I.6033 (R09830)
  misc_feature (264)..(264): n is a, c, g, or t
  misc_feature (284)..(284): n is a, c, g, or t
caggccccttcgtcacccaaactaacatggccctaaaagcttccatgaaccatattaaatgtctccttaggatctcatggaaaagggggcatatgtggtcttaacagataatccctctatgtcatggcacaacataagacttgggaaagaacaatttgttttttccaagtgtttctcttctaccaaggaaaaggaaagggacattgggcatgttctgggggaggaaattctggaattcaggatttcagtctttgacaaggcctnccagctggaatgaggttatncc

SEQ ID NO: 6034 - DNA, 402 bp, Homo sapiens
  I.6034 (R09824)
  misc_feature (188)..(188): n is a, c, g, or t
  misc_feature (245)..(245): n is a, c, g, or t
  misc_feature (276)..(276): n is a, c, g, or t
  misc_feature (348)..(348): n is a, c, g, or t
  misc_feature (360)..(360): n is a, c, g, or t
  misc_feature (376)..(376): n is a, c, g, or t
  misc_feature (388)..(388): n is a, c, g, or t
  misc_feature (393)..(393): n is a, c, g, or t
aggcctaagacatctcacatttatgtgaaatagttgaggcacaagtatgtggttaactacacataaattaccaataaaattaaaagttaactaaaatactacagaagacatttaatattttgcttcagactgttatagtaccttagggttatgaacatcaattacctttgagccttactatatttaangggaaggggaagctgacatttttatcttttttaatggggtacactctacggttaccnttaaagggcttccccggttttaaggcaaaanagggattatgtggggttttaaatcatatacccttattccttccatacttaggcttcccggtggggttttggnccttttcccccnaaacttttaccctggnccgggggttttnccctncccgggggg

SEQ ID NO: 6035 - DNA, 335 bp, Homo sapiens
  I.6035 (R09811)
  misc_feature (271)..(271): n is a, c, g, or t
  misc_feature (290)..(290): n is a, c, g, or t
cctgctccccaagccatgtgggtaaaaggataaaaagttcctgcaggatcaaatgcaattctagctagtgagggcctgggcaaacggttttatcccagggaatcctttgcctgggagtagctgtgctgggccggctggggcagggtggagccacccgagccagtcctgggattgtgccaggtgaggaagatgtgtgttgctgcaggccttccaacttctgggacaagccttttcctttaacgggggacaacacccatttcttggtagccanaaggcacaagcccaggggnaaattttttcccaattcggcctttttccccaaaagcattcgcttt

SEQ ID NO: 6036 - DNA, 416 bp, Homo sapiens
  I.6036 (R09664)
  misc_feature (343)..(343): n is a, c, g, or t
  misc_feature (416)..(416): n is a, c, g, or t
agagctaccagagcttcaataccctgtcctgtaatgacaatgctggcgggaaggggcgaggagcagggcaaaatagtacccagttgagaaccactattaaacaaagatccttcctcctctttgtctgtatgtaaaagttacctcaacttaattcacacaatgacataaagccattttgaataaggttaagaaactcatcaggtttcttgcagctcagtaagacaattgtggggatgaaatcaactcttgttaagttcaaagaaagtcataaataatatctgaatagtttctataccaaaagctttccttttctatgtgttttattttaaagtactttattccnagggggacacctccaggaaaattcaggtggttaatatggtgtttcacacacaatggcacctgtggaaaaaaan

SEQ ID NO: 6037 - DNA, 353 bp, Homo sapiens
  I.6037 (R09662)
  misc_feature (332)..(332): n is a, c, g, or t
gataaactgaccaatggtacagaattctaagagcctagaaaaacacgtatatatctgtgaaactttgatttttgacagaactgcctggaaaaggaaaagctggaaaaattgtttatccatgggggggaaaaaaaaagaaattggattcttagtcacaccatgccgaaaaattcactccagatggatgaagagctgaaatgtcaaaagcaaactctgagaatttgaaaaggaaatataagtgagtatctttctgagcttgaagtagggaagaatttacaaagatagaaaaaaggacaggcataaaagaaaagatccaataagtttgggctacntttaattatttaaagcctttg

SEQ ID NO: 6038 - DNA, 391 bp, Homo sapiens
  I.6038 (R09609)
  misc_feature (255)..(255): n is a, c, g, or t
  misc_feature (301)..(301): n is a, c, g, or t
  misc_feature (341)..(341): n is a, c, g, or t
  misc_feature (351)..(351): n is a, c, g, or t
  misc_feature (389)..(389): n is a, c, g, or t
atcctgggaaggggagcccattggtctaccctgatttagcacgggacatttctctgagtctctagtgttgttttaaattggcctaggtaagtggtgttcccagcccttttagccccagagcccctttcacaaattcctgagatttaaggcaggcgtggggaacgattctgttggatctaggggccaggccaaaccccatggcagtctgaggcccctccaggcgcctctgggagcaggtggttcctggggggcttngcagcagagtcccccctttttcagaagtaccagcctaccacatctnggtgctcttccctacttcagccattagccactccagctgntttctaaatnattccattttccaaggtccttttttaataaagaaagtnat

SEQ ID NO: 6039 - DNA, 372 bp, Homo sapiens
  I.6039 (R09551)
tttttttcacatgtgcattgtgtgtgaacatcatattaatcatctgattttctggaggtgtctccttggaataaagtactttaaaataaaacacatagaaaaggaaagcttttggtatagaaactattcagatattatttatgactttctttgaacttaacaagagttgatttcatccccacaattgtcttactgagctgcaagaaacctgatgagtttcttaaccttattcaaaatggctttatgtcattgtgtgaattaagttgagggtaacttttacatacagacaaagagggagggaagggatctttgtttaatagtgggttctcaactggggtactattttgccctgctcctcgccccttcccgcca

SEQ ID NO: 6040 - DNA, 415 bp, Homo sapiens
  I.6040 (R09549)
  misc_feature (166)..(166): n is a, c, g, or t
  misc_feature (370)..(370): n is a, c, g, or t
  misc_feature (415)..(415): n is a, c, g, or t
tattgtattgatctcttattattcgtgagtgaaattgcagggtcataggaagtgagaatgatcatctttaagtgagaacactaacttgttttccaaaatggtcgtacaaccactggggatcctgttgctccacaccttcccaatagttgtattatcaatgtttttnataatttttgccaacgcagtaggtatagaatcatgtctcatcatagtcatgatttgcctttgtctgtggccgagcatctctgcatatgtccactggcctcacacacctcccttctgtgcggtgaccgtgcttctcatgccttgtgcccacttttctgcagttgtttcctcactagtttgtgggctatttttatatattctaggngctaatcctgtcagttgaatgtcttacaggatatcttcttccagn

SEQ ID NO: 6041 - DNA, 323 bp, Homo sapiens
  I.6041 (R09504)
  misc_feature (88)..(88): n is a, c, g, or t
  misc_feature (138)..(138): n is a, c, g, or t
  misc_feature (281)..(281): n is a, c, g, or t
  misc_feature (290)..(290): n is a, c, g, or t
  misc_feature (303)..(303): n is a, c, g, or t
actccataaggaatgttaacaatatccagacacggtgctaggtactttatgtatttctttctttctttttttttttgagacggagctnccatctgtcacccaggctggactccttctcaaaaaaaaaaaaaaagcggngatttagaacaagctgcttcccacagggcttcaggtcagagctgcttaattgactaaggcttccgggatggggcaggcattgtaatgctgctccgtgccaagcaccctgcagccccctcaacctcagctaggaaaccgcaggnctcccacgntcagcctgggggnctgtctctagcctttaagcc

SEQ ID NO: 6042 - DNA, 389 bp, Homo sapiens
  I.6042 (R09300)
  misc_feature (257)..(257): n is a, c, g, or t
  misc_feature (268)..(268): n is a, c, g, or t
  misc_feature (291)..(291): n is a, c, g, or t
  misc_feature (303)..(303): n is a, c, g, or t
  misc_feature (314)..(314): n is a, c, g, or t
  misc_feature (325)..(325): n is a, c, g, or t
  misc_feature (334)..(334): n is a, c, g, or t
  misc_feature (349)..(349): n is a, c, g, or t
  misc_feature (374)..(374): n is a, c, g, or t
tgaaaatagataaccagaaagacttgtggggtacaaaatgttcacatactattgttttcagctatttccacttgcactctaagtcccagagaacttgagtaacaaactctttaccaaaaggtagaattctaaaggtcacattttctctgggcttacagacaatgttaacaaattcaagctgattattttaactaataaacttttgaggaaggcaccgtggacaggaaaatctgtaaggaaatgcgcccccattattnttatttccagntactgggacatctctccgggggncttcatttggcntaccctctttncattccttttnttggttccntatggttggaagggntttaaaacggggcaagggggctttntttgtccggcggggc

SEQ ID NO: 6043 - DNA, 288 bp, Homo sapiens
  I.6043 (R09195)
  misc_feature (5)..(5): n is a, c, g, or t
  misc_feature (6)..(6): n is a, c, g, or t
ttagnnctgatgctttccttggttaccatattcaggatttgtgatattttgacacaactcacgaaagcaagtttctgtaaagagggctagactatgcagagctgaggctagcagttcaccatgacttacttgtggctccagctcaccccgacgtttgtagatggctttttctccagtcagcccatcaatgatcttgggcatcatctaattctccagtagcttgatgtcttagccattgtctttctttacctttagcctacaaaaggacacacatacacacacaaggtc

SEQ ID NO: 6044 - DNA, 387 bp, Homo sapiens
  I.6044 (R08893)
  misc_feature (8)..(8): n is a, c, g, or t
  misc_feature (270)..(270): n is a, c, g, or t
  misc_feature (295)..(295): n is a, c, g, or t
  misc_feature (319)..(319): n is a, c, g, or t
  misc_feature (372)..(372): n is a, c, g, or t
ttgttttnataaagagattttaataaaggagttatttgcattaattgtagacagacttaaggagcaaacaaggtggcagggcacccaaaggatagcaatggtgagaatataatactacccctagggataaacagtcaaggaaaaggagcagtgtttccttaggagccctgcatcagaagaggtacagaggagaacagggcgaagggagttatatcctgaaaggacatgatcacggccagcgcacagggccgaagtagggcatgaagaagnaataccctgacttctttctcttccntgccctcccaatatcctgctaaangccttccatagggccccaccccaagggccaaaccacgggggggcagaggagtncccagtcatgccaaa

SEQ ID NO: 6045 - DNA, 420 bp, Homo sapiens
  I.6045 (R08655)
  misc_feature (345)..(345): n is a, c, g, or t
  misc_feature (359)..(359): n is a, c, g, or t
  misc_feature (375)..(375): n is a, c, g, or t
  misc_feature (382)..(382): n is a, c, g, or t
  misc_feature (388)..(388): n is a, c, g, or t
  misc_feature (396)..(396): n is a, c, g, or t
  misc_feature (413)..(413): n is a, c, g, or t
gaagtttgattgcacattgctgatttagactctagtttaacatccagagatctcatcatctagcagaactaccccctgcctacctctcaagcccccaaaccatggtgccccaggttggcccttgtctctaacacaatgagttacgtaatttagttcctatgcaccatcaccctcattgttcctttaccttgaccactatttttccattcccttctttccattcacccctccataatcttcaactaatctctgtgtcaaaatttacctcatggtcagctggctccagaaaggttttctaggaaaccatcccatggtggcaaccctggccacaattttaggattgtncccttttcattttntttaggggaggaaggnctatggnatggantgtatcanatggtttttggttggtngatttta

SEQ ID NO: 6046 - DNA, 413 bp, Homo sapiens
  I.6046 (R08408)
  misc_feature (3)..(3): n is a, c, g, or t
  misc_feature (6)..(6): n is a, c, g, or t
  misc_feature (7)..(7): n is a, c, g, or t
  misc_feature (49)..(49): n is a, c, g, or t
  misc_feature (323)..(323): n is a, c, g, or t
atnatnntgaggcagggtcttgctcactccaggccagagtgcagtggcnaatcacaactcactgcagcctcaacctcctgggctcaagcgatcctcccacctcaggccccagtgtagctgggaccacaggtgcacgccacctcgcccagctaattttttatttttgtagagacagggtcttgctgtgttgttgtgttgtccaggctcgtctcaatcttcaagtgatcctccctcctcggccccccgaagtgctggggattacacgagccaccgtgcccagccatcttttgagcctccagggcccaaccaggaacttcactgtntgcttcttaaggtcaacttttacaaacacgagggttattgcaggtttcatcttgcccttcaagcacggttgatgttgaacaggaagggca

SEQ ID NO: 6047 - DNA, 361 bp, Homo sapiens
  I.6047 (R08407)
  misc_feature (14)..(14): n is a, c, g, or t
  misc_feature (40)..(40): n is a, c, g, or t
  misc_feature (140)..(140): n is a, c, g, or t
  misc_feature (145)..(145): n is a, c, g, or t
  misc_feature (265)..(265): n is a, c, g, or t
  misc_feature (298)..(298): n is a, c, g, or t
  misc_feature (322)..(322): n is a, c, g, or t
  misc_feature (342)..(342): n is a, c, g, or t
  misc_feature (354)..(354): n is a, c, g, or t
cagggtcctgattnttgacactgcgtgtggagcgtcaagnggctagccatggacccagggggtgcagagactctccagcgtcatcttggtgagagtgatgttgggatcagagtggaaacaagacagagaggatgcggcanaaagnccataagtgaaagtcactagggaacggtcactttcggcatcagtgaaaatggtctccatgggccgcagcacattgtgggggacagggcagagtgggagttcagcagaggggagggaggcntgttgggggctttcaggggagcccgggcacagntcccagattcctccctggggggantttccagggccacgttcccntcccccagcagntttttgg

SEQ ID NO: 6048 - DNA, 486 bp, Homo sapiens
  I.6048 (R08340)
  misc_feature (245)..(245): n is a, c, g, or t
  misc_feature (261)..(261): n is a, c, g, or t
  misc_feature (340)..(340): n is a, c, g, or t
  misc_feature (356)..(356): n is a, c, g, or t
  misc_feature (387)..(387): n is a, c, g, or t
  misc_feature (420)..(420): n is a, c, g, or t
  misc_feature (444)..(444): n is a, c, g, or t
  misc_feature (450)..(450): n is a, c, g, or t
gtggagaatatattcaatgactggtcatagggtgtgtcagaccatttttgcattgctataaagaaatatctgagtttgggtaatttataagaaaagaggtttaattggctcacagttctgcaggctgtacaggaagcatggcactggcatctgtttctggtgaggtctcaggaagcttacaatcatggcagaaggctagcagggagcaggcctgtcacatgggcaggagtggggagcaagaggtngggggtccgaggggangcaccccacaccctttttaaaccacccagatttccctgaggagctcacttatccattgagggccagcacccaagagggncagcatccaaatccancccttaaggaattcccccccccccaccattnccacccaccccttacccggggccccaccttttnaacacggggggacccccatttttnaccttnaggacttttggggggggaccaacacccccaaccctt

SEQ ID NO: 6049 - DNA, 444 bp, Homo sapiens
  I.6049 (R08275)
  misc_feature (4)..(4): n is a, c, g, or t
  misc_feature (404)..(404): n is a, c, g, or t
ctgnatagggcttaacaaatctatgttgcagccctgtttttcccatccctgagaccaaaatctttgattctctgttattttcagccaagaagtctaacagagccaaacagagcaagcctgaaatgatcaggacagaattctgtctatctgaatttcctgccccagctaaaacagtatctgcaaaacatacactgtaaatcataacttgctgaggccccatcagtgtcaatgcaggcaagcagagtagggatattacagcctgggtcatccataaagaggacacattcaaggccagggtgagggtggctcataccctattaatctcaggcactttggggagggccgagggcagggaggggttgcttcgagcccagggggatttcggaggattccaactggggggncaaccaaaggccaggaccttcatcttcttattaaaaaagg

SEQ ID NO: 6050 - DNA, 480 bp, Homo sapiens
  I.6050 (R08274)
  misc_feature (302)..(302): n is a, c, g, or t
  misc_feature (320)..(320): n is a, c, g, or t
  misc_feature (336)..(336): n is a, c, g, or t
  misc_feature (358)..(358): n is a, c, g, or t
  misc_feature (409)..(409): n is a, c, g, or t
  misc_feature (422)..(422): n is a, c, g, or t
  misc_feature (433)..(433): n is a, c, g, or t
  misc_feature (450)..(450): n is a, c, g, or t
cccagaaaacaactcctagttaaccttggctcctcttcactcggcctctgtctttaagtctgagtgacctggtgggattgatcagctttgaagtcctaaggtgctattttaatactgttcttttacgttgcaggcttcgagactgatttaactagattctggagggagcttactttacagcattcttaagagctcgaacaatcttgaaagagttaaactctaattaggctcattcctaaggtatttaatgcccttattaaaactcaactgctcgttcacttttttctttagtggaatcaggnttcttgagggagctgagnctttcggtcctcaggncacagggctcacagttggaggnggggcagtgctaggagggctaggttcccatccgtgtggacaggcatttttnaatttaacagggnccgcctttggngttcccccaaaattttnggggagctttgggtccatttcagggtgtgg

SEQ ID NO: 6051 - DNA, 412 bp, Homo sapiens
  I.6051 (R07948)
  misc_feature (53)..(53): n is a, c, g, or t
  misc_feature (325)..(325): n is a, c, g, or t
ggcacgaggggatttgtatttataaatcacttcccttttagggatgagcggtntggggcgtgtgtgcgtgtgagtgtatgcgcgtgcgtgtgtgaccctcaagtgtactttgctcaatttagacgtccagtatttccagaaacaatgaaaaaagtaagatgttttcttctttatgattctgctcaaaacaccacgtgccgcctcagagctttttctagagcctcggtcctcaatgacgcgcttgacctgttgatgcctcagcccagcgaagccccttcacctgtggccccgggcgacagttctttcagtgtggcagtgcagggcntgggggtgggattgccagggctttcggttttgttgccagcaaacggcgttttttgtttggttccttccatggaacagggggttacaa

SEQ ID NO: 6052 - DNA, 499 bp, Homo sapiens
  I.6052 (R07891)
  misc_feature (90)..(90): n is a, c, g, or t
  misc_feature (344)..(344): n is a, c, g, or t
  misc_feature (379)..(379): n is a, c, g, or t
  misc_feature (403)..(403): n is a, c, g, or t
  misc_feature (447)..(447): n is a, c, g, or t
  misc_feature (476)..(476): n is a, c, g, or t
tttgagtgtgtttttaatgcattttttttaaagattaaagtaaaatgtctcaattgtaaaaaatacacaccgggcaaatccttacctggntaataaatatctacatcacagtacaataaaatttcttctctataaaatttaaatatgggattatagtctatcactatcaaaagaaacactatgctaatatttccatattattaaaataacagggaaaaattcggggcttattttaggaacctggatgccatagccgttggggaaggggccaaggaggattccaaatgtcggatccatcactctccctttgaggggggggactgtggggcctgggggttattccnctttaaattcaggttccatgggaaaagggggtttnggccccttccaaatgctggggccnaccatttccaaaactggtagggcctggatttccataattttggncctcctggcgggccagggggccattggcncgggtgggggtgggggtccctgg

SEQ ID NO: 6053 - DNA, 346 bp, Homo sapiens
  I.6053 (R07556)
  misc_feature (247)..(247): n is a, c, g, or t
  misc_feature (282)..(282): n is a, c, g, or t
tagggtcagaaaatataaggctcagaaggatccagaataatttcctctaaacccttcattcacagagtaaataaaatgaagctaccaatgtcacaggtagctaaagttagggcttggtctagaaatctcctccttatttaaattttctttattctccactgaacaaagagaaattgggaagaatgcaagagatctccccacttcagacctacagtccacctcgccacagccagtcttcaaaagaggncaggtgggagagccacgtgatgggcatttttcagnctgggtggcaaaggatctttccctggcccttttcaggaatggcccctttttttcatggcctggc

SEQ ID NO: 6054 - DNA, 475 bp, Homo sapiens
  I.6054 (R07502)
  misc_feature (322)..(322): n is a, c, g, or t
  misc_feature (459)..(459): n is a, c, g, or t
ttgttttaaagacacatgcacacgtatgtttattgtggcaccattcataatagtaaaacattttctttttggtgtgagagaccctcccattccttagtaaaaacgtatttacttgcatgttattattgtccttacaaacttgtttttccctagagcaattgattttgctttaggtactagctgaaggtctagaggcaatacaatttaggatccttgtctagaaatcaatatgattcaattcttttcaagccaaatgatatctgtaggactccagttgtgtgcaagccctgtgtgggagcctcaaggcatctgcgttaggccnagcttccctattcttgggaaatcagctttgcttgattgggccctatattggccatggtttaatggtttggatgggtggccggggcctttataaaggcataccaattttgcaggtggctccctctcaggggtaggggngtcctttgccccaagg

SEQ ID NO: 6055 - DNA, 313 bp, Homo sapiens
  I.6055 (R07237)
  misc_feature (40)..(40): n is a, c, g, or t
  misc_feature (214)..(214): n is a, c, g, or t
  misc_feature (232)..(232): n is a, c, g, or t
  misc_feature (266)..(266): n is a, c, g, or t
  misc_feature (292)..(292): n is a, c, g, or t
  misc_feature (300)..(300): n is a, c, g, or t
  misc_feature (312)..(312): n is a, c, g, or t
gagtaaatgtggtttattagcatgaaatattatgcctttnacttaaattattttatgtaaaatagggcactgtttaattatgaaagggggaaaatcattccaaataagagtttaatttttattaattataaaagactctgtattagtttcctagatgtgctagaacaaattaccacaaactgggtggctttaaacaacagaaatttattctctnaacagttcccagagactnaaatgtcccagactcaccaatgtccccagtgccntgcttccctcccttaggcccttgggnaaggaatncttcctagcctnt

SEQ ID NO: 6056 - DNA, 311 bp, Homo sapiens
  I.6056 (R07185)
  misc_feature (158)..(158): n is a, c, g, or t
  misc_feature (246)..(246): n is a, c, g, or t
  misc_feature (267)..(267): n is a, c, g, or t
  misc_feature (279)..(279): n is a, c, g, or t
tgcgtttatttaggtagtttaattctctacttttattatgttctaatacaagtaactttagtatttactgaagttttaacaaataacctaaataaaccaaaacaatgttgagagaaaagtatacatgcaaatgagcaaaaagcttaatatttttaaanccaaatttttaaatacctcaggaaactaggttatatcaaaagagggaggtaatcttcaccttcttgccaccaacatcctgggataggntatgggggcctgtggtggggngggatttgtggncccccccaaagggatatggtccaatccctaac

SEQ ID NO: 6057 - DNA, 260 bp, Homo sapiens
  I.6057 (R06993)
  misc_feature (19)..(19): n is a, c, g, or t
  misc_feature (77)..(77): n is a, c, g, or t
  misc_feature (92)..(92): n is a, c, g, or t
  misc_feature (180)..(180): n is a, c, g, or t
  misc_feature (190)..(190): n is a, c, g, or t
  misc_feature (201)..(201): n is a, c, g, or t
  misc_feature (216)..(216): n is a, c, g, or t
  misc_feature (243)..(243): n is a, c, g, or t
  misc_feature (251)..(251): n is a, c, g, or t
ggctcactgcagcctccgnctcccgggagaaactcttttcatcttttcaaagagcatattctttaaaatactaaggngtgttccaattatangtttaaaaaaatctaaagaacccccccgataatcagatggttctccaagtcccagtggccctgtgattctattgctccttggcaaggnccacttaggnactttattccntcacttgaaagtttngcagctgtgactgacaataggtggggnaacacagnggttaaatc

SEQ ID NO: 6058 - DNA, 328 bp, Homo sapiens
  I.6058 (R06992)
  misc_feature (306)..(306): n is a, c, g, or t
aaatggtcaacaagagaccttgaacctggccatctctagcgtgaattgcccttatttcttctaatgctccagctgctccagtttctcctggcccttcagttccagttgccgttgttccctctggctcttcagttccagctcctggtacttcctcaggtattggtgctctggctattgctcacttcccagcctcccaagtcctatatgttgggggaaattgacttctgctgccagatctgggatctgtcattccttttgattgttctcagagattacctacacaaggggcttaggtcctccagcttngggagtcttctctttgggcttt

SEQ ID NO: 6059 - DNA, 361 bp, Homo sapiens
  I.6059 (R06639)
  misc_feature (258)..(258): n is a, c, g, or t
  misc_feature (284)..(284): n is a, c, g, or t
  misc_feature (308)..(308): n is a, c, g, or t
  misc_feature (321)..(321): n is a, c, g, or t
  misc_feature (339)..(339): n is a, c, g, or t
  misc_feature (344)..(344): n is a, c, g, or t
  misc_feature (357)..(357): n is a, c, g, or t
gtttcaccttgttagccaggatggtttgatctcctgacctcgtgatccgcccttctcggcctcccaaagtgctgggattacaggcatgagccactgcgcccagcctaatttaaaaaatttaaaaaggaatgaaaaccaaaatttaaaacttttgtgggttcaatactatcaagaaagtgaaaagacagctcagagtgcaaggaaaatttttgcaaatctgggtaagaggacatatctaggaatatattaaaggtactncctacactttcaacggtttaaaaggncaacccacttaaaaattgggggcnaagggtggtaatnggggtttaaagggttttnccaantgggccccttaantccg

SEQ ID NO: 6060 - DNA, 513 bp, Homo sapiens
  I.6060 (R06585)
  misc_feature (27)..(27): n is a, c, g, or t
  misc_feature (346)..(346): n is a, c, g, or t
  misc_feature (375)..(375): n is a, c, g, or t
  misc_feature (420)..(420): n is a, c, g, or t
  misc_feature (428)..(428): n is a, c, g, or t
  misc_feature (456)..(456): n is a, c, g, or t
  misc_feature (465)..(465): n is a, c, g, or t
ggtctgcttctgatgcttagattacangtgcagagttcatccacgttgtgacttgcatcaatactccttttcatggctggataatactcagtttgatggatgtaccatattttgtttatccattcatcagttgatgggcacttggattattttctactttttgactgttgtgaataatgctgcagtgaatatttgtgtacaggtttttgtataaacacgtttttatttctcttggctgtatacctaggtgatgggaattgctgggattataagggtaactttttttgttgttttttgaggatgggagtcttgcttgtcaccagggctgggagtgcagtgccgaganctcggctcactgggaccctccatctcccngggttcaagccgattcccctgcctcagcctcccaagaggctgggnctgcaggnacggaccaccatgtcccggcaatttttngatttaggnggagatgggggttcaccatgttggccggatgggctcaactcctgcctc

SEQ ID NO: 6061 - DNA, 401 bp, Homo sapiens
  I.6061 (R06490)
  misc_feature (329)..(329): n is a, c, g, or t
  misc_feature (342)..(342): n is a, c, g, or t
  misc_feature (359)..(359): n is a, c, g, or t
ctagcacaggaagcggatgacagaggaatcccctttcctccaggtcaccttggcttgctgagttttccctaaagtaaggacatggttcttgtgcccccaggagctgttccaggcccccaccccaaggagctcaggactggtcaggtaaaggaaagctgttctcatgtcctttccccacctgtgtgacccctcagtcccacctgtgtgacccctcagtcccaccctgagggcccagggttagtggggccatttccacaggatccatggcagcctgggccccaatacccttaacagggaaggggaaagggaagttctttttgggaagtttnaggacagcaaagnttttaattttttttttncctaacaaaaatttttttggatttcattggggggaggttttt

SEQ ID NO: 6062 - DNA, 477 bp, Homo sapiens
  I.6062 (R06435)
  misc_feature (352)..(352): n is a, c, g, or t
  misc_feature (437)..(437): n is a, c, g, or t
  misc_feature (466)..(466): n is a, c, g, or t
ctttttagcacgtattatctagaatttctgttttaatgacttctaattttatttactttatcttgtttctagttagtttccctgctagaaccacgcttcttgcaggtagagacttttttctgtttcattcaatgctggcacccaggcactctttattggtgcctggcacacagtaggcactcaataaatattgttgagtaagtggatgaaattcatctgtccccatgagaaggctgaccaaggtcacagcaccagggaagtgacaaaataggcctagagcccagggcgtttcatggaacccagttaggcaacactgctgcgggtaatgcagggggccagcatgcagcccctncagggtgcttcaattaaatgctttgtttgaagggatgggccgtcccggggaggtgtctctctcccggggaaggccattttttcanttttaaaccagcctaagctccctctgttncatcctcccct

SEQ ID NO: 6063 - DNA, 390 bp, Homo sapiens
  I.6063 (R06378)
  misc_feature (372)..(372): n is a, c, g, or t
  misc_feature (378)..(378): n is a, c, g, or t
gtctttagctgctgaggaaatggcatgttactgagccttgatggcattactggcactttgagttttaccgtttccttaaaatcacagtactggaatcaggtgaaatttgctttctaagctgcagccactcgtcatgtgcagaattctgctgcccacccaagtcctgcttaaacagccgcattttataagctggtacgggagctctgcaacaaccttcacagagaaaggatctgctgctttatttgtatacaaaaaggaaaaagacagtcccaaacttttcaggaatcccttattgtcatctgctggaaaggggcaagttgtaggttaggcatgttaatccttggtaaaaaatgccatttaacttttcatttngggggngaaaatgcttcc

SEQ ID NO: 6064 - DNA, 357 bp, Homo sapiens
  I.6064 (R06377)
  misc_feature (156)..(156): n is a, c, g, or t
  misc_feature (326)..(326): n is a, c, g, or t
  misc_feature (356)..(356): n is a, c, g, or t
agaatctagaaccatggctgaccaaagcgagacttccgagtaaggttcgttaacaggcatcctgctgaattagaaggaaacaggaacgaatccaaagcaaacggggctaaacttccctcgaggacatttcctgagctgcaacatgggaagcgacanaccgaagctggtgagctggtgcaactgccacaccttttctctggtttttagtactcgggtcatcctggggagaccgctcatgggctatgggcagcccatgcctgggattttttggtgaatgagtctgaaaagcagtgaccaggtgtgttgagggcctcccctttaccttncaccttttttattcttcttgagttgacttna

SEQ ID NO: 6065 - DNA, 338 bp, Homo sapiens
  I.6065 (R05901)
  misc_feature (72)..(72): n is a, c, g, or t
  misc_feature (291)..(291): n is a, c, g, or t
  misc_feature (321)..(321): n is a, c, g, or t
cttttggaagtaaaggctttgtaagggagccagacttgacttttaccaaaaccacatcttaacatttttttngctaagtacagaaaaattatatgtatatttacagaacttacatttgtggaatatgtcttttattcttttatcagccaaaactatcctgaggtctgtgttttgtatttgaggaattttgggttttaatttcttaaaatctcttgaattctagtgagttagagattccataggggttgtactgttttccagtctaggggaatgatttaaaataggctgccngggggctaatgttgggaatgttcccagganaggtaaatatggtttcc

SEQ ID NO: 6066 - DNA, 395 bp, Homo sapiens
  I.6066 (R05816)
  misc_feature (359)..(359): n is a, c, g, or t
  misc_feature (393)..(393): n is a, c, g, or t
taaaaaataacaatctgaatgttttctctagggatggaagtaatataaccataatgcaagaagtctggtaaatgggtagaaagtcatctgatctaccaccacccaccacagccactgttatagttggtgtacttttttctcttttcgtacctgtactttcttatgatcacaacggatataatattaaaattatctggctttttatcctaaatcagccactttccttttggaactttttttttctttttcttttttttgtgaggcagagtttcactcttgtcacccagggctgggagtgcaatggccccaatcttgggctcactgcaaactccactgcactctagcctggggcaacaggnctgaggactctggtctccaaaaataaataaatanat

SEQ ID NO: 6067 - DNA, 401 bp, Homo sapiens
  I.6067 (R02742)
  misc_feature (285)..(285): n is a, c, g, or t
  misc_feature (291)..(291): n is a, c, g, or t
  misc_feature (382)..(382): n is a, c, g, or t
gagtcagctttaattgtgagttttggtgtgtgtgtgcgtgtgtgtgtgtgtgttttaatacggtgtctcattctgtcaggcaggctggagtgcagtggtgccatcatagctcactacagccttgatctcctgggctcaagtgatactcctgccttagcctcctgagtagctaggactacaggtgtacacaatctctcccaactaattttttttttaacttttatttttgtaggagatgggcatctccttttgttgccctgggcaaaaaaaaaaaaaattatgggntgatgncaatgtatttggggattaaatatggataaccattccttaataccttatattccccaccttactctgggggcctaaagggtttcatgcccanggggcccaagcaatttttt

SEQ ID NO: 6068 - DNA, 387 bp, Homo sapiens
  I.6068 (R02741)
agaaagctattatgaatctgctgaagaatgagttacataaatttaagtgtgtgctgtctgggttcagtggctcacacctgtaattccaacactttgggaggctgaggttggaggatcatttgagctcaggagttcaagatcagcctgggcaacatagtgagacttcatctccacaaaaatttaaaaaaaaattagccatttgtggtggtacacacctgtagtcccagctgctcaagaggctaaggcaggatgatccgcttgagcccaggagattgagggcttgcacttgagctctggatcttcgccactggcaccccagcctgggttgacaggagccgaggaccctgttttcccaaagggggtttaaaattaaaaagtgttgtttct

SEQ ID NO: 6069 - DNA, 372 bp, Homo sapiens
  I.6069 (R02699)
  misc_feature (117)..(117): n is a, c, g, or t
  misc_feature (139)..(139): n is a, c, g, or t
  misc_feature (141)..(141): n is a, c, g, or t
  misc_feature (143)..(143): n is a, c, g, or t
  misc_feature (303)..(303): n is a, c, g, or t
  misc_feature (320)..(320): n is a, c, g, or t
  misc_feature (368)..(368): n is a, c, g, or t
atgaaacttccggtctcattgtccgggaagtgagcattgagatttcgcgccacaagttggaagaactctttggacctgaagattactggtgccagtgtgtggcctggagctcagcgngttaccacaaagagccggaagnantngtgcgcattgcataggaactcatgacctgacatccattagcagagtcatcagagtcatctggctgctgtgttgagaatggaccatgctgggcaaggggagaagcaggaagaccagtgatgagactgcagctatgagagatgttaagctactgttagattnggaagcagtgggaggtngtgaggccagggttttcagatatattttaaaagttaggagttaacagntttt

SEQ ID NO: 6070 - DNA, 297 bp, Homo sapiens
  I.6070 (R02580)
  misc_feature (220)..(220): n is a, c, g, or t
  misc_feature (251)..(251): n is a, c, g, or t
  misc_feature (278)..(278): n is a, c, g, or t
tttctttataacagttttaattcaagaaaattgttaaacatctgtgatactctaggtattgtgctaagcaggagagatataaaattaagtacaatagaattcttgatctcatggaactcactggcatgaaacacaaattttacgagtgaatataattgaaatgagacaagcactatattaggggtatggacaaactgctctgaaagtattgagaaaggantgcccagcctcctccctctgtgaggcaggantggcttcactaaagacatttgaaaggnaatccttggataaggctta

SEQ ID NO: 6071 - DNA, 345 bp, Homo sapiens
  I.6071 (R01491)
  misc_feature (237)..(237): n is a, c, g, or t
  misc_feature (292)..(292): n is a, c, g, or t
acaaggctttgtttgttttatattgcaaattagatatatgatttgttggaaagaatataaaattaaatatgaaggtatgtcacatacgcaatgccatatataaaccatactcctttacctttaactcttcagtatataatctttcagacttttttatttgcacatatggaagtatatacattcgtaaagtttttaattttaaaattgggtcttaacagcatttttgaataggtggangtcttccaaaaatatgttggtaaaccatgggggaggtttaaaagtcctaatcacnggtcacccactgtttaggtgggggggggtattgtccaccccatggggggttcc

SEQ ID NO: 6072 - DNA, 310 bp, Homo sapiens
  I.6072 (R01131)
  misc_feature (200)..(200): n is a, c, g, or t
  misc_feature (274)..(274): n is a, c, g, or t
  misc_feature (286)..(286): n is a, c, g, or t
aatggctaatgggcataccccatatacttaaactatcatcaacaaattataatgagtgcttacaccttttaaataatacacattattcctaagggcaaagcaaaggttgtttttaatgctttctcatctcatcacttcaaaggttgtttttaatactttctcatctcaccagtctgcaccttcctatctattgtctcctnacaacctcatgctatgcttacattacataaaggagcctctatcaggcctgtcccagtcctacccatgtcccatnaatgccccatgntcccaaaattaatcccattctctc

SEQ ID NO: 6073 - DNA, 276 bp, Homo sapiens
  I.6073 (R00989)
  misc_feature (199)..(199): n is a, c, g, or t
  misc_feature (220)..(220): n is a, c, g, or t
  misc_feature (273)..(273): n is a, c, g, or t
ctatatgttaagtagtaggagaaagatattaaaaagatgtctgtccccagtaaatttctaatctagcaatcgaggcaagtgaaagaaatactaggaaaccaccaggtaatgcatctgcaaaagctaaaatgacattgcacctactgtggcagctaagagggattaggagaggaaagacacacgctttgatataggattntcaaattttctttcttggganttttcttgacaggcttcatgggaaaggcagggcataaggtggggctttgggtngga

SEQ ID NO: 6074 - DNA, 301 bp, Homo sapiens
  I.6074 (R00988)
tgaaaatactgtgaggtttaacaatgaaggcaggtgactggtgaggagagttccagccactggattctccctcagtcccctgtgctgtggcccttggtgacccctagatttcagtgcccctgcctgacactggagtccctctataaagaagcccctttctagctagctagctgttccatcccgcacacccccacagaagccttttgctgccattagtaaggcacgcctctattttcttcacctgtgattgatcatggcatgattggagttttgtctatttaaagcaattgtttaagttact

SEQ ID NO: 6075 - DNA, 262 bp, Homo sapiens
  I.6075 (R00835)
  misc_feature (4)..(4): n is a, c, g, or t
  misc_feature (7)..(7): n is a, c, g, or t
ttgnaanagacaaggttttaccatgttgcccagctggtcttgaactcctgggttcaaatgatctgcctgccttggcctcccaaaatgctgagcttacaggcatgagcactgcacccggcctatgaagatacttttatatctattcaataataaaaaaagatgattttaaaagacataaaatatatgacagatcaatgtacaggtctctatgggatgtaaaaacagaaagcacagctccttcttgttgaatatggtttaaaca

SEQ ID NO: 6076 - DNA, 348 bp, Homo sapiens
  I.6076 (R00689)
  misc_feature (261)..(261): n is a, c, g, or t
  misc_feature (290)..(290): n is a, c, g, or t
  misc_feature (328)..(328): n is a, c, g, or t
tttgtggatgcactcaggatacattcctccttgccccatcccctttgctgcctcttattcattcaacaaatatcctgaaggatgagaaaaaggctaggcttgcagagtgctatggatacaggaaacagtatataaaaaagttccagatggtggctcacacctgtaatcccagcactttgggaggccgaggtgggcagatcacgaggtcaggagttcaagaccagactggccaacatggtgggacctgtctctacttaaaantacaaaaattagctggggctgggtggccnggcgcctgttaatccccagcttggtcggggaaggcttnaggcagggagaatcactttt

SEQ ID NO: 6077 - DNA, 285 bp, Homo sapiens
  I.6077 (R00688)
  misc_feature (72)..(72): n is a, c, g, or t
  misc_feature (256)..(256): n is a, c, g, or t
  misc_feature (276)..(276): n is a, c, g, or t
tctaaatctatcatcaagttactgtcagtgctatttccataagatgataacttctttcatctgtactgccantaccctctttacctcttacctggaacatgatgatggccgcctcatttctgctggtgtctgcctctattccacttcacccagagcggccaagagtcgtatgtgtctgcttaaaatcttttaatgggttttccataggcacttaggattccaaactcccccacatgggttcacaggggccaggatnatctgggcttctgacctggnctctctgga

SEQ ID NO: 6078 - DNA, 374 bp, Homo sapiens
  I.6078 (R00371)
  misc_feature (114)..(114): n is a, c, g, or t
  misc_feature (198)..(198): n is a, c, g, or t
  misc_feature (247)..(247): n is a, c, g, or t
  misc_feature (291)..(291): n is a, c, g, or t
  misc_feature (342)..(342): n is a, c, g, or t
  misc_feature (368)..(368): n is a, c, g, or t
aacggctgggactgaggggctcaggcagggtgtgccttcctccgcatgcccctccctccccacggccctgcaagcagtctataccagcatgagtactgccccacccctgggganaacctggctccaaccaacccctcccctgcctccaccatatccactaccagggcaccctttagaacaggggtctgggggtacccnggggtgttaaggctcaggagtgggcagcagtcagggagagacagaactnggggaaagggatggttgtgggtctttctgtttcccaagatcctngaacatgggaagcgatggcagggcatagattcagggcagagagggtttttngggaggattcctttttttgttccacntttttt

SEQ ID NO: 6079 - DNA, 367 bp, Homo sapiens
  I.6079 (R00307)
  misc_feature (5)..(5): n is a, c, g, or t
  misc_feature (195)..(195): n is a, c, g, or t
  misc_feature (307)..(307): n is a, c, g, or t
  misc_feature (316)..(316): n is a, c, g, or t
ttctnttttttttcccctggagtggaaatatcagcctgtgtttgaatggagacatgaacagcacagcctcgtgctcatgggtagagagtatgggacaaacctgccctagctggttcctggcccagccacttgccagctgtggggtctgtcctgtggataataaatagcagcaccttcctcctgggagcctggcgngatggcagctgtgagacattgagatcgtgactggcacctgggtgaggactctgtaaatggaactcatcctcaccttgtccttcttaggcctggggggtgagaagctgagcgnccagcatgnaaagaccaactgcatttccagctttcttcttttctttgtggacattggcat

SEQ ID NO: 6080 - DNA, 396 bp, Homo sapiens
  I.6080 (R00259)
  misc_feature (2)..(2): n is a, c, g, or t
  misc_feature (135)..(135): n is a, c, g, or t
  misc_feature (202)..(202): n is a, c, g, or t
  misc_feature (217)..(217): n is a, c, g, or t
  misc_feature (242)..(242): n is a, c, g, or t
  misc_feature (263)..(263): n is a, c, g, or t
  misc_feature (276)..(276): n is a, c, g, or t
tnccctttttattaaaaatagactcaagcactttatgtatcatacaaaagtttcattcgctggtggcagccacgggaaagactggccccgtagcactgattttccacctcccctccagggacttgggtcccaggngcagtgactgggcctcagagaaagcccataaagactgcttactctggaagcagccgactaggggctnttccgcgagcagctntccccaccccacccaatggcaaaanttagatactcgaaagtgcctnttcagtgccaagntaaactaacaagtggagtgaaatggaaaaccctttgattattttactatttcccagggcctgggattttgagttttccctgcactcaagtccttttccctacaaataggggtaggaaact

SEQ ID NO: 6081 - DNA, 314 bp, Homo sapiens
  I.6081 (T99993)
  misc_feature (253)..(253): n is a, c, g, or t
cttccctctctactttctgatgcaaacaattctttataatgaacacactcttggaaatgctaatgtcataaaccacactgaggggtcacagggtgggaggtaaaatctgcaaaaccaaaggtacacttttaattgctaaaaacaatttagtggaagagtgtctacatttgcactcagttttatataggtaattctgtggcctgtgatgcaacacctggggacgtgtgacccaatgtaacttttaattctaccngatgaagcctaagccagcagagcagctcaacctgggagctcaccaagagagaagctcatag

SEQ ID NO: 6082 - DNA, 359 bp, Homo sapiens
  I.6082 (T99992)
taatcttgggaaagtgataagcatatcaggaagacatatttcttctagcttgatagaagagtgatgaatctaggatgtgacctctgctgtgtgagctgatgtctccctgatatatagtggctctgtgtgtgtttgcatagagagggaaagaggatgcatccgtgtctctgtttttcttcccggccgttcccaacagtgaatgggtgattgaggggctggagcacgtgcagctcctcacccacggtgaaggcattcttctagtaatgggcatctgggcccattatggcagatcttaggcttccactctgtggctggacatcagccggttttgtgggcaccttcaggcgtattttctgggg

SEQ ID NO: 6083 - DNA, 431 bp, Homo sapiens
  I.6083 (T99960)
  misc_feature (270)..(270): n is a, c, g, or t
  misc_feature (272)..(272): n is a, c, g, or t
  misc_feature (275)..(275): n is a, c, g, or t
  misc_feature (369)..(369): n is a, c, g, or t
  misc_feature (376)..(376): n is a, c, g, or t
  misc_feature (392)..(392): n is a, c, g, or t
  misc_feature (421)..(421): n is a, c, g, or t
  misc_feature (431)..(431): n is a, c, g, or t
atcaataggcacattccaatgagcaaaccccaggaatccacctgttctcatcttgccaacaatgctccttccacggaaactgaccctgtcctatttcctcgctttgatcattgcccagaaggaacagggactgttgagaaacagaggcagcgtgcagcctgaaggcatgcaccgtgcagaagaggatccctgcggctgcgggctcttttccaggcccaaggacaaggcggtgtgtgccgggttgatctgcactgctttagccagggatgntnctntcttaggagagacaaaccgctccaacgccaaacttgccctcgcaatttccaatcggcaaagggcagggttaggggccacagtttcaaacccaantggccantgttccacaaagaaangaggaaagttgggaattgcattggttttngccttgtttn

SEQ ID NO: 6084 - DNA, 393 bp, Homo sapiens
  I.6084 (T99746)
  misc_feature (4)..(4): n is a, c, g, or t
  misc_feature (44)..(44): n is a, c, g, or t
  misc_feature (240)..(240): n is a, c, g, or t
  misc_feature (251)..(251): n is a, c, g, or t
  misc_feature (305)..(305): n is a, c, g, or t
  misc_feature (320)..(320): n is a, c, g, or t
  misc_feature (363)..(363): n is a, c, g, or t
  misc_feature (374)..(374): n is a, c, g, or t
  misc_feature (387)..(387): n is a, c, g, or t
attnttttgatttttttttaacaatactgccctgctggcaacancacgatagtcacttgctcatctgaaaatgccttgcactttctttttcactagcttcgtgtatgacgcaaaacagaaatatttcaattacaggtgactaagagtaagaaaaatatacaactatatttaaaatacttaaattaacaagatagtacttttccattctaacaaaatatcatacattcagtttaaacaagngttaatatccngacacacggttttcaaaatacctggatgctaggttggaaaattggtggccctgngggctttcccagggntatttcttaattgggccaaactggtggttccaattttgagggnggtggtacccnccgtgctgggggngggccg

SEQ ID NO: 6085 - DNA, 452 bp, Homo sapiens
  I.6085 (T99745)
  misc_feature (1)..(1): n is a, c, g, or t
  misc_feature (378)..(378): n is a, c, g, or t
  misc_feature (425)..(425): n is a, c, g, or t
  misc_feature (434)..(434): n is a, c, g, or t
ntttcggcacagagcaaattcagaggatcttaggtgctggcttgtggagacaaaaggagggaaatgggtagagcctgtttgtcttgcttccccagagatagaatgtgaagacacgcgctagaaatcgcagtcctggccagagacgttatggtcattgtgagggactggtggcattgttcctttttgaggggctggggggactcaaattggtggctgttttcacacagatgtgttggtttgtggtccaacttctttatctgaaaaagccagtgagaaaacatttttgatttgatttttctaaactatctaccatatttttaagtgtaggcagctttgacttttgcaataacgtgggccaagtattctggattttctccntttggagggcaggaggttttaaaggtgttagggcctgtttacacttngttttgatnacccttttttccatggac

SEQ ID NO: 6086 - DNA, 520 bp, Homo sapiens
  I.6086 (T99196)
  misc_feature (5)..(5): n is a, c, g, or t
  misc_feature (267)..(267): n is a, c, g, or t
  misc_feature (269)..(269): n is a, c, g, or t
  misc_feature (290)..(290): n is a, c, g, or t
  misc_feature (314)..(314): n is a, c, g, or t
  misc_feature (328)..(328): n is a, c, g, or t
  misc_feature (378)..(378): n is a, c, g, or t
  misc_feature (509)..(509): n is a, c, g, or t
ttttnaatcaaaaataaaaataaaattcatttattgaaaagaaaaagcttaacatacgatccatgtgcaaaccccaaaacaggatctacgaactctggcatgatccacatcgctacacataccatgctggaagtgcacatccacacaggcacgtaacatacacagtactgtctagttatcaacacctacagattgggttgatttttcttcacacaccattgacatgttttacaataggaggttacccaattttattatccactgaangnggcataggcttcccccaggantcacttttggattttaaacccaantaacacaggtggantgacagggggcacccctgggcaccctattatcctggcttaccccttcccnttacttctggggataaccctccctaccagggcaccatttatggtcctctggggcaggggggggggacgggctcggtgggggggcacaggggggaaggggggagggggattgttacggggggctgatggttntcggggggggg

SEQ ID NO: 6087 - DNA, 428 bp, Homo sapiens
  I.6087 (T99195)
  misc_feature (338)..(338): n is a, c, g, or t
  misc_feature (344)..(344): n is a, c, g, or t
  misc_feature (406)..(406): n is a, c, g, or t
  misc_feature (413)..(413): n is a, c, g, or t
  misc_feature (418)..(418): n is a, c, g, or t
  misc_feature (425)..(425): n is a, c, g, or t
ctcagatttctcccttcctagaacattctctctgtttagcactaatgttcacctcgtattttttggaagtgcaaaaatctcaatttgtgtctgtttacagctctctctcctcactgctcacagcaaggggttctgtatcagtggatttcattttgtagctgctgaggatgttaagggcaagcctcagcatctgcccccgctgggtgcacaatgctgcttcctcgaggggaaggacacaggagtccaagtgggcagggacttgagggttgggcttccacttctggccttaggaaggtttaatttttcccaaaggtacatttaccaaatctctgaagggnccattngggggggaaaagggaaggggggtttggggttttgtccttttggaaattaccggggttaatancttttanggacnattaagntcc

SEQ ID NO: 6088 - DNA, 328 bp, Homo sapiens
  I.6088 (T98988)
  misc_feature (297)..(297): n is a, c, g, or t
atttctttatgcaaaccaattaaaaaaaagtacccagactggtctgatgtgagctaatcttttgtctgtgtgtttctgcaatatcgtgtggtaaaaatcagtgttaaaattgatgattctgaggaataagatctaaagatatcaaagatttgaatgttactaacgagagggaaggaaagtattaataggaattttcagtgaatgacagtggaaaatattgtacttcaagtttatggaaatccttttttttcttttggttattcagggtctgatttcatattcagtccgccaactttngggcctaatctgcccacctgattttggtaac

SEQ ID NO: 6089 - DNA, 336 bp, Homo sapiens
  I.6089 (T98940)
  misc_feature (33)..(33): n is a, c, g, or t
  misc_feature (36)..(36): n is a, c, g, or t
  misc_feature (335)..(335): n is a, c, g, or t
cagaatcttgctccaggatcaagtgcagtggcnaantcatagctcagtgtaaccctgaactcccgggcttaagtgatcctcccacctcagccacctgagtagctgggactaaaggtgtgtgccaccatacccagctaagattcatttttatagtctaattattttatattagtttttaacacaattgcagattttgcatgtttattctaaacaacaatttgccagttactggaggataagactgttaaactgggcaattttctatataaaaggttactatattaggaatgggcagcaacagccagaggatttgggggataccaatctttaaatgnc

SEQ ID NO: 6090 - DNA, 507 bp, Homo sapiens
  I.6090 (T98491)
  misc_feature (428)..(428): n is a, c, g, or t
  misc_feature (452)..(452): n is a, c, g, or t
  misc_feature (461)..(461): n is a, c, g, or t
  misc_feature (470)..(470): n is a, c, g, or t
  misc_feature (480)..(480): n is a, c, g, or t
ggccatcctattccagtgaaagcagagaggggtgtctcagggtgggcatcccagctagggtggagctggcttggtctggaaatctgtgatcttgaccatgtacagcccccacagacttgggcttgtttcatgcatactcggtccctgcgggcttcctactctctgaacccaggggtacgaagatccctttcagaagcagagtgagtttgggagcactgagaggattagggggcctttatcccgcataattgagtcccctcgatccagagggttggggtgcttcaccagcctgccttgcccttttgcttgagggccacaggggctcctctccagggggcttgcaccttcacagagggcttccgtgagcacttgggatgagggggggtgaattgaattcccttgaggtccattttggggagggtgacttnccaaccagaaatttttcaggtttnggagttttnaagtttttnccagcagggnacttaatttcgttgggtttttaaggag

SEQ ID NO: 6091 - DNA, 331 bp, Homo sapiens
  I.6091 (T98436)
  misc_feature (118)..(118): n is a, c, g, or t
  misc_feature (195)..(195): n is a, c, g, or t
  misc_feature (297)..(297): n is a, c, g, or t
  misc_feature (305)..(305): n is a, c, g, or t
  misc_feature (321)..(321): n is a, c, g, or t
agctcctgacctcgtgatccacccaccttggcctcccaaagtgctaggattacaggtgtgagccaccgtgcttggccaacccacccaaattgtgtaccctacaccatcctagtgcttnggagccaacacccactcacaggaggctaagggcaagtttaggtaactcttaacaccacgaattagttgcctgctggnaaaactttcaaactccaaggcctggaatttctgggttgggagttcaccttcccagatgggattcaggggatttcatttcaccccccttcattccagtgcttnacgggagncttttgttgaggggtngcagggctgg

SEQ ID NO: 6092 - DNA, 308 bp, Homo sapiens
  I.6092 (T98342)
  misc_feature (41)..(41): n is a, c, g, or t
  misc_feature (83)..(83): n is a, c, g, or t
  misc_feature (90)..(90): n is a, c, g, or t
ctgtcattttagatactcttatctaggataggaaatatacntcgtttcctgtctctccactggccatgagctcatcacacctncaatttncttcttcagggccaacacgaggaaatacgttgaacaccggctgttctggaccaggccactcaaaggccaaggcactcatcaagaggtatatattaaatgtattaaagctttttcttatatcagtaaggaagagaggaggaaggaagagagggaggaaggaagggagaggaagtttaacatatcttgtccagggttttccacaaagtgattttgttgtc

SEQ ID NO: 6093 - DNA, 544 bp, Homo sapiens
  I.6093 (T98336)
  misc_feature (7)..(7): n is a, c, g, or t
  misc_feature (9)..(9): n is a, c, g, or t
  misc_feature (18)..(18): n is a, c, g, or t
  misc_feature (19)..(19): n is a, c, g, or t
  misc_feature (27)..(27): n is a, c, g, or t
  misc_feature (30)..(30): n is a, c, g, or t
  misc_feature (33)..(33): n is a, c, g, or t
  misc_feature (35)..(35): n is a, c, g, or t
  misc_feature (40)..(40): n is a, c, g, or t
  misc_feature (45)..(45): n is a, c, g, or t
  misc_feature (62)..(62): n is a, c, g, or t
  misc_feature (75)..(75): n is a, c, g, or t
  misc_feature (76)..(76): n is a, c, g, or t
  misc_feature (77)..(77): n is a, c, g, or t
  misc_feature (81)..(81): n is a, c, g, or t
  misc_feature (82)..(82): n is a, c, g, or t
  misc_feature (85)..(85): n is a, c, g, or t
  misc_feature (86)..(86): n is a, c, g, or t
  misc_feature (115)..(115): n is a, c, g, or t
  misc_feature (404)..(404): n is a, c, g, or t
  misc_feature (426)..(426): n is a, c, g, or t
  misc_feature (443)..(443): n is a, c, g, or t
  misc_feature (483)..(483): n is a, c, g, or t
  misc_feature (490)..(490): n is a, c, g, or t
  misc_feature (497)..(497): n is a, c, g, or t
  misc_feature (512)..(512): n is a, c, g, or t
  misc_feature (520)..(520): n is a, c, g, or t
atttggnangagtaaatnnttaaaatnatnacnangattntgacnttatggactttgaaggncagatgttgtgcnnnattnnttnngtgtcacaagacctggcacatagacgatntcaataaatattatttgaaggagtgaatgatggtgacatggttcttaggagttaaaatgagaaaccccaaggagcccgaaagcatgtctctacggggaaaggttagagagcactgactcaaacccatcgtctccaattatgccagttttaatgaggaagcaagccccaccttggaccattatttaagccagagttatccccaataagcattttcctacccatgagtggtaggtttaagtagccatttgagtcatgttagttgaaagtattgccccttcttccatacccnttccaatgcctcttgggtaagnccaagaggaagcttttngttatagccttttttttttacacctttcacccttgttttntccaggnagggccngcccccggttccagngcttttgnccagccaaggtttccccgttaagg

SEQ ID NO: 6094 - DNA, 351 bp, Homo sapiens
  I.6094 (T98287)
  misc_feature (5)..(5): n is a, c, g, or t
  misc_feature (6)..(6): n is a, c, g, or t
  misc_feature (7)..(7): n is a, c, g, or t
ttctnnntttcacaagatatttattaattacaaagggaaaataataactgtacagtggagaaatttggcagatactgccttaaccaaggaattggctgatcactaagattaagacaaactgttgttatgagtgggtgtggtaatgtacctatagtcccagccactcaggaggctgaggtggcaggattgcttcagcccatctatttgaggctgcagtgagctatgggagtgcactccaacctggggcaacacagtgagacctcatttcttaaaaaaaggaaaaaagaagccttctggatacccatgtacttagggagggacacaacatcactttttgtgttattctttgac

SEQ ID NO: 6095 - DNA, 486 bp, Homo sapiens
  I.6095 (T98281)
  misc_feature (18)..(18): n is a, c, g, or t
  misc_feature (101)..(101): n is a, c, g, or t
  misc_feature (103)..(103): n is a, c, g, or t
  misc_feature (129)..(129): n is a, c, g, or t
  misc_feature (380)..(380): n is a, c, g, or t
  misc_feature (389)..(389): n is a, c, g, or t
  misc_feature (396)..(396): n is a, c, g, or t
  misc_feature (418)..(418): n is a, c, g, or t
  misc_feature (429)..(429): n is a, c, g, or t
  misc_feature (446)..(446): n is a, c, g, or t
  misc_feature (451)..(451): n is a, c, g, or t
  misc_feature (463)..(463): n is a, c, g, or t
  misc_feature (483)..(483): n is a, c, g, or t
gagacggggtttcaccantgttggtcatggctggtctcgaactcccaacctcgtgatccgcctgcctaggactcccaaagtgctgggattacaggcgtgcncntgtgcccggccattatttcatttctntactggatatctttgcttgctaaagtctctgaatctgaggtctgctctttctgacaaacaagggtgagaggtgttaaaaataggctattatcaaagactttctcttgacttaccagaggcattgaaatgggtatgaaggaaggggacattactttcactacatgactcaatgctacttaatctacccactcatgggtaggggaaaatgcttattgggggataactctgggctttaaataatgttcaagggntggggcttncttcccncattaaaactgccatattgggngacggaggggntgaggcaggtgctctcnaaccntttccccgtagnagacatggctttcggctccntgg

SEQ ID NO: 6096 - DNA, 367 bp, Homo sapiens
  I.6096 (T98075)
  misc_feature (267)..(267): n is a, c, g, or t
  misc_feature (304)..(304): n is a, c, g, or t
  misc_feature (320)..(320): n is a, c, g, or t
  misc_feature (346)..(346): n is a, c, g, or t
acttaataaaataaaataaaataaaataaaataaaataaaaatggatggtgtcccataaaaagcactagacatttccatctccatctttgaactatgctataccttccagaagggatgccaactagtacatgaaaactatctagaaacacagataggaccaagcttcccttctctgaattcttacaggcatatgtttgaagactgctgtgtttgtaatctctctctgcaactcaaatgttttggaacacttgtgatggcaccacagnttctttacagggggggattaaacatggattgggggtnttgggttacccttttnggggggctttttactttcggttggtnttttttaactttgttggggac

SEQ ID NO: 6097 - DNA, 387 bp, Homo sapiens
  I.6097 (T97997)
  misc_feature (163)..(163): n is a, c, g, or t
  misc_feature (289)..(289): n is a, c, g, or t
  misc_feature (297)..(297): n is a, c, g, or t
  misc_feature (337)..(337): n is a, c, g, or t
  misc_feature (342)..(342): n is a, c, g, or t
  misc_feature (355)..(355): n is a, c, g, or t
  misc_feature (386)..(386): n is a, c, g, or t
ttattttcataaaattatttattccatgtttcaattttacaacagagattcagttcagtcatcattttttttcatggagttttactatttaaccttctgcctctgcatttttcttgtgggcatttctaccaagttcaattttcttggattaaatttattaggnctaacttttttcaaaatatttgattattcttttaatattcagtcaggtacaaaattttgctatctctgggatttaggtcaaagcccaatcttattttcacttggattatttcccaactggtaattntcaccggnggaacctaaataaaatctggccttccaaatccatttaaangggcngggccaacctatntttgggataccatccatcctacctagggggnt

SEQ ID NO: 6098 - DNA, 318 bp, Homo sapiens
  I.6098 (T97872)
  misc_feature (26)..(26): n is a, c, g, or t
  misc_feature (29)..(29): n is a, c, g, or t
  misc_feature (46)..(46): n is a, c, g, or t
  misc_feature (60)..(60): n is a, c, g, or t
  misc_feature (120)..(120): n is a, c, g, or t
  misc_feature (137)..(137): n is a, c, g, or t
  misc_feature (162)..(162): n is a, c, g, or t
  misc_feature (166)..(166): n is a, c, g, or t
  misc_feature (172)..(172): n is a, c, g, or t
  misc_feature (283)..(283): n is a, c, g, or t
  misc_feature (294)..(294): n is a, c, g, or t
tattcgtgtgatgatgcaggcggagntgnagtgatgccaccgcagnccaggcaatgcggngccaccaggagctgggacaggcgggagggattctcccttatacccctcagagcaatcttngcccctctgacgtcttnactttagacttctggtccccagagncggngagagnaataaatctttcttgttttaaggctccaacaaattggtgggtcacttgttacagcaaccacaggaaatgtatacagcttctgatacttctggaaaacctcacacagccaanggtacatcctnggtatagaggctcactctttactt

SEQ ID NO: 6099 - DNA, 304 bp, Homo sapiens
  I.6099 (T97856)
  misc_feature (6)..(6): n is a, c, g, or t
  misc_feature (16)..(16): n is a, c, g, or t
  misc_feature (32)..(32): n is a, c, g, or t
  misc_feature (49)..(49): n is a, c, g, or t
  misc_feature (159)..(159): n is a, c, g, or t
  misc_feature (165)..(165): n is a, c, g, or t
  misc_feature (174)..(174): n is a, c, g, or t
  misc_feature (182)..(182): n is a, c, g, or t
  misc_feature (193)..(193): n is a, c, g, or t
  misc_feature (222)..(222): n is a, c, g, or t
  misc_feature (252)..(252): n is a, c, g, or t
  misc_feature (269)..(269): n is a, c, g, or t
ttaggntcctgaaagnctcattcttagcaggnttgtgaagttctcatgntcctgtgaaggagaaaatggggggaggaagggagaaaaacaacaacaaacaaaagaacaatcctgggaaaaatcgatattggccacattactctgaaggtccacacattngtaggncgggtatgnaaagtggncttatgtatgntaaatagggttgctattattttcttctgnaggtgttaagttgtctgggcttcagtttgncagggcttttaaggaangcacagcttaggttttccagtggactcccaaatta

SEQ ID NO: 6100 - DNA, 416 bp, Homo sapiens
  I.6100 (T97849)
  misc_feature (125)..(125): n is a, c, g, or t
  misc_feature (141)..(141): n is a, c, g, or t
  misc_feature (183)..(183): n is a, c, g, or t
  misc_feature (197)..(197): n is a, c, g, or t
  misc_feature (323)..(323): n is a, c, g, or t
  misc_feature (349)..(349): n is a, c, g, or t
  misc_feature (359)..(359): n is a, c, g, or t
  misc_feature (388)..(388): n is a, c, g, or t
  misc_feature (395)..(395): n is a, c, g, or t
  misc_feature (405)..(405): n is a, c, g, or t
  misc_feature (410)..(410): n is a, c, g, or t
tgagttctaaccatttttttgtgtgtgtataatgccattctcttcctctgtgaagtgcctgttcggggtgttgctacgtttttgttttgttgtgttttctgttgtagtgtttacatttttcttgntcgattcctaagaggnactttaggggtactgaggtcacccagggtcatgtgttgcagnggaggtgtcacagngtgaaaactggtcttttccttggatactacctttaggattcatatttgggggaggaccttcggctaatcaggactacataggtattcacttttactttcttaggacccttttggttttccattccnttttataggtaaagtctaggccctcngggaatttanggttggttggaataggccaggaagggggnccccggngcctttttcnggggngccata

SEQ ID NO: 6101 - DNA, 335 bp, Homo sapiens
  I.6101 (T97767)
  misc_feature (4)..(4): n is a, c, g, or t
  misc_feature (57)..(57): n is a, c, g, or t
  misc_feature (136)..(136): n is a, c, g, or t
  misc_feature (226)..(226): n is a, c, g, or t
agtngcttatcagggcaaccttccccatctgggaacaatctagcagtcatgtaagangcacatgcccccacaattagtttgaactccatcctggaattgcagctggttgtgattctaaggtacaggcatgccaggngcctggatttgaatagtcagtgggattttgtcacttagtggaatggataataagccaaccaatggtcatcagtctcacacataaggagtncaggcttcgtagggtattacacagtacttttcttcaaaagcatttgcaaattgacttgatttcttctattgttttgaaatttttggaaaaccccaacatcttatcttct

SEQ ID NO: 6102 - DNA, 405 bp, Homo sapiens
  I.6102 (T97749)
  misc_feature (162)..(162): n is a, c, g, or t
  misc_feature (265)..(265): n is a, c, g, or t
  misc_feature (290)..(290): n is a, c, g, or t
  misc_feature (302)..(302): n is a, c, g, or t
  misc_feature (355)..(355): n is a, c, g, or t
  misc_feature (367)..(367): n is a, c, g, or t
  misc_feature (390)..(390): n is a, c, g, or t
aaactaagctgtgctttcttaaagccctgcaaactgaagccagacaacttacacttcagaagaaaataatagcaacctatttacatacataagccactttcatacctgcctactaatgtgtggacttcagagtaatgtggccaatatcgatttttccagggnttgttcttttgtttgttgttgtttttctcccttcctccccccattttctcttcacagggacatgaggacttcacaacctgctaaggaatgaggctttcagggnccctaactactaggggctcgtgccncaattcttgggnctcgagggggccaaaatttcccctataggtgaggtcggtatttaaattcgggnaatcatggtcangggctggttttcccggtggtggnaaattggtttatccc

SEQ ID NO: 6103 - DNA, 241 bp, Homo sapiens
  I.6103 (T97741)
  misc_feature (139)..(139): n is a, c, g, or t
  misc_feature (206)..(206): n is a, c, g, or t
  misc_feature (212)..(212): n is a, c, g, or t
  misc_feature (223)..(223): n is a, c, g, or t
  misc_feature (233)..(233): n is a, c, g, or t
gcagtctggtcttgaacccctgacctcaggtgttccgcctgcctcagtctcccaaaatgctaggattacatacgtgagccaccgcacccggccaaaatgtattattaatgtaagctacaataatcaaaggaatgttctnctgactcctgaaagcacaggaagtccaaaaaccaatgcaaggttttataaggagggggttttcagancaatangggaagggctnttcaataaangtttcggg

SEQ ID NO: 6104 - DNA, 190 bp, Homo sapiens
  I.6104 (T97445)
  misc_feature (28)..(28): n is a, c, g, or t
  misc_feature (160)..(160): n is a, c, g, or t
  misc_feature (184)..(184): n is a, c, g, or t
gactttgaacatttttataaattttganaataatgctccagaactcttgaaccagtctacactcccatcagcagtgatacatgcaccctcccatcccaccttagtgccagtgttactgactctccactagaagctgccctctgcctggactggttggcantgagttaacatttttgttcaaccntgattt

SEQ ID NO: 6105 - DNA, 279 bp, Homo sapiens
  I.6105 (T97436)
  misc_feature (5)..(5): n is a, c, g, or t
  misc_feature (9)..(9): n is a, c, g, or t
  misc_feature (14)..(14): n is a, c, g, or t
  misc_feature (27)..(27): n is a, c, g, or t
  misc_feature (29)..(29): n is a, c, g, or t
  misc_feature (30)..(30): n is a, c, g, or t
  misc_feature (35)..(35): n is a, c, g, or t
  misc_feature (46)..(46): n is a, c, g, or t
  misc_feature (92)..(92): n is a, c, g, or t
  misc_feature (156)..(156): n is a, c, g, or t
  misc_feature (166)..(166): n is a, c, g, or t
  misc_feature (181)..(181): n is a, c, g, or t
  misc_feature (187)..(187): n is a, c, g, or t
  misc_feature (201)..(201): n is a, c, g, or t
  misc_feature (209)..(209): n is a, c, g, or t
  misc_feature (219)..(219): n is a, c, g, or t
  misc_feature (227)..(227): n is a, c, g, or t
  misc_feature (237)..(237): n is a, c, g, or t
  misc_feature (242)..(242): n is a, c, g, or t
acganattncggancgaggaaaaatangnnaaaanccatctctgtntcctgatagattattaattcttcagctcattgctgcccttttaacnacttctctacactgcctcccattttaatatattgtcttccattttcatctgccaactgggatangcatatatanatttttaataatttnacactnatcatttttttctntttcatantgaccctttnttgccttntcctgtgttntaccnattgaccaattagaaaccaagtcttttttcttacctg

SEQ ID NO: 6106 - DNA, 414 bp, Homo sapiens
  I.6106 (T97353)
  misc_feature (1)..(1): n is a, c, g, or t
  misc_feature (2)..(2): n is a, c, g, or t
  misc_feature (3)..(3): n is a, c, g, or t
  misc_feature (5)..(5): n is a, c, g, or t
  misc_feature (6)..(6): n is a, c, g, or t
  misc_feature (29)..(29): n is a, c, g, or t
  misc_feature (179)..(179): n is a, c, g, or t
  misc_feature (314)..(314): n is a, c, g, or t
  misc_feature (321)..(321): n is a, c, g, or t
  misc_feature (373)..(373): n is a, c, g, or t
  misc_feature (402)..(402): n is a, c, g, or t
nnncnncttctcccggcactggctcccantttctaggcaccctgtaaggctctggtatacccagaatgagcaatcctaatccaatactggaatatctaaagaagcagaagtcttttctggggaggtcagcaccatccctcactgaaccatacacacactgaccacaaaggctgcaactnttacatggagtatctaatgaaatattgtgtttataatgaaaatataatgtaaaaatgtattcataaaaaggatttcaaggcacataaaggatactggacaggatgggacataggaagggacatggtggtaaaaanttaaaantaaaggtactttgtccgggggttttttggtttttttttttccctcccctccnggttttttcaccaaacctatcctttattnggtgggtaataa

SEQ ID NO: 6107 - DNA, 394 bp, Homo sapiens
  I.6107 (T97352)
atgctgaatcttctatggcacaacttgaacaaactctaaaactgaataattgctgaaacaatatgtttctatactagccactttaaattagaaaagtctctttaagctacaggtttatggttctaaaaagttccatgcactgcccagagctatttgtaaattaaatcgtttaaaataaagctctttaatactctataattaggtcttgtctctctgaacatgactttactgtaaatgctccttcttgactctcctattgtcccaaggattcctgaggaaggaaaggcagccggggggattaattcaacattattggctggcttcaggtggcactaaatcggctttaaggaggcaggcaaggactctggtggctctctggccccacaggttcccg

SEQ ID NO: 6108 - DNA, 408 bp, Homo sapiens
  I.6108 (T97328)
  misc_feature (343)..(343): n is a, c, g, or t
  misc_feature (387)..(387): n is a, c, g, or t
cagggttttagttgtctagtctggtattgaactcctggcttcaagcaatcctcctgcctcggcctcccaaagtgttgggattataggcatgagcaccatgcccagactaaacacattatttaaagagaagtaaactggcatcttttccttgaagagtaacgaaagctgggatttatgaagcattttgattgagctaacttttaagtatgtgccagtatacttcactatcaaaacgaagaccagaagagaattctagcccaaatcttttaatatagcatttcaaattaaactgtggggaatttaatcacattttccctccctatcaggaatgacagtgttgggncacaacatggcacaaagaggtcccaggtaatatttttgcaggangtacttcaagaggggaggcaa

SEQ ID NO: 6109 - DNA, 307 bp, Homo sapiens
  I.6109 (T96797)
  misc_feature (304)..(304): n is a, c, g, or t
tctgattgcagaactagtaggtcctaatgttaaaacacctggaaagcatagaaaagcaaaagaataaaagaattctgtcaaactggatatggttttgaatcatgtttttctgttataccatgactattttcctttgtcattcaaactgcttcagaattgtttaaaattaaattgacaaatttgaggacacaaaacctttctaggaatatttatctttgatggatggaaaactcttggggaaggactttgttttaaaggaaatttcccctaagtattggggagtcccataggggtttggtggacnttg

SEQ ID NO: 6110 - DNA, 245 bp, Homo sapiens
  I.6110 (T96681)
  misc_feature (6)..(6): n is a, c, g, or t
  misc_feature (7)..(7): n is a, c, g, or t
  misc_feature (137)..(137): n is a, c, g, or t
  misc_feature (184)..(184): n is a, c, g, or t
  misc_feature (222)..(222): n is a, c, g, or t
ttcaannaaatattttcatagctttactgcagttaatacagcaattcataaagcaagaagaaatgtagtaaaaacatttgtgataattggcatatttctccaatcctatctggggaacaggcttaaaaagtgagcantagggacaggcgcggtggctcacacctgtaatcccagcacgttgggnttacaggcatgagaggagccacagggcagtatttttantacaagaaaagtaaccttaacaa

SEQ ID NO: 6111 - DNA, 227 bp, Homo sapiens
  I.6111 (T96015)
tggaagaagaccaaagggatcaaaagttcaaaagcaaatggggttccactcccaggtaatgatgtcacctgatgaacatgtagaaggtcctttatatttctctcgggttattaactattcttgatacagcatcatatccaacaaaatgtagcttcacttttgcttacacgtgttctgttctcagaatgcccacacaagcacacgcggtgaacgttcacagcagcatc

SEQ ID NO: 6112 - DNA, 425 bp, Homo sapiens
  I.6112 (T95986)
  misc_feature (356)..(356): n is a, c, g, or t
  misc_feature (382)..(382): n is a, c, g, or t
  misc_feature (392)..(392): n is a, c, g, or t
  misc_feature (425)..(425): n is a, c, g, or t
agcaacccaggaaagatgtgaattctgtggcattaaaattcagcaactcgcaaaatttggaaaccttaacatttcacttagcaaaatacatatatagtaatgtaaaggccctgagtcttgggttttcatttcaaggtgagcatttgatattggagctgggttatttcttgttttgttctctaatattgtcagaagtaatcctactccttggtttcaacatttcccctctccttttaattgggacacccctactcgtttaccaccagcttgaacacatcacaggtaattggcaagcaattaactaaaatagtagttgtgcagctatggaactgtgaggcagcttgctcttttcccancctgggcaattgggttgttcagtttntttccctccntctggaacccagtaacctcacccacgttttccn

SEQ ID NO: 6113 - DNA, 325 bp, Homo sapiens
  I.6113 (T95909)
  misc_feature (4)..(4): n is a, c, g, or t
  misc_feature (5)..(5): n is a, c, g, or t
  misc_feature (273)..(273): n is a, c, g, or t
  misc_feature (278)..(278): n is a, c, g, or t
  misc_feature (293)..(293): n is a, c, g, or t
  misc_feature (303)..(303): n is a, c, g, or t
  misc_feature (311)..(311): n is a, c, g, or t
cccnnctggtttcaaactcctgacctcagatgatccacccacctcagcctcccaaagtgctgggattacaggcgtgaggcaccacacccagcccagatgagcttcttttcttgtttattgccaaataagagtcctttgaattatacatcatgttgttttgagccattcacatgctgatgaacatttgagttgtttttcactttttgactattattgatgctgctgtgaacgttcacctgcgtgtgcttgtgtggggcattctgaggaccagancacgngtaagcaaaagtgangctacatttngttggganatgatgctggtatc

SEQ ID NO: 6114 - DNA, 366 bp, Homo sapiens
  I.6114 (T95888)
  misc_feature (189)..(189): n is a, c, g, or t
  misc_feature (247)..(247): n is a, c, g, or t
  misc_feature (348)..(348): n is a, c, g, or t
ctgtatttcttctgtaaattgccagtttcttgactggattgtttaccttttactcacaggtttgtatattctggaacattctttgtctacctatggcaaatagattctcccagttggccacttttttacgacatcatttgtcacaaagatgtttcacattttaatatatttgctatctttcaaactttnccattctggcatctaaatcttctaagtagcttagaaaggccttccccatctgatgggntactaaaaatattattctatgacagtaggacacaaattggggttgtttgccctatgtgttatttctcctcttctctcccaggggctggactggatcccaancacaggtccatacccgga

SEQ ID NO: 6115 - DNA, 425 bp, Homo sapiens
  I.6115 (T95815)
  misc_feature (347)..(347): n is a, c, g, or t
  misc_feature (377)..(377): n is a, c, g, or t
  misc_feature (412)..(412): n is a, c, g, or t
  misc_feature (418)..(418): n is a, c, g, or t
cagggttttactatgttggccaggctggtcttgaactcctgaccttaagtgatccacctgcctcggcctcccaaagtgctgggatcacagtgtgagccaccacacccggccacagaaggaaggaatttttaaatgaggaaactttacagagttttctggaatgaaataaagatcctgtatcaacttcaacacttgcattttattttccttaatcattacataacacattcaaggcaggaatgaatatccgttttgataggtggggaaactgagactgagggaggcaaagtggtctgcacagggccacaatcatgaggcactaagccagccacgggcacagctaggantccagccccaagtctttctcgttctgaagncgaggttctttgtgttttccctacttcacagcaancatgantgctggg

SEQ ID NO: 6116 - DNA, 411 bp, Homo sapiens
  I.6116 (T95814)
atttcggcacaggaaagtggctctcttagaatgaaatatcttagaatgaatttgtgtgagtcaggggcaggtgaaagtcattttgcaggattctaatggcttctccatacacctctctccgaagaaagaaaggacttggggtgttttgctgactcctggcagcattcttggcccaatgtattctgggtttgctcttccccgttggagagccctttgccagagaacagccgctggttgttgagccaggaagcttaccatgtgagtgcagcttgtgtctgaagaggctgggccagtacagataatacgaatcacatttcactggcttttttgatcggctgttttagctcctgggcagcttgttcccagcatttcatgttttgctggttgagtagggaaacacaaagaacctcg

SEQ ID NO: 6117 - DNA, 432 bp, Homo sapiens
  I.6117 (T92041)
  misc_feature (205)..(205): n is a, c, g, or t
  misc_feature (232)..(232): n is a, c, g, or t
  misc_feature (402)..(402): n is a, c, g, or t
  misc_feature (408)..(408): n is a, c, g, or t
  misc_feature (413)..(413): n is a, c, g, or t
aaaccattaaggcaaaactgtaccctgaaattaactctgtacattcatcagtcttacagtaggacatcccaaacacagaagttcccatatattcaggatataaatcaatacatgtggtcagttcagtctcctaataggaaaacgaagacccaagatttttttttaaaattaaggttattttatagccattttctaattgcctggnaccaatcagttcatgtgactagaaaanttactttcgctcttctctgcacatccttgattccggagtcctgggatgcccgctccccccaccagggagagaggtatgaagttggagagagggatgctggggcctgtgtggcagttcctactttgggaactcacctttttagcacaaataagaagctgtaaggcccaaantactgngggtntaaggccctcactagtagg

SEQ ID NO: 6118 - DNA, 486 bp, Homo sapiens
  I.6118 (T91980)
  misc_feature (2)..(2): n is a, c, g, or t
  misc_feature (3)..(3): n is a, c, g, or t
  misc_feature (5)..(5): n is a, c, g, or t
  misc_feature (38)..(38): n is a, c, g, or t
  misc_feature (93)..(93): n is a, c, g, or t
  misc_feature (96)..(96): n is a, c, g, or t
  misc_feature (147)..(147): n is a, c, g, or t
  misc_feature (158)..(158): n is a, c, g, or t
  misc_feature (168)..(168): n is a, c, g, or t
  misc_feature (196)..(196): n is a, c, g, or t
  misc_feature (221)..(221): n is a, c, g, or t
  misc_feature (243)..(243): n is a, c, g, or t
  misc_feature (264)..(264): n is a, c, g, or t
  misc_feature (284)..(284): n is a, c, g, or t
  misc_feature (322)..(322): n is a, c, g, or t
  misc_feature (353)..(353): n is a, c, g, or t
  misc_feature (359)..(359): n is a, c, g, or t
  misc_feature (368)..(368): n is a, c, g, or t
  misc_feature (379)..(379): n is a, c, g, or t
  misc_feature (400)..(400): n is a, c, g, or t
  misc_feature (408)..(408): n is a, c, g, or t
  misc_feature (421)..(421): n is a, c, g, or t
  misc_feature (456)..(456): n is a, c, g, or t
  misc_feature (479)..(479): n is a, c, g, or t
gnngnggtttttttttgtaaaacccttccatctgtctnccctttggacataactcaaataggagcacacatctcatcaaatcaaatgtgggtnctntcaaaaagtctgccaaaatatcatgccatttgctttttttaaaaagaaganttaaaatcagntttaacaaanttagttatttgttttgttgcttttcttnccatccattacagaaacatagaccncaatttactacatgcaggtttntacagtggccttctaggggtnttcccaaattaccctaaggntaaactaggataggcacagttttactggggggcaaaanttaggcaggtaggaggaaaggaaacccattncagggngggaccagnggaggaacccngagggcttcttaggctcctgnaacccccntagggggccaggnaaccccgggggtttaggggggcaattacccccatntgggcctttttctcttctccctnccggggc

SEQ ID NO: 6119 - DNA, 184 bp, Homo sapiens
  I.6119 (T91977)
  misc_feature (2)..(2): n is a, c, g, or t
  misc_feature (5)..(5): n is a, c, g, or t
  misc_feature (55)..(55): n is a, c, g, or t
  misc_feature (83)..(83): n is a, c, g, or t
  misc_feature (159)..(159): n is a, c, g, or t
tnacngcttcaacacatttattgggtggtatggaaagctaccaatttgagtgganccctagcaagacagtgctctgcagcaanaccctgctgggaatgcaaactgtcttgctgtccggccttgtgtctcagcagatccaatgctgctagtgtccctggnagataaagatgctgtgtgaagtctt

SEQ ID NO: 6120 - DNA, 386 bp, Homo sapiens
  I.6120 (T91946)
  misc_feature (106)..(106): n is a, c, g, or t
  misc_feature (281)..(281): n is a, c, g, or t
  misc_feature (346)..(346): n is a, c, g, or t
  misc_feature (383)..(383): n is a, c, g, or t
tttttggcttaaacaatagaaatttatttcttacagttctggaggctagaagttcagaatcaacgtgctggcccatccagtttctggggagggaccacctcctggnctacagatggccatcttcttgttgtattctccagggaattggctcactcaattatggaggctgagaagtcccacgatctgccatcttcaagctggagaaccaggaaagccagtgaagtagctcagtctgagtccaaaggcctgagagcctggggcaggattcctgggtgcaagtntcagagtcccaagaccagagaacctgggggtccttgatgtcctatgggcagggaaaagaaagttntttcagctccagaagagagagagtgaatctgattttnttc

SEQ ID NO: 6121 - DNA, 282 bp, Homo sapiens
  I.6121 (T91902)
  misc_feature (278)..(278): n is a, c, g, or t
agacgagtcgttttaaaaggtagctttgaaaaacaaaaaaggatttaaaattcaaagactttgggaaaattcaacttaaccaataacatgagtaacgactattactatttcctgagtccttaccatatgccaaataccgttgtacattgtacctgcttcacataaattatttcatctcattctcacaacattctgtgaagtgcgggtactttattatctatccctgtttgccagataagggagctgaggacttcatacagtgacttacaagttcgggncagc

SEQ ID NO: 6122 - DNA, 472 bp, Homo sapiens
  I.6122 (T91883)
  misc_feature (39)..(39): n is a, c, g, or t
  misc_feature (319)..(319): n is a, c, g, or t
  misc_feature (409)..(409): n is a, c, g, or t
  misc_feature (459)..(459): n is a, c, g, or t
  misc_feature (472)..(472): n is a, c, g, or t
cattcactcttttccaaagctaagctggctgctagcaanggctcacattgtgatgttaggaaaccaaatgcaggcagagaaaatgaaaccttactccatctggattccaaagcttttatctgacatggagttcccctcctgacttcagactgtgggcagcagctctggctgttccagtgctcttaaaaacatgcccaaagcagggacattccccccatcctctagaaatctgggatcccaagagaagcctgaggaaagtcatttcctcctgatgaaacttaattttccccatctgcaaattggaggttacttcctgggntgtttctctccttctttgcccctgttcacaagtctaaatattccccacctgaggactgggaagctatctcactctttgtttctgaagggnccctgcatgggggtagggggcttcaatgggggctgggttgggaggatctnccagaggattagn

SEQ ID NO: 6123 - DNA, 388 bp, Homo sapiens
  I.6123 (T91813)
  misc_feature (369)..(369): n is a, c, g, or t
  misc_feature (376)..(376): n is a, c, g, or t
  misc_feature (387)..(387): n is a, c, g, or t
aagctttatctggagtgggggaatgagacagtctggatttggatgttagttctgctaacatttgggaagtgttacttcctcttggtctcagttttctcatctgtaaaatggggataataactgccacctacctcatggagttgctttgaagattaaatgaaggaacacatgaatgtgtgtaaaataatcctgacacatagtaagtgttcaatagccattactgttacctaaggctaggtaaggccagctggttgtcagtttctgacctctgctgtaggcgaaaatgatctgtgggaaggcaggttagaaaaatggccaaggcttttggctcctgaggcagactgcatggggttcgaattctgtttcccngtgtttnctgggaggctnt

SEQ ID NO: 6124 - DNA, 456 bp, Homo sapiens
  I.6124 (T91795)
  misc_feature (207)..(207): n is a, c, g, or t
  misc_feature (209)..(209): n is a, c, g, or t
  misc_feature (335)..(335): n is a, c, g, or t
  misc_feature (417)..(417): n is a, c, g, or t
  misc_feature (440)..(440): n is a, c, g, or t
gtggagtgtgggattgggctaggggaaccagatgctcagccagccactgagctgggcagctgacatcctttcagggcaagtggcaatccatttcttcatcagccaggaagggcactggtgttgaggccgacatacttatcaagaacagtaactaccatggtttccagtgctttcatgaaacctcagacatgtggccttctggcaacnantctggcaatttcatattgtggggagcattcactgtatccctggggggctgcggctctctcagtttgcagggggctgggaccaaggaaaggaagggcattttcagatttcttatgggggcacagatnttcttacaggaagtttattgatggccattgaaatactttcgagggagatgaggggagggcttgctaatcttctcaggaattncaaagtgatttttggggaatatngaggaatttcttttgg

SEQ ID NO: 6125 - DNA, 210 bp, Homo sapiens
  I.6125 (T91150)
ctaagcatggtggcatggaccaatagtcccactacttggaaggctgaggagggggatcgcttgagcccaggatttcaaggctgcagcgagctatgatcatgctacctacactccagctcgggtgatggagcaaggccccatctcaaaacaagaaggaaaaaactgccagggtgtggtggctcctgctacaatcccaacactttggggagt

SEQ ID NO: 6126 - DNA, 425 bp, Homo sapiens
  I.6126 (T91086)
  misc_feature (411)..(411): n is a, c, g, or t
  misc_feature (417)..(417): n is a, c, g, or t
ttatttagtttaataagcatgtggtttaataaggacacactctctctctctctctctctatatatatatatatatatatacacacatatatatatgtaaatatatacgcggagggagcatattctcagagggtgggcagaagggccagggctcatcttacttttaaaagagaataataaggaaaataatctggtcaattccgctgttgctgtttgtatttttttaaaatccaacacatttgaaaccttacatttagccaacactacccaaaaaaaaggtacatcctgtctctggaaatacccatctctggggatgtcaggaattgggaggtaatttttttcaggaaccggtgaccgggtcatgccccaattgccctcccccggaggggtatccaaggccacaccagtcctngggggncaccctat

SEQ ID NO: 6127 - DNA, 391 bp, Homo sapiens
  I.6127 (T91035)
  misc_feature (280)..(280): n is a, c, g, or t
ttttaatgatgaaacagatgatattgattttgtcagttatttcttcaaatctaaaatgctagtcaacaatatgcaacaaatgtttactaacaaagaaaaaatacccaacatggacagtttaatgggatattccagcacaaaagctggaaaaccaaagagttagacccccgatatgagggttaacaccaaataagcctgttgtacaggaggggacattaaggaaatttgcacaaactaaacttggcactgggtgggagtacagggaacttcctctgaggantttgaactgcaagcggggcactcgccatgttttaggggctgaattcacacagcatgggtcccaaaatcccttcaggcaggggaaatcatgtttaaagtggggtctccgggt

SEQ ID NO: 6128 - DNA, 416 bp, Homo sapiens
  I.6128 (T89979)
  misc_feature (2)..(2): n is a, c, g, or t
  misc_feature (3)..(3): n is a, c, g, or t
  misc_feature (350)..(350): n is a, c, g, or t
  misc_feature (389)..(389): n is a, c, g, or t
  misc_feature (413)..(413): n is a, c, g, or t
tnnaagttttggtggagatgttgccccggctggtctcaagctcctgagctcaagcgatccacccacctcagcatcacagagtgcagggattacaggcatgagcaccaagttctgatcaacggtactaaccgcagtttcaggcatccactcggggtcttggcacacattccccacggataggggaggatggctgtatcactccttaagagcaacaggcagccagggaccccagctcaacacccaccgacacatgatgtctactgtgttctgaacatgcataagcatataatttgaactgcattgttagccttcagggaaaggggcaccagggagctgtgcttggccagggnacctagatccatttacttgtttcaaaaccaacccagggngctgagcttacttgaggcttcagnctc

SEQ ID NO: 6129 - DNA, 437 bp, Homo sapiens
  I.6129 (T89522)
  misc_feature (363)..(363): n is a, c, g, or t
  misc_feature (400)..(400): n is a, c, g, or t
ataccctgtatcgaaaatttaaaaaaaaaaaaattgcatctgtactgaacacccaacacaaaacagggcaaaaagacttcataaaactgccatttgcatcttttaatgaagggtaattctgtgaattctgtgagaaatcagatatccacagatctttaatggcactgcactttgctcattttattccatttatcttcccatctcccgaagtagaaacaataatatcaaacagcttaaaagtacctacctgtgcatgatactgtcaagacaaggggtccccaaactctggggaacaatcagtaccagttcgtggcctgttaggaactgggccacacagcaggaggtgagcagccggctgaggtncaggaattagaggcctgagctccgcctcctgttcaantcagctgctggctttaggtttttcttagggagcctgg

SEQ ID NO: 6130 - DNA, 286 bp, Homo sapiens
  I.6130 (T89435)
  misc_feature (135)..(135): n is a, c, g, or t
  misc_feature (263)..(263): n is a, c, g, or t
  misc_feature (268)..(268): n is a, c, g, or t
atttgcacctactctgtaacctaactgcgatttataaaatgaaacaatctcttctaatttggcacttgataggtgctttgactttaaaaggcaagtgtatttttctgtcacgaatatcttgtcattctaaaatangtaaaaacaatggattgatgaaacttcttcactgcttttttctttgtgtataacaaatacattgatattttactggcataaaatgtgtatttttagttgagtctttaaattattgctcagtgtatttngtttnattttaagccattattac

SEQ ID NO: 6131 - DNA, 324 bp, Homo sapiens
  I.6131 (T89340)
  misc_feature (288)..(288): n is a, c, g, or t
  misc_feature (312)..(312): n is a, c, g, or t
  misc_feature (323)..(323): n is a, c, g, or t
ctgtcagtctttcccaactaaaccgtgagttccagtatgtctggcagcacgtctgtcttgttcttggtgtattcccattactgaatccccaccaaccagcccaaataaggccctggcacaaagtaagctctccatttttgtagaatgaatgagtgaataaatggaggacactcaagcctcatgttttctctttctgacacatacctgtgctccctacgaccccaccctcaccatcacacccttaatagtggagacttagtgtgggtactgggctttttcaaacagggnattatgtgggccctaggacagggncatttcccttnc

SEQ ID NO: 6132 - DNA, 311 bp, Homo sapiens
  I.6132 (T89275)
  misc_feature (277)..(277): n is a, c, g, or t
  misc_feature (282)..(282): n is a, c, g, or t
ttcctaatctcaatgttctttttgtcttgttttctaatccgtttaatttttatattttctcattacagtgaactgccttaaatgttttctagcataaggcatataaataacgtattaagggtgacagcagcaatatgcataaaataatatggctagtaggcagaaggtcaactacttctaggaaagaaaagaggggatttttgaggtgggtcttgaggaataagtggagtgtcacctgatagaaaaggcaggaaaaggcaacctgtgcagattaagngagangtcctcattgtctctcaccagggccactg

SEQ ID NO: 6133 - DNA, 355 bp, Homo sapiens
  I.6133 (T89020)
  misc_feature (329)..(329): n is a, c, g, or t
  misc_feature (349)..(349): n is a, c, g, or t
tttttttatccattctttcaatatccaccttcaatttgggatgttgatttattcaatttagtttatttacagatgaagtaggatttgcatctgttatttgctatttattttctatgtgccttatttttaaaaatttctttattcatccattcctgtcttttgtgattgttaaatagattattttctaacatagttttaaaattccctttttctctttctatattttttgttaagctatcaaataattttataattattgcttatacaattgtatttaaaagagatagaacaagaaatgagtaacaaacagaaagatattgacctaaggncaatgtaggtaacatttccngggagt

SEQ ID NO: 6134 - DNA, 333 bp, Homo sapiens
  I.6134 (T87766)
  misc_feature (3)..(3): n is a, c, g, or t
  misc_feature (4)..(4): n is a, c, g, or t
  misc_feature (39)..(39): n is a, c, g, or t
  misc_feature (43)..(43): n is a, c, g, or t
  misc_feature (141)..(141): n is a, c, g, or t
  misc_feature (149)..(149): n is a, c, g, or t
  misc_feature (174)..(174): n is a, c, g, or t
  misc_feature (177)..(177): n is a, c, g, or t
  misc_feature (196)..(196): n is a, c, g, or t
  misc_feature (198)..(198): n is a, c, g, or t
  misc_feature (204)..(204): n is a, c, g, or t
  misc_feature (225)..(225): n is a, c, g, or t
  misc_feature (243)..(243): n is a, c, g, or t
  misc_feature (245)..(245): n is a, c, g, or t
  misc_feature (247)..(247): n is a, c, g, or t
  misc_feature (258)..(258): n is a, c, g, or t
  misc_feature (262)..(262): n is a, c, g, or t
  misc_feature (267)..(267): n is a, c, g, or t
  misc_feature (272)..(272): n is a, c, g, or t
  misc_feature (279)..(279): n is a, c, g, or t
  misc_feature (281)..(281): n is a, c, g, or t
  misc_feature (288)..(288): n is a, c, g, or t
  misc_feature (294)..(294): n is a, c, g, or t
  misc_feature (305)..(305): n is a, c, g, or t
  misc_feature (306)..(306): n is a, c, g, or t
tgnnaataaagcacatttattaaggcaaaggcaagctgncttncagaacatggccaaggagcgtgaagggattgctccactttaccaccactcagggcacccaggcccaggggtcctggtccaccccaggccagcagaagntatgaagnttacgcataagcctggctctccctnttnacgaaggcctggaagaggntncccagntcccagagggtgggggcccantcgccggccagcagcccntntntggcctcgagntttncctgntccanatcctgntntttctgntggagntgctgcccccnntcctgccccaagggaaagttgagatga

SEQ ID NO: 6135 - DNA, 490 bp, Homo sapiens
  I.6135 (T87765)
  misc_feature (151)..(151): n is a, c, g, or t
  misc_feature (356)..(356): n is a, c, g, or t
  misc_feature (399)..(399): n is a, c, g, or t
  misc_feature (407)..(407): n is a, c, g, or t
  misc_feature (425)..(425): n is a, c, g, or t
  misc_feature (433)..(433): n is a, c, g, or t
  misc_feature (473)..(473): n is a, c, g, or t
ctgctgcggcaacggcaaagggggcatcacggcagaggtgatgatgggcatcctcagagacaaggagagtggtatctgtatggactcgggaggctttcgcaccacggccagcatggtgtctgtcctgccccaggatcccacgcagccctgntgcaactttcttaccgccacgccagacccatccaggtctgtgttcaaacctttcatcttcgggatgggggtggcccagggccccagggtgctgtcccccacttttggagcacaagaccctgttcggaccctgccccgattccagacttcaggtagatcgttcggcataccctcttaccgtgggacaccagggcagccctggggtnattgggagaagagattcaggtattcccccagggagttaggggnttactttnaggggatgattagacttnccccattnccagttggacttttgggaaatatgaaggaattagggagtngaagagattttagagtt

SEQ ID NO: 6136 - DNA, 342 bp, Homo sapiens
  I.6136 (T87274)
  misc_feature (127)..(127): n is a, c, g, or t
  misc_feature (315)..(315): n is a, c, g, or t
  misc_feature (325)..(325): n is a, c, g, or t
  misc_feature (331)..(331): n is a, c, g, or t
tggaatgatgatcagcttagtaaagctgtacacagtgtcatgtacctgtagccccaactgctcagaagctgaagcaggaggactgcttgagctcaagagttccagaccagcctggtcaacgtagtangaacctgtctcttaaaaaaaaaaaaatcagcttaagtcatcaactgggaattcacctgtatccatcacttccagctctcctgcttaaaccctggattttccttttgctcctgcttgcggaactttctttgctttcttcataggagttcccaaatagacatgtctccgtttcaaactgttacttgggtntaaggaggcngcgggnttctctggcac

SEQ ID NO: 6137 - DNA, 459 bp, Homo sapiens
  I.6137 (T87219)
  misc_feature (315)..(315): n is a, c, g, or t
  misc_feature (362)..(362): n is a, c, g, or t
  misc_feature (397)..(397): n is a, c, g, or t
ttttcagttcaaatgcttggaactctaatgtaaatacacatttattgacacagaaagatatccataacatattgttaaaattttaaacaccctgctacaaacagtttatataatatctcaattttgttaaaatacaagcatatttacatatatgtataaactctaaacagtgtctaaagggatataaatcaaaatgttattagtgggtaattttgcttttctgttgtatatagttctctatttttgtatttttatattgaccattaatattttatattcagaaaataaatgatacagttctttgtatctgtgggntataaagggtaggaggttaataggtctgggtttaaaatgttaaggantaaactttaaaatcaaaatcactaaggtatataancttggcacatggaaatcaggacaggaccccaggttccaaaatccaattattcccattaatta

SEQ ID NO: 6138 - DNA, 252 bp, Homo sapiens
  I.6138 (T87188)
ctgtgcaggtaattttcctatctttatacatagatcttcctgacccctcctcctgaccccactctgtcactgaggctggagtgcagtggtgtgatcacagctcactgcagcctcaacctcctaggctcaagtgatcttcccacctcagcctctcaagtagttagggactgcggggcacatgccacaacgcctgggctaatttcttaatttttgtttttttttggagacaggggtctcactgtgttgcccagg

SEQ ID NO: 6139 - DNA, 382 bp, Homo sapiens
  I.6139 (T87139)
  misc_feature (187)..(187): n is a, c, g, or t
  misc_feature (284)..(284): n is a, c, g, or t
  misc_feature (290)..(290): n is a, c, g, or t
  misc_feature (316)..(316): n is a, c, g, or t
  misc_feature (324)..(324): n is a, c, g, or t
  misc_feature (337)..(337): n is a, c, g, or t
  misc_feature (360)..(360): n is a, c, g, or t
aaatatacacttaattctttgttgctataatgtgttcctcttctaggcaaggataaaagccatcaatacattttttgctaagaatggttatcgattaatggattctagtatctatagtcaccccattcaaactcaagcacagtatgcctccccagtctttatgcagcctgtatataatcctcaccancagtactcggtctatagtattgtgcctcagtcttggtctccaaatcctacaccttactttgaaacaccactgggtaagtgagatccttacaataaanttatanttaatatttttaaatttggagctganattttganggaatcagttggngtggggagctctatttatgttgncattgatgccttttttggcctt

SEQ ID NO: 6140 - DNA, 476 bp, Homo sapiens
  I.6140 (T87062)
  misc_feature (199)..(199): n is a, c, g, or t
  misc_feature (339)..(339): n is a, c, g, or t
  misc_feature (420)..(420): n is a, c, g, or t
  misc_feature (426)..(426): n is a, c, g, or t
agcatttaaaaacctttataatttagtctttataacaattatgtatgctgatttcacatccattttataagttgagaaaatgaggtttaaggaagttgggtaccttgcttgaagtcacagagtttatgagttgttgggctgggattcaactccaatttttctgattttgaagtccatgcttttcctagtagcacatggntttttttcactgaattttacagcagtaatcttcctcatttcctccatgcatggtggccagagcctctgagtttgtctttcccccttccaatctcttactgcttcaatcaacccttctcaatgtatctcccctgccagggntaattttgcttaaacatgtatatcccaaaggtatagggcctcaaaaaaaaaaaaaaagctttttattgaaactggcagggngagggngcagtgagttcccagtgggtttcacaggacttccaattattcttgctcct

SEQ ID NO: 6141 - DNA, 436 bp, Homo sapiens
  I.6141 (T86887)
  misc_feature (5)..(5): n is a, c, g, or t
  misc_feature (12)..(12): n is a, c, g, or t
  misc_feature (382)..(382): n is a, c, g, or t
  misc_feature (420)..(420): n is a, c, g, or t
tttgnatagagncttgctctgtcagccaagctggagtgcagaggccaacctcagctcactggaacctccgcctcccgggttgaagcaattctcatgcctcaacttcccaagtagctgggattacaggcacccaccactatgcccggctaatttttgtatttttagtagagatggggtttcaccattttggccgggcagatctcaaactcttgacctcaagtgatccacccaccttgtggtgctgggattacaggcgtgcacccgtgtcctgtctcctgttggctcgtttcttttacttgatttttttcctcttggcttttgatcatttattttgcttcttaatatgactggataattttttattgaaatcagggatatgggnatgtgaaaattttcagagataattccagactctagganggggttactgctaggc

SEQ ID NO: 6142 - DNA, 333 bp, Homo sapiens
  I.6142 (T86886)
  misc_feature (259)..(259): n is a, c, g, or t
  misc_feature (268)..(268): n is a, c, g, or t
  misc_feature (314)..(314): n is a, c, g, or t
  misc_feature (325)..(325): n is a, c, g, or t
aaacatcctcttttgtccctcatgggaattaacaaagaattcttgagtctgtctggtagataaaaacgtcaacagtgaaaacacagtttcaagaaaagtatttctttcttgatggggtgactttcacccatggaagagcatgctctatgaagttgtctatttcacaaatatgataattttatattaaagataattttaaatataaaatatattttaaaatatttaaatatgaaatgctcttagcatattactctacatnaattaaagnttccaaaacatattgctttcccaacatttattatttttgctttccncggatgtttcngggtactc

SEQ ID NO: 6143 - DNA, 425 bp, Homo sapiens
  I.6143 (T86231)
  misc_feature (349)..(349): n is a, c, g, or t
  misc_feature (409)..(409): n is a, c, g, or t
aaattcaggtggtgaaacttaaccccccaggtaatggtaatagaagctggggcctttggaaggtgattagatcatgagggtagtgccttttaaaagagactcaagataagatagagaccccctcatttcttctgccatgggagaacacagcaagaagtcaccatccgtgaaccagaaagtgggttctcaccagatactgaatctgccagtgccttgaacctagactttccagccagaactgtgagaaatttctattgtttataagccacccagttgatatttagttacagcagcccaaccaagactgtggttattgagggaaacaaacacattatttgtgggctaggantaatgggaactggggtccctttacctcccaagttacaccctctgttccttttttcgggtnaaaattttctttcgcc

SEQ ID NO: 6144 - DNA, 476 bp, Homo sapiens
  I.6144 (T86213)
  misc_feature (345)..(345): n is a, c, g, or t
  misc_feature (355)..(355): n is a, c, g, or t
  misc_feature (365)..(365): n is a, c, g, or t
  misc_feature (380)..(380): n is a, c, g, or t
  misc_feature (405)..(405): n is a, c, g, or t
  misc_feature (410)..(410): n is a, c, g, or t
  misc_feature (420)..(420): n is a, c, g, or t
  misc_feature (436)..(436): n is a, c, g, or t
  misc_feature (462)..(462): n is a, c, g, or t
ttttttccgggaaaaaaagtcaactatgcaattgtatacactcccgggtgcatgtgaagaaggggaataagtgtacttatgtgtccagagtattaactggggctgtttttctgtgtttggatttctcttttgaggtatgtactcataacccatcccttggaacgtaatccccacatttgatctaaagcacttgagcgtgcatgcatgtgcgtgcgtgcatatgtgtgtgtgttttcctcctcggtagccagtcaagattgtccttgttgggaaatgctcacggttttataaaaggttattttctcctcaacaaacttcaggaagtcacctatttttcccaaatcnggattttaantaattttccnatggggccatttaanttcttaggggtttttctttggaaantaggnttgtgtttangggaggcgtgaggttncccagggaggggtgtgtttatgtctnggcggttcggaatt

SEQ ID NO: 6145 - DNA, 457 bp, Homo sapiens
  I.6145 (T86130)
  misc_feature (118)..(118): n is a, c, g, or t
  misc_feature (183)..(183): n is a, c, g, or t
  misc_feature (189)..(189): n is a, c, g, or t
  misc_feature (387)..(387): n is a, c, g, or t
  misc_feature (444)..(444): n is a, c, g, or t
ttcctggctgatttattttatttatttatttatttatttatttttttgtagagtgttgcccaggctggtctcaaacttctgggctcaagcaaccctccagcctcggcctcccaaagtnttgggatcataggcatgagacaccgtgcctggcgaagatatttttaccgaaaaggacagagggtntacttngaggtaagggacccagttccattagtctagccacaataatgtgtttgtttcctcataaccacagtcttggttgggctgctgtaactaaatatcaactgggtggcttataaacaatagaaatttctcacagttctggctgggaaagtctagggttcaaggcactggccagattcagtatctgggtgagaacccactttntgggttcacgggatgggggacttcttgctgtggttctcccatgggcagaagaaatgngggggggtctcta

SEQ ID NO: 6146 - DNA, 468 bp, Homo sapiens
  I.6146 (T86114)
  misc_feature (182)..(182): n is a, c, g, or t
  misc_feature (223)..(223): n is a, c, g, or t
  misc_feature (249)..(249): n is a, c, g, or t
  misc_feature (391)..(391): n is a, c, g, or t
  misc_feature (421)..(421): n is a, c, g, or t
  misc_feature (460)..(460): n is a, c, g, or t
tttaaaatttccatctttttttatttgaaaataaagcaaacagaattgggattggctaacttataaataaaaacaaacatgatacaaggttttttgttcatttgtccttagtttttaaaaacaaaagtgttaactagaatctaacaacagatcaaatccaaacacagcagtccagtggagantcaaaacttttccggctttattctctgggaaaacccctggnctgttttcattcctattggtccaggncaccattctatgatatgaaggcctaaattagggaaagctagggtgagctgtgcaaattcagggtgtctgagccacctgttgtttgggtgtgtgatggggggtggaggccgcacacagtgggtgtttctcgctagtgttcaantcacagaaacaggggacgtaactaggggtnagggttaggcaaaagccacttcacccttggggcacaaanttttaagg

SEQ ID NO: 6147 - DNA, 232 bp, Homo sapiens
  I.6147 (T86067)
  misc_feature (12)..(12): n is a, c, g, or t
ttcaataccctngatttatgaacaattcataacttagtaaagaatgtctggtctgacatttcgcaacactaaaatgcatttaaaatcacgcaaaagttatccagtctcttctttcaattcactcagcaaattttacggaataaaattatgcgctctaatagctcacctcttagtcatatgcatttatttggtatggagaattagatatccatatcactgtttaaaagccaaa

SEQ ID NO: 6148 - DNA, 384 bp, Homo sapiens
  I.6148 (T85678)
  misc_feature (282)..(282): n is a, c, g, or t
  misc_feature (314)..(314): n is a, c, g, or t
  misc_feature (341)..(341): n is a, c, g, or t
  misc_feature (349)..(349): n is a, c, g, or t
tgtttttgagacagtgtctggttctgtcacccaggctggagttcggtggcccagtcttggctcactacaacctcagactcccgggctcaagccatccttccacctcaccctcctgagtagctgggactacaggcacttgccaccgtgtctggctggttttaaaatattttttgtagagacaaggtttcatgtttcccagggctggtcttgaactcctaaggctcaagtgatccacccactccccaaagtgttggggattgtagggcagggagccaccacacnggggcagtttttttccttcttgttttggaggnggggggccttgcttccatcacccgagntgggagtntagggtaggcatgatcataggttcgttgcagcctt

SEQ ID NO: 6149 - DNA, 410 bp, Homo sapiens
  I.6149 (T85445)
  misc_feature (399)..(399): n is a, c, g, or t
aggagtggagaagagaatctctgtggttgtttgtctatgagcacatgtcaccaattatgattttctgcaactattttcctaagaaaacggatccttacgaatggcagagacttttccagggagcaattcttttcaacatcttctgtcattcacagcctccagatttgttttgccactacaagaatccagttctcatttctccccaattatctccagggcttgtggccgttcctgccccatgttagaaaagcaaacccagggacagagccctccccccggcttacaaggcagttagtgctggatttgctgtatttgttcaatatttaagggttgttccagtttcacactcattcccctggcaccattcttttcccttctggattctggcccacacaggantaggaccagtg

SEQ ID NO: 6150 - DNA, 464 bp, Homo sapiens
  I.6150 (T85349)
  misc_feature (206)..(206): n is a, c, g, or t
  misc_feature (366)..(366): n is a, c, g, or t
  misc_feature (402)..(402): n is a, c, g, or t
  misc_feature (408)..(408): n is a, c, g, or t
  misc_feature (427)..(427): n is a, c, g, or t
ttggtaatttagttttattgtctacaaagatattggtccatgacagatttgggaggaatgaaacaaacaaacaaacaaactctgggtccttcatcatagataacttgagatgcactggtctattctgtgtgggcagaatcagaagggagagagtggtgcaggggatgagtgtgaactggacaaccttaatattgacaatacagcantcagcactaactgcttgtagccggggggagggctctgtcctgggggtttgcttttctaacatgggggcaggacggccacaagcctggggagataattggggggagaaatgaggaacctgggattcttgtaggtgggccaaaaccaaatctgggaggcctnttgaattgaccaggaggattttttgaaaagaatttnctcccngggggaaagtcttctgccnttcgtaaggttccccctttttcttagggggaaatagt

SEQ ID NO: 6151 - DNA, 394 bp, Homo sapiens
  I.6151 (T85176)
  misc_feature (11)..(11): n is a, c, g, or t
  misc_feature (46)..(46): n is a, c, g, or t
  misc_feature (203)..(203): n is a, c, g, or t
  misc_feature (323)..(323): n is a, c, g, or t
  misc_feature (336)..(336): n is a, c, g, or t
  misc_feature (364)..(364): n is a, c, g, or t
tgtgcttcttngatgatttatgtagcagggaggggttcggaatctnccgtgattatagctctcaagtgcaattccatagcttgttcatcatcctggacagctaggatggactgggatgctggacagagtggccatcaggtcatgtttcatcttctcgagcctgtggagccaaattaattgttcgatcgatttgagaggcaganagcaatggtgctgtggctcaccacagtcactgcccagggcccaccaggaactgatgtccacttccctaacagccggacctggggaccctgatgtgagcatctgctcgactcagcagcttntcaggacaggctngggtgaaaagtcctgtccccaggggctntgtgcttgcatttcagactgtcccatttct

SEQ ID NO: 6152 - DNA, 469 bp, Homo sapiens
  I.6152 (T85032)
  misc_feature (360)..(360): n is a, c, g, or t
  misc_feature (380)..(380): n is a, c, g, or t
  misc_feature (409)..(409): n is a, c, g, or t
  misc_feature (416)..(416): n is a, c, g, or t
  misc_feature (435)..(435): n is a, c, g, or t
  misc_feature (440)..(440): n is a, c, g, or t
  misc_feature (446)..(446): n is a, c, g, or t
  misc_feature (457)..(457): n is a, c, g, or t
  misc_feature (466)..(466): n is a, c, g, or t
attcacagaacaatagtaagggattagtaaagatgtgatagagtccataacaagcatattttgcataaacaaaaattagctttcttgaagaggattccacagaatgagaaagtaacatgaaagataaaaatgatgtgaagagaaatggaaaaataaacttctgctttaataagcctctatgattagataacaagatatttatgtgattacacaggacccaaccattaagacattaaattgattcaggatggcagttcttactaaatacttttaaagtaattttcagcttcactttttcagcttcatcagtctcttattttgtattgtgtccattgcttttccaaatctaaggcatatggnttttatccttatatttatcnggaggcacacccttttccctttttacagncttcacnttttattgccctacccctntaacntactgnggcggttttcnttcctatancgg

SEQ ID NO: 6153 - DNA, 408 bp, Homo sapiens
  I.6153 (T85025)
  misc_feature (1)..(1): n is a, c, g, or t
  misc_feature (10)..(10): n is a, c, g, or t
  misc_feature (12)..(12): n is a, c, g, or t
  misc_feature (19)..(19): n is a, c, g, or t
  misc_feature (355)..(355): n is a, c, g, or t
  misc_feature (369)..(369): n is a, c, g, or t
  misc_feature (377)..(377): n is a, c, g, or t
  misc_feature (392)..(392): n is a, c, g, or t
nttcggcacngngtctganttagaggtgatgctgtagaggtaaacagaggcaacccggtcaagacatctgggcttcctgaaaacagcaaggaaccactgaaggatcttaagcaggatttgtcatgtatctttttcaccaaactgcaaattccaggagcccagtagcagtgtctcttttttcttcttcacattatttatccagggcctaacccagtgcatgatacatagaaaatgctcggtaaacatctgaagaataaatgggatgatcagatatgcagaaacatcacttgttcaataatgtgaaaaacgtgtgaggaaataaatgctggaaaaaattaaaacagtaggccacggnggaaagggcacagntttaaagnggtttctgtttttanggggtggtggcctttg

SEQ ID NO: 6154 - DNA, 292 bp, Homo sapiens
  I.6154 (T85005)
  misc_feature (110)..(110): n is a, c, g, or t
  misc_feature (163)..(163): n is a, c, g, or t
  misc_feature (188)..(188): n is a, c, g, or t
  misc_feature (247)..(247): n is a, c, g, or t
gaacttgagagcctgtcaacccagggtgtgtaggctgaagcaggtcctgactgttccacagaactctctggccctcagctcccagaagcaggggcacaaggggctgggcnatccgttctcaagcttgccccatgtttttttatccaaagaatttgttaattanttatgaagagaaactacttattagnccatatattcatgaatagttcaggtcagtgacaaacttctaagtaattcaaccccaagnaattcttcatattccaaaatcacttttgcatttgagagatagcag

SEQ ID NO: 6155 - DNA, 333 bp, Homo sapiens
  I.6155 (T84923)
tgttgttgttgttcattactagtgttacatagtttcttcacatacattttgcacatttcttattaggtttcctgtgtataagtcagagtcccagcaagaaaggtatagcaaatattccaatgggctaatggaggggagtttgatgaagggattattttcaaaggtgaggaaagggttaaggagactcaacaagggacagtgtaaaggctaattttaggtgtacacttgactgcattaagtaatatccagagagccggtaaagcattatttctggggtctatgaggggcgattttgggaaaagattgacatttgagccagcagactacgtaagg

SEQ ID NO: 6156 - DNA, 351 bp, Homo sapiens
  I.6156 (T84821)
  misc_feature (10)..(10): n is a, c, g, or t
  misc_feature (54)..(54): n is a, c, g, or t
  misc_feature (57)..(57): n is a, c, g, or t
  misc_feature (347)..(347): n is a, c, g, or t
tggaagtganaatcaaacatctaaaatacactgcgtacacgtgtgcgtgcaaancancacacacacacacacacacacagctcttcatttctcctgagccatgcagaatttactttcaatgtggaaatctgttccctttaccacactgtatatgcacagagcacaagagaggctatctctagtcacttccaccagcgaggccttaggactccgtattagaggccaccgatttcatacaacagtgtttcgctaaagacccttcactattcttgtttaggtaaataggctgtctgctcttcaggggaactgttacctatggggttatttaccaaaggaacggtgggcanttgg

SEQ ID NO: 6157 - DNA, 355 bp, Homo sapiens
  I.6157 (T84818)
  misc_feature (146)..(146): n is a, c, g, or t
  misc_feature (303)..(303): n is a, c, g, or t
  misc_feature (352)..(352): n is a, c, g, or t
aacagaataacacagaaagaaccaaccagagctggaccaaaaatcgaggccaggatgttgtagagtcttgggttcaaattctgcctcctcctgggaagtcccctgagcctgctacaaggtcttggcttgcaccctattgcctctgnagaattcctccaaccagcaccaatgaagcacctaccccatgcagggtccttcagaaacaaagagtgagatagcttccagtctcaggtggggaatatttaggacttgtggaacaggggcaaagaagggagagaaacaaccagggaagttaacctccanttttgcagatggggggaaatttaagttttcattcagggagggaattganttt

SEQ ID NO: 6158 - DNA, 434 bp, Homo sapiens
  I.6158 (T84757)
  misc_feature (331)..(331): n is a, c, g, or t
  misc_feature (385)..(385): n is a, c, g, or t
tgggagatattttagtggtggtggcaagggggtgctggaatgttttcttcattgctggtgaaatcttggaactactgccttgtagaggttgagtagactttcaaaggtctttcttctccttgctgttactcaaaggtcaagagatttgcttgggtggagcccaccagcttgacttctgggaagaagtgagtgatggttgtgcctgcaaagactatagcagtgcacctgggctttggggctgactagccctgggtaataccacactgcctgtatttaaacacaccatggaaggcagataggagggagaaacaaatttcatatttccccactnggccagatggaagggcacttttacccatccctggaaattatcccccgtttttcnttttgtttccgaaatattattaccattttggatacagtttttccttcaa

SEQ ID NO: 6159 - DNA, 343 bp, Homo sapiens
  I.6159 (T84610)
  misc_feature (79)..(79): n is a, c, g, or t
  misc_feature (332)..(332): n is a, c, g, or t
gcattctaggccaaggggtcacagtccaccctgaactgtgcctcccagcctgaagccagaaagctcagggaggctagcngccctgcccaggcctcagcactgaccctgcacccctaggcccagctggatgacccctaagagcttcctggaatttggatgcagggttattctgtgtgtgctgcctctcagagcatgtcactttgacgtgggacatctcgggtctggttctggtgctgtccctgtcttcgccacgtgaccctgggataagtcatctctccaggccttgattttccccatctgttaaacagagggaacccaaggaacgagtgggntcttacttctt

SEQ ID NO: 6160 - DNA, 501 bp, Homo sapiens
  I.6160 (T84348)
  misc_feature (3)..(3): n is a, c, g, or t
  misc_feature (385)..(385): n is a, c, g, or t
  misc_feature (416)..(416): n is a, c, g, or t
  misc_feature (436)..(436): n is a, c, g, or t
  misc_feature (443)..(443): n is a, c, g, or t
  misc_feature (463)..(463): n is a, c, g, or t
  misc_feature (471)..(471): n is a, c, g, or t
ctngttctcattaaaaaaaaaaaaaacacacacacacatacacactgtctctgttatgtgcagaatgattagaggaagagaaaatgaggagctaagtttcctcgccacttactaacgtttacgtagtgctgttaggtattattctaattgttatccccattttacagatgaaacagacacaggttagcttgcctaaggtcgcacagatagtagttatagagggtcaaaggcagggagaccacctgccgagttcctgctcttcactattatgcgtcctgtgtctgctacttctggcagtggcccgggtgagagacaatgagggacttctctcttaatctggcacaggttgcctttttcctgccttttcttttcagggtggacactncacttattcctcaaggacccaccttcaaaantccccttttttcttttcccnggagttngtttggaccctctggcctantagggccntattatttttatggcaaattggctggtgtt

SEQ ID NO: 6161 - DNA, 374 bp, Homo sapiens
  I.6161 (T84292)
  misc_feature (181)..(181): n is a, c, g, or t
  misc_feature (202)..(202): n is a, c, g, or t
  misc_feature (217)..(217): n is a, c, g, or t
  misc_feature (221)..(221): n is a, c, g, or t
  misc_feature (237)..(237): n is a, c, g, or t
  misc_feature (367)..(367): n is a, c, g, or t
ctagaagagaatacaccccttacttcccacttatcctcctctcaacctaggaaagatcagacatattgactcaacattctaacaggggatgggctggatctgcccgtgaccagaccaatgccccccacccagcaagggagtaaacgctgcctgaagtgggaccagtgatacacagcatctntgtctgccagggcttcagccncgggggggatttgtnagangctgagcagctgggtntgcaaagacagcaagctgcactttgatttcatttgattcccttacaaaatgacattaaggggaatgttgaggcacagggagactcgcctgttctggggaagggcaggcaagcttcattttttcctggggncctgggg

SEQ ID NO: 6162 - DNA, 433 bp, Homo sapiens
  I.6162 (T83932)
  misc_feature (52)..(52): n is a, c, g, or t
  misc_feature (345)..(345): n is a, c, g, or t
  misc_feature (360)..(360): n is a, c, g, or t
  misc_feature (378)..(378): n is a, c, g, or t
  misc_feature (397)..(397): n is a, c, g, or t
  misc_feature (403)..(403): n is a, c, g, or t
  misc_feature (416)..(416): n is a, c, g, or t
  misc_feature (424)..(424): n is a, c, g, or t
actgcacttctctgtagagcctccagtcgatactgagagccactggggcgtnctgacacccaagggtgcagacattcactccaagtccagagaccgcgccctttctaaggccctgtctcacagtcgccccgtgctcattgtgccggatgtttccacagccacagagacggtgcgtgaaggtgaggtgcagcctagtgcatatgactgacagaaacgtgaagccacagtgggacgcctgggatgagacacagatcaccttccaaatctggagtgtgggccttggggaccaaccagggcagccaggggaggaagggcagagaccaggaggggaacccagggttgccnttcaattcccaggcntcctcttttccccaggcntcccaattccccaggcttnccccanttccccaggcttncttaattncccaggctt

SEQ ID NO: 6163 - DNA, 441 bp, Homo sapiens
  I.6163 (T83897)
  misc_feature (370)..(370): n is a, c, g, or t
  misc_feature (427)..(427): n is a, c, g, or t
caataaacctaaaaaatactaataaataagctgagtgtggtggtgcatgtctgtaatcccaccaccacgcccggctaatgcaatgaagcatttacattaagatatgtacactgttcttttagatatagcactatctgcatagtagactacagtataaacaacttttatatgcaccgtgaaaccaaaaacattgtgtgactcactttattacaatattcatcatattgatgtggtctgacactgaccctaccgcatctctgaggctgtgccttgttaggctggttcagggcagggtccagccattaaggacaggtgcattcttctttcttggggccagtggagtgttcccaggggaagggcacctccagtnttcctgttctaggaaatattgaggcccaaataatgggggttggggctgaggcacctncttgtgtttgactt

SEQ ID NO: 6164 - DNA, 446 bp, Homo sapiens
  I.6164 (T83761)
  misc_feature (14)..(14): n is a, c, g, or t
  misc_feature (38)..(38): n is a, c, g, or t
tagctttttattcntttatttgaccccgcccacatccntgctgactggtcattttacagagtgctgattggtccattttacagagtgctgattggcccatttttacagagtgctgattggtacgtttacaaactttagctagacacagcactgattggtgcatttacaaatctttagctagacagaaaagttctccaagtccccactcgacccagggaagtccagctggcttcacctctcacccggagcggagattgcagtgagccgagatcgcaccattgcactccagcctgggtcgacagagcgagactccattgtgtagcgggcgtcttctgggcgggtgggacgtagggccgggcgcacggattttccccgtggggtgaaggagtgccctctgcttgggtccatccaggacaccgcttgtcaacaaagtttcccctgcattc

SEQ ID NO: 6165 - DNA, 363 bp, Homo sapiens
  I.6165 (T83727)
  misc_feature (45)..(45): n is a, c, g, or t
  misc_feature (52)..(52): n is a, c, g, or t
  misc_feature (120)..(120): n is a, c, g, or t
  misc_feature (283)..(283): n is a, c, g, or t
  misc_feature (314)..(314): n is a, c, g, or t
  misc_feature (320)..(320): n is a, c, g, or t
  misc_feature (354)..(354): n is a, c, g, or t
ttttttttccagtaacatgccttgcttgtcaacttataatccccncccaggncaatgatggtgttatatggattagatacattaggagccgggaggattctgaggttaagaaagggtctntaactaacccaaggttaagcacgtgataagtatcaaagcccagattaggcaaccagtaagtaagctttttataattataacattgcacagtaaatgggtttgagactgctggttaaataaggcaaattgaaaacatgttatctcttccccttccagaataccnaataaaaatgacagtgaaggattttaaaaantgggcntaatgcccacaaagtaaaaagctccaggggtgangccagccct

SEQ ID NO: 6166 - DNA, 89 bp, Homo sapiens
  I.6166 (T83617)
attgaactagggaagcagaaaaaaaaaattttccactggttaattattttgataatttggttctaaaaacattaccagtatatatattg

SEQ ID NO: 6167 - DNA, 304 bp, Homo sapiens
  I.6167 (T83420)
  misc_feature (205)..(205): n is a, c, g, or t
  misc_feature (241)..(241): n is a, c, g, or t
gagatttgggtggggacacagaaaaaaccataccacctgtctttatgccaggaccacactgtctgaataactgtagctttgtaataagtcttgaaattgggaagtgcaagccttccaactttgttgggtttcaagattgtattggctgtttgggatctgttgcatttccctgtgatttttaagatcatcctttcagtttctatanataaaccagataggatttgatagcaattgtgttgantccgtaggatcaatttgagaagtattgcctttttaacagtattaagtctttcaatccatgaac

SEQ ID NO: 6168 - DNA, 369 bp, Homo sapiens
  I.6168 (T82802)
  misc_feature (85)..(85): n is a, c, g, or t
  misc_feature (186)..(186): n is a, c, g, or t
  misc_feature (195)..(195): n is a, c, g, or t
  misc_feature (269)..(269): n is a, c, g, or t
  misc_feature (277)..(277): n is a, c, g, or t
aaactcttattttaagtaaaagttccatcaggtttttacaaaaatagattttaccctagtgctcaagtcaagggggcaatggctngcgggtttaggatttaggatgaggtgagcaggaagcatgcgtggaagccagctcatgcccctcatgcatattcacgaagggcctgcttctgtgaaacaganccccgactngagtgcctctggatgcccatgctcagctcaggctgggtgaagctccgccttcagccagggagctccaaggagtnggcaggtnggtcgggggagagagaaggaggcagagctgggttcctaacaacgtttcagttgttccctctgtgttgacctattgcttgagggtttgccagt

SEQ ID NO: 6169 - DNA, 490 bp, Homo sapiens
  I.6169 (T82040)
  misc_feature (335)..(335): n is a, c, g, or t
  misc_feature (345)..(345): n is a, c, g, or t
  misc_feature (376)..(376): n is a, c, g, or t
  misc_feature (418)..(418): n is a, c, g, or t
  misc_feature (428)..(428): n is a, c, g, or t
  misc_feature (459)..(459): n is a, c, g, or t
  misc_feature (464)..(464): n is a, c, g, or t
  misc_feature (485)..(485): n is a, c, g, or t
aaaaaccatcagaattatttgaacttcaagaagatgaagccctacgaagagtgcagtatctcctcctgtctcgtccaattgattatagttcaagaatgctgtttgtatttgcaacatcaactacaaccgtaagctctagaaacttaatccaaactcttctgtgcatctcagcttaacatttttttcctgtttatttaccatgcttgattgcattaacagatgattcagataatgctcacgtacatatgtatttcaaagtctgtctcatctcctaaggcaaggcattgtcttgcaccatggctccatttagttctgggtctctgtaaacatctggntaggcgtggnggatgggtggcacctattggacagtttccanggggctggtctggcattcacgtggggttaactcccggggggncaggtccacnttccggagggccggggggggccccaacaaantggtnccacaaacaggttttccaccnggggc

SEQ ID NO: 6170 - DNA, 315 bp, Homo sapiens
  I.6170 (T81908)
  misc_feature (13)..(13): n is a, c, g, or t
  misc_feature (14)..(14): n is a, c, g, or t
  misc_feature (65)..(65): n is a, c, g, or t
  misc_feature (143)..(143): n is a, c, g, or t
  misc_feature (184)..(184): n is a, c, g, or t
  misc_feature (214)..(214): n is a, c, g, or t
  misc_feature (269)..(269): n is a, c, g, or t
ggcagtttaatcnnactttaacctcataacaagtctgtgaggtagatagggcaggcatcattatnccagcggagcttgtggctcagaaaggttgacttggggtctaaaaactagtacaggcatctggtttgaattaagacctntaaacgctagtacggagcagagaagctgagcactggctttnaaagttattcagttcccagggttgtccctnatcttcctcattccttgtgcagtcttcaggagtccggggcaagattccatgcagnggcagccaaagccacaccgttctctgtcccaggggctgccagcatg

SEQ ID NO: 6171 - DNA, 382 bp, Homo sapiens
  I.6171 (T81907)
  misc_feature (295)..(295): n is a, c, g, or t
  misc_feature (309)..(309): n is a, c, g, or t
  misc_feature (330)..(330): n is a, c, g, or t
  misc_feature (365)..(365): n is a, c, g, or t
  misc_feature (370)..(370): n is a, c, g, or t
gcaacgagcaaaaaacctttctgtaggctgagacctctcggtgcacctggtgaccctgggtggaggggacttgctgtgaagtcttcctcgccctctgccctcttgctgcttctccacattgccaggaaaagctgctgacgcctgccctcctctcttgagtcgagggctgaatctttctcctctaagcagtctggtcaggaaccttggtttcttgagaggcccccaagatgccgcagctccaggggctcttcctcctcaccagaaatccctggggcttccacaatgtggaactcantcattgttcaggtnttccgtgggagtgttttttgncatgggtgacctgttttgggggcccagcatgtttngcagnatgttgtaattt

SEQ ID NO: 6172 - DNA, 233 bp, Homo sapiens
  I.6172 (T81904)
  misc_feature (17)..(17): n is a, c, g, or t
  misc_feature (31)..(31): n is a, c, g, or t
  misc_feature (92)..(92): n is a, c, g, or t
  misc_feature (161)..(161): n is a, c, g, or t
  misc_feature (220)..(220): n is a, c, g, or t
atatctagcaataaacngtaagacaggatcntgactatttcaccatgaaaaggaagcctggatccttcagcaaataatcttttgtataattngcccacagtttaacccacagatccagctatggatgtttcatttaacagtgagtgaaaaactcaggactntcagcatcaggcctttgggtgggaatacccagatatcaaggttgggcaagtgggcattnggagtggtgccgg

SEQ ID NO: 6173 - DNA, 386 bp, Homo sapiens
  I.6173 (T81903)
  misc_feature (1)..(1): n is a, c, g, or t
  misc_feature (319)..(319): n is a, c, g, or t
  misc_feature (342)..(342): n is a, c, g, or t
  misc_feature (347)..(347): n is a, c, g, or t
  misc_feature (378)..(378): n is a, c, g, or t
ngagaatgggtggactcccggagaggattcctaccgagagtggatacaggtatgcagcataagatcaagcctatctaggattgaataagtttttgaccatctagagaggttgttgaaagaaagtggtactgtgccaaatggcctccaatgagaagataggttcacggccgtcagtataaatcactgcaagagaagataggttcacggccatcaggtataaatcactgcaaaatgagcccatcgctacacgatcagaggaaaagcaggcccaaggatggacatccctggaaaacggcattttatctttcttcaggattanttattattacttactctttccgngggantgtggacttaccaggtgttcttcacttttgnattaaaca

SEQ ID NO: 6174 - DNA, 369 bp, Homo sapiens
  I.6174 (T81601)
  misc_feature (6)..(6): n is a, c, g, or t
  misc_feature (36)..(36): n is a, c, g, or t
  misc_feature (65)..(65): n is a, c, g, or t
  misc_feature (109)..(109): n is a, c, g, or t
  misc_feature (122)..(122): n is a, c, g, or t
  misc_feature (125)..(125): n is a, c, g, or t
  misc_feature (161)..(161): n is a, c, g, or t
  misc_feature (168)..(168): n is a, c, g, or t
  misc_feature (239)..(239): n is a, c, g, or t
  misc_feature (271)..(271): n is a, c, g, or t
  misc_feature (274)..(274): n is a, c, g, or t
  misc_feature (282)..(282): n is a, c, g, or t
  misc_feature (349)..(349): n is a, c, g, or t
  misc_feature (360)..(360): n is a, c, g, or t
aatggnacaatctcagctcactgcaacctccgtctnctgggttcaagcaattcccctgcctcagnctcccaaataactgggattacaggtgcacaccaccatgcctggntaatgtaatattnatntttaaagacctcatattttcccttaaaaatcatgancaagaangacaaggatgtcccagaaaaactggatgatacctttttaactttagctaatatgtttacacacagaatttnctttacaattaacgttttaaaacttgcttaanccnttaaaacnatcccagcactttaggaagctgaggtgagtgaatcacaagttcgggagttcgagaccagcctgggcnaacatgggtgngaccatcat

SEQ ID NO: 6175 - DNA, 387 bp, Homo sapiens
  I.6175 (T80979)
  misc_feature (2)..(2): n is a, c, g, or t
  misc_feature (122)..(122): n is a, c, g, or t
  misc_feature (336)..(336): n is a, c, g, or t
  misc_feature (343)..(343): n is a, c, g, or t
  misc_feature (356)..(356): n is a, c, g, or t
  misc_feature (363)..(363): n is a, c, g, or t
anaaaaaacaattgttatttgtgtacttttaaaacctcacagtaatattttcacactaccttcttggctgaaagttcacactcggaattccagagcagtccatggccagggccactgggtcncccttgctctctccttggctttggtaaccactggccccagggactcagcctgctttcctatccatcccctcagtagctgtcaccatgcaggttaccccttctgtttcttctaccactaactccatgtctgactgcaagtgaaagggaacaggaagcccaaacctttggggttttaagggagtttattgctaatctggtaaaacaggaaaggagnacagggnggataaggcatgnaccaaantatagggggaagggaaatggactt

SEQ ID NO: 6176 - DNA, 150 bp, Homo sapiens
  I.6176 (T80978)
taccatttcatctaaccattcagaacatatttcaagaataattttaattcaagttgtagataaaacttactataccattttcattttgacgctttccaagaatgagatacacggtattttaaagacaaaggattgatcttacatgttact

SEQ ID NO: 6177 - DNA, 426 bp, Homo sapiens
  I.6177 (T80918)
  misc_feature (160)..(160): n is a, c, g, or t
  misc_feature (415)..(415): n is a, c, g, or t
  misc_feature (423)..(423): n is a, c, g, or t
aggccgggccttggtggctgtggaagggttaaaacgcacacccagaggcaggagagcagactccagagacccccctgggctaaagtgcatctccccctcagcctctgccttggttttgctgttgctccaatggttagttatacccagttaacgaagtgtntcagattcctttttctttgcttaaagcacagacttttctgtgaaatctgcttcccccattttcttgtttataaatttttaattctaataccagagggccacccgtgttcatgggaaacagcggtgacctgggtttccaggtgccccttctggcgccttgcccagtggaggtgacttgtggggtggagtcctgggaacacaccttcccctaaaccccaatcttcgtgtttccgatggggttaaagagaagtgggtnggcacgtnggc

SEQ ID NO: 6178 - DNA, 410 bp, Homo sapiens
  I.6178 (T80844)
  misc_feature (288)..(288): n is a, c, g, or t
  misc_feature (330)..(330): n is a, c, g, or t
tattcagaaatccaaactacgatacaccaggtttgagggtctcccttcaacatcacagcttacaggccattcaatctctccagggcctctcctccgttaagtgtgatggctggacttggcgcaccctgcagccactttggattaatattctaggaccccatttccaagcctccaggagttgccacgtgccaccacttctctttacccatcggaacacgagattggggttaggggaggtgtgttccagggactcacccacagtcactcactggggcagggcgcagaggnggcacctggggaaaaccagggttcaaccgctgttttccatgnacacggggtgggcctctgggtatttaggaatttaaaaattttattaaacaaggaaaatgggggggaaggcaggattttca

SEQ ID NO: 6179 - DNA, 420 bp, Homo sapiens
  I.6179 (T80733)
  misc_feature (19)..(19): n is a, c, g, or t
  misc_feature (44)..(44): n is a, c, g, or t
  misc_feature (56)..(56): n is a, c, g, or t
  misc_feature (57)..(57): n is a, c, g, or t
  misc_feature (68)..(68): n is a, c, g, or t
  misc_feature (137)..(137): n is a, c, g, or t
  misc_feature (199)..(199): n is a, c, g, or t
  misc_feature (263)..(263): n is a, c, g, or t
  misc_feature (339)..(339): n is a, c, g, or t
  misc_feature (383)..(383): n is a, c, g, or t
  misc_feature (400)..(400): n is a, c, g, or t
  misc_feature (405)..(405): n is a, c, g, or t
  misc_feature (416)..(416): n is a, c, g, or t
agatgatcactatatctgncactcagatcttttgttgtgaaaanttgcatgtattnntcttttttctncagctgggttaagtgctttcagggcagaggcactgtacctgtatttctgtgtattaactcctgcctctnttaagtccccgttttgtttactaagataatagggtgaaatctgggagacattaaatctgcanctcaaaaaggaattcatccatttctaagagatgaccaaacaagatgattttgtatgttttaatnttttagttttagagatagggtgtgggctctgtcacccaatctgggagtgcagtgggtgcgatccataggcttcacntcagccaccaactcctagggcttaaagtggatcctcctggcctncacccccccttgtcctntggcnttccgtagttngggg

SEQ ID NO: 6180 - DNA, 428 bp, Homo sapiens
  I.6180 (T80669)
  misc_feature (420)..(420): n is a, c, g, or t
ggagtggccagtttattctcttaagagagaaaatgaggggattaatggactgtagttctggacaaggtggaaaactcttaaagtggaagtattggggcgaatctctgacaggctaggatggtgcagtcagtcccttcacccagaaatcagtagaatgttagcagttcagactcaaaccttgtgaaaaacaggtggtggaaaggaaatccctcacagcaactggcaccataatcaagacaatgtttgcagaattaatggagttacctgctttcagccccaggtcatagctattgtctgccctgctggatatgtgataattaatttgtgattcatgttgtctttaaaatgggggttcactcatctccagtaggaatttaaggtccacagtgaaagtttgttcccccccttccccaaaggggntaaacctt

SEQ ID NO: 6181 - DNA, 474 bp, Homo sapiens
  I.6181 (T80622)
  misc_feature (462)..(462): n is a, c, g, or t
caacgatcatctgtggggcctggtacccacgcactattattaacatattctttaataggattatttatccatgtgactgcccaaattaaggacaggaaaggcacataggcccagtaagtataattagctgcagctgtttctgcagacatgaggagacttaccaccgttgatacaattatcaaagctgtaaccagtatattttctagagtttgtattacccttgtttttttaggctttttttagctaactgtgtcagcttctttagtgggaccccagggtcggcagctccgcttttttgggtgggatgacagctttatctgtttttttggatattaccattttgtttacttggggggagtcgatggatgcttgattgtggggtttttttgttttttgcagagggcgcttttttttgcatcttcgagggggtttattgtaggaactttaaatgtctagtggggnattcaaacaggg

SEQ ID NO: 6182 - DNA, 392 bp, Homo sapiens
  I.6182 (T79815)
  misc_feature (134)..(134): n is a, c, g, or t
  misc_feature (374)..(374): n is a, c, g, or t
ttcagagatagggtctagctctgtcacttaggctggagtgcagtagatgatttatagctcactgcaaccttgaactcctgacctcgtgatccgcccaccttggcctcccaaagtggtgggattacaggcgtgcnccgttgcctggccatgccagctaatttaaatttttttttttgtagaggaaggagtcatgctacattccccaggctggtcttaagctcctggcctcaagtcggcctgggcttccaaattctgggattatgggttttacctgggccagagaagatatatttgaatcaaacttagggggacaaggatttctgtacatcagtgttgtccttgaggaaactgaaatgcagctttggggaaagatnttttcagagcagagagaa

SEQ ID NO: 6183 - DNA, 476 bp, Homo sapiens
  I.6183 (T79804)
  misc_feature (76)..(76): n is a, c, g, or t
  misc_feature (130)..(130): n is a, c, g, or t
  misc_feature (473)..(473): n is a, c, g, or t
tttagaaatttttttactttttattttttaattagaaatatcagtttgtagaactgttgcacacaattgtcctggngtgtattgttcagatccaagggtgtcatttacacgaacaataaagagggctgtnaaccctgtcgatgagaaatcatatatctggaaaaaaagcctttttcagttctgctgccaaagtagcctgggaagcaggtttcatcttgtccccaatacgcatgtggggacagcgaggcttatatttggtgtttaatgttattttccattaaaagggaaatcgagatccttgggaggaatgggctgactcaacatcttggggcttgaaaaaggtcaaccgggggagtaggaacatcttgtttttgccagtagggtgagggactttatggaggacaattcctgaggtatttcttttagggagcagggcatgcacccagttgtaggccaattcccatccaaaaagnctg

SEQ ID NO: 6184 - DNA, 380 bp, Homo sapiens
  I.6184 (T79751)
  misc_feature (263)..(263): n is a, c, g, or t
  misc_feature (358)..(358): n is a, c, g, or t
  misc_feature (366)..(366): n is a, c, g, or t
  misc_feature (377)..(377): n is a, c, g, or t
aatggatggtggtggtattaaatcatttttgtattaaggttacatgggatgcaattagaataatgatgtaaccatttcacttaaaaatgtcattatatatgcccagaaatgacatcttttacaactatttaaactttaacaaaaaattttaagtcaacctaaaaatgtgcatggggaatatgtggtttttaaaatattttagggaccagggcgcagtggcctcacatctgggaatcccaccactttggggaggccgaggcggngtgggatcacttgaggccaggggagtttgaggaccaacctggggcccaacatgggcaaaaacccccatctcttacttaaaaatacaaaaactagnccggggcntggttgggccncac

SEQ ID NO: 6185 - DNA, 430 bp, Homo sapiens
  I.6185 (T79733)
  misc_feature (240)..(240): n is a, c, g, or t
  misc_feature (410)..(410): n is a, c, g, or t
  misc_feature (425)..(425): n is a, c, g, or t
agagctatgcattgcagaagtaactgcatttccaaatgaccgaaaatccttgacctgtcataggaatacctcagggtaaatgttgctgagggcagttgcaatctaagaaagaaaacatgcttgccctttatcatagtgtcaccttgcaggcctttttttttcctttgtgactcaccgggagtgctgatatgtgtatgtcttttccccctcatagtaccaagcagagtaatagggaaccgntgtgcttttaggatttctaccttctgtgggcgcgatcctcccactgctggcatgccagtcgcctgcctctttcatggaaatctccttcccgttttggtttggctttgtttctatgttcgtttttatgggataggattttttttttcagggttaaacaaattttaaggggnttgcctattcaaaangaaca

SEQ ID NO: 6186 - DNA, 601 bp, Homo sapiens
  I.6186 (T79648)
  misc_feature (246)..(246): n is a, c, g, or t
  misc_feature (289)..(289): n is a, c, g, or t
  misc_feature (331)..(331): n is a, c, g, or t
  misc_feature (518)..(518): n is a, c, g, or t
  misc_feature (524)..(524): n is a, c, g, or t
  misc_feature (543)..(543): n is a, c, g, or t
  misc_feature (573)..(573): n is a, c, g, or t
ttgggtaacagtgactactatgggacttttttggggggaggtgggggcacaggttgtttttaatatatgaattaaaaactaacatgattatttcacagtactcaaaaatgaaagaacagaaaggtactcaggaatatataactgaaattacaaattaaacaaccctgcgttttgctgctcagtgaatacattttgagctgaaaatatctgacaaaatctgaaacccactgcctaattatataaaantaactagaacaggtttcttagctttcaaggacagaactaggantaaaaaagtttgttttcactaaagccctggggatgccagaantggggggtttactctttttcacctgggggggtcttttcaactctcctcttgatcccttcatctaagggtcattaaggataacttcttgggttaggaaagagagggaaagcggggtagggggagagaaggacagggagatccccggtgcctggaacggggacttgattttttcacagctaaggcctcngggggnaaggtcattgtgttaaggncatcctgctgtatttggggttccgggtgcnccattttttcccctccttgccggccgtt

SEQ ID NO: 6187 - DNA, 412 bp, Homo sapiens
  I.6187 (T79553)
  misc_feature (167)..(167): n is a, c, g, or t
tggaaactgaggcatctaatatgaaggtatcaagactgtgacttttaattgtagtttatccatttttattcagtattccctcttgtaaacttgaggtaagacactttacttaaaagtgtattttaaattaagcaataatatgtaaactctttcttgcaaaagttatntatttatatttttaaataagatatattgaattcattcagtgaatcatataaagaaaataagtgtaaaactccaatggctagttagttcttagttctttttaagattaaagagaagagaccaaatataggcatcactgtactgagggcaaggttttctgtgtagttcataggaaactaggcctccatggattttaggaatatgccttggaatatttaagtgtaggccttcctccccccaactccct

SEQ ID NO: 6188 - DNA, 348 bp, Homo sapiens
  I.6188 (T79487)
aaggggctaaaaaatactggtttcaagtttggagtcattatagcactttttttatgttaatgggtataattcatgaaaaaggataaaactgaagacacgggacagtgaaatcataattccagaatctaaatctgtgtgttggcaagataggttggaacttgaagtggagtgattagtcttagataggagcagggataattctattgtgatcctagggaaggtgcagcatatgggctcatcaggctatggacttggtattgggaatgtggaataagaagccaggccatcaggttagagaatatgaggataaaaaatggttgtccaggagaaagagaaagttaaagtact

SEQ ID NO: 6189 - DNA, 485 bp, Homo sapiens
  I.6189 (T79463)
  misc_feature (371)..(371): n is a, c, g, or t
  misc_feature (434)..(434): n is a, c, g, or t
  misc_feature (467)..(467): n is a, c, g, or t
ttgagaatggggtcttgctatattgcccaggcaggtctcgagctccttggctcaagctatcctcccgcctctgcctcactaagagctgggattacaggcctgagcatcacacccggtggaagtaatatttttgttgataatgtccaattctatgaagttattaaattcagtcagaagagaatctgcctaagtgggaattaaaatggctaaagttttaacctcaattattttgaaaccagaacattttccccactatagacgattttctaacctgtcttgggagggtgatcaggaacttttcagtactatttgggcaagccaattttaggggcttaagggtgcccatggggaaatcatctagggactaggtncggatggcctggtaccttggcccaaataaggaccactttaaggttcttgaaggaatatacagnggggtcatataggcccggttttggggggaagcnggggggtaggacccgggg

SEQ ID NO: 6190 - DNA, 395 bp, Homo sapiens
  I.6190 (T79401)
  misc_feature (227)..(227): n is a, c, g, or t
ttaagtaacatagaatagattttaaaatattggactttattgaatgaagtcaggtaaatattgtttcataattttttcaattacatattatgtatgcattgtgcatattgagttgccttgaacatcatattacttactatgtctattttattttattttattttatttttgagatagagtctcgctctatctcaaaaataaagcactccaggcaggctggagtcagntggcgcgatctctgttcactgcaaactctgcctcctggggttcacgccattctcttgcctcagcctcccaaggtagctggggactatagggcgcccgctaccatgtccgggctaaattttttgtatttttaggtaggagatggggggtttcaccgtgtttagccgggg

SEQ ID NO: 6191 - DNA, 402 bp, Homo sapiens
  I.6191 (T79385)
  misc_feature (181)..(181): n is a, c, g, or t
  misc_feature (184)..(184): n is a, c, g, or t
  misc_feature (366)..(366): n is a, c, g, or t
  misc_feature (376)..(376): n is a, c, g, or t
  misc_feature (389)..(389): n is a, c, g, or t
cctcagcatcttacctctcaacgttcttctctctgctctgacacatctttcccaaagctgcatttcagtttcctcaaggacaacactgatgtacagaaatccttgtccccctaagtttgattcaaatatatcttctctggccaggtaacacccataatcccagaatttggaaggcccaggncancttgaggcaggtagcttaagaccagcctggggaatgtagcatgactccttcctctacaaaaaaaaaaatttaaattagctgggcatggccagggcacggtggcttcacgcctgtaaatcccaccactttggggaggccaaggtggggcggattcacggaggttcagggagtttcaaggttgncagttgaggntataattcatggntactggcacttcc

SEQ ID NO: 6192 - DNA, 472 bp, Homo sapiens
  I.6192 (T79373)
  misc_feature (236)..(236): n is a, c, g, or t
  misc_feature (363)..(363): n is a, c, g, or t
  misc_feature (388)..(388): n is a, c, g, or t
  misc_feature (411)..(411): n is a, c, g, or t
  misc_feature (438)..(438): n is a, c, g, or t
  misc_feature (445)..(445): n is a, c, g, or t
tacaaagtgcctaccacatgctaaccactgctgcaggactttctatagaagaactaatttaatcatcaccataaccctatgggtagatgatatttttacaacctccattttacagatgaagaaactgaagcatagacctgcttatttgagaagaaacgcagggagacagttcagtcactgcaatcttcatgcccatcagtttcttgtgagaagaaatcaagactgggcaacgctgnctttcctcctctgaggctgttcaagtagggaagtccggggctggctctgctaggaaaggaggaagttcatgtggcagggagccttggagggcatccccaggagccaaactggctatggcattccttncagctggcaaggggatttgaatggntattccaaccaacccttacagtngggaggaggcagatgctttccctaggntgaggcntcaggtttttttgttggggatttgcta

SEQ ID NO: 6193 - DNA, 485 bp, Homo sapiens
  I.6193 (T79322)
  misc_feature (271)..(271): n is a, c, g, or t
  misc_feature (289)..(289): n is a, c, g, or t
  misc_feature (322)..(322): n is a, c, g, or t
  misc_feature (328)..(328): n is a, c, g, or t
  misc_feature (333)..(333): n is a, c, g, or t
  misc_feature (356)..(356): n is a, c, g, or t
  misc_feature (364)..(364): n is a, c, g, or t
  misc_feature (389)..(389): n is a, c, g, or t
  misc_feature (406)..(406): n is a, c, g, or t
  misc_feature (411)..(411): n is a, c, g, or t
  misc_feature (446)..(446): n is a, c, g, or t
  misc_feature (469)..(469): n is a, c, g, or t
actcaaatgactatagagtacatacaggtaatgtaagtgaatggcagtcaagactggggtatagtgaagaatatatgcatcatgtaagaagaacggctgattgttttcatgtgagaatgcaggcctaagattgctagatctgagtcttcaggaaaagccaaaagttcagaggtttatatgatgtcttcatattgggaacttaattccacttaagggaaaaaaaaaaccctactactggggggaacttaattaaaacataggccaaatttantttgcattttgggcccantggaggctttcccatttttccatctggctcttntacggntttantgttaggggaaccaccattttcntccccttncttttttatttgtggcttttacccnttaagggatgttagggncttantagggccctttttccctcccccttgggggttgggntcccgtcccccggggttaccccntttaggttttgtccag

SEQ ID NO: 6194 - DNA, 222 bp, Homo sapiens
  I.6194 (T79270)
gagaaaagaaataatacaaattagtcaccctagcctacatagcaagaccccgtctctacaaaggataaaagaaacttacccaggtgtggtggtacatgcttgtgagtcctagcttctcagtctccggagtagcttattaaccaatacacttctgaataatacataggccaaagaaaaacactcaaaaccagcctagggaaacatagtgataccccatttcta

SEQ ID NO: 6195 - DNA, 385 bp, Homo sapiens
  I.6195 (T79228)
  misc_feature (4)..(4): n is a, c, g, or t
cagnttaggtgtagaagttttagagtatcttttggtgtaactataaatttactgacatctctaaatttaaaaaatgcatgcccttcattcacatttgaaacattcggaatgtcattttaaaattacttctctttttttgaaaaataaattttaaaaattaaagtaacttctcagtctttcagcatggaaagattggggacatttagagacttggtaatttccatgcgagggcaggtggattgggttcctttgcccaaagcagaacgtgggacaggatcagcctcgtgagatagcacgtctggcctttggtccccttctccattgcttcctctctttatgtttctcttcctatctctccgagtttgctgtttctttgtggagtctt

SEQ ID NO: 6196 - DNA, 399 bp, Homo sapiens
  I.6196 (T79185)
  misc_feature (119)..(119): n is a, c, g, or t
  misc_feature (146)..(146): n is a, c, g, or t
  misc_feature (203)..(203): n is a, c, g, or t
  misc_feature (245)..(245): n is a, c, g, or t
  misc_feature (254)..(254): n is a, c, g, or t
  misc_feature (265)..(265): n is a, c, g, or t
  misc_feature (267)..(267): n is a, c, g, or t
  misc_feature (293)..(293): n is a, c, g, or t
  misc_feature (300)..(300): n is a, c, g, or t
  misc_feature (307)..(307): n is a, c, g, or t
  misc_feature (314)..(314): n is a, c, g, or t
  misc_feature (320)..(320): n is a, c, g, or t
  misc_feature (353)..(353): n is a, c, g, or t
  misc_feature (390)..(390): n is a, c, g, or t
ttgaggtggggtctcactctgtcacccaggctggagtacagtggcatgatcatagctgtattagtcagggttctctagaaggccaggactaataggacagatgtacatatgaaagggantttattaaggagtatcgactcaaacantcacaaggtgaagtcctacaataggccatctgcaagctaaggagcaagaagccagtntgagtcccaaaacctcaaaagagggaagctgacagtgcagtnttcagtctntggccaaacgnangttccctggggcaaatcactttaagntccaagnagtccantagctgnaaaaanttgggagtccgatgtttgaagggcagggaagcntccagcacagggaggaaagttgaaggaccagaagganttcagccag

SEQ ID NO: 6197 - DNA, 414 bp, Homo sapiens
  I.6197 (T79147)
  misc_feature (18)..(18): n is a, c, g, or t
  misc_feature (94)..(94): n is a, c, g, or t
  misc_feature (196)..(196): n is a, c, g, or t
  misc_feature (261)..(261): n is a, c, g, or t
  misc_feature (277)..(277): n is a, c, g, or t
  misc_feature (280)..(280): n is a, c, g, or t
  misc_feature (338)..(338): n is a, c, g, or t
  misc_feature (360)..(360): n is a, c, g, or t
tcagaaaagtcatatccntgaaatgtatttttaaatgtaaatgatattctacttagaaacatgtttgagtatttttaacatataaaacatagantattcaaaaacatattaggtacattaacattacaatatccaattttttagttttaagttagggtaaaatttttctatcacaagccataaaggttgaaaaaanttcagtcacctaaataaaaacgtatatccaagggatgacagtgagggttggatgtttcattgaantttaaaataaacaaanttntttaaggatgctcaaaaaagaagctaaggaagttgttgttttcgtcacatgtgggccngttaaggttaggctgaggaacngggacaagaaggggagacagtaggagagagggaaagagtgggggaaaggaggaa

SEQ ID NO: 6198 - DNA, 538 bp, Homo sapiens
  I.6198 (T78569)
  misc_feature (225)..(225): n is a, c, g, or t
  misc_feature (227)..(227): n is a, c, g, or t
  misc_feature (229)..(229): n is a, c, g, or t
  misc_feature (433)..(433): n is a, c, g, or t
  misc_feature (439)..(439): n is a, c, g, or t
  misc_feature (444)..(444): n is a, c, g, or t
  misc_feature (463)..(463): n is a, c, g, or t
  misc_feature (485)..(485): n is a, c, g, or t
  misc_feature (500)..(500): n is a, c, g, or t
  misc_feature (516)..(516): n is a, c, g, or t
gagctagcacctgacattttatttaacatgatatagtgcgatagtctcggcacaaagtgaccttaactgcttccaaattccttccttatttttcctgtaacaaatcatatggtgaaggaagaccttcatcagggtcacgtaacttggaggagcttcttgggggaagtgcacaggcatctctgcgggctgtggaggaaaaggccccggaattggccccagtgggtntntnttcccaagaggatctgtcccgtttccctgttcatgtgttccgtcctcagtagctggggaccccattttctctgtcgtatcccacccccaacacctggaccaacttcaaattcaggcacatattatttttaaacaggtagtgggatatcccaacactgtgttcaggggcatggggaggaaaatggggaaaagaaaccgaattgtnggtccntagtncttgaggacacagggtaancttcatccaggcattttggggncagaggctgagttanccgggggtattatttnccgggattcctggattttcttt

SEQ ID NO: 6199 - DNA, 427 bp, Homo sapiens
  I.6199 (T78508)
  misc_feature (3)..(3): n is a, c, g, or t
  misc_feature (5)..(5): n is a, c, g, or t
  misc_feature (7)..(7): n is a, c, g, or t
  misc_feature (329)..(329): n is a, c, g, or t
  misc_feature (335)..(335): n is a, c, g, or t
  misc_feature (376)..(376): n is a, c, g, or t
  misc_feature (396)..(396): n is a, c, g, or t
  misc_feature (406)..(406): n is a, c, g, or t
  misc_feature (416)..(416): n is a, c, g, or t
ctntnantttatgaatgcctgtaacgataatagtcactcttggttactgagctacagctgtggtctagaactgttgtgaacgcttgtcataatgtcatagaatcttaccaatagcttttcaggataggtgctgttattctaatcttttccatgtggcaactgtgatgcagacattgtcccaggtcagacagctgttaggtctggaaccaagacaagtattccttcaggaaaaccccagagtcctcactcctggctgttgcacttggaatcttccctttccttgtaggacacacacacacacccccccacacccctttagagggcatggnttatantttgttacattcatttattggaacgggcataggtgtttccngggtaggcagcctagggcanttttacatantctgtttttncacagaggccg

SEQ ID NO: 6200 - DNA, 531 bp, Homo sapiens
  I.6200 (T78484)
  misc_feature (377)..(377): n is a, c, g, or t
tgagatggagtcctgctctgtcaccaggctggagtgcggcggaatgatcttggctcactgcagcctctgcctcctgggttcaagcaattctcctgtcttagcctcccaagtagctgggactacaggtgcccaccactatgcccagctaatttttgtatttttagtagagatggggtttcaccatgttggccaggatggtctcgatctcttgacctcgtgatccgcccgccttggcctcccaaagtgctgggattacaggcgtgacacttgtgcctggccggccttgcttttttatatactgaccttccccaaacgatgtggctctccctgaggttgaagatcaggcttactcttgcatctccatggcctgcacacantggggagttgataaatgcaagggtctgttatttctgcatgaatgaatggattcactttccttgctataccatatactcttctaaaaagttaccagggtttctggaacttatattaagaaattcagataccagcaataaatatccagggaactta

SEQ ID NO: 6201 - DNA, 516 bp, Homo sapiens
  I.6201 (T78444)
  misc_feature (470)..(470): n is a, c, g, or t
  misc_feature (485)..(485): n is a, c, g, or t
ttactaagtctttggatgccagcatatatttaatacatatggcctatcttgattggggctagctagcacgcttccagggctcaagagcacatctggctggtagctaccatagcagacagtgcaggactagaagcatttcaagatcctggcctggaagagtttctgtgtggtaagggaaactgacactttacatactgtcatcacttcccatgcttgaattgggattgcagagctatggagccaaggaacggtgctaggaaaggagtatcaggaagcacagagtttccttgaaatgttcctactgctttctctacatgtggcctgcagtgtgtataaatgaaagtgcaagcaatggaatccatacgtgtacatggggatatgtgtaaacacatatggacccacatatctataagttccacagctgatattcattctgtcacctgtcaagataacagtaaggaaggcttcantcaaagggaaggagncagcacagcattctcctcccccggggaaaag

SEQ ID NO: 6202 - DNA, 551 bp, Homo sapiens
  I.6202 (T78421)
  misc_feature (1)..(1): n is a, c, g, or t
  misc_feature (89)..(89): n is a, c, g, or t
  misc_feature (91)..(91): n is a, c, g, or t
  misc_feature (93)..(93): n is a, c, g, or t
  misc_feature (360)..(360): n is a, c, g, or t
  misc_feature (361)..(361): n is a, c, g, or t
  misc_feature (400)..(400): n is a, c, g, or t
  misc_feature (415)..(415): n is a, c, g, or t
  misc_feature (433)..(433): n is a, c, g, or t
  misc_feature (444)..(444): n is a, c, g, or t
  misc_feature (479)..(479): n is a, c, g, or t
  misc_feature (484)..(484): n is a, c, g, or t
  misc_feature (495)..(495): n is a, c, g, or t
  misc_feature (509)..(509): n is a, c, g, or t
  misc_feature (533)..(533): n is a, c, g, or t
  misc_feature (545)..(545): n is a, c, g, or t
naaaaaaatactcgtagttttatttccacaacctgttcaatattcgaccaaaagcactctatctcccgggccgtggaggggctatcccnangntctgctctgctcttccttcttccccctttcttcacggagctgcttctcctcgtgatggcgcaccacagttctaacgagcttcttcgcagcagccaccttccacctcctctcctggggcaaagtctgtggccatccactgcatctcctccagcagataggtcccagtgggctttggggggcgtgggggcctcctgcagctttgggcaggacggctctgggggaccacaggacctgctttcctcaggctccgcaatgggctggatgcannggggttctccagaggttatttgtttctgttcagcgtatnctgaggaactgtctngggacgaggtgggcattntgaggaggganttgtgggtttggtgggggggaagatgcaccccctnggggntccgggaagtnactggaagaaagtncttattggtggcttaaggaaggtntatttactgganaaggat

SEQ ID NO: 6203 - DNA, 419 bp, Homo sapiens
  I.6203 (T78156)
  misc_feature (410)..(410): n is a, c, g, or t
gagcgtcctgcaaccccagccctcaccaggatttcttgcgtttttcaggaaatcggttgtgattggcatgttccttaagcgtctgcaggaagccgaggcctttttggtatttcaggaggggttgctaaccccctccttgtaggatcggggtatcccagctgctaattcccctcctaacagccctgcagcgcctggattggaggtgtgacaggtggcatttttggcccgaagtccctaggcaggacgggtggctgtagctggcgcgtttgtgtaaattaacctccctttttagttctgtgaagggagaacgtgattagtttaaaatcacctgcgtgaaagaggctcttgattagtttaaaaatcacccacgtgaaaggggctctttgattagctttaaaatcaccggggtnttttcgttt

SEQ ID NO: 6204 - DNA, 510 bp, Homo sapiens
  I.6204 (T77995)
  misc_feature (270)..(270): n is a, c, g, or t
  misc_feature (361)..(361): n is a, c, g, or t
  misc_feature (376)..(376): n is a, c, g, or t
  misc_feature (492)..(492): n is a, c, g, or t
  misc_feature (500)..(500): n is a, c, g, or t
ttttgtagataatggggtcttaccatattgcccatgctggtgtcaaactcctgggctcaagcaatcctcccacctcagcgtcccgagtagctgggaccacaggcacccaccaccatgccacactaaaattttttttttgggggggagggtagagaaggggtcttaccatgttgcccaggctggtgtcaaactcctgggctcaagcgatcctcccacctcagcctcccgacatgtaaacggtggctacatttccgcacaatccccgcggtntccctcattctgttttacaactactcccacataaagtaacgtaggaaagacggagccccgttattcccttaggaagggtaggactgggagntttgcagggaagctntaggggattaaacattcagagggccaacttgaggattaaaacggaaacacccggggtgatttttaaggttaattcaagaggccccttttcacgtgggggtgattttttaaacttantcaggggnctttttttca

SEQ ID NO: 6205 - DNA, 429 bp, Homo sapiens
  I.6205 (T77350)
  misc_feature (305)..(305): n is a, c, g, or t
  misc_feature (337)..(337): n is a, c, g, or t
  misc_feature (350)..(350): n is a, c, g, or t
  misc_feature (370)..(370): n is a, c, g, or t
  misc_feature (401)..(401): n is a, c, g, or t
  misc_feature (413)..(413): n is a, c, g, or t
  misc_feature (418)..(418): n is a, c, g, or t
agaaactgcatcagagtcaacaggcaacctacagaatgggagaaattttttgcaatctatccatctgacaaagggctaatatccagaatccacaaagaacttaaatttacaagaaaaaaagaaatatccccatcaaaaatggacaaaggatatgaacagatgcttctcaaaagaagacatttatgcagccaacaaacatatggaaaaaagcttatcaacactggtcattagagaatgcaaatcaaaactacaatgaggtaccatctcatgtcagttaggatggtgatccttactaagtcaggganacaacaggtgttgggtgaggaatgttgagganatatggaaccctntttacactgttgggtagggngtgttaaatttgttcaaccttgtggggaggnccgtgtgggtgntttcnttaagggttct

SEQ ID NO: 6206 - DNA, 512 bp, Homo sapiens
  I.6206 (T77048)
  misc_feature (375)..(375): n is a, c, g, or t
  misc_feature (455)..(455): n is a, c, g, or t
  misc_feature (460)..(460): n is a, c, g, or t
  misc_feature (492)..(492): n is a, c, g, or t
ttattttttaaattttcttttattttactttaagttccaggatacatgtgcagaggtgcaggtttgttacagaggtatacatgtgccatggtggtttgctgcacctatgaacctgtcatctaggttttaagccccacacgcattaggtatttgtcctaatgctgtccccctgctggccccccgtgccccaacaggtcccatgtgtgatgttcccctccctgtgtccatgtgttctcattgttcaactcccatttatgagtgcaaacatgtgggagtttgggttttctgttcctgtgttaggttgctgagggatgatggatttccaggcttcatccatggttcctgcaaagggacatggaactcatccttttttanggctgcgtaggtattccaggggtgtatatggtgccacaattttctttatccaggtacatcattgatgggggcattggggntgggntccaaggtctttggctattgtggaccgggtgnccacataaacatacaagggg

SEQ ID NO: 6207 - DNA, 518 bp, Homo sapiens
  I.6207 (T71619)
  misc_feature (28)..(28): n is a, c, g, or t
  misc_feature (480)..(480): n is a, c, g, or t
  misc_feature (494)..(494): n is a, c, g, or t
ctgagaatcattttgcctactggtccanccccttctcctctctctgctccaactgcctcagaggacatttctataggcaagaacctgaagctaaaggtcatattgccgttagggaaattgcaagttcaatctagctagaatttagtgggcagaaggggtggtctgaccagagcatgcagccagattaggccttggtggagacttgtttgtggacagtttgtttggctcctggcttcaggaatgtggactgaccagggagttaaccactgtgaatgcagacagccagtggaaactgtcaataggtgcaccattcagcacgctaagcagatgttacagagaccagaactaaatgggagcatggtgcaagacaatgcttgcttagggagatgagacagactttgaatacatatgtacggtgagcattatcctgaatcatctgttaatgcaatcaagcatgggtaaataaacagggaaaaaatnttaagcttgaggtncaccagaagagtttggggtttagt

SEQ ID NO: 6208 - DNA, 207 bp, Homo sapiens
  I.6208 (T69815)
  misc_feature (76)..(76): n is a, c, g, or t
  misc_feature (93)..(93): n is a, c, g, or t
  misc_feature (116)..(116): n is a, c, g, or t
  misc_feature (118)..(118): n is a, c, g, or t
  misc_feature (137)..(137): n is a, c, g, or t
ttatcactttaggaggtttatttgccaacgttaaggatgcacaccaaggagacaggtctatgcttttcttcaaaantgattatgagggttccnaatttaaaggggaaagggtgaantnttgagaaatacagttttcntgtaagactggggtaaggggaaaacattcattgatacggtttggctctgtgtccccacccaaatctcacc

SEQ ID NO: 6209 - DNA, 386 bp, Homo sapiens
  I.6209 (T80560)
tttttatagggtttgtagagctctgatccttggttaaagatccctgacaatgtctaatagctgttttgaaaacctgtacctccaatcttgaagctaaggttttagttttagttttagtatgtgaatatctgatgaaacgattcaatggttttgtagcattggattcaatttcagggttgggctcctttctaggaatagaggaatattcttatctcaggaaaaaaaattcagagtgtgggaagtacgaaaattattaattcaaaggtgtatttgctgtcagattggatggcagtacccacatccctaggggctcctgttcccaaggactgttttcattgtttctatccagcgctgggcacgagcctttgaagtggcgaatttcatcc

SEQ ID NO: 6210 - DNA, 482 bp, Homo sapiens
  I.6210 (T80364)
ctggaatttgctttgtactagtgatttgaaaaataattttctggataacgaatttccatactaaagcatcagtcaccaccaattccttattaagttaattctccttagtaactttggtgttaaagtggtaactatctgaacccaaaataaatttgtgaagagtaatttattcattctaaaaagaaattttcttacattgctagaaaagaatagtatctactaatcttattcccatactttatgaagggtgattatttagagagttttaaaagaaattaacagaacatttaaaagtgtgttctttgttgtttgtttttaaataggcaaatgaatctaacctgacatcttttttccccttgctaggaaatattgagctgaatgaattacattccgaaaatgtaatgaattagtacacattttggaaatggaaaaactccaaagttttcctagtttttaatatccttgtctgggaggagtgtatc

SEQ ID NO: 6211 - DNA, 483 bp, Homo sapiens
  I.6211 (T80034)
  misc_feature (351)..(351): n is a, c, g, or t
  misc_feature (456)..(456): n is a, c, g, or t
  misc_feature (470)..(470): n is a, c, g, or t
  misc_feature (478)..(478): n is a, c, g, or t
ttagaattaaggatgacttcattaaagcacctctagtggtggaagatgtccatcctatcccccacccatagctgggagctatgtttggctcattcttcctgactcactggattacactgtgactcagttcaatttcacacatgctgctgctaaattagggtcttggtgagcctttgggaggacagctctgaggaatgaattgtagcactgcagccctgcctgaggaacatgatagaaacaggtggtaggcccagctcttgccttccacctactaagcagtttttctgtggttagctgtgtgacataaactatcggtgtattaatttgctttcactaggattcccccccccncaacaacttaggtccaagaacatacctggaattctttggcatttcctttgcctttagtttgctttttgtagggggtgggacagcagggacttgcattgaggaatnaggctggtgctttncttgggancccta

SEQ ID NO: 6212 - DNA, 478 bp, Homo sapiens
  I.6212 (T79997)
  misc_feature (378)..(378): n is a, c, g, or t
  misc_feature (407)..(407): n is a, c, g, or t
  misc_feature (450)..(450): n is a, c, g, or t
  misc_feature (455)..(455): n is a, c, g, or t
  misc_feature (474)..(474): n is a, c, g, or t
gcatctggggtctgcttcatttattcactagccatcactacaatcaccagcttttaaaacaacagctaccagaaatacaaagagtgccattggaacagctgtgtctaagaattaaaattttagagatgtttagtgctcataatctccagtctgtgttctctcggctcattgaacctccacacaccgattctcttcgtgcctcaaaaatacgattacgagacttaggagcattaactccagatgaaagattgacccctcttgggtatcatttggcctctctgcccgtgggatgtgagaattgggcaaacttaatgttgtttggggtctatcttccgctgtttgggatcctgctcttcaccattggcttgccagtttggnctttttaaagtctccgtttgtattctccngggggataaaaaaagaagaagcttaaccaggaaaaagctgggnatttngcattcggcaaacagtggntatc

SEQ ID NO: 6213 - DNA, 491 bp, Homo sapiens
  I.6213 (T77969)
  misc_feature (457)..(457): n is a, c, g, or t
ggacgaggctgaagaagctttatagatgtgtcgttacacttcatcacattaaggaaggaaattgtgtgatacagggattttgcaagaattaccaaagttctctggatggatccctgatgagggcttgacagtgcctgtcctcgaaatgcaggttaaccgctgtgtcctttgttagaggacttggccccgcactaagcatgctgagtttcatccactgatgttctcactcatgtggagagtatttgtggtgcatcctgggaaacgcaattgcaggtagctttctgagccgactagcaatctaaactgagcccacggtgatgagattttcttcaacgccactctttgggatgctgctggacttgtggatgaaatggggcaggggaacccttatggattttaaagcttgcaacttctggaatgcctccagtccccgaggagtcctccagcctgggcattncaggaaccaagcccctttcacctccacggggttc

SEQ ID NO: 6214 - DNA, 483 bp, Homo sapiens
  I.6214 (T74288)
  misc_feature (332)..(332): n is a, c, g, or t
  misc_feature (351)..(351): n is a, c, g, or t
  misc_feature (446)..(446): n is a, c, g, or t
  misc_feature (452)..(452): n is a, c, g, or t
  misc_feature (471)..(471): n is a, c, g, or t
  misc_feature (478)..(478): n is a, c, g, or t
ggttgtgcgacatgagttgggtgttgttgtggagaagaattgggccctttctgttgatgaatgtcagctgcaggccttgcagttttcagtgcatcacattgatttgctgggcatactactcagatgtaatggtttcacagggattcagaaagctgtagtggatcagaccgtcagcagactaccaaacagtgaccatgatcttcttttcgtgcaagtttggccttggggagtgctttgaagcttcttctcaatgcaaccactgagctggtagtcaccagttttcatataaaatccacttttcatcacatgtcacaatctgatagagaaatggnttgttgttgttgcataggnataaggcaaggtgccctttcaaaatggatattttttaaaaatttttcacttcaggctccatggagggcacccacttatccaggcttttttcaccntttccnatttggcttccaaatgccnagggccntaggg

SEQ ID NO: 6215 - DNA, 477 bp, Homo sapiens
  I.6215 (T74053)
  misc_feature (455)..(455): n is a, c, g, or t
ctcaaacaatatttatacatttatttactccagggtcaaatccaatcctttggaagtagcttctctagtttattttatttgtcccagagctctactcacacttaggacccacccaaaaattctcaaaaacgtaatatggattctgcctcatctgatgctatttctggcagtgggttgtcagccatactctgcttcattccactgggtgtccttgctagatggggagtgagatgtggagcagggaggagctttggattctgggagtggaggtggcaagggaaaagtctcctagtctcctgtgatgttcctgcctccagataggaatagcaaaaacaaacaatttttttttgtgtattatgcctccatgacattgtttacattctatggagggagcatctgtctcctttcttaggacttggaactgtgggtaggaaaaagcccccttcttcttcttnctatcctacttaggaattgggt

SEQ ID NO: 6216 - DNA, 295 bp, Homo sapiens
  I.6216 (T72535)
  misc_feature (31)..(31): n is a, c, g, or t
  misc_feature (272)..(272): n is a, c, g, or t
  misc_feature (294)..(294): n is a, c, g, or t
atgacctctgcaaagagaaggtcagctatangtagggagaaaaggaagaaggcaagaaaaggagactcgagatgagtttacatccaagagaagcacagatgtttgtaatctacctagaataatgtgaagtacctgtccagcatgtatgctcagatcctccattcattagcacaagctgaaaacatgaactgcaaattctacaccagcatcctttgcttcctccatggcagtgggaggtagcaaggggagtccaacacttctccatgacgtangaaaggcagggaaaaatactgnt

SEQ ID NO: 6217 - DNA, 389 bp, Homo sapiens
  I.6217 (T70414)
  misc_feature (275)..(275): n is a, c, g, or t
  misc_feature (329)..(329): n is a, c, g, or t
  misc_feature (366)..(366): n is a, c, g, or t
  misc_feature (373)..(373): n is a, c, g, or t
ttgttttatagttatactgttcataaatcatttttccccatttgtgatcaccaagaatggttaaaacaaagctttggtctaaattagcatgcaattgctagacatttttctttcctcttgtggggagactggaaaatatttttgaagtatatatgggtagctacactttgtctgctccaacattagactaggtctagggtgaagtgcagtaaactgcttcccaaggcagagtgaggcttttaggaatagggaagtcaacatgggctcagcaagtnaattcacatggcaaatggaacctgcctgggaacattttagttaggaaaaaaatnggtaattagccagactgggatgtatcccggggtcccnaggattncggttaccccccattt

SEQ ID NO: 6218 - DNA, 467 bp, Homo sapiens
  I.6218 (T70330)
  misc_feature (398)..(398): n is a, c, g, or t
  misc_feature (456)..(456): n is a, c, g, or t
  misc_feature (463)..(463): n is a, c, g, or t
attgacataaacatgattagcgatttctggaagcatgtgggatgctgcattgataaggatatgaacctccttgagtaataatgtatatttttactccgaatactgtttcacattttgggtgttacatccttacttcagacttctgccttatcagtggccatcccaccctatgttcttatctcctcagtctaaaaagaaaaatggggacccatcagaatttggatagaagaccctccagggaatttctgccactgcttattcatggggttgggcacagacactgattcagtggggcacacaggagttcaggaatgattcaggaggcccaggatatgtggccctaaggtcacatctccaggcgtccgggggagggacttgttaaggtgcttcgtttatcnggggaaaaatggaaaccaggggctcaggctactcctggaggtcatttaaaactccttncccttgntttt

SEQ ID NO: 6219 - DNA, 345 bp, Homo sapiens
  I.6219 (T69485)
  misc_feature (210)..(210): n is a, c, g, or t
  misc_feature (271)..(271): n is a, c, g, or t
  misc_feature (306)..(306): n is a, c, g, or t
  misc_feature (311)..(311): n is a, c, g, or t
  misc_feature (323)..(323): n is a, c, g, or t
tggcaagcaatggttgtctctaagtaacacagaagaagtcctttttcaacaaagcctttaaaaagcctcccagctctcaggcattcgaaaaacacagttgtgtgtgtgtgtgtgtgtgtgtgtgtgtgtgtgcgtgtgtgtgtctttttctttttcctgcaagacttagctgtgaagtcaaggtcactattcctaggggagctcagctgncacaaggaaggcctaggaggctgcattggctggggcctggggagcctggccctggaccctnctggtggctgggacttgtggcttttcccacccggnctccnggggacccttgncttttctttttcccagtgggtt

SEQ ID NO: 6220 - DNA, 565 bp, Homo sapiens
  I.6220 (T67452)
  misc_feature (477)..(477): n is a, c, g, or t
  misc_feature (527)..(527): n is a, c, g, or t
  misc_feature (555)..(555): n is a, c, g, or t
gcttaataaattggggtcctaggtttttattttttttccacctgggggataatattactaatgataattattatggttattggtatagtaataaaacacttattgagcatttattatatgccaggaactgtgcttaacattttacacactttgaatcatttaatccttctactaaccttatcacagataaggcctcttattatccccatttcccccatttccctgataaggaaggcacagagaggttaggcattttgttcaaggtcccacagcgctatgataagtcacagaagccagggacctgaatccagcttttgtttctccagaatctgtgctattaatcaggtatataacctgctctacatcacaagtgttcctatctgttttacatactggggcctctgttggtagggtctcatttaaacaaggggtctgggaaaggtatataatacaggcttttttttttaggatgatccnattaacattgaggaaattgggtgcaggcccatttgggaggggcccatggngtctttggaaatgctggggggccatggntgacccggcc

SEQ ID NO: 6221 - DNA, 396 bp, Homo sapiens
  I.6221 (T67089)
  misc_feature (290)..(290): n is a, c, g, or t
  misc_feature (318)..(318): n is a, c, g, or t
  misc_feature (329)..(329): n is a, c, g, or t
  misc_feature (344)..(344): n is a, c, g, or t
ggaaatgccctcacagcatatgccttgtttaagattgcaacacctgctcggtataccgtgactttgggaggaacatctgtcactgtgaagtatctgcgcagtcatggctacatgtccacgccgccacccgtcaaggagtatctgcaggacaggatggaagagacaaaggagcttatcacagagaaaatggaagaaacaaaagatagactcactgaaaagttacaagaaaccaaagaaaaagtttcctttaagaaaaaagtggaataaggtgccttatatagcagtatagnaaattcctgcactttaaccctttggaanctatgggcaangatacatgtgtctgnttatttttttggttagttgccgccatatactagttctctgaggggttaaaga

SEQ ID NO: 6222 - DNA, 298 bp, Homo sapiens
  I.6222 (T67088)
  misc_feature (69)..(69): n is a, c, g, or t
  misc_feature (81)..(81): n is a, c, g, or t
  misc_feature (132)..(132): n is a, c, g, or t
  misc_feature (149)..(149): n is a, c, g, or t
  misc_feature (151)..(151): n is a, c, g, or t
  misc_feature (173)..(173): n is a, c, g, or t
  misc_feature (258)..(258): n is a, c, g, or t
  misc_feature (263)..(263): n is a, c, g, or t
  misc_feature (284)..(284): n is a, c, g, or t
tttgaaaagtaccatcaccatatatatatttgctttaaaaaaattatgacaagcttcaggtaaaaatantttttaaagggnccatttttcatttacgtacaatcagtacatcttatttacatatatgactgnttctttattctattttntncatataagatattttaactggnaggtaactgctctattctgtttttatagaaagactaaacaccttatttacaggcagttttgatgatgctagtttgtctccaaatnacggnactgaatatagttaaaatctnaatgaataacataa

SEQ ID NO: 6223 - DNA, 452 bp, Homo sapiens
  I.6223 (T66344)
  misc_feature (66)..(66): n is a, c, g, or t
  misc_feature (68)..(68): n is a, c, g, or t
  misc_feature (81)..(81): n is a, c, g, or t
  misc_feature (368)..(368): n is a, c, g, or t
  misc_feature (421)..(421): n is a, c, g, or t
  misc_feature (428)..(428): n is a, c, g, or t
  misc_feature (438)..(438): n is a, c, g, or t
  misc_feature (447)..(447): n is a, c, g, or t
acatgagtacctgtatctctttcgagtctacaccgcagactgatgattgaacctaaacgttttctncnttttgcttttctncctggttgtgagacaaatgcaatcggtgaatcgactcatgtgacatagtgaaggttacagcaaacaagaagatgaccaacaacttttataaaaaaaagtctctaaagtttattacagtgatggcatttatatcaattattgcaatgtattgttccctaagatggttagaaaaaagaattgtgttgtcctctactgaatttacgtcagttaaaaagcaagcatgtttcagtatttgttttctccaaagtaagtgtacatacttcctttattttttttttcccacaggntttacatgtttgttcattattttcttatccacagtttaggtggatttgttttnctcggcngggattttcntcccagggnctata

SEQ ID NO: 6224 - DNA, 393 bp, Homo sapiens
  I.6224 (T66332)
  misc_feature (144)..(144): n is a, c, g, or t
  misc_feature (159)..(159): n is a, c, g, or t
  misc_feature (161)..(161): n is a, c, g, or t
  misc_feature (188)..(188): n is a, c, g, or t
tctctcacgcttctgtctcagagcccgagttagcataagagaaagagcctgttcctctctagggagaggagggttgcggtctggaggtctggctcgtctttatctgcgcattctcccagcctcctggcttcagacctcagcgangcggcggctgcccgncntctcctcttcctgcctgcagacctggnctgctgcttctttctccttcctccctccctgcctgccctgcggtttcaaagtagattagaaataacagtgtcccacatggaagcctctacttcttcctggggtcaactttgatgacgaggctccagaaaacctttgcaatgctgtgtgggaatttttaaatcggtgagctcgtgctcttgccctatttatttgtccagcgtacat

SEQ ID NO: 6225 - DNA, 536 bp, Homo sapiens
  I.6225 (T66291)
  misc_feature (309)..(309): n is a, c, g, or t
  misc_feature (334)..(334): n is a, c, g, or t
  misc_feature (417)..(417): n is a, c, g, or t
  misc_feature (467)..(467): n is a, c, g, or t
  misc_feature (514)..(514): n is a, c, g, or t
actgtaaagacatttcatgacaaggaaatactatttaaagaatgttgtcaaacataaaagagcttttaagttcatccagaagtactaagatatacagtgcagcaagttaaaagatgtttcctgcccagatttactaacagtagttaaatattataattttagaattagtttttccacaagtaggaccacaaactctagacagattcattcttcggtgtagttaagctttcctttccctgggataagcagttttcatatgaccaaaagaacatggaaaaaatgcagatgtctaattatttatatttcggngtttgttgtgggacatattgttgangaaacagaaatatgggtaacactccgcgttctttctgcttcctttccatgcaacccagctgacccttttctgaagccataggnaacaaagccagattatccatcactgggagtgtggggagagatggccgcgncttgacgcctgactgcccaagggtgtacacactgggactgcatcggncaaggtcgggatggctgtcatg

SEQ ID NO: 6226 - DNA, 528 bp, Homo sapiens
  I.6226 (T66282)
  misc_feature (30)..(30): n is a, c, g, or t
  misc_feature (163)..(163): n is a, c, g, or t
  misc_feature (216)..(216): n is a, c, g, or t
  misc_feature (322)..(322): n is a, c, g, or t
  misc_feature (338)..(338): n is a, c, g, or t
  misc_feature (362)..(362): n is a, c, g, or t
  misc_feature (384)..(384): n is a, c, g, or t
  misc_feature (434)..(434): n is a, c, g, or t
  misc_feature (439)..(439): n is a, c, g, or t
  misc_feature (446)..(446): n is a, c, g, or t
  misc_feature (457)..(457): n is a, c, g, or t
  misc_feature (495)..(495): n is a, c, g, or t
  misc_feature (519)..(519): n is a, c, g, or t
ttttattcttaaaaaatgttcgcatataancacgcttatctcaactaactgtaaacctttttattttctcccagataggaccttgaaatgatccctgttcccctgcacactcccagccacaccccctttacaccgcagggcccctagccctcatctccctcgntctccgtcttcctcttatccatcatcacttcctcaataaatacattttgggtncttcctgcatataaaacatcctgccagctctgggcattctgcggtaaacaagggtcatgtcctatgcagcttcattagctgattgaccactgaccactcctggggnggcgactgcagggtgntcaggaaagtgcctgggtggaagntgtgctcgtgtgttccagaagnaaggctgtccggcctgagaggggcgggagggcacatgagatgaggtgggnggggnaggggtncagctggactnagggtttcatttcatcctgaaggtgggggaggaggctnggagacaggtgggcagaggggagncgtggtcat

SEQ ID NO: 6227 - DNA, 487 bp, Homo sapiens
  I.6227 (T66055)
  misc_feature (438)..(438): n is a, c, g, or t
ctattagtctttggtttaaaatcttaccatggatttatcttcaggataaaataaaattctttaacacagaaaaaaagacccttccatgctgtgagccttcaggattcagtggttaaccagtatcatctttctaacttcctgacctgcaagtctccctctgaccacactgagctttcacccttccctagctgactgaggtgttcttgcacctccaagaatctgcacacaatcttttcttcttccttcatatccttctggatctggctaactctgactatccttcaagacatggttgggtatcgctttgtctgggagaataacctgtatgcccccaaagatgggggataaaacaccctttctagatgatctgggtagtttctggagtctggcttctaacaaggttaactccaaattcctcagcccaggattgaggggaantccttttcactccttttacctggggattttcacccgtggcaggttttgg

SEQ ID NO: 6228 - DNA, 339 bp, Homo sapiens
  I.6228 (T65296)
  misc_feature (220)..(220): n is a, c, g, or t
  misc_feature (278)..(278): n is a, c, g, or t
  misc_feature (307)..(307): n is a, c, g, or t
  misc_feature (318)..(318): n is a, c, g, or t
  misc_feature (323)..(323): n is a, c, g, or t
  misc_feature (333)..(333): n is a, c, g, or t
tgtttttatagttaacattttttttaataaataggaaaacaccctaaaataactgtgaaaaatatagtacagtaaatatacaaaccactaacatcgtcatttattattatcaagtattacgtactgtatgtaattgtatgtgctattcttttttacaactggcaaacaagtgagtaatgtgttgctctaccacatgctgatggctataatgtcaccaggnaataggatattttcaggtcctgggatcaccatcatatatttgatctgttggttgactnaaaagttgttatgcagtgccttgattggnatacctttttnaaaantcattggagnccgccc

SEQ ID NO: 6229 - DNA, 437 bp, Homo sapiens
  I.6229 (T65193)
  misc_feature (84)..(84): n is a, c, g, or t
  misc_feature (95)..(95): n is a, c, g, or t
  misc_feature (120)..(120): n is a, c, g, or t
  misc_feature (204)..(204): n is a, c, g, or t
  misc_feature (366)..(366): n is a, c, g, or t
  misc_feature (384)..(384): n is a, c, g, or t
  misc_feature (431)..(431): n is a, c, g, or t
ttcagtccagccaattcagtgatggggcttcccagggcagaagagtggaggtaagctcgataaaccacagggcctggctgagtngggaggcaganactcagcagcagcagagccttggtnggaagatcttccttcccaagggcctgagagccacgctgataacatcttttctacctccacagtcacagagcacaatagggaganggggtactggttctgaacagaatgggttcccttcatagagccgatgtttcagaaaatactgctttttgttcttaaactctgttttcttactgcccacccccagttttttttttaagtctattaaaatgcaagataaattttaccattgtttgttagtctgtntttatcttgcagcaggcnaattttgtaaaacatgaaatataggggacctcttgaaggagatgggntttttc

SEQ ID NO: 6230 - DNA, 591 bp, Homo sapiens
  I.6230 (T65124)
  misc_feature (50)..(50): n is a, c, g, or t
  misc_feature (221)..(221): n is a, c, g, or t
  misc_feature (231)..(231): n is a, c, g, or t
  misc_feature (257)..(257): n is a, c, g, or t
  misc_feature (297)..(297): n is a, c, g, or t
  misc_feature (350)..(350): n is a, c, g, or t
  misc_feature (375)..(375): n is a, c, g, or t
  misc_feature (383)..(383): n is a, c, g, or t
  misc_feature (401)..(401): n is a, c, g, or t
  misc_feature (455)..(455): n is a, c, g, or t
  misc_feature (466)..(466): n is a, c, g, or t
  misc_feature (487)..(487): n is a, c, g, or t
  misc_feature (507)..(507): n is a, c, g, or t
  misc_feature (562)..(562): n is a, c, g, or t
  misc_feature (582)..(582): n is a, c, g, or t
  misc_feature (588)..(588): n is a, c, g, or t
tttttttttaagacttaacactttatttgccaaataaaggagtctggacncatgttttaaaagtacacagtcacctattcactttccaaaggaaatgaaaatataacatgcatccactcaaatgatctgagagatggggacatcctatagtatcattaggagaacatagtggctattttcactactaatagcattcccttcctctgctaattcccatgagncttaaggagnaaagcagaccgagcagtcatatcagnatgaaaggccaacttgttcaacactacccaaaacaggggnaattcctaggtatattaaaaattggaaattaaatgcattcaaggcctttaagnctcctaggttctatggctagtgggnggggcttnattcccttgcctttgggnggagggtagggttacttggattccattaaaaaaatcaggctgatcccccggggnggattttcttncacatacattttcttccctgnggggcttattttattaggtnccctggggggggggctctttcctccatggttttcccccattctttccggggcttncaactgggcggcttcggccntacctnatc

SEQ ID NO: 6231 - DNA, 422 bp, Homo sapiens
  I.6231 (T64782)
  misc_feature (23)..(23): n is a, c, g, or t
  misc_feature (90)..(90): n is a, c, g, or t
tgtgcctctctaactaaagcctncccacctaatgtatattagataaggggtgggggatggtggtggtagtaatcaggactctgaccaatnttctatgccaaaggatgctaaagatacaaagttttcagttctcagtagatttccatgaaaagtccttggccaccctggaagaggcatactgcctgtcctacctccacctccaacatgaatttgacttggagtatttatgttctaaaggactgaagaacctccactcctatcctgtcccaattcaggattgtctctttcttccttccagggtcacttgcaacagtactggtccagatgaaataaaactgtcaagggaatcctgggagctattttgtcaaaaggcagccattgggagccaaacctcttgttgggcattacttcagtgccccttt

SEQ ID NO: 6232 - DNA, 405 bp, Homo sapiens
  I.6232 (T77474)
  misc_feature (115)..(115): n is a, c, g, or t
  misc_feature (136)..(136): n is a, c, g, or t
  misc_feature (170)..(170): n is a, c, g, or t
  misc_feature (176)..(176): n is a, c, g, or t
  misc_feature (187)..(187): n is a, c, g, or t
  misc_feature (374)..(374): n is a, c, g, or t
ttggaaaagggtgtcttctgtgcccttgttaatttattttatagtgatttggttcaaagatgtttacaggacacacacacacacacacacacacacacacacacacccctagagnaaagtacagatttccagtggntatttcaagcacagttctgctgctgtggcttcantttggnagctgtcaatnccggagcaaactttcccaactacccaaccccaccatggccagggcatgtgcaatgccagccctttcttgtcttggcacatgcacagacccagtcccctcacggtagggcacccctgacctacgggtttccaagagagcagctgcagtggttgggaggagctttaccagtgtgccccaaggagtggantggagcccaatctaagtattccttgctgctt

SEQ ID NO: 6233 - DNA, 446 bp, Homo sapiens
  I.6233 (T77260)
  misc_feature (28)..(28): n is a, c, g, or t
  misc_feature (29)..(29): n is a, c, g, or t
  misc_feature (30)..(30): n is a, c, g, or t
  misc_feature (99)..(99): n is a, c, g, or t
  misc_feature (405)..(405): n is a, c, g, or t
  misc_feature (429)..(429): n is a, c, g, or t
  misc_feature (438)..(438): n is a, c, g, or t
cagtgaactctgctagatgccaggaagnnnaaaggaaaggtcaatgagaaataaagtgctcaagggcagattcaaggaaaacatggggagcattcaganaaccaggtcttaaaagagaagttaaggagaacagcaagaagcaagcacacaggagcaggcagaggcacactggttgagaaagtaggatgcccagcagcctgggtctgattaaatcagaaattccctctgtaggaggacaagcaaagcatattatcataggctgggcagaattccaaaggtcatttcatccaacactccttcagacgctggaaacttcaaggttttcggaaggccaaaagtgggaagtgttaggacatttgcttacagattttgaagccccaacatttttgtccttttgccttttcntaatttttggaggaccaaattttnaaaccttcntggaattt

SEQ ID NO: 6234 - DNA, 409 bp, Homo sapiens
  I.6234 (T77080)
  misc_feature (356)..(356): n is a, c, g, or t
  misc_feature (361)..(361): n is a, c, g, or t
taaataaacctgaaacttggcacatttgctagtttaatgtgcatcagtatctgaactaggttgagcctggaataatgaaaacacttcactagtattaactaatgttttctacatagtagttcccaatagattaaggaaaatttccaacctgagattctttgttttggaatttgaataatgtgtttgtaactattccttgattgtcccaaatccagggtttacgtctgcttttgtcaatgtaacatcctagtgccaggaaattggaaaatccaatgactttttgtgtgtaaagtactggaatttttttgttcgtttgtttttaagacggagtgtcaactctcgcccagggtggggtncagtngcctgatctcggctcactgcaaccttctcctcccgggctgaagtgatt

SEQ ID NO: 6235 - DNA, 428 bp, Homo sapiens
  I.6235 (T75332)
  misc_feature (12)..(12): n is a, c, g, or t
  misc_feature (55)..(55): n is a, c, g, or t
  misc_feature (352)..(352): n is a, c, g, or t
  misc_feature (405)..(405): n is a, c, g, or t
  misc_feature (419)..(419): n is a, c, g, or t
  misc_feature (424)..(424): n is a, c, g, or t
agatgggaaatncttgattgacattttctttagcatttaaaatttttggcatttncagcttcatgacaaacagttttgtgccataccttagaaaatgtggtgctgagttaaataaaggctgtttgagcactggagcagaaaaatgcattatttgcaaactggtggataattttgtgccttctcttctggccaccaagccagtgtagaaacagcaaaaatgtcataaaaattcttatatttaaaacaaaaacaaaagcaaaaacaaacattgaattaaattaagttttgtaattttaaactttaaaaacttctactgaaaatatttccgccaaatgccatccaatattttagnctgtacctcgtttgcaaaactgctttgagaggggaggagtgggacagctcccntcagccttgttctncttgnggaa

SEQ ID NO: 6236 - DNA, 278 bp, Homo sapiens
  I.6236 (T53592)
  misc_feature (10)..(10): n is a, c, g, or t
  misc_feature (14)..(14): n is a, c, g, or t
  misc_feature (28)..(28): n is a, c, g, or t
  misc_feature (40)..(40): n is a, c, g, or t
  misc_feature (64)..(64): n is a, c, g, or t
  misc_feature (198)..(198): n is a, c, g, or t
  misc_feature (201)..(201): n is a, c, g, or t
  misc_feature (211)..(211): n is a, c, g, or t
  misc_feature (236)..(236): n is a, c, g, or t
tgtttattcnaggnacacactggctcangcggactcacanccacaaagctgagcattaaacaangacagaatcgggtttttataagtggacttacaataaataaaacaaaagcagttaaccaaatgataggtcatataatctatagcatagcataacttgtggccttgcataggtggtggccttgtagctgcattganagncaaacaacanccggctaaatacagacatttgtaanacataatcatgcttaagaagactgggaaaggagtaacagtaa

SEQ ID NO: 6237 - DNA, 288 bp, Homo sapiens
  I.6237 (T53591)
attcttttactgttactcctttcccagtcttcttaagcatgattatgttttacaaatgtctgtatttagccggttgttgtttttctttcaatgcagctacaaggccaccacctatgcaaggccacaagttatgctatgctatagattatatgacctatcatttgggttaactgcttttgttttatttattgtaaggtccacttataaaaacccgattctgtctttgtttaatgctcagctttgtgggatgtgaggtccgctgaggccagtgtggtacctaaaaattaa

SEQ ID NO: 6238 - DNA, 244 bp, Homo sapiens
  I.6238 (T49511)
  misc_feature (39)..(39): n is a, c, g, or t
  misc_feature (146)..(146): n is a, c, g, or t
  misc_feature (157)..(157): n is a, c, g, or t
  misc_feature (169)..(169): n is a, c, g, or t
  misc_feature (176)..(176): n is a, c, g, or t
  misc_feature (238)..(238): n is a, c, g, or t
aaaatatcctatttgaaatttaaaatgttttattctgancataaaataatatagtcttagagaagaagaaaataaaacctacctttaaaatcattcaaaatattctgatagaaattatttaaaacattaagtaacttacatttganctttcatcccncatttgcaaaanccgaaangatacatttatcaaggaattctcataccttgcactgttctactttatttccagcttcatccntctctt

SEQ ID NO: 6239 - DNA, 314 bp, Homo sapiens
  I.6239 (T47430)
  misc_feature (303)..(303): n is a, c, g, or t
  misc_feature (311)..(311): n is a, c, g, or t
gtgagcactgtgtactgtgctcggtagtcatacagtcttaacatgtaactacatacagcattacatctgatctaaattttctcttcgagtacttaagccattaaaacatacagcagccattactctcacctgttgccatttctgctggaggtatgtatctttgactgagtacagatacttgttcatttggtcaagactcctgataatagccatcgagagtcatagtttcccagcaatgatattcacgagccaattttacattctcactaatcatagaggctcatgttcactgtaagctaaaangaggaggnaaa

SEQ ID NO: 6240 - DNA, 361 bp, Homo sapiens
  I.6240 (T47429)
  misc_feature (183)..(183): n is a, c, g, or t
  misc_feature (190)..(190): n is a, c, g, or t
  misc_feature (193)..(193): n is a, c, g, or t
  misc_feature (206)..(206): n is a, c, g, or t
  misc_feature (281)..(281): n is a, c, g, or t
  misc_feature (290)..(290): n is a, c, g, or t
  misc_feature (300)..(300): n is a, c, g, or t
  misc_feature (314)..(314): n is a, c, g, or t
  misc_feature (319)..(319): n is a, c, g, or t
  misc_feature (333)..(333): n is a, c, g, or t
  misc_feature (339)..(339): n is a, c, g, or t
agggtttcgccatattggcaggctggtcttgaactcctggcctgaagtgagctgcctgccttagcctcctaaataaaatatttctttgaggccaggcgcggtggctcatgcctgtaatcccagcactttgggaggccgtggcgggcagatcacctgaggtcaggagttcgagaccagcctggncaacatngtnaaacccatttttnccaaaaatacaaaaaaaattagccgggcattgccggttggtgcctctaatcccaactacttgggaggctgaggtnggagaattnctttaacccnggaggcagaggttncagtnagccgagatcatgncatttncgctccagcctgggccacagag

SEQ ID NO: 6241 - DNA, 70 bp, Homo sapiens
  I.6241 (R16541)
ggcaaaagccttgggttttgggtgatccatattaactacagacagatgcctggttaataatatttctgaa

SEQ ID NO: 6242 - DNA, 70 bp, Homo sapiens
  I.6242 (R16598)
ttggcaggatggcttctcatcgtctgctcctcctctgccttgctggactggtatttgtgtctgaggctgg

SEQ ID NO: 6243 - DNA, 494 bp, Homo sapiens
  II.1 (XM_086400)
gagcagccttcctgagagaggagagagaaagctcagggaggtctggagcaaagatactcctggaggtggggagtgaggcagggataaggaaggagagtatcctccagcaccttccagtgggtggggcaagtccgtgggcatcatgttgaccgagctggagaaagccttgaactctatcatcgacgtctaccacaagtactccctgataaaggggaatttccatgccgtctacagggatgacctgaagaaattgctagagaccgagtgtcctcagtatatcaggaaaaagggtgcagacgtctggttcaaagagttggatatcaacactgatggtgcagttaacttccaggagttcctcattctggtgataaagatgggcgtggcagcccacaaaaaaagccatgaagaaagccacaaagagtagctgagttactgggcccagaggctgggcccctggacatgtacctgcagaataataaagtcatcaatacctc

SEQ ID NO: 6244 - DNA, 466 bp, Homo sapiens
  II.2 (XM_001682)
accactgctggctttttgctgtagctccacattcctgtgcattgaggggttaacattaggctgggaagatgacaaaacttgaagagcatctggagggaattgtcaatatcttccaccaatactcagttcggaaggggcattttgacaccctctctaagggtgagctgaagcagctgcttacaaaggagcttgcaaacaccatcaagaatatcaaagataaagctgtcattgatgaaatattccaaggcctggatgctaatcaagatgaacaggtcgactttcaagaattcatatccctggtagccattgcgctgaaggctgcccattaccacacccacaaagagtaggtagctctctgaaggctttttacccagcaatgtcctcaatgagggtcttttctttccctcaccaaaacccagccttgcccgtggggagtaagagttaataaacacactcacgaaaagtt

SEQ ID NO: 6245 - DNA, 439 bp, Homo sapiens
  II.3 (NM_002619)
ccgcagcatgagctccgcagccgggttctgcgcctcacgccccgggctgctgttcctggggttgctgctcctgccacttgtggtcgccttcgccagcgctgaagctgaagaagatggggacctgcagtgcctgtgtgtgaagaccacctcccaggtccgtcccaggcacatcaccagcctggaggtgatcaaggccggaccccactgccccactgcccaactgatagccacgctgaagaatggaaggaaaatttgcttggacctgcaagccccgctgtacaagaaaataattaagaaacttttggagagttagctactagctgcctacgtgtgtgcatttgctatatagcatacttcttttttccagtttcaatctaactgtgaaagaaacttctgatatttgtgttatccttatgattttaaataaacaaaataaatc

SEQ ID NO: 6246 - DNA, 673 bp, Homo sapiens
  II.4 (NM_002704)
gggcaactcaccctcactcagaggtcttctggttctggaaacaactctagctcagccttctccaccatgagcctcagacttgataccaccccttcctgtaacagtgcgagaccacttcatgccttgcaggtgctgctgcttctgtcattgctgctgactgctctggcttcctccaccaaaggacaaactaagagaaacttggcgaaaggcaaagaggaaagtctagacagtgacttgtatgctgaactccgctgcatgtgtataaagacaacctctggaattcatcccaaaaacatccaaagtttggaagtgatcgggaaaggaacccattgcaaccaagtcgaagtgatagccacactgaaggatgggaggaaaatctgcctggacccagatgctcccagaatcaagaaaattgtacagaaaaaattggcaggtgatgaatctgctgattaatttgttctgtttctgccaaacttctttaactcccaggaagggtagaattttgaaaccttgattttctagagttctcatttattcaggatacctattcttactgtattaaaatttggatatgtgtttcattctgtctcaaaaatcacattttattctgagaaggttggttaaaagatggcagaaagaagatgaaaataaataagcctggtttcaaccctct

SEQ ID NO: 6247 - DNA, 1793 bp, Homo sapiens
  II.5 (NM_001101)
cgcgtccgccccgcgagcacagagcctcgcctttgccgatccgccgcccgtccacacccgccgccagctcaccatggatgatgatatcgccgcgctcgtcgtcgacaacggctccggcatgtgcaaggccggcttcgcgggcgacgatgccccccgggccgtcttcccctccatcgtggggcgccccaggcaccagggcgtgatggtgggcatgggtcagaaggattcctatgtgggcgacgaggcccagagcaagagaggcatcctcaccctgaagtaccccatcgagcacggcatcgtcaccaactgggacgacatggagaaaatctggcaccacaccttctacaatgagctgcgtgtggctcccgaggagcaccccgtgctgctgaccgaggcccccctgaaccccaaggccaaccgcgagaagatgacccagatcatgtttgagaccttcaacaccccagccatgtacgttgctatccaggctgtgctatccctgtacgcctctggccgtaccactggcatcgtgatggactccggtgacggggtcacccacactgtgcccatctacgaggggtatgccctcccccatgccatcctgcgtctggacctggctggccgggacctgactgactacctcatgaagatcctcaccgagcgcggctacagcttcaccaccacggccgagcgggaaatcgtgcgtgacattaaggagaagctgtgctacgtcgccctggacttcgagcaagagatggccacggctgcttccagctcctccctggagaagagctacgagctgcctgacggccaggtcatcaccattggcaatgagcggttccgctgccctgaggcactcttccagccttccttcctgggcatggagtcctgtggcatccacgaaactaccttcaactccatcatgaagtgtgacgtggacatccgcaaagacctgtacgccaacacagtgctgtctggcggcaccaccatgtaccctggcattgccgacaggatgcagaaggagatcactgccctggcacccagcacaatgaagatcaagatcattgctcctcctgagcgcaagtactccgtgtggatcggcggctccatcctggcctcgctgtccaccttccagcagatgtggatcagcaagcaggagtatgacgagtccggcccctccatcgtccaccgcaaatgcttctaggcggactatgacttagttgcgttacaccctttcttgacaaaacctaacttgcgcagaaaacaagatgagattggcatggctttatttgttttttttgttttgttttggttttttttttttttttggcttgactcaggatttaaaaactggaacggtgaaggtgacagcagtcggttggagcgagcatcccccaaagttcacaatgtggccgaggactttgattgcacattgttgtttttttaatagtcattccaaatatgagatgcattgttacaggaagtcccttgccatcctaaaagccaccccacttctctctaaggagaatggcccagtcctctcccaagtccacacaggggaggtgatagcattgctttcgtgtaaattatgtaatgcaaaatttttttaatcttcgccttaatacttttttattttgttttattttgaatgatgagccttcgtgcccccccttccccctttttgtcccccaacttgagatgtatgaaggcttttggtctccctgggagtgggtggaggcagccagggcttacctgtacactgacttgagaccagttgaataaaagtgcacacctta

SEQ ID NO: 6248 - DNA, 691 bp, Homo sapiens
  II.6 (NM_001013)
cccgcgcaggcgcagacggggaagcggagccaacatgccagtggcccggagctgggtttgtcgcaaaacttatgtgaccccgcggagacccttcgagaaatctcgtctcgaccaagagctgaagctgatcggcgagtatgggctccggaacaaacgtgaggtctggagggtcaaatttaccctggccaagatccgcaaggccgcccgggaactgctgacgcttgatgagaaggacccacggcgtctgttcgaaggcaacgccctgctgcggcggctggtccgcattggggtgctggatgagggcaagatgaagctggattacatcctgggcctgaagatagaggatttcttagagagacgcctgcagacccaggtcttcaagctgggcttggccaagtccatccaccacgctcgcgtgctgatccgccagcgccatatcagggtccgcaagcaggtggtgaacatcccgtccttcattgtccgcctggattcccagaagcacatcgacttctctctgcgctctccctacgggggtggccgcccgggccgcgtgaagaggaagaatgccaagaagggccagggtggggctggggctggagacgacgaggaggaggattaagtccacctgtccctcctgggctgctggattgtctcgttttcctgccaaataaacaggatcagcgctttaaaa

SEQ ID NO: 6249 - DNA, 3144 bp, Homo sapiens
  II.7 (XM_057445)
tgggcagaaggcagaaaaccagcagagtcacagaggagatggccaactgccaaatagccatcttgtaccagagattccagagagtggtctttggaatttcccaactcctttgcttcagtgccctgatctctggaactaacaaaccagaaagaagtggcagcatggacttatcattacagcacaaaagcatactcatggaatatttcccgtaaatactgccagaatcgctacacagacttagtggccatccagaataaaaatgaaattgattacctcaataaggtcctaccctactacagctcctactactggattgggatccgaaagaacaataagacatggacatgggtgggaaccaaaaaggctctcaccaacgaggctgagaactgggctgataatgaacctaacaacaaaaggaacaacgaggactgcgtggagatatacatcaagagtccgtcagcccctggcaagtggaatgatgagcactgcttgaagaaaaagcacgcattgtgttacacagcctcctgccaggacatgtcctgcagcaaacaaggagagtgcctcgagaccatcgggaactacacctgctcctgttaccctggattctatgggccagaatgtgaatacggtgagagagtgtggagaacttgagctccctcaacacgtgctcatgaactgcagccaccctctgggaaacttctcttttaactcgcagtgcagcttccactgcactgacgggtaccaagtaaatgggcccagcaagctggaatgcttggcttctggaatctggacaaataagcctccacagtgtttagctgcccagtgcccacccctgaagattcctgaacgaggaaacatgacctgccttcattctgcaaaagcattccagcatcagtctagctgcagcttcagttgtgaagagggatttgcattagttggaccggaagtggtgcaatgcacagcctcgggggtatggacagccccagccccagtgtgtaaagctgtgcagtgtcagcacctggaagcccccagtgaaggaaccatggactgtgttcatccgctcactgcttttgcctatggctccagctgtaaatttgagtgccagcccggctacagagtgaggggcttggacatgctccgctgcattgactctggacactggtctgcacccttgccaacctgtgaggctatttcgtgtgagccgctggagagtcctgtccacggaagcatggattgctctccatccttgagagcgtttcagtatgacaccaactgtagcttccgctgtgctgaaggtttcatgctgagaggagccgatatagttcggtgtgataacttgggacagtggacagcaccagccccagtctgtcaagctttgcagtgccaggatctcccagttccaaatgaggcccgggtgaactgctcccaccccttcggtgcctttaggtaccagtcagtctgcagcttcacctgcaatgaaggcttgctcctggtgggagcaagtgtgctacagtgcttggctactggaaactggaattctgttcctccagaatgccaagccattccctgcacacctttgctaagccctcagaatggaacaatgacctgtgttcaacctcttggaagttccagttataaatccacatgtcaattcatctgtgacgagggatattctttgtctggaccagaaagattggattgtactcgatcgggacgctggacagactccccaccaatgtgtgaagccatcaagtgcccagaactctttgccccagagcagggcagcctggattgttctgacactcgtggagaattcaatgttggctccacctgccatttctcttgtgacaacggctttaagctggaggggcccaataatgtggaatgcacaacttctggaagatggtcagctactccaccaacctgcaaaggcatagcatcacttcctactccaggggtgcaatgtccagccctcaccactcctgggcagggaaccatgtactgtaggcatcatccgggaacctttggttttaataccacttgttactttggctgcaacgctggattcacactcataggagacagcactctcagctgcagaccttcaggacaatggacagcagtaactccagcatgcagagctgtgaaatgctcagaactacatgttaataagccaatagcgatgaactgctccaacctctggggaaacttcagttatggatcaatctgctctttccattgtctagagggccagttacttaatggctctgcacaaacagcatgccaagagaatggccactggtcaactaccgtgccaacctgccaagcaggaccattgactatccaggaagccctgacttactttggtggagcggtggcttctacgataggtctgataatgggtgggacgctcctggctttgctaagaaagcgtttcagacaaaaagatgatgggaaatgccccttgaatcctcacagccacctaggaacatatggagtttttacaaacgctgcatttgacccgagtccttaaggtttccataaacacccatgaatcaaagacatggaattaccttagattagctctggaccagcctgttggacccgctctggaccaaccctgtttcctgagtttgggattgtggtacaatctcaaattctcaacctaccaccccttcctgtcccacctcttctcttcctgtaacacaagccacagaagccaggagcaaatgtttctgcagtagtctctgtgctttgactcacctgttacttgaaataccagtgaaccaaagagactggagcatctgactcacaagaagaccagactgtggagaaataaaaatacctctttattttttgattgaaggaaggttttctccactttgttggaaagcaggtggcatctctaattggaagaaattcctgtagcatcttctggagtctccagtggttgctgttgatgaggcctcttggacctctgctctgaggcttccagagagtcctctggatggcaccagaggctgcagaaggccaagaatcaagctagaaggccacatgtcaccgtggaccttcctgccaccagtcactgtccctcaaatgacccaaagaccaatattcaaatgcgtaattaaaagaattttcccc

SEQ ID NO: 6250 - DNA, 944 bp, Homo sapiens
  II.8 (BC018761)
gcaagatggtgttgcagacccaggtcttcatttctctgttgctctggatctctggtgtctacggggacatcgtgatgacccagtctccagactccctggctgtgtctctgggcgagagggccaccatcaactgcaagtccagccagactgttttatacagctccaacaataagaactacttagcttggtaccagcagaaaccaggacagcctcctaagctgctcatttactgggcatctacccgggaatccggggtccctgaccgattcagtggcagcgggtctgggacagatttcactctcaccatcagcagcctgcaggctgaagatgtggcagtttattactgtcagcaatattatactactcctatcactttcggccctgggacccaagtggatatcaaacgaactgtggctgcaccatctgtcttcatcttcccgccatctgatgagcagttgaaatctggaactgcctctgttgtgtgcctgctgaataacttctatcccagagaggccaaagtacagtggaaggtggataacgccctccaatcgggtaactcccaggagagtgtcacagagcaggacagcaaggacagcacctacagcctcagcagcaccctgacgctgagcaaagcagactacgagaaacacaaagtctacgcctgcgaagtcacccatcagggcctgagctcgcccgtcacaaagagcttcaacaggggagagtgttagagggagaagtgcccccacctgctcctcagttccagcctgaccccctcccatcctttggcctctgaccctttttccacaggggacctacccctattgcggtcctccagctcatctttcacctcacccccctcctcctccttggctttaattatgctaatgttggaggagaatgaataaataaagtgaatctttgcaaaaaaaaaaaaaaaaaaaaaa

SEQ ID NO: 6251 - DNA, 1762 bp, Homo sapiens
  II.9 (XM_030906)
acacggcgtccctcaggcgcccccattccggaccagccctcgggagtcgccgacccggcctcccgcaaagacttttccccagacctcgggcgcaccccctgcacgccgccttcatccccggcctgtctcctgagcccccgcgcatcctagaccctttctcctccaggagacggatctctctccgacctgccacagatcccctattcaagaccacccaccttctggtaccagatcgcgcccatctaggttatttccgtgggatactgagacacccccggtccaagcctcccctccaccactgcgcccttctccctgaggacctcagctttccctcgaggccctcctaccttttgccgggagacccccagcccctgcaggggcggggcctccccaccacaccagccctgttcgcgctctcggcagtgccggggggcgccgcctcccccatgccgccctccgggctgcggctgctgccgctgctgctaccgctgctgtggctactggtgctgacgcctggccggccggccgcgggactatccacctgcaagactatcgacatggagctggtgaagcggaagcgcatcgaggccatccgcggccagatcctgtccaagctgcggctcgccagccccccgagccagggggaggtgccgcccggcccgctgcccgaggccgtgctcgccctgtacaacagcacccgcgaccgggtggccggggagagtgcagaaccggagcccgagcctgaggccgactactacgccaaggaggtcacccgcgtgctaatggtggaaacccacaacgaaatctatgacaagttcaagcagagtacacacagcatatatatgttcttcaacacatcagagctccgagaagcggtacctgaacccgtgttgctctcccgggcagagctgcgtctgctgaggctcaagttaaaagtggagcagcacgtggagctgtaccagaaatacagcaacaattcctggcgatacctcagcaaccggctgctggcacccagcgactcgccagagtggttatcttttgatgtcaccggagttgtgcggcagtggttgagccgtggaggggaaattgagggctttcgccttagcgcccactgctcctgtgacagcagggataacacactgcaagtggacatcaacgggttcactaccggccgccgaggtgacctggccaccattcatggcatgaaccggcctttcctgcttctcatggccaccccgctggagagggcccagcatctgcaaagctcccggcaccgccgagccctggacaccaactattgcttcagctccacggagaagaactgctgcgtgcggcagctgtacattgacttccgcaaggacctcggctggaagtggatccacgagcccaagggctaccatgccaacttctgcctcgggccctgcccctacatttggagcctggacacgcagtacagcaaggtcctggccctgtacaaccagcataacccgggcgcctcggcggcgccgtgctgcgtgccgcaggcgctggagccgctgcccatcgtgtactacgtgggccgcaagcccaaggtggagcagctgtccaacatgatcgtgcgctcctgcaagtgcagctgaggtcccgccccgccccgccccgccccggcaggcccggccccaccccgccccgcccccgctgccttgcccatgggggctgtatttaaggacacccgtgccccaagcccacctggggccccattaaagatggagagaggactgcg

SEQ ID NO: 6252 - DNA, 2095 bp, Homo sapiens
  II.10 (NM_001760)
gcgcctgtcagggaagcggcgcgcgcgcgcgggcggcgggcgggctggggatccgccgcgcagtgccagcgccagcgccagacccgcgccccgcgctctccggcccgtcgcctgccttgggactcgcgagcccgcactcccgccctgcctgttcgctgcccgagtatggagctgctgtgttgcgaaggcacccggcacgcgccccgggccgggccggacccgcggctgctgggggaccagcgtgtcctgcagagcctgctccgcctggaggagcgctacgtaccccgcgcctcctacttccagtgcgtgcagcgggagatcaagccgcacatgcggaagatgctggcttactggatgctggaggtatgtgaggagcagcgctgtgaggaggaagtcttccccctggccatgaactacctggatcgctacctgtcttgcgtccccacccgaaaggcgcagttgcagctcctgggtgcggtctgcatgctgctggcctccaagctgcgcgagaccacgcccctgaccatcgaaaaactgtgcatctacaccgaccacgctgtctctccccgccagttgcgggactgggaggtgctggtcctagggaagctcaagtgggacctggctgctgtgattgcacatgatttcctggccttcattctgcaccggctctctctgccccgtgaccgacaggccttggtcaaaaagcatgcccagacctttttggccctctgtgctacagattatacctttgccatgtacccgccatccatgatcgccacgggcagcattggggctgcagtgcaaggcctgggtgcctgctccatgtccggggatgagctcacagagctgctggcagggatcactggcactgaagtggactgcctgcgggcctgtcaggagcagatcgaagctgcactcagggagagcctcagggaagcctctcagaccagctccagcccagcgcccaaagccccccggggctccagcagccaagggcccagccagaccagcactcctacagatgtcacagccatacacctgtagccctggagaggccctctggagtggccactaagcagaggaggggccgctgccacccacctccctgcctccaggaaccacaccacatctaagcctgaaggggcgtctgttcccccttcacaaagcccaagggatctggtcctacccatccccgcagtgtgcactaaggggcccggccagccatgtctgcatttcggtggctagtcaagctcctcctccctgcatctgaccagcagcgcctttcccaactctagctgggggtgggccaggctgatgggacagaattggatacatacaccagcattccttttgaacgcccccccccacccctgggggctctcatgttttcaactgccaaaatgctctagtgccttctaaaggtgttgtcccttctagggttattgcatttggattggggtccctctaaaatttaatgcatgatagacacatatgagggggaatagtctagatggctcctctcagtactttggaggcccctatgtagtccgtgctgacagctgctcctagagggaggggcctaggcctcagccagagaagctataaattcctctttgctttgctttctgctcagcttctcctgtgtgattgacagctttgctgctgaaggctcattttaatttattaattgctttgagcacaactttaagaggacataatgggggcctggccatcccacaagtggtggtaaccctggtggttgctgttttcctcccttctgctactggcaaaaggatctttgtggccaaggagctgctatagcctggggtggggtcatgccctcctctcccattgtccctctgccccatcctccagcagggaaaatgcagcagggatgccctggaggtggctgagcccctgtctagagagggaggcaagccctgttgacacaggtctttcctaaggctgcaaggtttaggctggtggcccaggaccatcatcctactgtaataaagatgattgtgaaataaaactggctttggcttcttggaaaaaaaaaaaaaaaaaaaaaaaaaaaaaaaaaaaaaaaaaaaaa

SEQ ID NO: 6253 - DNA, 1185 bp, Homo sapiens
  II.11 (XM_035922)
gctcagggcacatgcctcccctccccaggccgcggcccagctgaccctcggggctcccccggcagcggacagggaagggttaaaggcccccggctccctgccccctgccctggggaacccctggccctgtggggacatgaactgtgtttgccgcctggtcctggtcgtgctgagcctgtggccagatacagctgtcgcccctgggccaccacctggcccccctcgagtttccccagaccctcgggccgagctggacagcaccgtgctcctgacccgctctctcctggcggacacgcggcagctggctgcacagctgagggacaaattcccagctgacggggaccacaacctggattccctgcccaccctggccatgagtgcgggggcactgggagctctacagctcccaggtgtgctgacaaggctgcgagcggacctactgtcctacctgcggcacgtgcagtggctgcgccgggcaggtggctcttccctgaagaccctggagcccgagctgggcaccctgcaggcccgactggaccggctgctgcgccggctgcagctcctgatgtcccgcctggccctgccccagccacccccggacccgccggcgcccccgctggcgcccccctcctcagcctgggggggcatcagggccgcccacgccatcctgggggggctgcacctgacacttgactgggccgtgaggggactgctgctgctgaagactcggctgtgacccggggcccaaagccaccaccgtccttccaaagccagatcttatttatttatttatttcagtactgggggcgaaacagccaggtgatccccccgccattatctccccctagttagagacagtccttccgtgaggcctggggggcatctgtgccttatttatacttatttatttcaggagcaggggtgggaggcaggtggactcctgggtccccgaggaggaggggactggggtcccggattcttgggtctccaagaagtctgtccacagacttctgccctggctcttccccatctaggcctgggcaggaacatatattatttatttaagcaattacttttcatgttggggtggggacggaggggaaagggaagcctgggtttttgtacaaaaatgtgagaaacctttgtgagacagagaacagggaattaaatgtgtcatacatatcc

SEQ ID NO: 6254 - DNA, 2617 bp, Homo sapiens
  II.12 (XM_039625)
ggattcttattggcccaacccgccgtcggtcggcggcgagtccgccccctcagaaccttacatttacagtgtagcaaaagagaaagtaactatgttgctgctggagatcaatgaagccgagtgaatgggggctgaatgtgcgagtccatagctgaagaggagcgccagatggtggaggaatacacttatttatgaaactgtcttgagttcttcttgaattgccagttttcagcctcctcatgcctccgtctcctttagacgacagggtagtagtggcactatctaggcccgtccgacctcaggatctcaacctttgtttagactctagttaccttggctctgccaacccaggcagtaacagccaccctcctgtcatcgccaccaccgttgtgtccctcaaggctgcgaatctgacgtatatgccctcatccagcggctctgcccgctcgctgaattgtggatgcagcagtgccagctgctgcactgtggcaacctacgacaaggacaatcaggcccaaacccaagccattgccgctggcaccaccaccactgccatcggaacctctaccacctgccctgctaaccagatggtcaacaataatgagaatacaggctctctaagtccatcaagtggggtgggcagccctgtgtcagggacccccaagcagctagccagcatcaaaataatctaccccaatgacttggcaaagaagatgaccaaatgcagcaagagtcacctgccgagtcagggccctgtcatcattgactgcaggcccttcatggagtacaacaagagtcacatccaaggagctgtccacattaactgtgccgataagatcagccggcggagactgcagcagggcaagatcactgtcctagacttgatttcctgtagggaaggcaaggactctttcaagaggatcttttccaaagaaattatagtttatgatgagaataccaatgaaccaagccgagtgatgccctcccagccacttcacatagtcctcgagtccctgaagagagaaggcaaagaacctctggtgttgaaaggtggacttagtagttttaagcagaaccatgaaaacctctgtgacaactccctccagctccaagagtgccgggaggtggggggcggcgcatccgcggcctcgagcttgctacctcagcccatccccaccacccctgacatcgagaacgctgagctcacccccatcttgcccttcctgttccttggcaatgagcaggatgctcaggacctggacaccatgcagcggctgaacatcggctacgtcatcaacgtcaccactcatcttcccctctaccactatgagaaaggcctgttcaactacaagcggctgccagccactgacagcaacaagcagaacctgcggcagtactttgaagaggcttttgagttcattgaggaagctcaccagtgtgggaaggggcttctcatccactgccaggctggggtgtcccgctccgccaccatcgtcatcgcttacttgatgaagcacactcggatgaccatgactgatgcttataaatttgtcaaaggcaaacgaccaattatctccccaaaccttaacttcatggggcagttgctagagttcgaggaagacctaaacaacggtgtgacaccgagaatccttacaccaaagctgatgggcgtggagacggttgtgtgacaatggtctggatggaaaggattgctgctctccattaggagacaatgaggaaggaggatggattctggttttttttctttctttttttttttgtagttgggagtaagtttgtgaatggaaacaaacttgtttaaacactttatttttaacaagtgtaagaagactataacttttgatgccattgagattcacctcccacaaactgacaaattaaggaggttaaagaagtaatttttttaagccaacaataaaaatataatacaacttgtttctcccccttttccttttaagctatttgtagagtttatgactaaatagtctgtgcaggttcatagaccgaagatactacacactttaaaccaattaaaaagaaccaaaagtaaatagaaaagacattgaatcaccaaggcctgggatcaacctgggctgtccacacagaaaacaaaaacccaaccaaaccaagccctgttgtgctcactggtgcaaagagaagatcagggcagcttaagtggtctaagaatccttcaggcattctttaaggagaaaaaggatacctttgattttgtgtgtttcatgctctggattttttttttttttccttctctgggtttaagagattttttttgaaatagtgaggaactgaccattatatgccttcactggcttcttgtgcaataatatgatgttttaagtgtgcaaacaagttagagctggcagctgaatgatagacaaatagtgcaaatttgccagcttggagatagaaaggaattcaacaatatatcaaatactttccttcccacctttttccttttttttttttttttctgatttgattctggttacagtgccataaaccttgttacatatgtatatcagaatgtaagaaaaaaaaatttatttaaaaatatttttcgcaaaaaaaaaaaaaa

SEQ ID NO: 6255 - DNA, 1195 bp, Homo sapiens
  II.13 (XM_002762)
cactgctctgagaatttgtgagcagcccctaacaggctgttacttcactacaactgacgatatgatcatcttaatttacttatttctcttgctatgggaagacactcaaggatggggattcaaggatggaatttttcataactccatatggcttgaacgagcagccggtgtgtaccacagagaagcacggtctggcaaatacaagctcacctacgcagaagctaaggcggtgtgtgaatttgaaggcggccatctcgcaacttacaagcagctagaggcagccagaaaaattggatttcatgtctgtgctgctggatggatggctaagggcagagttggataccccattgtgaagccagggcccaactgtggatttggaaaaactggcattattgattatggaatccgtctcaataggagtgaaagatgggatgcctattgctacaacccacacgcaaaggagtgtggtggcgtctttacagatccaaagcaaatttttaaatctccaggcttcccaaatgagtacgaagataaccaaatctgctactggcacattagactcaagtatggtcagcgtattcacctgagttttttagattttgaccttgaagatgacccaggttgcttggctgattatgttgaaatatatgacagttacgatgatgtccatggctttgtgggaagatactgtggagatgagcttccagatgacatcatcagtacaggaaatgtcatgaccttgaagtttctaagtgatgcttcagtgacagctggaggtttccaaatcaaatatgttgcaatggatcctgtatccaaatccagtcaaggaaaaaatacaaggagaaaaaaacacagttgttactcggtaatgagggatgttgggactcagacgataccctaaagtatgacactttgggatactgagtactttgagctaaaggagactggaaggcctcagaagcaagatctctgtgaccttctccttccatcttccctcttgccccaagtcttcctcttccaaagcaagtcataaaaaccagaattcaccgggcgcagtggctcactcctgtaatcccatcactttggaaggccgaggcagaggatctcttgagctcaggagttcaaaaccaggctgggcaacatagcaagacctcatctctatgaaaaaaattttaaattaaaaaattaaaaatta

SEQ ID NO: 6256 - DNA, 873 bp, Homo sapiens
  II.14 (XM_015396)
acttccccttcctgtacagggcaggttgtgcagctggaggcagagcagtcctctctggggagcctgaagcaaacatggatcaagaaactgtaggcaatgttgtcctgttggccatcgtcaccctcatcagcgtggtccagaatggattctttgcccataaagtggagcacgaaagcaggacccagaatgggaggagcttccagaggaccggaacacttgcctttgagcgggtctacactgccaaccagaactgtgtagatgcgtaccccactttcctcgctgtgctctggtctgcggggctactttgcagccaagttcctgctgcgtttgctggactgatgtacttgtttgtgaggcaaaagtactttgtcggttacctaggagagagaacgcagagcacccctggctacatatttgggaaacgcatcatactcttcctgttcctcatgtccgttgctggcatattcaactattacctcatcttctttttcggaagtgactttgaaaactacataaagacgatctccaccaccatctcccctctacttctcattccctaactctctgctgaatatggggttggtgttctcatctaatcaatacctacaagtcatcataattcagctcttgagagcattctgctcttctttagatggctgtaaatctattggccatctgggcttcacagcttgagttaaccttgcttttccgggaacaaaatgatgtcatgtcagctccgccccttgaacatgaccgtggccccaaatttgctattcccatgcattttgtttgtttcttcacttatcctgttctctgaagatgttttgtgaccaggtttgtgttttcttaaaataaaatgcagagacatgtttt

SEQ ID NO: 6257 - DNA, 1124 bp, Homo sapiens
  II.15 (NM_003823)
tccgcaggcggaccgggggcaaaggaggtggcatgtcggtcaggcacagcagggtcctgtgtccgcgctgagccgcgctctccctgctccagcaaggaccatgagggcgctggaggggccaggcctgtcgctgctgtgcctggtgttggcgctgcctgccctgctgccggtgccggctgtacgcggagtggcagaaacacccacctacccctggcgggacgcagagacaggggagcggctggtgtgcgcccagtgccccccaggcacctttgtgcagcggccgtgccgccgagacagccccacgacgtgtggcccgtgtccaccgcgccactacacgcagttctggaactacctggagcgctgccgctactgcaacgtcctctgcggggagcgtgaggaggaggcacgggcttgccacgccacccacaaccgtgcctgccgctgccgcaccggcttcttcgcgcacgctggtttctgcttggagcacgcatcgtgtccacctggtgccggcgtgattgccccgggcacccccagccagaacacgcagtgccagccgtgccccccaggcaccttctcagccagcagctccagctcagagcagtgccagccccaccgcaactgcacggccctgggcctggccctcaatgtgccaggctcttcctcccatgacaccctgtgcaccagctgcactggcttccccctcagcaccagggtaccaggagctgaggagtgtgagcgtgccgtcatcgactttgtggctttccaggacatctccatcaagaggctgcagcggctgctgcaggccctcgaggccccggagggctggggtccgacaccaagggcgggccgcgcggccttgcagctgaagctgcgtcggcggctcacggagctcctgggggcgcaggacggggcgctgctggtgcggctgctgcaggcgctgcgcgtggccaggatgcccgggctggagcggagcgtccgtgagcgcttcctccctgtgcactgatcctggccccctcttatttattctacatccttggcaccccacttgcactgaaagaggcttttttttaaatagaagaaatgaggtttcttaaagcttatttttataaagctttttcataaaa

SEQ ID NO: 6258 - DNA, 3410 bp, Homo sapiens
  II.16 (XM_029300)
cgcgcgtctccgccgcccgcggtgacttctgcctgcgctccttctctgaacgctcacttccgaggagacgccgacgatgaagacaccgtggaaggttcttctgggactgctgggtgctgctgcgcttgtcaccatcatcaccgtgcccgtggttctgctgaacaaaggcacagatgatgctacagctgacagtcgcaaaacttacactctaactgattacttaaaaaatacttatagactgaagttatactccttaagatggatttcagatcatgaatatctctacaaacaagaaaataatatcttggtattcaatgctgaatatggaaacagctcagttttcttggagaacagtacatttgatgagtttggacattctatcaatgattattcaatatctcctgatgggcagtttattctcttagaatacaactacgtgaagcaatggaggcattcctacacagcttcatatgacatttatgatttaaataaaaggcagctgattacagaagagaggattccaaacaacacacagtgggtcacatggtcaccagtgggtcataaattggcatatgtttggaacaatgacatttatgttaaaattgaaccaaatttaccaagttacagaatcacatggacggggaaagaagatataatatataatggaataactgactgggtttatgaagaggaagtcttcagtgcctactctgctctgtggtggtctccaaacggcacttttttagcatatgcccaatttaacgacacagaagtcccacttattgaatactccttctactctgatgagtcactgcagtacccaaagactgtacgggttccatatccaaaggcaggagctgtgaatccaactgtaaagttctttgttgtaaatacagactctctcagctcagtcaccaatgcaacttccatacaaatcactgctcctgcttctatgttgataggggatcactacttgtgtgatgtgacatgggcaacacaagaaagaatttctttgcagtggctcaggaggattcagaactattcggtcatggatatttgtgactatgatgaatccagtggaagatggaactgcttagtggcacggcaacacattgaaatgagtactactggctgggttggaagatttaggccttcagaacctcattttacccttgatggtaatagcttctacaagatcatcagcaatgaagaaggttacagacacatttgctatttccaaatagataaaaaagactgcacatttattacaaaaggcacctgggaagtcatcgggatagaagctctaaccagtgattatctatactacattagtaatgaatataaaggaatgccaggaggaaggaatctttataaaatccaacttagtgactatacaaaagtgacatgcctcagttgtgagctgaatccggaaaggtgtcagtactattctgtgtcattcagtaaagaggcgaagtattatcagctgagatgttccggtcctggtctgcccctctatactctacacagcagcgtgaatgataaagggctgagagtcctggaagacaattcagctttggataaaatgctgcagaatgtccagatgccctccaaaaaactggacttcattattttgaatgaaacaaaattttggtatcagatgatcttgcctcctcattttgataaatccaagaaatatcctctactattagatgtgtatgcaggcccatgtagtcaaaaagcagacactgtcttcagactgaactgggccacttaccttgcaagcacagaaaacattatagtagctagctttgatggcagaggaagtggttaccaaggagataagatcatgcatgcaatcaacagaagactgggaacatttgaagttgaagatcaaattgaagcagccagacaattttcaaaaatgggatttgtggacaacaaacgaattgcaatttggggctggtcatatggagggtacgtaacctcaatggtcctgggatcgggaagtggcgtgttcaagtgtggaatagccgtggcgcctgtatcccggtgggagtactatgactcagtgtacacagaacgttacatgggtctcccaactccagaagacaaccttgaccattacagaattcaacagtcatgagcagagctgaaaattttaaacaagttgagtacctccttattcatggaacagcagatgataacgttcactttcagcagtcagctcagatctccaaagccctggtcgatgttggagtggatttccaggcaatgtggtatactgatgaagaccatggaatagctagcagcacagcacaccaacatatatatacccacatgagccacttcataaaacaatgtttctctttaccttagcacctcaaaataccatgccatttaaagcttattaaaactcatttttgttttcattatctcaaaactgcactgtcaagatgatgatgatctttaaaatacacactcaaatcaagaaacttaaggttacctttgttcccaaatttcatacctatcatcttaagtagggacttctgtcttcacaacagattattaccttacagaagtttgaattatccggtcgggttttattgtttaaaatcatttctgcatcagctgctgaaacaacaaataggaattgtttttatggaggctttgcatagattccctgagcaggattttaatctttttctaactggactggttcaaatgttgttctcttctttaaagggatggcaagatgtgggcagtgatgtcactagggcagggacaggataagagggattagggagagaagatagcagggcatggctgggaacccaagtccaagcataccaacacgagcaggctactgtcagctcccctcggagaagagctgttcacagccagactggcacagttttctgagaaagactattcaaacagtctcaggaaatcaaatatgcaaagcactgacttctaagtaaaaccacagcagttgaaaagactccaaagaaatgtaagggaaactgccagcaacgcaggcccccaggtgccagttatggctataggtgctacaaaaacacagcaagggtgatgggaaagcattgtaaatgtgcttttaaaaaaaaatactgatgttcctagtgaaagaggcagcttgaaactgagatgtgaacacatcagcttgccctgttaaaagatgaaaatatttgtatcacaaatcttaacttgaaggagtccttgcatcaatttttcttatttcatttctttgagtgtcttaattaaaagaatattttaacttccttggactcattttaaaaaatggaacataaaatacaatgttatgtattattattcccattctacatactatggaatttctcccagtcatttaataaatgtgccttcattttttc

SEQ ID NO: 6259 - DNA, 1145 bp, Homo sapiens
  II.17 (NM_001562)
attctctccccagcttgctgagccctttgctcccctggcgactgcctggacagtcagcaaggaattgtctcccagtgcattttgccctcctggctgccaactctggctgctaaagcggctgccacctgctgcagtctacacagcttcgggaagaggaaaggaacctcagaccttccagatcgcttcctctcgcaacaaactatttgtcgcaggaataaagatggctgctgaaccagtagaagacaattgcatcaactttgtggcaatgaaatttattgacaatacgctttactttatagctgaagatgatgaaaacctggaatcagattactttggcaagcttgaatctaaattatcagtcataagaaatttgaatgaccaagttctcttcattgaccaaggaaatcggcctctatttgaagatatgactgattctgactgtagagataatgcaccccggaccatatttattataagtatgtataaagatagccagcctagaggtatggctgtaactatctctgtgaagtgtgagaaaatttcaactctctcctgtgagaacaaaattatttcctttaaggaaatgaatcctcctgataacatcaaggatacaaaaagtgacatcatattctttcagagaagtgtcccaggacatgataataagatgcaatttgaatcttcatcatacgaaggatactttctagcttgtgaaaaagagagagacctttttaaactcattttgaaaaaagaggatgaattgggggatagatctataatgttcactgttcaaaacgaagactagctattaaaatttcatgccgggcgcagtggctcacgcctgtaatcccagccctttgggaggctgaggcgggcagatcaccagaggtcaggtgttcaagaccagcctgaccaacatggtgaaacctcatctctactaaaaatacaaaaaattagctgagtgtagtgacgcatgccctcaatcccagctactcaagaggctgaggcaggagaatcacttgcactccggaggtagaggttgtggtgagccgagattgcaccattgcgctctagcctgggcaacaacagcaaaactccatctcaaaaaataaaataaataaataaacaaataaaaaattcataatgtg

SEQ ID NO: 6260 - DNA, 1735 bp, Homo sapiens
  II.18 (NM_005037)
cactcggagcccgagcccgagccgcagccgccgcctggggcgcttgggtcggcctcgaggacaccggagaggggcgccacgccgccgtggccgcagaaatgaccatggttgacacagagatgccattctggcccaccaactttgggatcagctccgtggatctctccgtaatggaagaccactcccactcctttgatatcaagcccttcactactgttgacttctccagcatttctactccacattacgaagacattccattcacaagaacagatccagtggttgcagattacaagtatgacctgaaacttcaagagtaccaaagtgcaatcaaagtggagcctgcatctccaccttattattctgagaagactcagctctacaataagcctcatgaagagccttccaactccctcatggcaattgaatgtcgtgtctgtggagataaagcttctggatttcactatggagttcatgcttgtgaaggatgcaagggtttcttccggagaacaatcagattgaagcttatctatgacagatgtgatcttaactgtcggatccacaaaaaaagtagaaataaatgtcagtactgtcggtttcagaaatgccttgcagtggggatgtctcataatgccatcaggtttgggcggatgccacaggccgagaaggagaagctgttggcggagatctccagtgatatcgaccagctgaatccagagtccgctgacctccgggccctggcaaaacatttgtatgactcatacataaagtccttcccgctgaccaaagcaaaggcgagggcgatcttgacaggaaagacaacagacaaatcaccattcgttatctatgacatgaattccttaatgatgggagaagataaaatcaagttcaaacacatcacccccctgcaggagcagagcaaagaggtggccatccgcatctttcagggctgccagtttcgctccgtggaggctgtgcaggagatcacagagtatgccaaaagcattcctggttttgtaaatcttgacttgaacgaccaagtaactctcctcaaatatggagtccacgagatcatttacacaatgctggcctccttgatgaataaagatggggttctcatatccgagggccaaggcttcatgacaagggagtttctaaagagcctgcgaaagccttttggtgactttatggagcccaagtttgagtttgctgtgaagttcaatgcactggaattagatgacagcgacttggcaatatttattgctgtcattattctcagtggagaccgcccaggtttgctgaatgtgaagcccattgaagacattcaagacaacctgctacaagccctggagctccagctgaagctgaaccaccctgagtcctcacagctgtttgccaagctgctccagaaaatgacagacctcagacagattgtcacggaacacgtgcagctactgcaggtgatcaagaagacggagacagacatgagtcttcacccgctcctgcaggagatctacaaggacttgtactagcagagagtcctgagccactgccaacatttcccttcttccagttgcactattctgagggaaaatctgacacctaagaaatttactgtgaaaaagcattttaaaaagaaaaggttttagaatatgatctattttatgcatattgtttataaagacacatttacaatttacttttaatattaaaaattaccatattatgaaattgc

SEQ ID NO: 6261 - DNA, 1406 bp, Homo sapiens
  II.19 (M90746)
tttttcatctctccacttctcctaataggtttggcagtgtcaaccatctcatcattctctccacctgggtaccaagtctctttctgcttggtgatggtactcctttttgcagtggacacaggactatatttctctgtgaagacaaacatttgaagctcaacaagagactggaaggaccataaacttaaatggagaaaggaccctcaagacaaatgacccccatcccatgggagtaataagagcagtggcagcagcatctctgaacatttctctggatttgcaaccccatcatcctcaggcctctctacaagcagcaggaaacatagaactcagagccagatcctttatccaactctcgatttttccttggtctccagtggaagggaaaagcccatgatcttcaagcagggaagccccagtgagtagctgcattcctagaaattgaagtttcagagctacacaaacactttttctgtcccaaccattccctcacagtaaaacaacaatacaggctagggatggtaatcctttaaacatacaaaaattgctcgtattataaattacccagtttagaccggaaaaaagaaaataattattcctaaacaaatggataagtagaattaatgattgaggcaggaccctacagagtgtgggaactgctggggatctagagaattcagtgggaccaatgaaagcatggctgagaaatagcagggtagtccaggagagtctaagggaggtgttcccatctgagcccagagataagggtgtcttcctagaacattagccgtagtggaattaacaggaaatcatgagggtgacgtagaattgagtcttccaggggactctatcagaactggaccatttccaagtatataacgatgagccctctaatgctaggagtagcaaatggtcctaggaaggggactgaggattggggtgggggtggggtggaaaagaaagtacagaacaaaccctgtgtcactgtcccaagttaagctaagtgaacagaactatctcagcatcagaatgagaaagcctgagaagaaagaaccaaccacaagcacacaggaaggaaagcgcaggaggtgaaaatgctttcttggccagggtagtaagaattagaggttaatgcagggactgtaaaaccaccttttctgcttcaatgtctagttcctgtatagctttgttcattgcatttattaaacaaatgttgtataaccaatactaaatgtactactgagcttcactgagttacgctgtgaaactttcaaatccttcttcatgtcagttccaatgaggtggggatggagaagacaattgttgcttatgaaaaaaagctttagctgtctctgttttgtaagctttcagtgcaacatttcttggttccaataaagcattttaca

SEQ ID NO: 6262 - DNA, 3757 bp, Homo sapiens
  II.20 (NM_001315)
ggaaccgcgaccactggagccttagcgggcgcagcagctggaacgggagtactgcgacgcagcccggagtcggccttgtaggggcgaaggtgcagggagatcgcggcgggcgcagtcttgagcgccggagcgcgtccctgcccttagcggggcttgccccagtcgcaggggcacatccagccgctgcggctgacagcagccgcgcgcgcgggagtctgcggggtcgcggcagccgcacctgcgcgggcgaccagcgcaaggtccccgcccggctgggcgggcagcaagggccggggagagggtgcgggtgcaggcgggggccccacagggccaccttcttgcccggcggctgccgctggaaaatgtctcaggagaggcccacgttctaccggcaggagctgaacaagacaatctgggaggtgcccgagcgttaccagaacctgtctccagtgggctctggcgcctatggctctgtgtgtgctgcttttgacacaaaaacggggttacgtgtggcagtgaagaagctctccagaccatttcagtccatcattcatgcgaaaagaacctacagagaactgcggttacttaaacatatgaaacatgaaaatgtgattggtctgttggacgtttttacacctgcaaggtctctggaggaattcaatgatgtgtatctggtgacccatctcatgggggcagatctgaacaacattgtgaaatgtcagaagcttacagatgaccatgttcagttccttatctaccaaattctccgaggtctaaagtatatacattcagctgacataattcacagggacctaaaacctagtaatctagctgtgaatgaagactgtgagctgaagattctggattttggactggctcggcacacagatgatgaaatgacaggctacgtggccactaggtggtacagggctcctgagatcatgctgaactggatgcattacaaccagacagttgatatttggtcagtgggatgcataatggccgagctgttgactggaagaacattgtttcctggtacagaccatattaaccagcttcagcagattatgcgtctgacaggaacaccccccgcttatctcattaacaggatgccaagccatgaggcaagaaactatattcagtctttgactcagatgccgaagatgaactttgcgaatgtatttattggtgccaatcccctggctgtcgacttgctggagaagatgcttgtattggactcagataagagaattacagcggcccaagcccttgcacatgcctactttgctcagtaccacgatcctgatgatgaaccagtggccgatccttatgatcagtcctttgaaagcagggacctccttatagatgagtggaaaagcctgacctatgatgaagtcatcagctttgtgccaccaccccttgaccaagaagagatggagtcctgagcacctggtttctgttctgttgatcccacttcactgtgaggggaaggccttttcacgggaactctccaaatattattcaagtgcctcttgttgcagagatttcctccatggtggaagggggtgtgcgtgcgtgtgcgtgcgtgttagtgtgtgtgcatgtgtgtgtctgtctttgtgggagggtaagacaatatgaacaaactatgatcacagtgactttacaggaggttgtggatgctccagggcagcctccaccttgctcttctttctgagagttggctcaggcagacaagagctgctgtccttttaggaatatgttcaatgcaaagtaaaaaaatatgaattgtccccaatcccggtcatgcttttgccactttggcttctcctgtgaccccaccttgacggtggggcgtagacttgacaacatcccacagtggcacggagagaaggcccataccttctggttgcttcagacctgacaccgtccctcagtgatacgtacagccaaaaaggaccaactggcttctgtgcactagcctgtgattaacttgcttagtatggttctcagatcttgacagtatatttgaaactgtaaatatgtttgtgccttaaaaggagagaagaaagtgtagatagttaaaagactgcagctgctgaagttctgagccgggcaagtcgagagggctgttggacagctgcttgtgggcccggagtaatcaggcagccttcataggcggtcatgtgtgcatgtgagcacatgcgtatatgtgcgtctctctttctccctcacccccaggtgttgccatttctctgcttacccttcacctttggtgcagaggtttcttgaatatctgccccagtagtcagaagcaggttcttgatgtcatgtacttcctgtgtactctttatttctagcagagtgaggatgtgttttgcacgtcttgctatttgagcatgcacagctgcttgtcctgctctcttcaggaggccctggtgtcaggcaggtttgccagtgaagacttcttgggtagtttagatcccatgtcacctcagctgatattatggcaagtgatatcacctctcttcagcccctagtgctattctgtgttgaacacaattgatacttcaggtgcttttgatgtgaaaatcatgaaaagaggaacaggtggatgtatagcatttttattcatgccatctgttttcaaccaactatttttgaggaattatcatgggaaaagaccagggcttttcccaggaatatcccaaacttcggaaacaagttattctcttcactcccaataactaatgctaagaaatgctgaaaatcaaagtaaaaaattaaagcccataaggccagaaactccttttgctgtctttctctaaatatgattactttaaaataaaaaagtaacaaggtgtcttttccactcctatggaaaagggtcttcttggcagcttaacattgacttcttggtttggggagaaataaattttgtttcagaattttgtatattgtaggaatccctttgagaatgtgattccttttgatggggagaaagggcaaattattttaatattttgtattttcaactttataaagataaaatatcctcaggggtggagaagtgtcgttttcataacttgctgaatttcaggcattttgttctacatgaggactcatatatttaagccttttgtgtaataagaaagtataaagtcacttccagtgttggctgtgtgacagaatcttgtatttgggccaaggtgtttccatttctcaatcagtgcagtgatacatgtactccagagggacagggtggaccccctgagtcaactggagcaagaaggaaggaggcagactgatggcgattccctctcacccgggactctccccctttcaaggaaagtgaacctttaaagtaaaggcctcatctcctttattgcagttcaaatcctcaccatccacagcaagatgaattttatcagccatgtttggttgtaaatgctcgtgtgatttcctacagaaatactgctctgaatattttgtaataaaggtctttgcacatgtgaccacatacgtgttaggaggctgcatgctctggaagcctggactctaagctggagctcttggaagagctcttcggtttctgagcataatgctcccatctcctgatttctctgaacagaaaacaaaagagagaatgagggaaattgctattttatttgtattcatgaacttggctgtaatcagttatgccgtataggatgtcagacaataccactggttaaaataaagcctatttttcaaattt

SEQ ID NO: 6263 - DNA, 1946 bp, Homo sapiens
  II.21 (BC001506)
ggcacgaggagaggatcctgggcgccgccaggttctgtggacaatcacaatgggaatccaaggagggtctgtcctgttcgggctgctgctcgtcctggctgtcttctgccattcaggtcatagcctgcagtgctacaactgtcctaacccaactgctgactgcaaaacagccgtcaattgttcatctgattttgatgcgtgtctcattaccaaagctgggttacaagtgtataacaagtgttggaagtttgagcattgcaatttcaacgacgtcacaacccgcttgagggaaaatgagctaacgtactactgctgcaagaaggacctgtgtaactttaacgaacagcttgaaaatggtgggacatccttatcagagaaaacagttcttctgctggtgactccatttctggcagcagcctggagccttcatccctaagtcaacaccaggagagcttctcccaaactccccgttcctgcgtagtccgctttctcttgctgccacattctaaaggcttgatattttccaaatggatcctgttgggaaagaataaaattagcttgagcaacctggctaagatagaggggctctgggagactttgaagaccagtcctgtttgcagggaagccccacttgaaggaagaagtctaagagtgaagtaggtgtgacttgaactagattgcatgcttcctcctttgctcttgggaagaccagctttgcagtgacagcttgagtgggttctctgcagccctcagattatttttcctctggctccttggatgtagtcagttagcatcattagtacatctttggagggtggggcaggagtatatgagcatcctctctcacatggaacgctttcataaacttcagggatcccgtgttgccatggaggcatgccaaatgttccatatgtgggtgtcagtcagggacaacaagatccttaatgcagagctagaggacttctggcagggaagtggggaagtgttccagatagcagggcatgaaaacttagagaggtacaagtggctgaaaatcgagtttttcctctgtctttaaattttatatgggctttgttatcttccactggaaaagtgtaatagcatacatcaatggtgtgttaaagctatttccttgccttttttttattggaatggtaggatatcttggctttgccacacacagttacagagtgaacactctactacatgtgactggcagtattaagtgtgcttattttaaatgttactggtagaaaggcagttcaggtatgtgtgtatatagtatgaatgcagtggggacaccctttgtggttacagtttgagacttccaaaggtcatccttaataacaacagatctgcaggggtatgttttaccatctgcatccagcctcctgctaactcctagctgactcagcatagattgtataaaatacctttgtaacggctcttagcacactcacagatgtttgaggctttcagaagctcttctaaaaaatgatacacacctttcacaagggcaaactttttccttttccctgtgtattctagtgaatgaatctcaagattcagtagacctaatgacatttgtattttatgatcttggctgtatttaatggcataggctgacttttgcagatggaggaatttcttgattaatgttgaaaaaaaacccttgattatactctgttggacaaaccgagtgcaatgaatgatgcttttctgaaaatgaaatataacaagtgggtgaatgtggttatggccgaaaaggatatgcagtatgcttaatggtagcaactgaaagaagacatcctgagcagtgccagctttcttctgttgatgccgttccctgaacataggaaaatagaaacttgcttatcaaaacttaaaaaaaaaaaaaaaaaaaaaaaaaaaaaaaaaaaaaaaaaaaaaaaaaaaaaaaaaaaaaa

SEQ ID NO: 6264 - DNA, 1615 bp, Homo sapiens
  II.22 (XM_042018)
gccgcgggcggcggcggcagcggttggaggttgtaggaccggcgaggaataggaatcatggcggctgcgctgttcgtgctgctgggattcgcgctgctgggcacccacggagcctccggggctgccggcacagtcttcactaccgtagaagaccttggctccaagatactcctcacctgctccttgaatgacagcgccacagaggtcacagggcaccgctggctgaaggggggcgtggtgctgaaggaggacgcgctgcccggccagaaaacggagttcaaggtggactccgacgaccagtggggagagtactcctgcgtcttcctccccgagcccatgggcacggccaacatccagctccacgggcctcccagagtgaaggctgtgaagtcgtcagaacacatcaacgagggggagacggccatgctggtctgcaagtcagagtccgtgccacctgtcactgactgggcctggtacaagatcactgactctgaggacaaggccctcatgaacggctccgagagcaggttcttcgtgagttcctcgcagggccggtcagagctacacattgagaacctgaacatggaggccgaccccggccagtaccggtgcaacggcaccagctccaagggctccgaccaggccatcatcacgctccgcgtgcgcagccacctggccgccctctggcccttcctgggcatcgtggctgaggtgctggtgctggtcaccatcatcttcatctacgagaagcgccggaagcccgaggacgtcctggatgatgacgacgccggctctgcacccctgaagagcagcgggcagcaccagaatgacaaaggcaagaacgtccgccagaggaactcttcctgaggcaggtggcccgaggacgctccctgctccacgtctgcgccgccgccggagtccactcccagtgcttgcaagattccaagttctcacctcttaaagaaaacccaccccgtagattcccatcatacacttccttcttttttaaaaaagttgggttttctccattcaggattctgttccttaggtttttttccttctgaagtgtttcacgagagcccgggagctgctgccctgcggccccgtctgtggctttcagcctctgggtctgagtcatggccgggtgggcggcacagccttctccactggccggagtcagtgccaggtccttgccctttgtggaaagtcacaggtcacacgaggggccccgtgtcctgcctgtctgaagccaatgctgtctggttgcgccatttttgtgcttttatgtttaattttatgagggccacgggtctgtgttcgactcagcctcagggacgactctgacctcttggccacagaggactcacttgcccacaccgagggcgaccccgtcacagcctcaagtcactcccaagccccctccttgtctgtgcatccgggggcagctctggagggggtttgctggggaactggcgccatcgccgggactccagaaccgcagaagcctccccagctcacccctggaggacggccggctctctatagcaccagggctcacgtgggaacccccctcccacccaccgccacaataaagatcgcccccacctccaccctc

SEQ ID NO: 6265 - DNA, 2285 bp, Homo sapiens
  II.23 (XM_010177)
cgcttcccgccgcccgagcttcggaaacttcccggccgcgacgcagggaaccggcgcggagaaccgagcagagcggagcgcccgtggtccagcgtgtagggagccgatcgcccatggagggtctgggccgctcgtgcctgtggctgcgtcgggagctgtcgcccccgcggccgcggctcctgctcctggactgccgcagccgcgagctgtacgagtcggcgcgcatcggtggggcgctgagcgtggccctgccggcgctcctgctgcgccgcctgcggaggggcagcctgtcggtgcgcgcgctcctgcctgggccgccgctgcagccgcccccgcctgcccccgtgctcctgtacgaccagggcgggggccggcgccggcgcggggaggccgaggccgaggccgaggagtgggaggccgagtcggtgctgggcaccctgctgcagaagctgcgagaggaaggctacctggcctactacctccagggaggcttcagcagattccaggccgagtgccctcacctgtgtgagaccagccttgctggccgtgccggctccagcatggcgccggtgcccggtccagtgcccgtggtggggttgggcagcctgtgcctgggctccgactgctctgatgcggaatccgaggctgaccgcgactccatgagctgtggcctggattcggagggtgccacacccccaccagtggggctgcgggcatccttccctgtccagatcctgcccaacctctatctgggcagtgcccgggattccgccaatttggagagcctggccaaactgggcatccgctacatcctcaatgtcacccccaacctcccaaacttcttcgagaagaatggtgactttcactacaagcagatccccatctccgaccactggagccagaacctgtcgcggttctttccggaggccattgagttcattgatgaggccttgtcccagaactgcggggtgctcgtccactgcttggcgggggtcagccgttctgtcaccgtcactgtggcctacctcatgcagaagctccacctctctctcaacgatgcctatgacctggtcaagaggaagaagtctaacatctcccccaacttcaacttcatggggcagttgctggactttgagcgcagcttgcggctggaggagcgccactcgcaggagcagggcagtggggggcaggcatctgcggcctccaacccgccctccttcttcaccacccccaccagtgatggcgccttcgagctggcccccacctagggccccgtggccggcaggccggcccctgccccacccccacccacgggtgtccctgcccactcgtgtggcaagggaggggagggcaggagggctcggcctgagcagggtgctggggggagagcgcaatacctcacgcgggctgccgtcctaatcaacgtgcctatggcgggaccacgctcggagcctgcctcttctgcgactgttactttttctttgcgggatgggggtgggggttccctctccaggtggttgtccaggcccatgtcccggccctgggtgctcagccagctcggctaggccctgcgcctccctgcgcttcccccttcaggaagggtgtgtgccacctcgttgcactggatcccagtggctgcttgggggagaggcgtttgccatcactggtgttgtcacctccctgtttctccaccaagggcttgggcctctcggggctggggcctcccaggggatggggacccagaggtgcagtggccgcccacatccatggcctaggagctactgggcaggttcccggccacacatctggtgggctgttttgttttttttttttcctcttcccccagatgtcttgacgggatcactggggctctttgtgagtgagggtggccaaactaccgccggaggagatggggtctcagagcgagagctgcggagggggaggggaagaagaaggcctcacttttgctgctgcggggcccacacagccgctgctactttggggggtggggaaggggccaagctgcagacacacacagtcattcatttctgtccacacccctgtgggtggcgggtgtgcgtgtgtgtgcttgtgtgtgcgcacgtgtcggcgctcacacacacatgctagcccactgatgcacccagcccagggctggcagtctttgcagcgtggggccgtctcaccctggagcctggagaggatctatgcttgtttgtttttgtaatccatatcatagttgctttctttaattgttccttctgaataaacagtttatttaagat

SEQ ID NO: 6266 - DNA, 1813 bp, Homo sapiens
  II.24 (BC013992)
gaggagtggagatggcggcggcggcggctcaggggggcgggggcggggagccccgtagaaccgagggggtcggcccgggggtcccgggggaggtggagatggtgaaggggcagccgttcgacgtgggcccgcgctacacgcagttgcagtacatcggcgagggcgcgtacggcatggtcagctcggcctatgaccacgtgcgcaagactcgcgtggccatcaagaagatcagccccttcgaacatcagacctactgccagcgcacgctccgggagatccagatcctgctgcgcttccgccatgagaatgtcatcggcatccgagacattctgcgggcgtccaccctggaagccatgagagatgtctacattgtgcaggacctgatggagactgacctgtacaagttgctgaaaagccagcagctgagcaatgaccatatctgctacttcctctaccagatcctgcggggcctcaagtacatccactccgccaacgtgctccaccgagatctaaagccctccaacctgctcatcaacaccacctgcgaccttaagatttgtgatttcggcctggcccggattgccgatcctgagcatgaccacaccggcttcctgacggagtatgtggctacgcgctggtaccgggccccagagatcatgctgaactccaagggctataccaagtccatcgacatctggtctgtgggctgcattctggctgagatgctctctaaccggcccatcttccctggcaagcactacctggatcagctcaaccacattctgggcatcctgggctccccatcccaggaggacctgaattgtatcatcaacatgaaggcccgaaactacctacagtctctgccctccaagaccaaggtggcttgggccaagcttttccccaagtcagactccaaagcccttgacctgctggaccggatgttaacctttaaccccaataaacggatcacagtggaggaagcgctggctcacccctacctggagcagtactatgacccgacggatgagccagtggccgaggagcccttcaccttcgccatggagctggatgacctacctaaggagcggctgaaggagctcatcttccaggagacagcacgcttccagcccggagtgctggaggccccctagcccagacagacatctctgcaccctggggcctggacctgcctcctgcctgcccctctcccgccagactgttagaaaatggacactgtgcccagcccggaccttggcagcccaggccggggtggagcatgggcctggccacctctctcctttgctgaggcctccagcttcaggcaggccaaggccttctcctccccacccgccctccccacggggcctcgggagctcaggtggccccagttcaatctcccgctgctgctgctgcgcccttaccttccccagcgtcccagtctctggcagttctggaatggaagggttctggctgccccaacctgctgaagggcagaggtggagggtggggggcgctgagtagggactcagggccatgcctgcccccctcatctcattcaaaccccaccctagtttccctgaaggaacattccttagtctcaagggctagcatccctgaggagccaggccgggccgaatcccctccctgtcaaagctgtcacttcgcgtgccctcgctgcttctgtgtgtggtgagcagaagtggagctggggggcgtggagagcccggcgcccctgccacctccctgacccgtctaatatataaatatagagatgtgtctatggctgaaaaaaaaaaaaaaaaaaaaaaaaaaa

SEQ ID NO: 6267 - DNA, 4006 bp, Homo sapiens
  II.25 (NM_001560)
tgccaaggctccagcccggccgggctccgaggcgagaggctgcatggagtggccggcgcggctctgcgggctgtgggcgctgctgctctgcgccggcggcgggggcgggggcgggggcgccgcgcctacggaaactcagccacctgtgacaaatttgagtgtctctgttgaaaacctctgcacagtaatatggacatggaatccacccgagggagccagctcaaattgtagtctatggtattttagtcattttggcgacaaacaagataagaaaatagctccggaaactcgtcgttcaatagaagtacccctgaatgagaggatttgtctgcaagtggggtcccagtgtagcaccaatgagagtgagaagcctagcattttggttgaaaaatgcatctcacccccagaaggtgatcctgagtctgctgtgactgagcttcaatgcatttggcacaacctgagctacatgaagtgttcttggctccctggaaggaataccagtcccgacactaactatactctctactattggcacagaagcctggaaaaaattcatcaatgtgaaaacatctttagagaaggccaatactttggttgttcctttgatctgaccaaagtgaaggattccagttttgaacaacacagtgtccaaataatggtcaaggataatgcaggaaaaattaaaccatccttcaatatagtgcctttaacttcccgtgtgaaacctgatcctccacatattaaaaacctctccttccacaatgatgacctatatgtgcaatgggagaatccacagaattttattagcagatgcctattttatgaagtagaagtcaataacagccaaactgagacacataatgttttctacgtccaagaggctaaatgtgagaatccagaatttgagagaaatgtggagaatacatcttgtttcatggtccctggtgttcttcctgatactttgaacacagtcagaataagagtcaaaacaaataagttatgctatgaggatgacaaactctggagtaattggagccaagaaatgagtataggtaagaagcgcaattccacactctacataaccatgttactcattgttccagtcatcgtcgcaggtgcaatcatagtactcctgctttacctaaaaaggctcaagattattatattccctccaattcctgatcctggcaagatttttaaagaaatgtttggagaccagaatgatgatactctgcactggaagaagtacgacatctatgagaagcaaaccaaggaggaaaccgactctgtagtgctgatagaaaacctgaagaaagcctctcagtgatggagataatttatttttaccttcactgtgaccttgagaagattcttcccattctccatttgttatctgggaacttattaaatggaaactgaaactactgcaccatttaaaaacaggcagctcataagagccacaggtctttatgttgagtcgcgcaccgaaaaactaaaaataatgggcgctttggagaagagtgtggagtcattctcattgaattataaaagccagcaggcttcaaactaggggacaaagcaaaaagtgatgatagtggtggagttaatcttatcaagagttgtgacaacttcctgagggatctatacttgctttgtgttctttgtgtcaacatgaacaaattttatttgtaggggaactcatttggggtgcaaatgctaatgtcaaacttgagtcacaaagaacatgtagaaaacaaaatggataaaatctgatatgtattgtttgggatcctattgaaccatgtttgtggctattaaaactcttttaacagtctgggctgggtccggtggctcacgcctgtaatcccagcaatttgggagtccgaggcgggcggatcactcgaggtcaggagttccagaccagcctgaccaaaatggtgaaacctcctctctactaaaactacaaaaattaactgggtgtggtggcgcgtgcctgtaatcccagctactcgggaagctgaggcaggtgaattgtttgaacctgggaggtggaggttgcagtgagcagagatcacaccactgcactctagcctgggtgacagagcaagactctgtctaaaaaacaaaacaaaacaaaacaaaacaaaaaaacctcttaatattctggagtcatcattcccttcgacagcattttcctctgctttgaaagccccagaaatcagtgttggccatgatgacaactacagaaaaaccagaggcagcttctttgccaagacctttcaaagccattttaggctgttaggggcagtggaggtagaatgactccttgggtattagagtttcaaccatgaagtctctaacaatgtattttcttcacctctgctactcaagtagcatttactgtgtctttggtttgtgctaggcccccgggtgtgaagcacagaccccttccaggggtttacagtctatttgagactcctcagttcttgccacttttttttttaatctccaccagtcatttttcagaccttttaactcctcaattccaacactgatttccccttttgcattctccctccttcccttccttgtagccttttgactttcattggaaattaggatgtaaatctgctcaggagacctggaggagcagaggataattagcatctcaggttaagtgtgagtaatctgagaaacaatgactaattcttgcatattttgtaacttccatgtgagggttttcagcattgatatttgtgcattttctaaacagagatgaggtggtatcttcacgtagaacattggtattcgcttgagaaaaaaagaatagttgaacctatttctctttctttacaagatgggtccaggattcctcttttctctgccataaatgattaattaaatagcttttgtgtcttacattggtagccagccagccaaggctctgtttatgcttttggggggcatatattgggttccattctcacctatccacacaacatatccgtatatatcccctctactcttacttcccccaaatttaaagaagtatgggaaatgagaggcatttcccccaccccatttctctcctcacacacagactcatattactggtaggaacttgagaactttatttccaagttgttcaaacatttaccaatcatattaatacaatgatgctatttgcaattcctgctcctaggggaggggagataagaaaccctcactctctacaggtttgggtacaagtggcaacctgcttccatggccgtgtagaagcatggtgccctggcttctctgaggaagctggggttcatgacaatggcagatgtaaagttattcttgaagtcagattgaggctgggagacagccgtagtagatgttctactttgttctgctgttctctagaaagaatatttggttttcctgtataggaatgagattaattcctttccaggtattttataattctgggaagcaaaacccatgcctccccctagccatttttactgttatcctatttagatggccatgaagaggatgctgtgaaattcccaacaaacattgatgctgacagtcatgcagtctgggagtggggaagtgatcttttgttcccatcctcttcttttagcagtaaaatagctgagggaaaagggagggaaaaggaagttatgggaatacctgtggtggttgtgatccctaggtcttgggagctcttggaggtgtctgtatcagtggatttcccatcccctgtgggaaattagtaggctcatttactgttttaggtctagcctatgtggattttttcctaacatacctaagcaaacccagtgtcaggatggtaattcttattctttcgttcagttaagtttttcccttcatctgggcactgaagggatatgtgaaacaatgttaacatttttggtagtcttcaaccagggattgtttctgtttaacttcttataggaaagcttgagtaaaataaatattgtctttttgtatgtca

SEQ ID NO: 6268 - DNA, 4005 bp, Homo sapiens
  II.26 (NM_004555)
cggctgcggttcctggtgctgctcggcgcgcggccagctttcggaacggaacgctcggcgtcgcgggccccgcccggaaagtttgccgtggagtcgcgacctcttggcccgcgcggcccggcatgaagcggcgttgaggagctgctgccgccgcttgccgctgccgccgccgccgcctgaggaggagctgcagcaccctgggccacgccgatgactactgcaaactgtggcgcccacgacgagctcgacttcaaactcgtctttggcgaggacggggcgccggcgccgccgcccccgggctcgcggcctgcagatcttgagccagatgattgtgcatccatttacatctttaatgtagatccacctccatctactttaaccacaccactttgcttaccacatcatggattaccgtctcactcttctgttttgtcaccatcgtttcagctccaaagtcacaaaaactatgaaggaacttgtgagattcctgaatctaaatatagcccattaggtggtcccaaaccctttgagtgcccaagtattcaaattacatctatctctcctaactgtcatcaagaattagatgcacatgaagatgacctacagataaatgacccagaacgggaatttttggaaaggccttctagagatcatctctatcttcctcttgagccatcctaccgggagtcttctcttagtcctagtcctgccagcagcatctcttctaggagttggttctctgatgcatcttcttgtgaatcgctttcacatatttatgatgatgtggactcagagttgaatgaagctgcagcccgatttacccttggatcccctctgacttctcctggtggctctccagggggctgccctggagaagaaacttggcatcaacagtatggacttggacactcattatcacccaggcaatctccttgccactctcctagatccagtgtcactgatgagaattggctgagccccaggccagcctcaggaccctcatcaaggcccacatccccctgtgggaaacggaggcactccagtgctgaagtttgttatgctgggtccctttcaccccatcactcacctgttccttcacctggtcactcccccaggggaagtgtgacagaagatacgtggctcaatgcttctgtccatggtgggtcaggccttggccctgcagtttttccatttcagtactgtgtagagactgacatccctctcaaaacaaggaaaacttctgaagatcaagctgccatactaccaggaaaattagagctgtgttcagatgaccaagggagtttatcaccagcccgggagacttcaatagatgatggccttggatctcagtatcctttaaagaaagattcatgtggtgatcagtttctttcagttccttcaccctttacctggagcaaaccaaagcctggccacacccctatatttcgcacatcttcattacctccactagactggcctttaccagctcattttggacaatgtgaactgaaaatagaagtgcaacctaaaactcatcatcgagcccattatgaaactgaaggtagccgaggggcagtaaaagcatctactgggggacatcctgttgtgaagctcctgggctataacgaaaagccaataaatctacaaatgtttattgggacagcagatgatcgatatttacgacctcatgcattttaccaggtgcatcgaatcactgggaagacagtcgctactgcaagccaagagataataattgccagtacaaaagttctggaaattccacttcttcctgaaaataatatgtcagccagtattgattgtgcaggtattttgaaactccgcaattcagatatagaacttcgaaaaggagaaactgatattggcagaaagaatactagagtacgacttgtgtttcgtgtacacatcccacagcccagtggaaaagtcctttctctgcagatagcctctatacccgttgagtgctcccagcggtctgctcaagaacttcctcatattgagaagtacagtatcaacagttgttctgtaaatggaggtcatgaaatggttgtgactggatctaattttcttccagaatccaaaatcatttttcttgaaaaaggacaagatggacgacctcagtgggaggtagaagggaagataatcagggaaaaatgtcaaggggctcacattgtccttgaagttcctccatatcataacccagcagttacagctgcagtgcaggtgcacttttatctttgcaatggcaagaggaaaaaaagccagtctcaacgttttacttatacaccagttttgatgaagcaagaacacagagaagagattgatttgtcttcagttccatctttgcctgtgcctcatcctgctcagacccagaggccttcctctgattcagggtgttcacatgacagtgtactgtcaggacagagaagtttgatttgctccatcccacaaacatatgcatccatggtgacctcatcccatctgccacagttgcagtgtagagatgagagtgttagtaaagaacagcatatgattccttctccaattgtacaccagccttttcaagtcacaccaacacctcctgtggggtcttcctatcagcctatgcaaactaatgttgtgtacaatggaccaacttgtcttcctattaatgctgcctctagtcaagaatttgattcagttttgtttcagcaggatgcaactctttctggtttagtgaatcttggctgtcaaccactgtcatccataccatttcattcttcaaattcaggctcaacaggacatctcttagcccatacacctcattctgtgcataccctgcctcatctgcaatcaatgggatatcattgttcaaatacaggacaaagatctctttcttctccagtggctgaccagattacaggtcagccttcgtctcagttacaacctattacatatggtccttcacattcagggtctgctacaacagcttccccagcagcttctcatcccttggctagttcaccgctttctgggccaccatctcctcagcttcagcctatgccttaccaatctcctagctcaggaactgcctcatcaccgtctccagccaccagaatgcattctggacagcactcaactcaagcacaaagtacgggccaggggggtctttctgcaccttcatccttaatatgtcacagtttgtgtgatccagcgtcatttccacctgatggggcaactgtgagcattaaacctgaaccagaagatcgagagcctaactttgcaaccattggtctgcaggacatcactttagatgatgaccaatttatatctgacttggaacaccagccatcaggttcagcagagaaatggcctaaccacagtgtgctctcatgtccagctcctttctggagaatctagaggtgaacgagataattgggagagacatgtcccagatttctgtttcccaaggagcaggggtgagcaggcaggctcccctcccgagtcctgagtccctggatttaggaagatctgatgggctctaacagtgcttactgcagccttgtgtccaccaccaacttctcagcatgtttctctccttggaccttgggtttccaactctgcagccttcaggtctggggccaggagtgggacccaccatttgtggggaaagtagcattcctccacctcaggccttgggtagatttggcaaaagaacaggagcagcataggctgtttgagctttggggaaatgaactttgctttttatatttaactaggatacttttatatgatgggtgctttgagtgtgaatgcagcaggctctcttgtttccgaggtgctgcttttgcaggtgacctggttacttagctaggattggtgatttgtactgctttatggtcatttgaagggccctttagtttttatgataatttttaaaataggaacttttgataagaccttctagaagcaaaaaaaaaaaaaaaaaaaaaaaaaagaaaaaaaaag

SEQ ID NO: 6269 - DNA, 1630 bp, Homo sapiens
  II.27 (NM_001154)
agggccggggtggggcgctggcgtttccgttgcttggatcagtctaggtgcagctgcggatccttcagcgtctgcatctcggcgtcgccccgcgtaccgtcgcccggctctccgccgctctcccgggggttcggggcacttgggtcccacagtctggtcctgcttcaccttcccctgacctgagtagtcgccatggcacaggttctcagaggcactgtgactgacttccctggatttgatgagcgggctgatgcagaaactcttcggaaggctatgaaaggcttgggcacagatgaggagagcatcctgactctgttgacatcccgaagtaatgctcagcgccaggaaatctctgcagcttttaagactctgtttggcagggatcttctggatgacctgaaatcagaactaactggaaaatttgaaaaattaattgtggctctgatgaaaccctctcggctttatgatgcttatgaactgaaacatgccttgaagggagctggaacaaatgaaaaagtactgacagaaattattgcttcaaggacacctgaagaactgagagccatcaaacaagtttatgaagaagaatatggctcaagcctggaagatgacgtggtgggggacacttcagggtactaccagcggatgttggtggttctccttcaggctaacagagaccctgatgctggaattgatgaagctcaagttgaacaagatgctcaggctttatttcaggctggagaacttaaatgggggacagatgaagaaaagtttatcaccatctttggaacacgaagtgtgtctcatttgagaaaggtgtttgacaagtacatgactatatcaggatttcaaattgaggaaaccattgaccgcgagacttctggcaatttagagcaactactccttgctgttgtgaaatctattcgaagtatacctgcctaccttgcagagaccctctattatgctatgaagggagctgggacagatgatcataccctcatcagagtcatggtttccaggagtgagattgatctgtttaacatcaggaaggagtttaggaagaattttgccacctctctttattccatgattaagggagatacatctggggactataagaaagctcttctgctgctctgtggagaagatgactaacgtgtcacggggaagagctccctgctgtgtgcctgcaccaccccactgccttccttcagcacctttagctgcatttgtatgccagtgcttaacacattgccttattcatactagcatgctcatgaccaacacatacacgtcatagaagaaaatagtggtgcttctttctgatctctagtggagatctctttgactgctgtagtactaaagtgtacttaatgttactaagtttaatgcctggccattttccatttatatatattttttaagaggctagagtgcttttagccttttttaaaaactccatttatattacatttgtaaccatgatactttaattagaagcttagccttgaaattgtgaactcttggaaatgttattagtgaagttcgcaactaaactaaacctgtaaaattatgatgattgtattcaaaagattaatgaaaaataaacatttctgtccccctgaattat

SEQ ID NO: 6270 - DNA, 3748 bp, Homo sapiens
  II.28 (NM_001310)
cgtctgtaaacacccagagactgtcatggagggggaggaggaggcggcggcggcgaagggaggcgtttggggccgcctccagggtccgctctgccattcctgaactggtccctcgtccccgtgactctggcatcagggaagcgaactgttaggcgagaggaggaggcagccagaaccatatccccttcttcctcggggcgggggccgggccaggccggctgagccgggggagggctccgggagggagtgcctggccaggccggcctgtctgccgcgatggatgacagtaaggtggttggaggcaaagtaaagaagcccggtaaacgtggtcggaagccagccaaaattgacttgaaagcaaaacttgagaggagccggcagagtgcaagagaatgccgagcccgaaaaaagctgagatatcagtatttggaagagttggtatccagtcgagaaagagctatatgtgccctcagagaggaactggaaatgtacaagcagtggtgcatggcaatggaccaaggaaaaatcccttctgaaataaaggccctactcactggagaagagcagaacaaatctcagcagaactcaagcaggcataccaaggctgggaagacagatgctaatagcaattcctggtgaagattatataaagatgagtcagtgattgaagccaatattctgattcccatggaagatggatgggcaagagtgtacttcttggctccatttactacctactgctcagtagtcatctctgtaaatctgcaatttctaccaaaatgtgtgatcgtagatctcaaaggatcttgctttaactttcaacacttagaaaatctacaaacattcagacctgtctgggttggtattgccacccatgacatttaacatgttgtgatgcttgaaaacacaggagtagagaaaatcgatgaagattgtatttttgcaccttaactccacattgctttattggttaatttatattctttccatgtaattcatgtaattgtatgtctgtgtgtgttttatgtgtcaccacctttcatgtttttgattgccctacaaagagaaaccaaatgagctgattactgactataagttctcagcctttatggacctaatcttatttttatttacttgagtaatgtttattctctgcatgaaccatgatttctcctgtgagccattccagcataagctgtgaatatgtattaacaaatatatacatttctatttttataatccataaggatatgcctgttttaaataacatacatattaacaatatctatcaggaaaaccctcaagacagcttctagttaaaacctttgttgctgtcctctcaaactatatttataaaaatttgctagggccaaatccatacttgcagaataattcatcaaattttatttttaagtgaaaagtaacctttcaggcatttcagcagcatacattgacaatctagggtatatatgtatgtatgtttcttattgtatgtctatatatgtatgtggggaggacaggagtgaatgttcacacacttttcttgcgtactcaactaaattggagaatgtttctgaagaaaattggatgaaattagctgctgagattgagtttctgccttaaaatctgaaacaaaaaaagggacaaattgctggtagatctactgactgtagccatcaccagaacacttagtttcttcccagacatgaatttcctgacaggctctgagccagaaacacactgtgggcgtgcatctggttcagccctggatatgcctccactgtggagggaagcattggaactggagttgtgcacagcaccgcagctagtgggcctggctgggggtgcagaagggcagggtagttctttccatttccccttgcagctacacttactttctccctgactaccaaatggagtgacggttgaagaatcaagctcataatatgatacacccagacagacccagaaatcttttgatttccccagcgagatacttaccactctctcttctctttcccatggttaaaacaggagttgtgttctctgtcgctgctaaattattcttcacttgagtgaagcaaatatttagcttccaaataaagtatattttgttctgaactggcagtttaagaggagataccgtagtctagattgtctttgaggtagaatatatgatggaccacatagtttaagattacaaggtactttccctcttctctcaggccatgcatttgaataaagtgcctcccttagcctgagctcctaaagacctcttgtacttggttgcaaactcagatctctagtctagtctagtctagtctagtctagtcatgtgtgactgtgtactgagataccactagcccagtttgctgggtctctatgttttggaagttgggggtttaataatatttaatgtctttttaggatcataaacataaataggtttgttgatattcaggccttcagaatttaagggttttaaatatagcattcagattgtaattggtatgtttttgccatctggtccactcaattgtatatttttattttgcaaaacaacccaaaacttactttatgttgctttgttcagtaccttttgaattcccccagaagagttgttttcaaaacaaacattccagaatgaatgtcgctcttcaatggaacgtctttattgtgcttgaagtatttcttctctggttgtaattctaaattacagagtcatttgagctttctcccctcccgctagtatctttacaggagcagggaagagcagtagaggatgtataattttgggcgaagttaaattacaatttatttgaggttattcctaaacctatttatttggtgttttggaggagatcacacactaagagaacgttgattgcctcggctattgtgctggctggacactttggtcacttttgaagcatgttaataaatgtcactgattaaaacagctggagcatttccttccctttccagtgaaggagcagcatagtgaaatcctggcacccctcacctttttgtgatgacaagatggctgacagtcacggagtccaggagaaggtgctgctctccttgctttctgagtaaacagagtaatgttttttttcttattttcccaaagaaagaaaagggggaaaatatatttgtatgtttagaccagccaaattctgtcattattttagtatcaacctgctgtatattagagcaactgaatataatatggaataagtttgaccaggtcaagttttaggatatagttgaatttctttaaaaagttttctattttatctaaaatctttctattatatctaaattagaatgatcatcctgcgcaaattcagattactgtttgctggctaattgacagtatttctcagcatcactatgtagcattctgttttagcatctttgaattatgatcatttgatttggctaattacaaaaagtacaggtttaaactggacttaccttgagttaaaggcaaagaaaatctaaaaacataaatgttatatttcacaagaaatcagttgcatattatccattacatatttagttttaaaaggaggagtcaccttgaattattttctgagtcaccttgagttatttgatctctcagcctgctttctcatctgtaaaaaaggggggaggataactttcacagggtaattggtaggctaaataggagttacagaaaactgttaaatagggaagaactacattaaatttaaatattcacatt

SEQ ID NO: 6271 - DNA, 2844 bp, Homo sapiens
  II.29 (XM_036107)
tgtcaggactttacgacccgcgcctccagctgaggtttctagacgtgacccagggcagactggtagcaaagcccccacgcccagccaggagcaccgccgaggactccagcacaccgagggacatgctgggcctgcgccccccactgctcgccctggtggggctgctctccctcgggtgcgtcctctctcaggagtgcacgaagttcaaggtcagcagctgccgggaatgcatcgagtcggggcccggctgcacctggtgccagaagctgaacttcacagggccgggggatcctgactccattcgctgcgacacccggccacagctgctcatgaggggctgtgcggctgacgacatcatggaccccacaagcctcgctgaaacccaggaagaccacaatgggggccagaagcagctgtccccacaaaaagtgacgctttacctgcgaccaggccaggcagcagcgttcaacgtgaccttccggcgggccaagggctaccccatcgacctgtactatctgatggacctctcctactccatgcttgatgacctcaggaatgtcaagaagctaggtggcgacctgctccgggccctcaacgagatcaccgagtccggccgcattggcttcgggtccttcgtggacaagaccgtgctgccgttcgtgaacacgcaccctgataagctgcgaaacccatgccccaacaaggagaaagagtgccagcccccgtttgccttcaggcacgtgctgaagctgaccaacaactccaaccagtttcagaccgaggtcgggaagcagctgatttccggaaacctggatgcacccgagggtgggctggacgccatgatgcaggtcgccgcctgcccggaggaaatcggctggcgcaacgtcacgcggctgctggtgtttgccactgatgacggcttccatttcgcgggcgacgggaagctgggcgccatcctgacccccaacgacggccgctgtcacctggaggacaacttgtacaagaggagcaacgaattcgactacccatcggtgggccagctggcgcacaagctggctgaaaacaacatccagcccatcttcgcggtgaccagtaggatggtgaagacctacgagaaactcaccgagatcatccccaagtcagccgtgggggagctgtctgaggactccagcaatgtggtccaactcattaagaatgcttacaataaactctcctccagggtcttcctggatcacaacgccctccccgacaccctgaaagtcacctacgactccttctgcagcaatggagtgacgcacaggaaccagcccagaggtgactgtgatggcgtgcagatcaatgtcccgatcaccttccaggtgaaggtcacggccacagagtgcatccaggagcagtcgtttgtcatccgggcgctgggcttcacggacatagtgaccgtgcaggttcttccccagtgtgagtgccggtgccgggaccagagcagagaccgcagcctctgccatggcaagggcttcttggagtgcggcatctgcaggtgtgacactggctacattgggaaaaactgtgagtgccagacacagggccggagcagccaggagctggaaggaagctgccggaaggacaacaactccatcatctgctcagggctgggggactgtgtctgcgggcagtgcctgtgccacaccagcgacgtccccggcaagctgatatacgggcagtactgcgagtgtgacaccatcaactgtgagcgctacaacggccaggtctgcggcggcccggggagggggctctgcttctgcgggaagtgccgctgccacccgggctttgagggctcagcgtgccagtgcgagaggaccactgagggctgcctgaacccgcggcgtgttgagtgtagtggtcgtggccggtgccgctgcaacgtatgcgagtgccattcaggctaccagctgcctctgtgccaggagtgccccggctgcccctcaccctgtggcaagtacatctcctgcgccgagtgcctgaagttcgaaaagggcccctttgggaagaactgcagcgcggcgtgtccgggcctgcagctgtcgaacaaccccgtgaagggcaggacctgcaaggagagggactcagagggctgctgggtggcctacacgctggagcagcaggacgggatggaccgctacctcatctatgtggatgagagccgagagtgtgtggcaggccccaacatcgccgccatcgtcgggggcaccgtggcaggcatcgtgctgatcggcattctcctgctggtcatctggaaggctctgatccacctgagcgacctccgggagtacaggcgctttgagaaggagaagctcaagtcccagtggaacaatgataatccccttttcaagagcgccaccacgacggtcatgaaccccaagtttgctgagagttaggagcacttggtgaagacaaggccgtcaggacccaccatgtctgccccatcacgcggccgagacatggcttgccacagctcttgaggatgtcaccaattaaccagaaatccagttattttccgccctcaaaatgacagccatggccggccgggtgcttctgggggctcgtcggggggacagctccactctgactggcacagtctttgcatggagacttgaggagggagggcttgaggttggtgaggttaggtgcgtgtttcctgtgcaagtcaggacatcagtctgattaaaggtggtgccaatttatttacatttaaacttgtcagggtataaaatgacatcccattaattatattgttaatcaatcacgtgtatagaaaaaaaataaaacttcaatacaggctgtccatgg

SEQ ID NO: 6272 - DNA, 1797 bp, Homo sapiens
  II.30 (XM_009064)
ccagcagggagctgggagctgggggaaacgacgccaggaaagctatcgcgccagagagggcgacgggggctcgggaagcctgacagggcttttgcgcacagctgccggctggctgctacccgcccgcgccagcccccgagaacgcgcgaccaggcacccagtccggtcaccgcagcggagagctcgccgctcgctgcagcgaggcccggagcggccccgcagggaccctccccagaccgcctgggccgcccggatgtgcactaaaatggaacagcccttctaccacgacgactcatacacagctacgggatacggccgggcccctggtggcctctctctacacgactacaaactcctgaaaccgagcctggcggtcaacctggccgacccctaccggagtctcaaagcgcctggggctcgcggacccggcccagagggcggcggtggcggcagctacttttctggtcagggctcggacaccggcgcgtctctcaagctcgcctcttcggagctggaacgcctgattgtccccaacagcaacggcgtgatcacgacgacgcctacacccccgggacagtacttttacccccgcgggggtggcagcggtggaggtgcagggggcgcagggggcggcgtcaccgaggagcaggagggcttcgccgacggctttgtcaaagccctggacgatctgcacaagatgaaccacgtgacaccccccaacgtgtccctgggcgctaccggggggcccccggctgggcccgggggcgtctacgccggcccggagccacctcccgtttacaccaacctcagcagctactccccagcctctgcgtcctcgggaggcgccggggctgccgtcgggaccgggagctcgtacccgacgaccaccatcagctacctcccacacgcgccgcccttcgccggtggccacccggcgcagctgggcttgggccgcggcgcctccaccttcaaggaggaaccgcagaccgtgccggaggcgcgcagccgggacgccacgccgccggtgtcccccatcaacatggaagaccaagagcgcatcaaagtggagcgcaagcggctgcggaaccggctggcggccaccaagtgccggaagcggaagctggagcgcatcgcgcgcctggaggacaaggtgaagacgctcaaggccgagaacgcggggctgtcgagtaccgccggcctcctccgggagcaggtggcccagctcaaacagaaggtcatgacccacgtcagcaacggctgtcagctgctgcttggggtcaagggacacgccttctgaacgtcccctgcccctttacggacaccccctcgcttggacggctgggcacacgcctcccactggggtccagggagcaggcggtgggcacccaccctgggacctaggggcgccgcaaaccacactggactccggccctcctaccctgcgcccagtccttccacctcgacgtttacaagcccccccttccacttttttttgtatgttttttttctgctggaaacagactcgattcatattgaatataatatatttgtgtatttaacagggaggggaagagggggcgatcgcggcggagctggccccgccgcctggtactcaagcccgcggggacattgggaaggggacccccgccccctgccctcccctctctgcaccgtactgtggaaaagaaacacgcacttagtctctaaagagtttattttaagacgtgtttgtgtttgtgtgtgtttgttctttttattgaatctatttaagtaaaaaaaaaattggttctttattaa

SEQ ID NO: 6273 - DNA, 1125 bp, Homo sapiens
  II.31 (NM_001774)
gtctcccccactgtcagcacctcttctgtgtggtgagtggaccgcttaccccactaggtgaagatgtcagcccaggagagctgcctcagcctcatcaagtacttcctcttcgttttcaacctcttcttcttcgtcctcggcagcctgatcttctgcttcggcatctggatcctcatcgacaagaccagcttcgtgtcctttgtgggcttggccttcgtgcctctgcagatctggtccaaagtcctggccatctcaggaatcttcaccatgggcatcgccctcctgggttgtgtgggggccctcaaggagctccgctgcctcctgggcctgtattttgggatgctgctgctcctgtttgccacacagatcaccctgggaatcctcatctccactcagcgggcccagctggagcgaagcttgcgggacgtcgtagagaaaaccatccaaaagtacggcaccaaccccgaggagaccgcggccgaggagagctgggactatgtgcagttccagctgcgctgctgcggctggcactacccgcaggactggttccaagtcctcatcctgagaggtaacgggtcggaggcgcaccgcgtgccctgctcctgctacaacttgtcggcgaccaacgactccacaatcctagataaggtgatcttgccccagctcagcaggcttggacacctggcgcggtccagacacagtgcagacatctgcgctgtccctgcagagagccacatctaccgcgagggctgcgcgcagggcctccagaagtggctgcacaacaaccttatttccatagtgggcatttgcctgggcgtcggcctactcgagctcgggttcatgacgctctcgatattcctgtgcagaaacctggaccacgtctacaaccggctcgctcgataccgttaggccccgccctccccaaagtcccgccccgcccccgtcacgtgcgctgggcacttccctgctgcctgtaaatatttgtttaatccccagttcgcctggagccctccgccttcacattcccctggggacccacgtggctgcgtgcccctgctgctgtcacctctcccacgggacctggggctttcgtccacagcttcctgtccccatctgtcggcctac

SEQ ID NO: 6274 - DNA, 1894 bp, Homo sapiens
  II.32 (XM_049849)
tccggaggtctccctaccaccaggctctgtggggcagggaagcccagtggggtgcagggagccaggaagctggggtggggtcagggcagggtccacagggagaccgggcgaggctggcagccttcccagtccgcgcagcgtctctgcagggggagcaagagctgcccttccacccctcccaggggacgggtaggggcactctgggcttttcccaccccctcacgcagggacacaggcctggtgggtctatgactgaaattggccagaccgcattctggtggttttattcggaagggaagtttaccctgttcagcagaagctgagatgggaacaggaaacccacagggcccctttattcggcaaaaatgtcagtcagcgccccggggagcagccgagggtccctgagtgtccgcagcaatggcgctgagttcctctgctggagttcatcctgctagctgggttcccgagctgccggtctgagcctgaggcatggagcctcctggagactgggggcctcctccctggagatccacccccaaaaccgacgtcttgaggctggtgctgtatctcaccttcctgggagccccctgctacgccccagctctgccgtcctgcaaggaggacgagtacccagtgggctccgagtgctgccccaagtgcagtccaggttatcgtgtgaaggaggcctgcggggagctgacgggcacagtgtgtgaaccctgccctccaggcacctacattgcccacctcaatggcctaagcaagtgtctgcagtgccaaatgtgtgacccagccatgggcctgcgcgcgagccggaactgctccaggacagagaacgccgtgtgtggctgcagcccaggccacttctgcatcgtccaggacggggaccactgcgccgcgtgccgcgcttacgccacctccagcccgggccagagggtgcagaagggaggcaccgagagtcaggacaccctgtgtcagaactgccccccggggaccttctctcccaatgggaccctggaggaatgtcagcaccagaccaagtgcagctggctggtgacgaaggccggagctgggaccagcagctcccactgggtatggtggtttctctcagggagcctcgtcatcgtcattgtttgctccacagttggcctaatcatatgtgtgaaaagaagaaagccaaggggtgatgtagtcaaggtgatcgtctccgtccagcggaaaagacaggaggcagaaggtgaggccacagtcattgaggccctgcaggcccctccggacgtcaccacggtggccgtggaggagacaataccctcattcacggggaggagcccaaaccactgacccacagactctgcaccccgacgccagagatacctggagcgacggctgctgaaagaggctgtccacctggcggaaccaccggagcccggaggcttgggggctccgccctgggctggcttccgtctcctccagtggagggagaggtggggcccctgctggggtagagctggggacgccacgtgccattcccatgggccagtgagggcctggggcctctgttctgctgtggcctgagctccccagagtcctgaggaggagcgccagttgcccctcgctcacagaccacacacccagccctcctgggccagcccagagggcccttcagaccccagctgtctgcgcgtctgactcttgtggcctcagcaggacaggccccgggcactgcctcacagccaaggctggactgggttggctgcagtgtggtgtttagtggataccacatcggaagtgattttctaaattggatttgaattcggctcctgttttctatttgtcatgaaacagtgtatttggggagatgctgtgggaggatgtaaatatcttgtttctcctc

SEQ ID NO: 6275 - DNA, 1084 bp, Homo sapiens
  II.33 (NM_003327)
cgaggatgtgcgtgggggctcggcggctgggccgcgggccgtgtgcggctctgctcctcctgggcctggggctgagcaccgtgacggggctccactgtgtcggggacacctaccccagcaacgaccggtgctgccacgagtgcaggccaggcaacgggatggtgagccgctgcagccgctcccagaacacggtgtgccgtccgtgcgggccgggcttctacaacgacgtggtcagctccaagccgtgcaagccctgcacgtggtgtaacctcagaagtgggagtgagcggaagcagctgtgcacggccacacaggacacagtctgccgctgccgggcgggcacccagcccctggacagctacaagcctggagttgactgtgccccctgccctccagggcacttctccccaggcgacaaccaggcctgcaagccctggaccaactgcaccttggctgggaagcacaccctgcagccggccagcaatagctcggacgcaatctgtgaggacagggaccccccagccacgcagccccaggagacccagggccccccggccaggcccatcactgtccagcccactgaagcctggcccagaacctcacagggaccctccacccggcccgtggaggtccccgggggccgtgcggttgccgccatcctgggcctgggcctggtgctggggctgctgggccccctggccatcctgctggccctgtacctgctccggagggaccagaggctgccccccgatgcccacaagccccctgggggaggcagtttccggacccccatccaagaggagcaggccgacgcccactccaccctggccaagatctgacctgggcccaccaaggtggacgctgggccccgccaggctggagcccggagggtctgctgggcgagcagggcaggtgcaggccgcctgccccgccacgctcctgggccaactctgcaccgttctaggtgccgatggctgcctccggctctctgcttacgtatgccatgcatacctcctgccccgcgggaccacaataaaaaccttggcagacgggagtctccgaccggcaaaaaaaaaaaaaaaaa

SEQ ID NO: 6276 - DNA, 1522 bp, Homo sapiens
  II.34 (BC001374)
ggcacgaggcggacgcgtggtagcctagagtcctggggagcttctgtccacctgtcctgcagaggagtcgtttccagcccggctgccccaggatgggtgagttcaacgagaagaagacaacatgtggcaccgtttgcctcaagtacctgctgtttacctacaattgctgcttctggctggctggcctggctgtcatggcagtgggcatctggacgctggccctcaagagtgactacatcagcctgctggcctcaggcacctacctggccacagcctacatcctggtggtggcgggcactgtcgtcatggtgactggggtcttgggctgctgcgccaccttcaaggagcgtcggaacctgctgcgcctgtacttcatcctgctcctcatcatctttctgctggagatcatcgctggtatcctcgcctacgcctactaccagcagctgaacacggagctcaaggagaacctgaaggacaccatgaccaagcgctaccaccagccgggccatgaggctgtgaccagcgctgtggaccagctgcagcaggagttccactgctgtggcagcaacaactcacaggactggcgagacagtgagtggatccgctcacaggaggccggtggccgtgtggtcccagacagctgctgcaagacggtggtggctctttgtggacagcgagaccatgcctccaacatctacaaggtggagggcggctgcatcaccaagttggagaccttcatccaggagcacctgagggtcattggggctgtggggatcggcattgcctgtgtgcaggtctttggcatgatcttcacgtgctgcctgtacaggagtctcaagctggagcactactgaccctgccttgggccttgctgctgctgcacccaactactgagctgagaccactgagtaccaggggctgggctccctgatgacacccaccctgtgccatcaccataacctctggggaccccaacctcagaggcagcttcaagtgccttttgctgcgcaccaatgcccagcaggggaggtgaggggggctggcggggcgaagtttggggggtgttttgtggggctccccggacatactctctgcctggtggtcagatgcaggttggaaggggccttgctgagtggcgcaaggccgagcgttcccagcagggggagaaacccttcacaccccaggcccttcaggaactggggctttgccttgcagccacatggccccatcccagttggggaagccaggtgagctctgacccttgggcctgggcctctgcccctcccaacccagccgtcgtctccctcgacagcgcccctgctgtcttccccaccgcagtcaccaccacccgaaatgccacgtggtcactgtgcactgccctgttcatgtgcctctgcggggcagggccttcctggttttgtacactgctgtacccagatgcctacaaccatccctgccacatacaggtgctcaataaacacttgtagagcagatggaaaaaaaaaaaaaaaaaaaaaaaaaa

SEQ ID NO: 6277 - DNA, 2481 bp, Homo sapiens
  II.35 (XM_051958)
cccggcgctcgctgctcccgcggcccgcgccatgccctcctacacggtcaccgggaccgtacttcaccccgtggtgaagacactgacgactacatctacctcagcctcgtgggctcggcgggctgcagcgagaagcacctgctggacaagcccttctacaacgacttcgagcgtggcgcggtggattcatacgacgtgactgtggacgaggaactgggcgagatccagctggtcagaatcgagaagcgcaagtactggctgaatgacgactggtacctgaagtacatcacgctgaagacgccccacggggactacatcgagttcccctgctaccgctggatcaccggcgatgtcgaggttgtcctgagggatggacgcgcaaagttggcccgagatgaccaaattcacattctcaagcaacaccgacgtaaagaactggaaacacggcaaaaacaatatcgatggatggagtggaaccctggcttccccttgagcatcgatgccaaatgccacaaggatttaccccgtgatatccagtttgatagtgaaaaaggagtggactttgttctgaattactccaaagcgatggagaacctgttcatcaaccgcttcatgcacatgttccagtcttcttggaatgacttcgccgactttgagaaaatctttgtcaagatcagcaacactatttctgagcgggtcatgaatcactggcaggaagacctgatgtttggctaccagttcctgaatggctgcaaccctgtgttgatccggcgctgcacagagctgcccgagaagctcccggtgaccacggagatggtagagtgcagcctggagcggcagctcagcttggagcaggaggtccagcaagggaacattttcatcgtggactttgagctgctggatggcatcgatgccaacaaaacagacccctgcacactccagttcctggccgctcccatctgcttgctgtataagaacctggccaacaagattgtccccattgccatccagctcaaccaaatcccgggagatgagaaccctattttcctcccttcggatgcaaaatacgactggcttttggccaaaatctgggtgcgttccagtgacttccacgtccaccagaccatcacccaccttctgcgaacacatctggtgtctgaggtttttggcattgcaatgtaccgccagctgcctgctgtgcaccccattttcaagctgctggtggcacacgtgagattcaccattgcaatcaacaccaaggcccgtgagcagctcatctgcgagtgtggcctctttgacaaggccaacgccacagggggcggtgggcacgtgcagatggtgcagagggccatgaaggacctgacctatgcctccctgtgctttcccgaggccatcaaggcccggggcatggagagcaaagaagacatcccctactacttctaccgggacgacgggctcctggtgtgggaagccatcaggacgttcacggccgaggtggtagacatctactacgagggcgaccaggtggtggaggaggacccggagctgcaggacttcgtgaacgatgtctacgtgtacggcatgcggggccgcaagtcctcaggcttccccaagtcggtcaagagccgggagcagctgtcggagtacctgaccgtggtgatcttcaccgcctccgcccagcacgccgcggtcaacttcggccagtacgactggtgctcctggatccccaatgcgcccccaaccatgcgagccccgccaccgactgccaagggcgtggtgaccattgagcagatcgtggacacgctgcccgaccgcggccgctcctgctggcatctgggtgcagtgtgggcgctgagccagttccaggaaaacgagctgttcctgggcatgtacccagaagagcattttatcgagaagcctgtgaaggaagccatggcccgattccgcaagaacctcgaggccattgtcagcgtgattgctgagcgcaacaagaagaagcagctgccatattactacttgtccccagaccggattccgaacagtgtggccatctgagcacactgccagtctcactgtgggaaggccagctgccccagccagatggactccagcctgcctggcaggctgtctggccaggcctcttggcagtcacatctcttcctccgaggccagtacctttccatttattctttgatcttcagggaactgcatagattgatcaaagtgtaaacaccatagggacccattctacacagagcaggactgcacagcgtcctgtccacacccagctcagcatttccacaccaagcagcaacagcaaatcacgaccactgatagatgtctattcttgttggagacatgggatgattattttctgttctatttgtgcttagtccaattccttgcacatagtaggtacccaattcaattactattgaatgaattaagaattggttgccataaaaataaatcagttcattt

SEQ ID NO: 6278 - DNA, 1695 bp, Homo sapiens
  II.36 (NM_021805)
gttgccgctgcgcacctggctcaggtgagctgccccgcccccgcccggcgcgagccccaggtcctggcagcagcccctgacctgtccaggtgccctgtccagctgactgcaaggacagagaggagtcctgcccagctcttggatcagtctgctggccgaggagcccggtggagccaggggtgaccctggagcccagcctgccccgaggaggccccggctcagagccatgccaggtgtctgtgatagggcccctgacttcctctccccgtctgaagaccaggtgctgaggcctgccttgggcagctcagtggctctgaactgcacggcttgggtagtctctgggccccactgctccctgccttcagtccagtggctgaaagacgggcttccattgggaattgggggccactacagcctccacgagtactcctgggtcaaggccaacctgtcagaggtgcttgtgtccagtgtcctgggggtcaacgtgaccagcactgaagtctatggggccttcacctgctccatccagaacatcagcttctcctccttcactcttcagagagctggccctacaagccacgtggctgcggtgctggcctccctcctggtcctgctggccctgctgctggccgccctgctctatgtcaagtgccgtctcaacgtgctgctctggtaccaggacgcgtatggggaggtggagataaacgacgggaagctctacgacgcctacgtctcctacagcgactgccccgaggaccgcaagttcgtgaacttcatcctaaagccgcagctggagcggcgtcggggctacaagctcttcctggacgaccgcgacctcctgccgcgcgctgagccctccgccgacctcttggtgaacctgagccgctgccgacgcctcatcgtggtgctttcggacgccttcctgagccgggcctggtgcagccacagcttccgggagggcctgtgccggctgctggagctcacccgcagacccatcttcatcaccttcgagggccagaggcgcgaccccgcgcacccggcgctccgcctgctgcgccagcaccgccacctggtgaccttgctgctctggaggcccggctccgtgactccttcctccgatttttggaaagaagtgcagctggcgctgccgcggaaggtgcggtacaggccggtggaaggagacccccagacgcagctgcaggacgacaaggaccccatgctgattcttcgaggccgagtccctgagggccgggccctggactcagaggtggacccggaccctgagggcgacctgggtgtccgggggcctgtttttggagagccatcagctccaccgcacaccagtggggtctcgctgggagagagccggagcagcgaagtggacgtctcggatctcggctcgcgaaactacagtgcccgcacagacttctactgcctggtgtccaaggatgatatgtagctcccaccccagagtgcaggatcatagggacagcgggggccagggcagcggcgtcgctcctctgctcaacaggaccacaacccctgccagcagccctgggaccctgccagcagccctgggaaaaggctgtggcctcagggcgcctcccagtgccagaaaataaagtccttttggattctgaaaaaaaaaaaaaaaaaaaaaaaaaaaaaaaaaaaaaaaaaaaaaaaaaaaaaaaa

SEQ ID NO: 6279 - DNA, 1114 bp, Homo sapiens
  II.37 (NM_017526)
gtctggcttgggcaggctgcccgggccgtggcaggaagccggaagcagccgcggccccagttcgggagacatggcgggcgttaaagctctcgtggcattatccttcagtggggctattggactgacttttcttatgctgggatgtgccttagaggattatggcgtttactggcccttattcgtcctgattttccacgccatctcccccatcccccatttcattgccaaaagagtcacctatgactcagatgcaaccagtagtgcctgtcgggaactggcatatttcttcactactggaattgttgtttctgcctttggatttcctgttattcttgctcgtgtggctgtgatcaaatggggagcctgcggccttgtgttggcaggcaatgcagtcattttccttacaattcaagggtttttccttatatttggaagaggagatgattttagctgggagcagtggtagcactttattctgattacagtgcattgaatttcttagaactcatactatctgtatacatgtgcacatgcggcattttactatgaaatttaatatgctgggttttttaatacctttatatatcatgttcactttaagaaagacttcataagtaggagatgagttttattctcagcaaatagacctgtcaaatttagattatgttactcaaattatgttacttgtttggctgttcatgtagtcacggtgctctcagaaaatatattaacgcagtcttgtaggcagctgccaccttatgcagtgcatcgaaaccttttgcttggggatgtgcttggagaggcagataacgctgaagcaggcctctcatgacccaggaaggccggggtggatccctctttgtgttgtagtccatgctattaaaagtgtggcccacagaccaagagcctcaacatttcctagagccttattagaaatgcagaatctgaagccccactctggacccaggacattttgatgagatccaaaggagttgtatgcacatgaaagtttgagaagcatcatcatagagaagtaaacatcacacccaacttccttatctttccagtggctaaaccacttaacctctctgggtgttacctgctcatttgttta

SEQ ID NO: 6280 - DNA, 5893 bp, Homo sapiens
  II.38 (XM_011780)
ggaggacagccggaccgagccaacgccggggactttgttccctccgcggaggggactcggcaactcgcagcggcagggtctggggccggcgcctgggagggatctgcgccccccactcactccctagctgtgttcccgccgccgccccggctagtctccggcgctggcgcctatggtcggcctccgacagcgctccggagggaccgggggagctcccaggcgcccgggactggagactgatgcatgagggggctacggaggcgcaggagcggtggtgatggtctgggaagcggagctgaagtgccctgggctttggtgaggcgtgacagtttatcatgaccgtgttcaggcaggaaaacgtggatgattactacgacaccggcgaggaacttggcagtggacagtttgcggttgtgaagaaatgccgtgagaaaagcaccggcctccagtatgccgccaaattcatcaagaaaaggaggactaagtccagccggcggggtgtgagccgcgaggacatcgagcgggaggtcagcatcctgaaggagatccagcaccccaatgtcatcaccctgcacgaggtctatgagaacaagacggacgtcatcctgatcttggaactcgttgcaggtggcgagctgtttgacttcttagctgaaaaggaatctttaactgaagaggaagcaactgaatttctcaaacaaattcttaatggtgtttactacctgcactcccttcaaatcgcccactttgatcttaagcctgagaacataatgcttttggatagaaatgtccccaaacctcggatcaagatcattgactttgggttggcccataaaattgactttggaaatgaatttaaaaacatatttgggactccagagtttgtcgctcctgagatagtcaactatgaacctcttggtcttgaggcagatatgtggagtatcggggtaataacctatatcctcctaagtggggcctccccatttcttggagacactaagcaagaaacgttagcaaatgtatccgctgtcaactacgaatttgaggatgaatacttcagtaataccagtgccctagccaaagatttcataagaagacttctggtcaaggatccaaagaagagaatgacaattcaagatagtttgcagcatccctggatcaagcctaaagatacacaacaggcacttagtagaaaagcatcagcagtaaacatggagaaattcaagaagtttgcagcccggaaaaaatggaaacaatccgttcgcttgatatcactgtgccaaagattatccaggtcattcctgtccagaagtaacatgagtgttgccagaagcgatgatactctggatgaggaagactcctttgtgatgaaagccatcatccatgccatcaacgatgacaatgtcccaggcctgcagcaccttctgggctcattatccaactatgatgttaaccaacccaacaagcacgggacacctccattactcattgctgctggctgtgggaatattcaaatactacagttgctcattaaaagaggctcgagaatcgatgtccaggataagggcgggtccaatgccgtctactgggctgctcggcatggccacgtcgataccttgaaatttctcagtgagaacaaatgccctttggatgtgaaagacaagtctggagagatggccctccacgtggcagctcgctatggccatgctgacgtggctcagttactgtgcagcttcggctcaaatcccaatatccaggacaaaggaagaagaaacccccctgcactgtgctgcttggcacggctattactctgtggccaaagccctttgtgaagccggctgtaacgtgaacatcaagaaccgagaaggagagacgcccctcctgacagcctctgccaggggctaccacgacatcgtggagtgtctggccgaacatggagccgaccttaatgcttgcgacaaggacggacacattgcccttcatctggctgtaagacggtgtcagatggaggtaatcaagactctcctcagccaagggtgtttcgtcgattatcaagacaggcacggcaatactcccctccatgtggcatgtaaagatggcaacatgcctatcgtggtggccctctgtgaagcaaactgcaatttggacatctccaacaagtatgggcgaacgcctctgcaccttgcggccaacaacggaatcctagacgtggtccggtatctctgtctgatgggagccagcgttgaggcgctgaccacggacggaaagacggcagaagatcttgctagatcggaacagcacgagcacgtagcaggtctccttgcaagacttcgaaaggatacgcaccgaggactcttcatccagcagctccgacccacacagaacctgcagccaagaattaagctcaagctgtttggccactcgggatccgggaaaaccacccttgtagaatctctcaagtgtgggctgctgaggagctttttcagaaggcgtcggcccagactgtcttccaccaactccagcaggttcccaccttcacccctggcttctaagcccacagtctcagtgagcatcaacaacctgtacccaggctgcgagaacgtgagtgtgaggagccgcagcatgatgttcgagccgggtcttaccaaagggatgctggaggtgtttgtggccccgacccaccacccgcactgctcggccgatgaccagtccaccaaggccatcgacatccagaacgcttatttgaatggagttggcgatttcagcgtgtgggagttctctggaaatcctgtgtatttctgctgttatgactattttgctgcaaatgatcccacgtcaatccatgttgttgtctttagtctagaagagccctatgagatccagctgaaccaagtgattttctggctcagtttcctgaagtcccttgtcccagttgaagaacccatagccttcggtggcaagctgaagaacccactccaagttgtcctggtggccacccacgctgacatcatgaatgttcctcgaccggctggaggcgagtttggatatgacaaagacacatcgttgctgaaagagattaggaacaggtttggaaatgatcttcacatttcaaataagctgtttgttctggatgctggggcttctgggtcaaaggacatgaaggtacttcgaaatcatctgcaagaaatacgaagccagattgtttcggtctgtcctcccatgactcacctgtgtgagaaaatcatctccacgctgccttcctggaggaagctcaatggacccaaccagctgatgtcgctgcagcagtttgtgtacgacgtgcaggaccagctgaaccccctggccagcgaggaggacctcaggcgcattgctcagcagctccacagcacaggcgagatcaacatcatgcaaagtgaaacagttcaggacgtgctgctcctggacccccgctggctctgcacaaacgtcctggggaagttgctgtccgtggagaccccacgggcgctgcaccactaccggggccgctacaccgtggaggacatccagcgcctggtgcccgacagcgacgtggaggagctgctgcagatcctcgatgccatggacatctgcgcccgggacctgagcagcgggaccatggtggacgtcccagccctgatcaagacagacaacctgcaccgctcctgggctgatgaggaggacgaggtgatggtgtatggtggcgtgcgcatcgtgcccgtggaacacctcacccccttcccatgtggcatctttcacaaggtccaggtgaacctgtgccggtggatccaccagcaaagcacagagggcgacgcggacatccgcctgtgggtgaatggctgcaagctggccaaccgtggggccgagctgctggtgctgctggtcaaccacggccagggcattgaggtccaggtccgcggcctggagacggagaagatcaagtgctgcctgctgctggactcggtgtgcagcaccattgagaacgtcatggccaccacgctgccagggctcctgaccgtgaagcattacctgagcccccagcagctgcgggagcaccatgagcccgtcatgatctaccagccacgggacttcttccgggcacagactctgaaggaaacctcactgaccaacaccatgggggggtacaaggaaagcttcagcagcatcatgtgcttcgggtgtcacgacgtctactcacaggccagcctcggcatggacatccatgcatcagacctgaacctcctcactcggaggaaactgagtcgcctgctggacccgcccgaccccctggggaaggactggtgccttctcgccatgaacttaggcctccctgacctcgtggcaaagtacaacaccagtaacggggctcccaaggatttcctccccagccccctccacgccctgctgcgggaatggaccacctaccctgagagcacagtgggcaccctcatgtccaaactgagggagctgggtcgccgggatgccgcagactttttgctgaaggcatcctctgtgttcaaaatcaacctggatggcaatggccaggaggcctatgcctcgagctgcaacagcggcacctcttacaattccattagctctgttgtatcccggtgagggcagcctctggcttgggcagggtctgtttggactgcagaagcaagggggtgatgtagcccatccttccctttggagatgctgagggtgtttcttcctgcacccacagccagggggatgccactcctccctccggcttgacctgtttctctgccgctacctccctccccgtctcattccgttgtctgtggatggtcattgcagtttaagagcagaacagatcttttactttggccgcttgaaaagctagtgtacctcctctcagtgttttggactccatctctcatcctccagtaccttgcttcttactgataattttgctggaattcctaacttttcaatgacattttttttaactactatattgattgtcctttaaaaaagaaaagtgcatatttatccaaaatgtgtatttcttatacgcttttctttgttataccatttcctcagcttatctcttttatatttgtaggagaaactcccatgtatggaatcccactgtatgatttataaacagacaatatgtgagtgccttttgcagaagagggtgtgtttgaaatcatcggagtcagccaggagctgtcaccaaggaaacgctacctctctgtcccttgctgtatgctgatcatcgccagaggtgcttcaccctgagttttgttttgtattgttttctgacagtttttctgttttgtttggcaaggaaaggggagaagggaatcctcctccagggtgattttatgatcagtgttgttgctctaggaagacatttttccgtttgcttttgttccaatgtcaatgtgaacgtccacatgaaacctacacactgtcatgcttcatcattccctctcatctcaggtagaaggttgacacagttgtagggttacagagacctatgtaagaattcagaagacccctgactcatcatttgtggcagtcccttataattggtgcatagcagatggtttccacatttagatcctggtttcataacttcctgtacttgaagtctaaaagcagaaaataaaggaagcaagttttcttccatgattttaaattgtgatcgagttttaaattgataggagggaacatgtcctaattcttctgtcctgagaagcatgtaatgttaatgttatatcatatgtatatatatatatgcactatgtatatacatatatattaatactggtatttttacttaatctataaaatgtcgttaaaaagttgtttgtttttttctttttttataaataaactgttgctcgtt

SEQ ID NO: 6281 - DNA, 3794 bp, Homo sapiens
  II.39 (NM_006017)
ccaagttctacctcatgtttggaggatcttgctagctatggccctcgtactcggctccctgttgctgctggggctgtgcgggaactccttttcaggagggcagccttcatccacagatgctcctaaggcttggaattatgaattgcctgcaacaaattatgagacccaagactcccataaagctggacccattggcattctctttgaactagtgcatatctttctctatgtggtacagccgcgtgatttcccagaagatactttgagaaaattcttacagaaggcatatgaatccaaaattgattatgacaagccagaaactgtaatcttaggtctaaagattgtctactatgaagcagggattattctatgctgtgtcctggggctgctgtttattattctgatgcctctggtggggtatttcttttgtatgtgtcgttgctgtaacaaatgtggtggagaaatgcaccagcgacagaaggaaaatgggcccttcctgaggaaatgctttgcaatctccctgttggtgatttgtataataataagcattggcatcttctatggttttgtggcaaatcaccaggtaagaacccggatcaaaaggagtcggaaactggcagatagcaatttcaaggacttgcgaactctcttgaatgaaactccagagcaaatcaaatatatattggcccagtacaacactaccaaggacaaggcgttcacagatctgaacagtatcaattcagtgctaggaggcggaattcttgaccgactgagacccaacatcatccctgttcttgatgagattaagtccatggcaacagcgatcaaggagaccaaagaggcgttggagaacatgaacagcaccttgaagagcttgcaccaacaaagtacacagcttagcagcagtctgaccagcgtgaaaactagcctgcggtcatctctcaatgaccctctgtgcttggtgcatccatcaagtgaaacctgcaacagcatcagattgtctctaagccagctgaatagcaaccctgaactgaggcagcttccacccgtggatgcagaacttgacaacgttaataacgttcttaggacagatttggatggcctggtccaacagggctatcaatcccttaatgatatacctgacagagtacaacgccaaaccacgactgtcgtagcaggtatcaaaagggtcttgaattccattggttcagatatcgacaatgtaactcagcgtcttcctattcaggatatactctcagcattctctgtttatgttaataacactgaaagttacatccacagaaatttacctacattggaagagtatgattcatactggtggctgggtggcctggtcatctgctctctgctgaccctcatcgtgattttttactacctgggcttactgtgtggcgtgtgcggctatgacaggcatgccaccccgaccacccgaggctgtgtctccaacaccggaggcgtcttcctcatggttggagttggattaagtttcctcttttgctggatattgatgatcattgtggttcttacctttgtctttggtgcaaatgtggaaaaactgatctgtgaaccttacacgagcaaggaattattccgggttttggatacaccctacttactaaatgaagactgggaatactatctctctgggaagctatttaataaatcaaaaatgaagctcacttttgaacaagtttacagtgactgcaaaaaaaatagaggcacttacggcactcttcacctgcagaacagcttcaatatcagtgaacatctcaacattaatgagcatactggaagcataagcagtgaattggaaagtctgaaggtaaatcttaatatctttctgttgggtgcagcaggaagaaaaaaccttcaggattttgctgcttgtggaatagacagaatgaattatgacagctacttggctcagactggtaaatcccccgcaggagtgaatcttttatcatttgcatatgatctagaagcaaaagcaaacagtttgcccccaggaaatttgaggaactccctgaaaagagatgcacaaactattaaaacaattcaccagcaacgagtccttcctatagaacaatcactgagcactctataccaaagcgtcaagatacttcaacgcacagggaatggattgttggagagagtaactaggattctagcttctctggattttgctcagaacttcatcacaaacaatacttcctctgttattattgaggaaactaagaagtatgggagaacaataataggatattttgaacattatctgcagtggatcgagttctctatcagtgagaaagtggcatcgtgcaaacctgtggccaccgctctagatactgctgttgatgtctttctgtgtagctacattatcgaccccttgaatttgttttggtttggcataggaaaagctactgtatttttacttccggctctaatttttgcggtaaaactggctaagtactatcgtcgaatggattcggaggacgtgtacgatgatgttgaaactatacccatgaaaaatatggaaaatggtaataatggttatcataaagatcatgtatatggtattcacaatcctgttatgacaagcccatcacaacattgatagctgatgttgaaactgcttgagcatcaggatactcaaagtggaaaggatcacagatttttggtagtttctgggtctacaaggactttccaaatccaggagcaacgccagtggcaacgtagtgactcaggcgggcaccaaggcaacggcaccattggtctctgggtagtgctttaagaatgaacacaatcacgttatagtccatggtccatcactattcaaggatgactccctcccttcctgtctatttttgttttttacttttttacactgagtttctatttagacactacaacatatggggtgtttgttcccattggatgcatttctatcaaaactctatcaaatgtgatggctagattctaacatattgccatgtgtggagtgtgctgaacacacaccagtttacaggaaagatgcattttgtgtacagtaaacggtgtatataccttttgttaccacagagttttttaaacaaatgagtattataggactttcttctaaatgagctaaataagtcaccattgacttcttggtgctgttgaaaataatccattttcactaaaagtgtgtgaaacctacagcatattcttcacgcagagattttcatctattatactttatcaaagattggccatgttccacttggaaatggcatgcaaaagccatcatagagaaacctgcgtaactccatctgacaaattcaaaagagagagagagatcttgagagagaaatgctgttcgttcaaaagtggagttgttttaacagatgccaattacggtgtacagtttaacagagttttctgttgcattaggataaacattaattggagtgcagctaacatgagtatcatcagactagtatcaagtgttctaaaatgaaatatgagaagatcctgtcacaattcttagatctggtgtccagcatggatgaaacctttgagtttggtccctaaatttgcatgaaagcacaaggtaaatattcatttgcttcaggagtttcatgttggatctgtcattatcaaaagtgatcagcaatgaagaactggtcggacaaaatttaacgttgatgtaatggaattccagatgtaggcattccccccaggtcttttcatgtgcagattgcagttctgattcatttgaataaaaaggaacttgg

SEQ ID NO: 6282 - DNA, 2145 bp, Homo sapiens
  II.40 (XM_027885)
aaatgaaaaaaaataatagttcactcaaacacaacttccgggttgaaggttcaacgattctcctcctcacctccaagtactgggactacagacatgcaccacacacccagctaattctgcatttttagtagagaaggggtctcaccatgttgcccaggatggtctggatctcctgaccttatggtccgctcgcctcggcctcccaaagtcctgggattacaggtgtgacccaccgcgcctggcccaaagtgctgggatgacaggcgtgagacaccatcctgccccacagaaaagatctgagatgggacagcccccgcagatcaggacgtgggctctgttatctggggggtgaccgactcaccctgcctcctctcgtctctgcaggtggtctgggaggcgggcaaagccggcctggaggagtgtctggtgactgaagtacaggtcgtgcagaaaacttgagactggggttcagggcttgtgggggtctgcctcaatctccctggccgggccaggcgcctgcacagactggctgctggacctgcgcacgcagcccaggaatggacattcctaacgggtggtgggcatgggagatgcctgtgtaatttcgtccgaagctgccaggaagaagaacagaactttgtgtgtttatttcatgataaagtgatttttttttttttaacccactcactggtcccggtctctggattcagccccattcctccaacactactagagagactgtttccccggttttttttttggggagatggagtcacgatctgtctcccaggttggagtgcagtgatgcaatctcagctcactgcaaccgctgcctcccgggctcaagcaattctcctgcctcagcctcccaagtaggtgggattacaggcacctgccaccacccctggctaatttttatattagcggtctcgaactcctgaccttgtgatctgcccgcctctgcctcccaagtgctgggattacaggggtgagccaccacacctggccttttttctttaaacttttccaagcggctgccgaagatggcggaggtgcaggtcctggtgcttgatggtcgaggccatctcctgggccgcctggcggccatcgtggctaaacaggtactgctgggccggaaggtggtggtcgtacgctgtgaaggcatcaacatttctggcaatttctacagaaacaagttgaagtacctggctttcctccgcaagcggatgaacaccaacccttcccgaggcccctaccacttccgggcccccagccgcatcttctggcggaccgtgcgaggtatgctgccccacaaaaccaagcgaggccaggccgctctggaccgtctcaaggtgtttgacggcatcccaccgccctacgacaagaaaaagcggatggtggttcctgctgccctcaaggtcgtgcgtctgaagcctacaagaaagtttgcctatctggggcgcctggctcacgaggttggctggaagtaccaggcagtgacagccaccctggaggagaagaggaaagagaaagccaagatccactaccggaagaagaaacagctcatgaggctacggaaacaggccgagaagaacgtggagaagaaaattgacaaatacacagaggtcctcaagacccacggactcctggtctgagcccaataaagactgttaattcctcatgcgttgcctgcccttcctccattgttgccctggaatgtacgggacccaggggcagcagcagtccaggtgccacaggcagccctgggacataggaagctgggagcaaggaaagggtcttagtcactgcctcccgaagttgcttgaaagcactcggagaattgtgcaggtgtcatttatctatgaccaataggaagagcaaccagttactatgagtgaaagggagccagaagactgattggagggccctatcttgtgagtggggcatctgttggactttccacctggtcatatactctgcagctgttagaatgtgcaagcacttggggacagcatgagcttgctgttgtacacagggtatttctagaagcagaaatagactgggaagatgcacaaccaaggggttacaggcatcgcccatgctcctcacctgtattttgtaatcagaaataaattgcttttaaag

SEQ ID NO: 6283 - DNA, 5725 bp, Homo sapiens
  II.41 (NM_007289)
cctggaggagggctctggaagtcacgtcaggttggctcttcaggttcatttccatagttccctgcggcctctgccttggggagttatgttttgttaccgagatccgcgctaccagattgcaccggggctgatttgggggctgggaatttgccattctgctgtacagacactgatttttttttcttctttttaaaaagcaaggtttgttttcattttggattttaggtgatgggcaagtcagaaagtcagatggatataactgatatcaacactccaaagccaaagaagaaacagcgatggactcgactggagatcagcctctcggtccttgtcctgctcctcaccatcatagctgtgagaatgatcgcactctatgcaacctacgatgatggtatttgcaagtcatcagactgcataaaatcagctgctcgactgatccaaaacatggatgccaccactgagccttgtagagactttttcaaatatgcttgcggaggctggttgaaacgtaatgtcattcccgagaccagctcccgttacggcaactttgacattttaagagatgaactagaagtcgttttgaaagatgtccttcaagaacccaaaactgaagatatagtagcagtgcagaaagcaaaagcattgtacaggtcttgtataaatgaatctgctattgatagcagaggtggagaacctctactcaaactgttaccagacatatatgggtggccagtagcaacagaaaactgggagcaaaaatatggtgcttcttggacagctgaaaaagctattgcacaactgaattctaaatatgggaaaaaagtccttattaatttgtttgttggcactgatgataagaattctgtgaatcatgtaattcatattgaccaacctcgacttggcctcccttctagagattactatgaatgcactggaatctataaagaggcttgtacagcatatgtggattttatgatttctgtggccagattgattcgtcaggaagaaagattgcccatcgatgaaaaccagcttgctttggaaatgaataaagttatggaattggaaaaagaaattgccaatgctacggctaaacctgaagatcgaaatgatccaatgcttctgtataacaagatgagattggcccagatccaaaataacttttcactagagatcaatgggaagccattcagctggttgaatttcacaaatgaaatcatgtcaactgtgaatattagtattacaaatgaggaagatgtggttgtttatgctccagaatatttaaccaaacttaagcccattcttaccaaatattctgccagagatcttcaaaatttaatgtcctggagattcataatggatcttgtaagcagcctcagccgaacctacaaggagtccagaaatgctttccgcaaggccctttatggtacaacctcagaaacagcaacttggagacgttgtgcaaactatgtcaatgggaatatggaaaatgctgtggggaggctttatgtggaagcagcatttgctggagagagtaaacatgtggtcgaggatttgattgcacagatccgagaagtttttattcagactttagatgacctcacttggatggatgccgagacaaaaaagagagctgaagaaaaggccttagcaattaaagaaaggatcggctatcctgatgacattgtttcaaatgataacaaactgaataatgagtacctcgagttgaactacaaagaagatgaatacttcgagaacataattcaaaatttgaaattcagccaaagtaaacaactgaagaagctccgagaaaaggtggacaaagatgagtggataagtggagcagctgtagtcaatgcattttactcttcaggaagaaatcagatagtcttcccagccggcattctgcagccccccttctttagtgcccagcagtccaactcattgaactatgggggcatcggcatggtcataggacacgaaatcacccatggcttcgatgacaatggcagaaactttaacaaagatggagacctcgttgactggtggactcaacagtctgcaagtaactttaaggagcaatcccagtgcatggtgtatcagtatggaaacttttcctgggacctggcaggtggacagcaccttaatggaattaatacactgggagaaaacattgctgataatggaggtcttggtcaagcatacagagcctatcagaattatattaaaaagaatggcgaagaaaaattacttcctggacttgacctaaatcacaaacaactatttttcttgaactttgcacaggtgtggtgtggaacctataggccagagtatgcggttaactccattaaaacagatgtgcacagtccaggcaatttcaggattattgggactttgcagaactctgcagagttttcagaagcctttcactgccgcaagaattcatacatgaatccagaaaagaagtgccgggtttggtgatcttcaaaagaagcattgcagcccttggctagacttgccaacaccacagaaatggggaattctctaatcgaaagaaaatgggccctaggggtcactgtactgacttgagggtgattaacagagagggcaccatcacaatacagataacattaggttgtcctagaaagggtgtggagggaggaagggggtctaaggtctatcaagtcaatcatttctcactgtgtacataatgcttaatttctaaagataatattactgtttatttctgtttctcatatggtctaccagtttgctgatgtccctagaaaacaatgcaaaacctttgaggtagaccaggatttctaatcaaaagggaaaagaagatgttgaagaatagagttaggcaccagaagaagagtaggtgacactatagtttaaaacacattgcctaactactagtttttacttttatttgcaacatttacagtccttcaaaatccttccaaagaattcttatacacattggggccttggagcttacatagttttaaactcatttttgccatacatcagttattcattctgtgatcatttattttaagcactcttaaagcaaaaaatgaatgtctaaaattgttttttgttgtacctgctttgactgatgctgagattcttcaggcttcctgcaattttctaagcaatttcttgctctatctctcaaaacttggtatttttcagagatttatataaatgtaaaaataataatttttatatttaattattaactacatttatgagtaactattattataggtaatcaatgaatattgaagtttcagcttaaaataaacagttgtgaaccaagatctataaagcgatatacagatgaaaatttgagactatttaaacttataaatcatattgatgaaaagatttaagcacaaactttagggtaaaaattgcgattggacagttgtctagagatatatatacttgtggttttcaaattggactttcaaaattaaatctgtccctgagagtgtctctgataaaagggcaaatctgcacctatgtagctctgcatctcctgtcttttcaggtttgtcatcagatggaaatattttgataataaattgaaattgtgaactcattgctccctaagactgtgacaactgtctaactttagaagtgcatttctgaatagaaatgggaggcctctgatggaccttctagaattataagtcacaaagagttctggaaaagaactgtttactgcttgataggaattcatcttttgaggcttctgttcctctcttttcctgttgtattgactattttcgttcattacttgattaagattttacaaaagaggagcacttccaaaattcttatttttcctaacaaaagatgaaagcagggaatttctatctaaatgatgagtattagttccctgtctcttgaaaaatgcccatttgcctttaaaaaaaaaagttacagaaatactataacatatgtacataaattgcataaagcataagtatacagttcaataaacttaactttaactgaacaatggccctgtagccagcacctgtaagaaacagagcagtaccagcgctctaaaagcacctccttgtcactttattactcccagaacaacaactatcctgacttctaatatcattcactagctttgcctggttttgtcttttatgcagatagaatcaatcagtatgtattcttttgtgcctggcttctttctctcagccttacatttgtgagattcctctgtattgtgctgattgtggatcttttcattctcattgcagaataatgttctattgtgggacttattacaatttgttcatcctattgttgatgggcacttgagaactttccattttggcgctattacaaatagtgcaactatgaatgtactgcatgttaccatcttacttgagcctttaatggacttatttcttcaaatccttccaaaaattattataagcattgaaattatagtttcaagccaactgtggatacccttaccctttcctcctttatcacaaccaccgttacaagtatacttatatttccctaaaatacatttaaaacttacctaagtgacatttgtagttggagtaataggagcttccagctctaataaaacagctgtctctaacttattttatttccatcatgtcagagcaggtgaagagccagaagtgaagagtgactagtacaaattataaaaagccactagactcttcactgttagctttttaaaacattaggctcccatccctatggaggaacaactctccagtgcctggatcccctctgtctacaaatataagattttctgggcctaaaggatagatcaaagtcaaaaatagcaatgcctccctatccctcacacatccagacatcatgaattttacatggtactcttgttgagttctatagagccttctgatgtctctaaagcactaccgattctttggagttgtcacatcagataagacatatctctaattccatccataaatccagttctactatggctgagttctggtcaaagaaagaaagtttagaagctgagacacaaagggttgggagctgatgaaactcacaaatgatggtaggaagaagctctcgacaatacccgttggcaaggagtctgcctccatgctgcagtgttcgagtggattgtaggtgcaagatggaaaggattgtaggtgcaagctgtccagagaaaagagtccttgttccagccctattctgccactcctgacagggtgaccttgggtatttgcaatattcctttgggcctctgcttctctcacctaaaaaaagagaattagattatattggtggttctcagcaagagaaggagtatgtgtccaatgctgccttcccatgaatctgtctcccagttatgaatcagtgggcaggataaactgaaaactcccatttaagtgtctgaatcgagtgagacaaaattttagtccaaataacaagtaccaaagttttatcaagtttgggtctgtgctgctgttactgttaaccatttaagtggggcaaaaccttgctaattttctcaaaagcatttatcattcttgttgccacagctggagctctcaaactaaaagacatttgttattttggaaagaagaaagactctattctcaaagtttcctaatcagaaatttttatcagtttccagtctcaaaaatacaaaataaaaacaaacgtttttaatact

SEQ ID NO: 6284 - DNA, 849 bp, Homo sapiens
  II.42 (XM_008411)
aaaaggccggcggaacagccagaggagcagagaggcaaagaaacattgtgaaatctccaactcttaaccttcaacatgaaagtctctgcagtgcttctgtgcctgctgctcatgacagcagctttcaacccccagggacttgctcagccagatgcactcaacgtcccatctacttgctgcttcacatttagcagtaagaagatctccttgcagaggctgaagagctatgtgatcaccaccagcaggtgtccccagaaggctgtcatcttcagaaccaaactgggcaaggagatctgtgctgacccaaaggagaagtgggtccagaattatatgaaacacctgggccggaaagctcacaccctgaagacttgaactctgctacccctactgaaatcaagctggagtacgtgaaatgacttttccattctcctctggcctcctcttctatgctttggaatacttctaccataattttcaaataggatgcattcggttttgtgattcaaaatgtactatgtgttaagtaatattggctattatttgacttgttgctggtttggagtttatttgagtattgctgatcttttctaaagcaaggccttgagcaagtaggttgctgtctctaagcccccttcccttccactatgagctgctggcagtgggtttgtattcggttcccaggggttgagagcatgcctgtgggagtcatggacatgaagggatgctgcaatgtaggaaggagagctctttgtgaatgtgaggtgttgctaaatatgttattgtggaaagatgaatgcaatagtaggactgctgacattttgcagaaaatacattttatttaaaatctcc

SEQ ID NO: 6285 - DNA, 2795 bp, Homo sapiens
  II.43 (XM_055188)
gccaccccagaaggctggagcagggacgccgtcgctccggccgcctgctcccctcgggtccccgtgcgagcccacgccggccccggtgcccgcccgcagccctgccactggacacaggataaggcccagcgcacaggcccccacgtggacagcatggaccgcggcacgctccctctggctgttgccctgctgctggccagctgcagcctcagccccacaagtcttgcagaaacagtccattgtgaccttcagcctgtgggccccgagaggggcgaggtgacatataccactagccaggtctcgaagggctgcgtggctcaggcccccaatgccatccttgaagtccatgtcctcttcctggagttcccaacgggcccgtcacagctggagctgactctccaggcatccaagcaaaatggcacctggccccgagaggtgcttctggtcctcagtgtaaacagcagtgtcttcctgcatctccaggccctgggaatcccactgcacttggcctacaattccagcctggtcaccttccaagagcccccgggggtcaacaccacagagctgccatccttccccaagacccagatccttgagtgggcagctgagaggggccccatcacctctgctgctgagctgaatgacccccagagcatcctcctccgactgggccaagcccaggggtcactgtccttctgcatgctggaagccagccaggacatgggccgcacgctcgagtggcggccgcgtactccagccttggtccggggctgccacttggaaggcgtggccggccacaaggaggcgcacatcctgagggtcctgccgggccactcggccgggccccggacggtgacggtgaaggtggaactgagctgcgcacccggggatctcgatgccgtcctcatcctgcagggtcccccctacgtgtcctggctcatcgacgccaaccacaacatgcagatctggaccactggagaatactccttcaagatctttccagagaaaaacattcgtggcttcaagctcccagacacacctcaaggcctcctgggggaggcccggatgctcaatgccagcattgtggcatccttcgtggagctaccgctggccagcattgtctcacttcatgcctccagctgcggtggtaggctgcagacctcacccgcaccgatccagaccactcctcccaaggacacttgtagcccggagctgctcatgtccttgatccagacaaagtgtgccgacgacgccatgaccctggtactaaagaaagagcttgttgcgcatttgaagtgcaccatcacgggcctgaccttctgggaccccagctgtgaggcagaggacaggggtgacaagtttgtcttgcgcagtgcttactccagctgtggcatgcaggtgtcagcaagtatgatcagcaatgaggcggtggtcaatatcctgtcgagctcatcaccacagcggaaaaaggtgcactgcctcaacatggacagcctctctttccagctgggcctctacctcagcccacacttcctccaggcctccaacaccatcgagccggggcagcagagctttgtgcaggtcagagtgtccccatccgtctccgagttcctgctccagttagacagctgccacctggacttggggcctgagggaggcaccgtggaactcatccagggccgggcggccaagggcaactgtgtgagcctgctgtccccaagccccgagggtgacccgcgcttcagcttcctcctccacttctacacagtacccatacccaaaaccggcaccctcagctgcacggtagccctgcgtcccaagaccgggtctcaagaccaggaagtccataggactgtcttcatgcgcttgaacatcatcagccctgacctgtctggttgcacaagcaaaggcctcgtcctgcccgccgtgctgggcatcacctttggtgccttcctcatcggggccctgctcactgctgcactctggtacatctactcgcacacgcgttcccccagcaagcgggagcccgtggtggcggtggctgccccggcctcctcggagagcagcagcaccaaccacagcatcgggagcacccagagcaccccctgctccaccagcagcatggcatagccccggccccccgcgctcgcccagcaggagagactgagcagccgccagctgggagcactggtgtgaactcaccctgggagccagtcctccactcgacccagaatggagcctgctctccgcgcctacccttcccgcctccctctcagaggcctgctgccagtgcagccactggcttggaacaccttggggtccctccaccccacagaaccttcaacccagtgggtctgggatatggctgcccaggagacagaccacttgccacgctgttgtaaaaacccaagtccctgtcatttgaacctggatccagcactggtgaactgagctgggcaggaagggagaacttgaaacagattcaggccagcccagccaggccaacagcacctccccgctgggaagagaagagggcccagcccagagccacctggatctatccctgcggcctccacacctgaacttgcctaactaactggcaggggagacaggagcctagcggagcccagcctgggagcccagagggtggcaagaacagtgggcgttgggagcctagctcctgccacatggagccccctctgccggtcgggcagccagcagagggggagtagccaagctgcttgtcctgggcctgcccctgtgtattcaccaccaataaatcagaccatgaaacc

SEQ ID NO: 6286 - DNA, 2207 bp, Homo sapiens
  II.44 (NM_021073)
ctcttgaagagggctggtatatttgtgcctgctggaggtggaattaacagtaagaaggagaaagggattgaatggacttacaggaaggatttcaagtaaattcagggaaacacatttacttgaatagtacaacctagagtattattttacactaagacgacacaaaagatgttaaagttatcaccaagctgccggacagatatatattccaacaccaaggtgcagatcagcatagatctgtgattcagaaatcaggatttgttttggaaagagctcaagggttgagaagaactcaaaagcaagtgaagattactttgggaactacagtttatcagaagatcaacttttgctaattcaaataccaaaggcctgattatcataaattcatataggaatgcataggtcatctgatcaaataatattagccgtcttctgctacatcaatgcagcaaaaactcttaacaactgtggataattggaaatctgagtttcagctttcttagaaataactactcttgacatattccaaaatatttaaaataggacaggaaaatcggtgaggatgttgtgctcagaaatgtcactgtcatgaaaaataggtaaatttgttttttcagctactgggaaactgtacctcctagaaccttaggttttttttttttttaagaggacaagaaggactaaaaatatcaacttttgcttttggacaaaaatgcatctgactgtatttttacttaagggtattgtgggtttcctctggagctgctgggttctagtgggttatgcaaaaggaggtttgggagacaatcatgttcactccagttttatttatagaagactacggaaccacgaaagacgggaaatacaaagggaaattctctctatcttgggtttgcctcacagacccagaccattttcacctggaaaacaagcgtcctctgcacctctctttatgctggatctctacaatgccatgaccaatgaagaaaatcctgaagagtcggagtactcagtaagggcatccttggcagaagagaccagaggggcaagaaagggatacccagcctctcccaatgggtatcctcgtcgcatacagttatctcggacgactcctctgaccacccagagtcctcctctagccagcctccatgataccaactttctgaatgatgctgacatggtcatgagctttgtcaacttagttgaaagagacaaggatttttctcaccagcgaaggcattacaaagaatttcgatttgatcttacccaaattcctcatggagaggcagtgacagcagctgaattccggatatacaaggaccggagcaacaaccgatttgaaaatgaaacaattaagattagcatatatcaaatcatcaaggaatacacaaatagggatgcagatctgttcttgttagacacaagaaaggcccaagctttagatgtgggttggcttgtctttgatatcactgtgaccagcaatcattgggtgattaatccccagaataatttgggcttacagctctgtgcagaaacaggggatggacgcagtatcaacgtaaaatctgctggtcttgtgggaagacagggacctcagtcaaaacaaccattcatggtggccttcttcaaggcgagtgaggtacttcttcgatccgtgagagcagccaacaaacgaaaaaatcaaaaccgcaataaatccagctctcatcaggactcctccagaatgtccagtgttggagattataacacaagtgagcaaaaacaagcctgtaagaagcacgaactctatgtgagcttccgggatctgggatggcaggactggattatagcaccagaaggatacgctgcattttattgtgatggagaatgttcttttccacttaacgcccatatgaatgccaccaaccacgctatagttcagactctggttcatctgatgtttcctgaccacgtaccaaagccttgttgtgctccaaccaaattaaatgccatctctgttctgtactttgatgacagctccaatgtcattttgaaaaaatatagaaatatggtagtacgctcatgtggctgccactaatattaaataatattgataataacaaaaagatctgtattaaggtttatggctgcaataaaaagcatactttcagacaaacggggaatttcctaaaaaaaaaaaaaaaaaaaaaaaaaaaaaaaaaaaaaaa

SEQ ID NO: 6287 - DNA, 2580 bp, Homo sapiens
  II.45 (XM_007417)
cctgtttagacacatggacaagaatcccagcgctacaaggcacacagtccgcttcttcgtcctcagggttgccagcgcttcctggaagtcctgaagctctcgcagtgcagtgagttcatgcaccttcttgccaagcctcagtctttgggatctggggaggccgcctggttttcctccctccttctgcacgtctgctggggtctcttcctctccaggccttgccgtccccctggcctctcttcccagctcacacatgaagatgcacttgcaaagggctctggtggtcctggccctgctgaactttgccacggtcagcctctctctgtccacttgcaccaccttggacttcggccacatcaagaagaagagggtggaagccattaggggacagatcttgagcaagctcaggctcaccagcccccctgagccaacggtgatgacccacgtcccctatcaggtcctggccctttacaacagcacccgggagctgctggaggagatgcatggggagagggaggaaggctgcacccaggaaaacaccgagtcggaatactatgccaaagaaatccataaattcgacatgatccaggggctggcggagcacaacgaactggctgtctgccctaaaggaattacctccaaggttttccgcttcaatgtgtcctcagtggagaaaaatagaaccaacctattccgagcagaattccgggtcttgcgggtgcccaaccccagctctaagcggaatgagcagaggatcgagctcttccagatccttcggccagatgagcacattgccaaacagcgctatatcggtggcaagaatctgcccacacggggcactgccgagtggctgtcctttgatgtcactgacactgtgcgtgagtggctgttgagaagagagtccaacttaggtctagaaatcagcattcactgtccatgtcacacctttcagcccaatggagatatcctggaaaacattcacgaggtgatggaaatcaaattcaaaggcgtggacaatgaggatgaccatggccgtggagatctggggcgcctcaagaagcagaaggatcaccacaaccctcatctaatcctcatgatgattcccccacaccggctcgacaacccgggccaggggggtcagaggaagaagcgggctttggacaccaattactgcttccgcaacttggaggagaactgctgtgtgcgccccctctacattgacttccgacaggatctgggctggaagtgggtccatgaacctaagggctactatgccaacttctgctcaggcccttgcccatacctccgcagtgcagacacaacccacagcacggtgctgggactgtacaacactctgaaccctgaagcatctgcctcgccttgctgcgtgccccaggacctggagcccctgaccatcctgtactatgttgggaggacccccaaagtggagcagctctccaacatggtggtgaagtcttgtaaatgtagctgagaccccacgtgcgacagagagaggggagagagaaccaccactgcctgactgcccgctcctcgggaaacacacaagcaacaaacctcactgagaggcctggagcccacaaccttcggctccgggcaaatggctgagatggaggtttccttttggaacatttctttcttgctggctctgagaatcacggtggtaaagaaagtgtgggtttggttagaggaaggctgaactcttcagaacacacagactttctgtgacgcagacagaggggatggggatagaggaaagggatggtaagttgagatgttgtgtggcaatgggatttgggctaccctaaagggagaaggaagggcagagaatggctgggtcagggccagactggaagacacttcagatctgaggttggatttgctcattgctgtaccacatctgctctagggaatctggattatgttatacaaggcaagcattttttttttttttttaaagacaggttacgaagacaaagtcccagaattgtatctcatactgtctgggattaagggcaaatctattacttttgcaaactgtcctctacatcaattaacatcgtgggtcactacagggagaaaatccaggtcatgcagttcctggcccatcaactgtattgggccttttggatatgctgaacgcagaagaaagggtggaaatcaaccctctcctgtctgccctctgggtccctcctctcacctctccctcgatcatatttccccttggacacttggttagacgccttccaggtcaggatgcacatttctggattgtggttccatgcagccttggggcattatgggttcttcccccacttcccctccaagaccctgtgttcatttggtgttcctggaagcaggtgctacaacatgtgaggcattcggggaagctgcacatgtgccacacagtgacttggccccagacgcatagactgaggtataaagacaagtatgaatattactctcaaaatctttgtataaataaatatttttggggcatcctggatgatttcatcttctggaatattgtttctagaacagtaaaagccttattctaaggtg

SEQ ID NO: 6288 - DNA, 2898 bp, Homo sapiens
  II.46 (NM_001495)
tttgattgtagcgggcaaggggggcgtcgagaggcagcagcccatcgcccgcctctcaccccaccccctccagccagaggcgagaatcgcaggactcgggatcttcatcgggtggactagctgggatctccgcattggatttggggctgattaccactgcttgcctattattattgttgttgttactactattatttttttttacccaagggagaaagacaaaaaaacggtgggatttatttaacatgatcttggcaaacgtcttctgcctcttcttctttctagacgagaccctccgctctttggccagcccttcctccctgcagggccccgagctccacggctggcgccccccagtggactgtgtccgggccaatgagctgtgtgccgccgaatccaactgcagctctcgctaccgcactctgcggcagtgcctggcaggccgcgaccgcaacaccatgctggccaacaaggagtgccaggcggccttggaggtcttgcaggagagcccgctgtacgactgccgctgcaagcggggcatgaagaaggagctgcagtgtctgcagatctactggagcatccacctggggctgaccgagggtgaggagttctacgaagcctccccctatgagccggtgacctcccgcctctcggacatcttcaggcttgcttcaatcttctcagggacaggggcagacccggtggtcagcgccaagagcaaccattgcctggatgctgccaaggcctgcaacctgaatgacaactgcaagaagctgcgctcctcctacatctccatctgcaaccgcgagatctcgcccaccgagcgctgcaaccgccgcaagtgccacaaggccctgcgccagttcttcgaccgggtgcccagcgagtacacctaccgcatgctcttctgctcctgccaagaccaggcgtgcgctgagcgccgccggcaaaccatcctgcccagctgctcctatgaggacaaggagaagcccaactgcctggacctgcgtggcgtgtgccggactgaccacctgtgtcggtcccggctggccgacttccatgccaattgtcgagcctcctaccagacggtcaccagctgccctgcggacaattaccaggcgtgtctgggctcttatgctggcatgattgggtttgacatgacacctaactatgtggactccagccccactggcatcgtggtgtccccctggtgcagctgtcgtggcagcgggaacatggaggaggagtgtgagaagttcctcagggacttcaccgagaacccatgcctccggaacgccatccaggcctttggcaacggcacggacgtgaacgtgtccccaaaaggcccctcgttccaggccacccaggcccctcgggtggagaagacgccttctttgccagatgacctcagtgacagtaccagcttggggaccagtgtcatcaccacctgcacgtctgtccaggagcaggggctgaaggccaacaactccaaagagttaagcatgtgcttcacagagctcacgacaaatatcatcccagggagtaacaaggtgatcaaacctaactcaggccccagcagagccagaccgtcggctgccttgaccgtgctgtctgtcctgatgctgaaacaggccttgtaggctgtgggaaccgagtcagaatatttttgaaagctacgcagacaagaacagccgcctgacgaaatggaaacacacacagacacacacacaccttgcaaaaaaaaaattgtttttcccaccttgtcgctgaacctgtctcctcccaggtttcttctctggagaagtttttgtaaaccaaacagacaagcaggcaggcagcctgagagctggcccaggggtcccctggcaggggaaactctggtgccggggagggcacgaggctctagaaatgcccttcactttctcctggtgtttttctctctggacccttctgaagcagagaccggacaagagcctgcagcggaagggactctgggctgtgcctgaggctggctgggggcaggacaacacagctgcttccccaggctgcccactctggggacccgctgggggctggcagagggcatcggtcagcggggcagcggggctggccatgagggtccaccttcagccctttggcttcaaggatggagatggttttgccctccctctctgccctcgggtggggctggtgggtctgcagctggtgtgggaacttccccacggatggcggtggagggggttcgcaccgtgctgggctccccctgactgtagcacggagtgttggggctgggggccagctccaggagggcttgagagctcagcctgcctgggagagcccttgtggcgaggcattaaaacttgggcaccagcttctttctcggtggcagaaattttgaagtcagagagaaacggtcctttgttggcttctttgctttctcgtgggtcctttggcaggcctccctttggggagagggaggggagagaccacagccgggtgtgtgtctgcagcaccgtgggccctcaagctttcctgctgtcttctccctcctcctcctttcccctttctctttcctcatttcctagacgtacgtcaactgtatgtacataccggggctcctctcctaacatatatgtatatacacatccatatacatatattgtgtggtttcccctttctttcctttttttaagcaacaaaactatggaaataataccccaacagatgagcgaaaatgtattattgtaaagtttattttttttaatactgttgtctataatggggaaaaaggacattggccccgcagtgccctgccccagtcagcctggctgggctctggtgggggctcctgatccgcatccaagcttaaccaaggctccaataaacgtgctaggaagc

SEQ ID NO: 6289 - DNA, 2173 bp, Homo sapiens
  II.47 (XM_009475)
aaaggcgtcggcgccacgcgcatatccctgctcggcgctgcccgcccagttcctgttcccagactgaggcccagcccccttcgcccgtttccatcacgagtgccgccagcatgtctgacaaactgccctacaaagtcgccgacatcggcctggctgcctggggacgcaaggccctggacattgctgagaacgagatgccgggcctgatgcgtatgcgggagcggtactcggcctccaagccactgaagggcgcccgcatcgctggctgcctgcacatgaccgtggagacggccgtcctcattgagaccctcgtcaccctgggtgctgaggtgcagtggtccagctgcaacatcttctccacccaggaccatgcggcggctgccattgccaaggctggcattccggtgtatgcctggaagggcgaaacggacgaggagtacctgtggtgcattgagcagaccctgtacttcaaggacgggcccctcaacatgattctggacgacgggggcgacctcaccaacctcatccacaccaagtacccgcagcttctgccaggcatccgaggcatctctgaggagaccacgactggggtccacaacctctacaagatgatggccaatgggatcctcaaggtgcctgccatcaatgtcaatgactccgtcaccaagagcaagtttgacaacctctatggctgccgggagtccctcatagatggcatcaagcgggccacagatgtgatgattgccggcaaggtagcggtggtagcaggctatggtgatgtgggcaagggctgtgcccaggccctgcggggtttcggagcccgcgtcatcatcaccgagattgaccccatcaacgcactgcaggctgccatggagggctatgaggtgaccaccatggatgaggcctgtcaggagggcaacatctttgtcaccaccacaggctgtattgacatcatccttggccggcactttgagcagatgaaggatgatgccattgtgtgtaacattggacactttgacgtggagatcgatgtcaagtggctcaacgagaacgccgtggagaaggtgaacatcaagccgcaggtggaccggtatcggttgaagaatgggcgccgcatcatcctgctggccgagggtcggctggtcaacctgggttgtgccatgggccaccccagcttcgtgatgagtaactccttcaccaaccaggtgatggcgcagatcgagctgtggacccatccagacaagtaccccgttggggttcatttcctgcccaagaagctggatgaggcagtggctgaagcccacctgggcaagctgaatgtgaagttgaccaagctaactgagaagcaagcccagtacctgggcatgtcctgtgatggccccttcaagccggatcactaccgctactgagagccaggtctgcgtttcaccctccagctgctgtccttgcccaggccccacctctcctccctaagagctaatggcaccaactttgtgattggtttgtcagtgtcccccatcgactctctggggctgatcacttagtttttggcctctgctgcagccgtcatactgttccaaatgtggcagcgggaacagagtaccctcttcaagccccggtcatgatggaggtcccagccacagggaaccatgagctcagtggtcttggaacagctcactaagtcagtccttccttagcctggaagtcagtagtggagtcacaaagcccatgtgttttgccatctaggccttcacctggtctgtggacttatacctgtgtgcttggtttacaggtccagtggttcttcagcccatgacagatgagaaggggctatattgaagggcaaagaggaactgttgtttgaattttcctgagagcctggcttagtgctgggccttctcttaaacctcattacaatgaggttagtacttttagtccctgttttacaggggttagaatagactgttaaggggcaactgagaaagaacagagaagtgacagctaggggttgagaggggccagaaaaacatgaatgcaggcagatttcgtgaaatctgccaccactttataaccagatggttcctttcacaaccctgggtcaaaaagagaataatttggcctataatgttaaaagaaagcaggaaggtgggtaaataaaaatcttggtgcctgg

SEQ ID NO: 6290 - DNA, 2485 bp, Homo sapiens
  II.48 (XM_006738)
agaacgtgcgcatcgaccccagtagcctgtccttcaacatgtggaaggagatccctatccccttctatctctccgtctacttctttgacgtcatgaaccccagcgagatcctgaagggcgagaagccgcaggtgcgggagcgcgggccctacgtgtacagggagttcaggcacaaaagcaacatcaccttcaacaacaacgacaccgtgtccttcctcgagtaccgcaccttccagttccagccctccaagtcccacggctcggagagcgactacatcgtcatgcccaacatcctggtcttgggtgcggcggtgatgatggagaataagcccatgaccctgaagctcatcatgaccttggcattcaccaccctcggcgaacgtgccttcatgaaccgcactgtgggtgagatcatgtggggctacaaggacccccttgtgaatctcatcaacaagtactttccaggcatgttccccttcaaggacaagttcggattatttgctgagctcaacaactccgactctgggctcttcacggtgttcacgggggtccagaacatcagcaggatccacctcgtggacaagtggaacgggctgagcaaggttgacttctggcattccgatcagtgcaacatgatcaatggaacttctgggcaaatgtggccgcccttcatgactcctgagtcctcgctggagttctacagcccggaggcctgccgatccatgaagctaatgtacaaggagtcaggggtgtttgaaggcatccccacctatcgcttcgtggctcccaaaaccctgtttgccaacgggtccatctacccacccaacgaaggcttctgcccgtgcctggagtctggaattcagaacgtcagcacctgcaggttcagtgcccccttgtttctctcccatcctcacttcctcaacgctgacccggttctggcagaagcggtgactggcctgcaccctaaccaggaggcacactccttgttcctggacatccacccggtcacgggaatccccatgaactgctctgtgaaactgcagctgagcctctacatgaaatctgtcgcaggcattggacaaactgggaagattgagcctgtggtcctgccgctgctctggtttgcagagagcggggccatggagggggagactcttcacacattctacactcagctggtgttgatgcccaaggtgatgcactatgcccagtacgtcctcctggcgctgggctgcgtcctgctgctggtccctgtcatctgccaaatccggagccaagtaggtgctggccagagggcagcccgggctgacagccattcgcttgcctgctgggggaaaggggcctcagatcggaccctctggccaaccgcagcctggagcccacctccagcagcagtcctgcgtctctgccggagtgggagcggtcactgctgggggctgcgcagcacgcttgcgtcttttgcatgccgcgttgccactactctgcctgttctggaaggcctgggaccctcccttggagggggcacagggtcctgaggacaccgtgagccagccaggcctggccgctgggcctgaccggccccccagcccctacaccccgcttctcccggactctcccagcggacagccccccagccccacagcctgagcctcccagctgccatgtgcctgttgcacacctgcacacacgccctggcacacatacacacatgcgtgcaggcttgtgcagacactcagggatggagctgctgctgaagggacttgtagggagaggctcgtcaacaagcactgttctggaaccttctctccacgtggcccacaggcctgaccacaggggctgtgggtcctgcgtccccttcctcgggtgagcctggcctgtcccgttcagccgttgggcccaggcttcctcccctccaaggtgaaacactgcagtcccggtgtggtggctccccatgcaggacgggccaggctgggagtgccgccttcctgtgccaaattcagtggggactcagtgcccaggccctggccacgagctttggccttggtctacctgccaggccaggcaaagcgcctttacacaggcctcggaaaacaatggagtgagcacaagatgccctgtgcagctgcccgagggtctccgcccaccccggccggactttgatccccccgaagtcttcacaggcactgcatcgggttgtctggcgcccttttcctccagcctaaactgacatcatcctatggactgagccggccactctctggccgaagtggccgcaggctgtgcccccgagctgcccccaccccctcacagggtccctcagattataggtgcccaggctgaggtgaagaggcctgggggccctgccttccgggcgctcctggaccctggggcaaacctgtgacccttttctactggaatagaaatgagttttatcatctttgaaaaataattcactcttgaagtaataaacgtttaaaaaaatggg

SEQ ID NO: 6291 - DNA, 1437 bp, Homo sapiens
  II.49 (NM_001772)
gcttcctcagacatgccgctgctgctactgctgcccctgctgtgggcaggggccctggctatggatccaaatttctggctgcaagtgcaggagtcagtgacggtacaggagggtttgtgcgtcctcgtgccctgcactttcttccatcccataccctactacgacaagaactccccagttcatggttactggttccgggaaggagccattatatccggggactctccagtggccacaaacaagctagatcaagaagtacaggaggagactcagggcagattccgcctccttggggatcccagtaggaacaactgctccctgagcatcgtagacgccaggaggagggataatggttcatacttctttcggatggagagaggaagtaccaaatacagttacaaatctccccagctctctgtgcatgtgacagacttgacccacaggcccaaaatcctcatccctggcactctagaacccggccactccaaaaaccttacctgctctgtgtcctgggcctgtgagcagggaacacccccgatcttctcctggttgtcagctgcccccacctccctgggccccaggactactcactcctcggtgctcataatcaccccacggccccaggaccacggcaccaacctgacctgtcaggtgaagttcgctggagctggtgtgactacggagagaaccatccagctcaacgtcacctatgttccacagaacccaacaactggtatctttccaggagatggctcagggaaacaagagaccagagcaggactggttcatggggccattggaggagctggtgttacagccctgctcgctctttgtctctgcctcatcttcttcatagtgaagacccacaggaggaaagcagccaggacagcagtgggcagcaatgacacccaccctaccacagggtcagcctccccgaaacaccagaagaactccaagttacatggccccactgaaacctcaagctgttcaggtgccgcccctactgtggagatggatgaggagctgcattatgcttccctcaactttcatgggatgaatccttccaaggacacctccaccgaatactcagaggtcaggacccagtgaggaaccctcaagagcatcaggctcagctagaagatccacatcctctacaggtcggggaccaaaggctgattcttggagatttaactccccacaggcaatgggtttatagacattatgtgagtttcctgctatattaacatcatcttgagactttgcaagcagagagtcgtggaatcaaatctgtgctctttcatttgctaagtgtatgatgtcacacaagctccttaaccttccatgtctccattttcttctctgtgaagtaggtataagaagtcctatctcatagggatgctgtgagcattaaataaaggtacacatggaaaacaccag

SEQ ID NO: 6292 - DNA, 3404 bp, Homo sapiens
  II.50 (NM_057158)
gcagttcagacccccccacacccatcaaagagccgctcctcccccccgcaggcgccttcgccgcctccctcccttcctttcctttccgctcctcttccgacctgtccacccgggaggaagggagctggaaagggggcggaaacctctcccctccaaaaagcacaacaaaactgttcagtgcggaggagccgggttcgcccctgccggacagcggggggctttgttccccgcagttgtttcctgcccatttgacctgtcagctgctggggaaacgctgctgttgacctttggttgaactgctaaggcgattttgctgatttttctttctttttccgcgagggctgtcttttgctcctccaaatgagcccagtccccctcccttctccccaaagcgctccaagagaaagtgccaggaaggggcttgtcccggaaggcctggcggctgagcggggccaggtcctggttaggccaccagggtgggcgtccgcgccattgtttgagcttgtcggcgctggtgggagagatgagggcaattcctctgggacgcaagtcccctcgaatggccggggctggccgggatgttccccgcacggcgctgccctcgagtccccccgatggagagcgcgggcgcgccttccttcgctggcgtccaaacccgggaccagctagaacacagcagggctgggactgggttccagccccacgtggagtctggatttgttttgttgtgttttgctttccttcctggaagaaatcccgaggggaccgccctagagcggcagctccaggacctcggcccttgggcttccgggggtgcagccacttaggccccgctcccggggagagagggattattttttaagatttatccccagggcgcgcggcatttccctgtccctcgtgaatcccgttgagagtcctccctccccaacctcctccatttccccagccagaccgattcgagagccctggagattctgggcgaggctagtgactgggtagtacaggcctctagccccaccattgctctctctgtcttcagttccccaggagggcaatggcatcaaacagcacagctctgggggatgtcaatattgcataccttttctacctaaagggaaaatgactcgcttttctgcttgcaaatatggtagtttctgcttacaaatgtaatacaatgcccatgacagccaaggactggaagcataagttgctaggtcttacaggtgattttttacaatgaagcaaactcactatgttagacaccatttacattggatgtctccaactaacaaaagtaactaaagacagatgtaggtgtaaattgagagtgaaatttgaccctttagaccgtcacaacttccttgggcttatcctgggtgcttataggagaggtgggctccacccacaaaaatggactgctcagaaaaatgagggagagagaaagggtggccactttcccgagccaagaaattccttgaaaaaaaatcagaacatctgaaaccagagagccgatttccttaccgggaggcagttcctggctaacgaagaggaagcacgatgggaagaaaagttcactccaacggaagccagtttgctgaacatagcagatcgcccaggaggactgggagagactgcaaaccagttcgagcccccagcatggcgttaggtgtcagccagctggcaggaaggtccaggtgtctgtgttcagagtctcaaggcggctatgagaggttttcctccgagtacccagaattctgttctaaaaccaaggccctggcagccatcccacccccggttccccccagtgccacagagcccttggacctgggctgcagctcctgtgggaccccactacacgaccaggggggtcctgtggagatccttcccttcctctacctcggcagtgcctaccatgctgcccggagagacatgctggacgccctgggcatcacggctctgttgaatgtctcctcggactgcccaaaccactttgaaggacactatcagtacaagtgcatcccagtggaagataaccacaaggccgacatcagctcctggttcatggaagccatagagtacatcgatgccgtgaaggactgccgtgggcgcgtgctggtgcactgccaggcgggcatctcgcggtcggccaccatctgcctggcctacctgatgatgaagaaacgggtgaggctggaggaggccttcgagttcgttaagcagcgccgcagcatcatctcgcccaacttcagcttcatggggcagctgctgcagttcgagtcccaggtgctggccacgtcctgtgctgcggaggctgctagcccctcgggacccctgcgggagcggggcaagacccccgccacccccacctcgcagttcgtcttcagctttccggtctccgtgggcgtgcactcggcccccagcagcctgccctacctgcacagccccatcaccacctctcccagctgttagagccgccctgggggccccagaaccagagctggctcccagcaagggtaggacgggccgcatgcgggcagaaagttgggactgagcagctgggagcaggcgaccgagctccttccccatcatttctccttggccaacgacgaggccagccagaatggcaataaggactccgaatacataataaaagcaaacagaacactccaacttagagcaataacggctgccgcagcagccagggaagaccttggtttggtttatgtgtcagtttcacttttccgatagaaatttcttacctcatttttttaagcagtaaggcttgaagtgatgaaacccacagatcctagcaaatgtgcccaaccagctttactaaagggggaggaagggagggcaaagggatgagaagacaagtttcccagaagtgcctggttctgtgtacttgtccctttgttgtcgttgttgtagttaaaggaatttcattttttaaaagaaatcttcgaaggtgtggttttcatttctcagtcaccaacagatgaataattatgcttaataataaagtatttattaagactttcttcagagtatgaaagtacaaaaagtctagttacagtggatttagaatatatttatgttgatgtcaaacagctgagcaccgtagcatgcagatgtcaaggcagttaggaagtaaatggtgtcttgtagatatgtgcaaggtagcatgatgagcaacttgagtttgttgccactgagaagcaggcgggttgggtgggaggaggaagaaagggaagaattaggtttgaattgctttttaaaaaaaaaagaaaagaaaaagacagcatctcactatgttgccaaggctcatcttgagaagcaggcgggttgggtgggaggaggaagaaagggaagaattaggtttgaattgcttttttaaaaaaaaa

SEQ ID NO: 6293 - DNA, 2202 bp, Homo sapiens
  II.51 (XM_058179)
aggatgccagggatcagctgaccatgtggttagcatctcgggagtgcctcttcagttacaaccaaacagcatacagacgaaggttgacagcattgcatggaagaagttgctgccctcacaaaatggatttcatcacatattgaagtgggagaatggctctttgccttccaatacttccaatgatagattcagttttatagtcaagaacttgagtcttctcatcaaggcagctcagcagcaggacagtggcctctactgcctggaggtcaccagtatatctggaaaagttcagacagccacgttccaggtttttgtatttgataaagttgagaaaccccgcctacaggggcaggggaagatcctggacagagggagatgccaagtggctctgtcttgcttggtctccagggatggcaatgtgtcctatgcttggtacagagggagcaagctgatccagacagcagggaacctcacctacctggacgaggaggttgacattaatggcactcacacatatacctgcaatgtcagcaatcctgttagctgggaaagccacaccctgaatctcactcaggactgtcagaatgcccatcaggaattcagattttggccgtttttggtgatcatcgtgattctaagcgcactgttccttggcacccttgcctgcttctgtgtgtggaggagaaagaggaaggagaagcagtcagagaccagtcccaaggaatttttgacaatttacgaagatgtcaaggatctgaaaaccaggagaaatcacgagcaggagcagacttttcctggaggggggagcaccatctactctatgatccagtcccagtcttctgctcccacgtcacaagaacctgcatatacattatattcattaattcagccttccaggaagtctggatccaggaagaggaaccacagcccttccttcaatagcactatctatgaagtgattggaaagagtcaacctaaagcccagaaccctgctcgattgagccgcaaagagctggagaactttgatgtttattcctagttgctgcagcaattctcacctttcttgcacatcagcatctgctttgggaattggcacagtggatgacggcacaggagtctctatagaacacttcctagtctggagaggatatggaaatttgttcttgttctatattttgttttgaaaatgatgtctaacaaccatgataagagcaaggctgttaaataatatcttccaatttacagatcagacatgaatgggtggaggggttaggttgttcacaaaaggccacattccaagtatttgtaatctagaaagtgttatgtaagtgatgttattagcatcgagattccctccacctgattttcaagctgtcacttgtttccttttctcccctctctgggttgactgcatttctagactctcgccggcccaggcccatcttccaaagcaagaggaaggaatgataatggtgactcaggggaagaagaaacagccctcctctgaaagcctggactgtccggctgtgaactggctggcaggttctgcacgtgggtgggggccagggcctgggctttactcaattgcagagaaaaaactttctccctgcatctcatacctttacctctggccagttggccaccagggggagtgggctgaagggagagtagatggtgcaaagcaagcccatctctgagtagaaaaatcacccagagcacatgctgacctgataactggggtgttgagaccagctttgtccatggtatgatgtttgatttatgaagacgcattgttagaaatccatttggcttcttcatagaagtggcttcccagaggaagaggcctctcagaaaccatgttctatttaagttctgagtcctgatgagtgttccccaggatgcacattgaagggagggctcaggcagctgagggctgagaatgaggcagttggaatctagacactatgctgggttccctgagtcgtcaggccagacatttcaacaaggctgtggggagcagggctgtgactctggctgagcccaggaaagcgacaagggtgaactgggagaggacttactcagagaccccaacaggtgatactgcacaaagcctggttcttcaattttcctaccctgtatctaacataggagtttcatataaaacggtgatatcatgcagatgcagtctgaattccttgcctg

SEQ ID NO: 6294 - DNA, 1932 bp, Homo sapiens
  II.52 (NM_001770)
gcatcccctgcgcgaagctgggtgccccggagagtctgaccaccatgccacctcctcgcctcctcttcttcctcctcttcctcacccccatggaagtcaggcccgaggaacctctagtggtgaaggtggaagagggagataacgctgtgctgcagtgcctcaaggggacctcagatggccccactcagcagctgacctggtctcgggagtccccgcttaaacccttcttaaaactcagcctggggctgccaggcctgggaatccacatgaggcccctggccatctggcttttcatcttcaacgtctctcaacagatggggggcttctacctgtgccagccggggcccccctctgagaaggcctggcagcctggctggacagtcaatgtggagggcagcggggagctgttccggtggaatgtttcggacctaggtggcctgggctgtggcctgaagaacaggtcctcagagggccccagctccccttccgggaagctcatgagccccaagctgtatgtgtgggccaaagaccgccctgagatctgggagggagagcctccgtgtgtcccaccgagggacagcctgaaccagagcctcagccaggacctcaccatggcccctggctccacactctggctgtcctgtggggtaccccctgactctgtgtccaggggccccctctcctggacccatgtgcaccccaaggggcctaagtcattgctgagcctagagctgaaggacgatcgcccggccagagatatgtgggtaatggagacgggtctgttgttgccccgggccacagctcaagacgctggaaagtattattgtcaccgtggcaacctgaccatgtcattccacctggagatcactgctcggccagtactatggcactggctgctgaggactggtggctggaaggtctcagctgtgactttggcttatctgatcttctgcctgtgttcccttgtgggcattcttcatcttcaaagagccctggtcctgaggaggaaaagaaagcgaatgactgaccccaccaggagattcttcaaagtgacgcctcccccaggaagcgggccccagaaccagtacgggaacgtgctgtctctccccacacccacctcaggcctcggacgcgcccagcgttgggccgcaggcctggggggcactgccccgtcttatggaaacccgagcagcgacgtccaggcggatggagccttggggtcccggagcccgccgggagtgggcccagaagaagaggaaggggagggctatgaggaacctgacagtgaggaggactccgagttctatgagaacgactccaaccttgggcaggaccagctctcccaggatggcagcggctacgagaaccctgaggatgagcccctgggtcctgaggatgaagactccttctccaacgctgagtcttatgagaacgaggatgaagagctgacccagccggtcgccaggacaatggacttcctgagccctcatgggtcagcctgggaccccagccgggaagcaacctccctggggtcccagtcctatgaggatatgagaggaatcctgtatgcagccccccagctccgctccattcggggccagcctggacccaatcatgaggaagatgcagactcttatgagaacatggataatcccgatgggccagacccagcctggggaggagggggccgcatgggcacctggagcaccaggtgatcctcaggtggccagcctggatctcctcaagtccccaagattcacacctgactctgaaatctgaagacctcgagcagatgatgccaacctctggagcaatgttgcttaggatgtgtgcatgtgtgtaagtgtgtgtgtgtgtgtgtgtgtgtatacatgccagtgacacttccagtcccctttgtattccttaaataaactcaatgagctcttccaa

SEQ ID NO: 6295 - DNA, 1410 bp, Homo sapiens
  II.53 (NM_004931)
gcgactgtctccgccgagcccccggggccaggtgtcccgggcgcgccacgatgcggccgcggctgtggctcctcctggccgcgcagctgacagttctccatggcaactcagtcctccagcagacccctgcatacataaaggtgcaaaccaacaagatggtgatgctgtcctgcgaggctaaaatctccctcagtaacatgcgcatctactggctgagacagcgccaggcaccgagcagtgacagtcaccacgagttcctggccctctgggattccgcaaaagggactatccacggtgaagaggtggaacaggagaagatagctgtgtttcgggatgcaagccggttcattctcaatctcacaagcgtgaagccggaagacagtggcatctacttctgcatgatcgtcgggagccccgagctgaccttcgggaagggaactcagctgagtgtggttgatttccttcccaccactgcccagcccaccaagaagtccaccctcaagaagagagtgtgccggttacccaggccagagacccagaagggcccactttgtagccccatcacccttggcctgctggtggctggcgtcctggttctgctggtttccctgggagtggccatccacctgtgctgccggcggaggagagcccggcttcgtttcatgaaacaattttacaaatgagcagagaatacggttttggtgtcctgctacaaaaagacatcggtcagtaacgagcacgatgtggaaaaatgagagaagggacacattcaaccctggagagttcaatggctgctgaagctgcctgcttttcactgctgcaaggcctttctgtgtgtgatgtgcatgggagcaacttgttcgtgggtcatcgggaatactagggagaaggtttcattgcccccagggcacttcacagagtgtgctggaggactgagtaagaaatgctgcccatgccaccgcttccggctcctgtgctttccctgaactgggacctttagtggtggccatttagccaccatctttgcaggttgctttgccctggtagggcagtaacattgggtcctgggtctttcatggggtgatgctgggctggctccctcttggtcttcccaggctggggctgaccttcctcgcagagaggccaggtgcaggttgggaatgaggcttgctgagaggggctgtccagttcccagaaggcatatcagtctctgagggcttcctttggggccgggaacttgcgggtttgaggataggagttcacttcatcttctcagctcccatttctactcttaagtttctcagctcccatttctactctcccatggcttaatgcttctttcattttctgtttgttttatacaaatgtcttagttgtacaaataaagtcccaggttaaagataaaaaaaa

SEQ ID NO: 6296 - DNA, 823 bp, Homo sapiens
  II.54 (XM_006454)
gggctgctccacgcttttgccggaggacagagactgacatggaacaggggaagggcctggctgtcctcatcctggctatcattcttcttcaaggtactttggcccagtcaatcaaaggaaaccacttggttaaggtgtatgactatcaagaagatggttcggtacttctgacttgtgatgcagaagccaaaaatatcacatggtttaaagatgggaagatgatcggcttcctaactgaagataaaaaaaaatggaatctgggaagtaatgccaaggaccctcgagggatgtatcagtgtaaaggatcacagaacaagtcaaaaccactccaagtgtattacagaatgtgtcagaactgcattgaactaaatgcagccaccatatctggctttctctttgctgaaatcgtcagcattttcgtccttgctgttggggtctacttcattgctggacaggatggagttcgccagtcgagagcttcagacaagcagactctgttgcccaatgaccagctctaccagcccctcaaggatcgagaagatgaccagtacagccaccttcaaggaaaccagttgaggaggaattgaactcaggactcagagtagtccaggtgttctcctcctattcagttcccagaatcaaagcaatgcattttggaaagctcctagcagagagactttcagccctaaatctagactcaaggttcccagagatgacaaatggagaagaaaggccatcagagcaaatttgggggtttctcaaataaaataaaaataaaaacaaatactgtgtttcagaagcgccacctattggggaaaattgt

SEQ ID NO: 6297 - DNA, 1581 bp, Homo sapiens
  II.55 (XM_041847)
ccctgacaagctgccaggcaggttctcttcctctcacatactgacccacggctccaccctctctcccctggaaaggacaccatgagcactgaaagcatgatccgggacgtggagctggccgaggaggcgctccccaagaagacaggggggccccagggctccaggcggtgcttgttcctcagcctcttctccttcctgatcgtggcaggcgccaccacgctcttctgcctgctgcactttggagtgatcggcccccagagggaagagttccccagggacctctctctaatcagccctctggcccaggcagtcagatcatcttctcgaaccccgagtgacaagcctgtagcccatgttgtagcaaaccctcaagctgaggggcagctccagtggctgaaccgccgggccaatgccctcctggccaatggcgtggagctgagagataaccagctggtggtgccatcagagggcctgtacctcatctactcccaggtcctcttcaagggccaaggctgcccctccacccatgtgctcctcacccacaccatcagccgcatcgccgtctcctaccagaccaaggtcaacctcctctctgccatcaagagcccctgccagagggagaccccagagggggctgaggccaagccctggtatgagcccatctatctgggaggggtcttccagctggagaagggtgaccgactcagcgctgagatcaatcggcccgactatctcgactttgccgagtctgggcaggtctactttgggatcattgccctgtgaggaggacgaacatccaaccttcccaaacgcctcccctgccccaatccctttattaccccctccttcagacaccctcaacctcttctggctcaaaaagagaattgggggcttagggtcggaacccaagcttagaactttaagcaacaagaccaccacttcgaaacctgggattcaggaatgtgtggcctgcacagtgaagtgctggcaaccactaagaattcaaactggggcctccagaactcactggggcctacagctttgatccctgacatctggaatctggagaccagggagcctttggttctggccagaatgctgcaggacttgagaagacctcacctagaaattgacacaagtggaccttaggccttcctctctccagatgtttccagacttccttgagacacggagcccagccctccccatggagccagctccctctatttatgtttgcacttgtgattatttattatttatttattatttatttatttacagatgaatgtatttatttgggagaccggggtatcctgggggacccaatgtaggagctgccttggctcagacatgttttccgtgaaaacggagctgaacaataggctgttcccatgtagccccctggcctctgtgccttcttttgattatgttttttaaaatatttatctgattaagttgtctaaacaatgctgatttggtgaccaactgtcactcattgctgagcctctgctccccaggggagttgtgtctgtaatcgccctactattcagtggcgagaaataaagtttgcttagaaaagaa

SEQ ID NO: 6298 - DNA, 3121 bp, Homo sapiens
  II.56 (NM_145319)
gcggccgcccccgcagctgcgcagcctgcccttcgggacgctggagctaggcgacaccgcggctctggatgccttctacaacgcggatgtggtggtgctggaggtgagcagctcgctggtacagccctccctgttctaccaccttggtgtgcgtgagagcttcagcatgaccaacaatgtgctcctctgctcccaggccgacctccctgacctgcaggccctgcgggaggatgttttccagaagaactcggattgcgttggcagctacacactgatcccctatgtggtgacggccactggtcgggtgctgtgtggtgatgcaggccttctgcggggcctggctgatgggctggtacaggctggagtggggaccgaggccctgctcactcccctggtgggccggcttgcccgcctgctggaggccacacccacagactcttgtggctatttccgggagaccattcggcgggacatccggcaggcgcgggagcggttcagtgggccacagctgcggcaggagctggctcgcctgcagcggagactggacagcgtggagctgctgagccccgacatcatcatgaacttgctgctctcctaccgcgatgtgcaggactactcggccatcattgagctggtggagacgctgcaggccttgcccacctgtgatgtggccgagcagcataatgtctgcttccactacacttttgccctcaaccggaggaacaggcctggggaccgggcgaaggccctgtctgtgctgctgccgctggtacagcttgagggctctgtggcgcccgatctgtactgcatgtgtggccgtatctacaaggacatgttcttcagctcgggtttccaggatgctgggcaccgggagcaggcctatcactggtatcgcaaggcttttgacgtagagcccagccttcactcaggcatcaatgcagctgtgctcctcattgctgccgggcagcactttgaggattccaaagagctccggctaataggcatgaagctgggctgcctgctggcccgcaaaggctgcgtggagaagatgcagtattactgggatgtgggtttctacctgggagcccagatcctcgccaatgaccccacccaggtggtgctggctgcagagcagctgtataagctcaatgcccccatatggtacctggtgtccgtgatggagaccttcctgctctaccagcacttcaggcccacgccagagccccctggagggccaccacgccgtgcccacttctggctccacttcttgctacagtcctgccaaccattcaagacagcctgtgcccagggcgaccagtgcttggtgctggtcctggagatgaacaaggtgctgctgcctgcaaagctcgaggttcggggtactgacccagtaagcacagtgaccctgagcctgctggagcctgagacccaggacattccctccagctggaccttcccagtcgcctccatatgcggagtcagcgcctcaaagcgcgacgagcgctgctgcttcctctatgcactccccccggctcaggacgtccagctgtgcttccccagcgtagggcactgccagtggttctgcggcctgatccaggcctgggtgacgaacccggattccacggcgcccgcggaggaggcggagggcgcgggggagatgttggagtttgattatgagtacacggagacgggcgagcggctggtgctgggcaagggcacgtatggggtggtgtacgcgggccgcgatcgccacacgagggtgcgcatcgccatcaaggagatcccggagcgggacagcaggttctctcagcccctgcatgaagagatcgctcttcacagacgcctgcgccacaagaacatagtgcgctatctgggctcagctagccagggcggctaccttaagatcttcatggaggaagtgcctggaggcagcctgtcctccttgctgcggtcggtgtggggacccctgaaggacaacgagagcaccatcagtttctacacccgccagatcctgcagggacttggctacttgcacgacaaccacatcgtgcacagggacataaaaggggacaatgtgctgatcaacaccttcagtgggctgctcaagatttctgacttcggcacctccaagcggctggcaggcatcacaccttgcactgagaccttcacaggaactctgcagtatatggccccagaaatcattgaccagggcccacgcgggtatgggaaagcagctgacatctggtcactgggctgcactgtcattgagatggccacaggtcgcccccccttccacgagctcgggagcccacaggctgccatgtttcaggtgggtatgtacaaggtccatccgccaatgcccagctctctgtcggccgaggcccaagcctttctcctccgaacttttgagccagacccccgcctccgagccagcgcccagacactgctgggggaccccttcctgcagcctgggaaaaggagccgcagccccagctccccacgacatgctccacggccctcagatgccccttctgccagtcccactccttcagccaactcaaccacccagtctcagacattcccgtgccctcaggcaccctctcagcacccacccagccccccgaagcgctgcctcagttatgggggcaccagccagctccgggtgcccgaggagcctgcggccgaggagcctgcgtctccggaggagagttcggggctgagcctgctgcaccaggagagcaagcgtcgggccatgctggccgcagtattggagcaggagctgccagcgctggcggagaatctgcaccaggagcagaagcaagagcagggggcccgtctgggcagaaaccatgtggaagagctgctgcgctgcctcggggcacacatccacactcccaaccgccggcagctcgcccaggagctgcgggcgctgcaaggatggatgaatggagaggacaaaggcagcttctgacacaccagccccaggacctggggcgactggaggaagccaggcgagtggggcccaggactggttccagtgagagaaaccaaccacaggcacccaagcactaccagacaaagcgtattaaacagaacacttttgaaaaaaaaaaaaaaaaaa

SEQ ID NO: 6299 - DNA, 3334 bp, Homo sapiens
  II.57 (XM_045985)
attcctgcctgggaggttgtggaagaaggaagatggccagagctttgtgtccactgcaagccctctggcttctggagtgggtgctgctgctcttgggaccttgtgctgcccctccagcctgggccttgaacctggacccagtgcagctcaccttctatgcaggccccaatggcagccagtttggattttcactggacttccacaaggacagccatgggagagtggccatcgtggtgggcgccccgcggaccctgggccccagccaggaggagacgggcggcgtgttcctgtgcccctggagggccgagggcggccagtgcccctcgctgctctttgacctccgtgatgagacccgaaatgtaggctcccaaactttacaaaccttcaaggcccgccaaggactgggggcgtcggtcgtcagctggagcgacgtcattgtggcctgcgccccctggcagcactggaacgtcctagaaaagactgaggaggctgagaagacgcccgtaggtagctgctttttggctcagccagagagcggccgccgcgccgagtactccccctgtcgcgggaacaccctgagccgcatttacgtggaaaatgattttagctgggacaagcgttactgtgaagcgggcttcagctccgtggtcactcaggccggagagctggtgcttggggctcctggcggctattatttcttaggtctcctggcccaggctccagttgcggatattttctcgagttaccgcccaggcatccttttgtggcacgtgtcctcccagagcctctcctttgactccagcaacccagagtacttcgacggctactgggggtactcggtggccgtgggcgagttcgacggggatctcaacactacagaatatgtcgtcggtgcccccacttggagctggaccctgggagcggtggaaattttggattcctactaccagaggctgcatcggctgcgcggagagcagatggcgtcgtattttgggcattcagtggctgtcactgacgtcaacggggatgggaggcatgatctgctggtgggcgctccactgtatatggagagccgggcagaccgaaaactggccgaagtggggcgtgtgtatttgttcctgcagccgcgaggcccccacgcgctgggtgcccccagcctcctgctgactggcacacagctctatgggcgattcggctctgccatcgcacccctgggcgacctcgaccgggatggctacaatgacattgcagtggctgccccctacgggggtcccagtggccggggccaagtgctggtgttcctgggtcagagtgaggggctgaggtcacgtccctcccaggtcctggacagccccttccccacaggctctgcctttggcttctcccttcgaggtgccgtagacatcgatgacaacggatacccagacctgatcgtgggagcttacggggccaaccaggtggctgtgtacagagctcagccagtggtgaaggcctctgtccagctactggtgcaagattcactgaatcctgctgtgaagagctgtgtcctacctcagaccaagacacccgtgagctgcttcaacatccagatgtgtgttggagccactgggcacaacattcctcagaagctatccctaaatgccgagctgcagctggaccggcagaagccccgccagggccggcgggtgctgctgctgggctctcaacaggcaggcaccaccctgaacctggatctgggcggaaagcacagccccatctgccacaccaccatggccttccttcgagatgaggcagacttccgggacaagctgagccccattgtgctcagcctcaatgtgtccctaccgcccacggaggctggaatggcccctgctgtcgtgctgcatggagacacccatgtgcaggagcagacacgaatcgtcctggactgtggggaagatgacgtatgtgtgccccagcttcagctcactgccagcgtgacgggctccccgctcctagttggggcagataatgtcctggagctgcagatggacgcagccaacgagggcgagggggcctatgaagcagagctggccgtgcacctgccccagggcgcccactacatgcgggccctaagcaatgtcgagggctttgagagactcatctgtaatcagaagaaggagaatgagaccagggtggtgctgtgtgagctgggcaaccccatgaagaagaacgcccagataggaatcgcgatgttggtgagcgtggggaatctggaagaggctggggagtctgtgtccttccagctgcagatacggagcaagaacagccagaatccaaacagcaagattgtgctgctggacgtgccggtccgggcagaggcccaagtggagctgcgagggaactcctttccagcctccctggtggtggcagcagaagaaggtgagagggagcagaacagcttggacagctggggacccaaagtggagcacacctatgagctccacaacaatggccctgggactgtgaatggtcttcacctcagcatccaccttccgggacagtcccagccctccgacctgctctacatcctggatatacagccccaggggggccttcagtgcttcccacagcctcctgtcaaccctctcaaggtggactgggggctgcccatccccagcccctcccccattcacccggcccatcacaagcgggatcgcagacagatcttcctgccagagcccgagcagccctcgaggcttcaggatccagttctcgtaagctgcgactcggcgccctgtactgtggtgcagtgtgacctgcaggagatggcgcgcgggcagcgggccatggtcacggtgctggccttcctgtggctgcccagcctctaccagaggcctctggatcagtttgtgctgcagtcgcacgcatggttcaacgtgtcctccctcccctatgcggtgcccccgctcagcctgccccgaggggaagctcaggtgtggacacagctgctccgggccttggaggagagggccattccaatctggtgggtgctggtgggtgtgctgggtggcctgctgctgctcaccatcctggtcctggccatgtggaaggtcggcttcttcaagcggaaccggccacccctggaagaagatgatgaagagggggagtgatggtgcagcctacactattctagcaggagggttgggcgtgctacctgcaccgccccttctccaacaagttgcctccaagctttgggttggagctgttccattgggtcctcttggtgtcgtttccctcccaacagagctgggctaccccccctcctgctgcctaataaagagactgagccctg

SEQ ID NO: 6300 - DNA, 866 bp, Homo sapiens
  II.58 (XM_055756)
gtaatgcatccaggaagcctggaggcctgtggtttccgcacccgctgccacccccgcccctagcgtggacatttatcctctagcgctcaggccctgccgccatcgccgcagatccagcgcccagagagacaccagagaacccaccatggccccctttgagcccctggcttctggcatcctgttgttgctgtggctgatagcccccagcagggcctgcacctgtgtcccaccccacccacagacggccttctgcaattccgacctcgtcatcagggccaagttcgtggggacaccagaagtcaaccagaccaccttataccagcgttatgagatcaagatgaccaagatgtataaagggttccaagccttaggggatgccgctgacatccggttcgtctacacccccgccatggagagtgtctgcggatacttccacaggtcccacaaccgcagcgaggagtttctcattgctggaaaactgcaggatggactcttgcacatcactacctgcagttttgtggctccctggaacagcctgagcttagctcagcgccggggcttcaccaagacctacactgttggctgtgaggaatgcacagtgtttccctgtttatccatcccctgcaaactgcagagtggcactcattgcttgtggacggaccagctcctccaaggctctgaaaagggcttccagtcccgtcaccttgcctgcctgcctcgggagccagggctgtgcacctggcagtccctgcggtcccagatagcctgaatcctgcccggagtggaagctgaagcctgcacagtgtccaccctgttcccactcccatctttcttccggacaatgaaataaagagttaccacccagc

SEQ ID NO: 6301 - DNA, 817 bp, Homo sapiens
  II.59 (NM_004740)
tgctgtctttctactttttaatttaaatacccaacctctccatcacagctgcatccctgagagtgggagggggctgtagtggtagctggggctcccaagaacgactcgggaatgtcatctccatcttcacccttcagagagcagtcctttctctgtgcagctggagacgctggtgaggagagccgggtccaggttcttaagaatgaggtgcggaggggctctccggtgctgctgggctgggttgagcaagcctacgcagacaagtgtgtgtgtggaccatccgcacctccagcccccaccccaccctctttgtctcagcgtgttatgtgcaatgacctatttaaggtaaacccattccaactacagcagttcagggctgatccaagcactgcctccctcctgctctgtccaggtggtctggaccataaactcaacttgagagggaaggcttggggttgaggacttgtgatcagaaaaactgaagatggaagttttggccggtgctcattagacatgagtcctcactctgtgtcctgagcccgtgtcattcttccaacctccctgcccccacacacttatcccagacacaacaccatgtggtctggaggtcccagcccccaccctaaaaaggttatccctgagaactccaccagacttgggagcccaagtgcagtgcctggtgctgctcccatctgccgccccccttctctcctgcaattggtttgtactcactgggctgtgctctcccctgtttacccgatgtatggaaataaaggcccttttcctcctgaaaaaaaaaaaaaaaaaaaaaaaaaaa

SEQ ID NO: 6302 - DNA, 4490 bp, Homo sapiens
  II.60 (XM_008432)
aggtgaacaggtcctcacgcccagctccgcgccctcacgcgctctcgccgggaccccgcttccgctggcagccatgggccccggccccagccgcgcgccccgcgccccacgcctgatgctctgtgcgctcgccttgatggtggcggccggcggctgcgtcgtctccgccttcaacctggatacccgattcctggtagtgaaggaggccgggaacccgggcagcctcttcggctactcggtcgccctccatcggcagacagagcggcagcagcgctacctgctcctggctggtgccccccgggagctcgctgtgcccgatggctacaccaaccggactggtgctgtgtacctgtgcccactcactgcccacaaggatgactgtgagcggatgaacatcacagtgaaaaatgaccctggccatcacattattgaggacatgtggcttggagtgactgtggccagccagggccctgcaggcagagttctggtctgtgcccaccgctacacccaggtgctgtggtcagggtcagaagaccagcggcgcatggtgggcaagtgctacgtgcgaggcaatgacctagagctggactccagtgatgactggcagacctaccacaacgagatgtgcaatagcaacacagactacctggagacgggcatgtgccagctgggcaccagcggtggcttcacccagaacactgtgtacttcggcgcccccggtgcctacaactggaaaggaaacagctacatgattcagcgcaaggagtgggacttatctgagtatagttacaaggacccagaggaccaaggaaacctctatattgggtacacgatgcaggtaggcagcttcatcctgcaccccaaaaacatcaccattgtgacaggtgccccacggcaccgacatatgggcgcggtgttcttgctgagccaggaggcaggcggagacctgcggaggaggcaggtgctggagggctcgcaggtgggcgcctattttggcagcgccattgccctggcagacctgaacaatgatgggtggcaggacctcctggtgggcgccccctactacttcgagaggaaagaggaagtagggggtgccatctatgtcttcatgaaccaggcgggaacctccttccctgctcacccctcactccttcttcatggccccagtggctctgcctttggtttatctgtggccagcattggtgacatcaaccaggatggatttcaggatattgctgtgggagctccgtttgaaggcttgggcaaagtgtacatctatcacagtagctctaaggggctccttagacagccccagcaggtaatccatggagagaagctgggactgcctgggttggccaccttcggctattccctcagtgggcagatggatgtggatgagaacttctacccagaccttctagtgggaagcctgtcagaccacattgtgctgctgcagggcccggcccgtcatcaacatcgtccacaagaccttggtgcccaggccagctgtgctggaccctgcactttgcacggccacctcttgtgtgcaagtggagctgtgctttgcttacaaccagagtgccgggaaccccaactacaggcgaaacatcaccctggcctacactctggaggctgacagggaccgccggccgccccggctccgctttgccggcagtgagtccgctgtcttccacggcttcttctccatgcccgagatgcgctgccagaagctggagctgctcctgatggacaacctccgtgacaaactccgccccatcatcatctccatgaactactctttacctttgcggatgcccgatcgcccccggctggggctgcggtccctggacgcctacccgatcctcaaccaggcacaggctctggagaaccacactgaggtccagttccagaaggagtgcgggcctgacaacaagtgtgagagcaacttgcagatgcgggcagccttcgtgtcagagcagcagcagaagctgagcaggctccagtacagcagagacgtccggaaattgctcctgagcatcaacgtgacgaacacccggacctcggagcgctccggggaggacgcccacgaggcgctgctcaccctggtggtgcctcccgccctgctgctgtcctcagtgcgcccccccggggcctgccaagctaatgagaccatcttttgcgagctggggaaccccttcaaacggaaccagaggatggagctgctcatcgcctttgaggtcatcggggtgaccctgcacacaagggaccttcaggtgcagctgcagctctccacgtcgagtcaccaggacaacctgtggcccatgatcctcactctgctggtggactatacactccagacctcgcttagcatggtaaatcaccggctacaaagcttctttggggggacagtgatgggtgagtctggcatgaaaactgtggaggatgtaggaagccccctcaagtatgaattccaggtgggcccaatgggggaggggctggtgggcctggggaccctggtcctaggtctggagtggccctacgaagtcagcaatggcaagtggctgctgtatcccacggagatcaccgtccatggcaatgggtcctggccctgccgaccacctggagaccttatcaaccctctcaacctcactctttctgaccctggggacaggccatcatccccacagcgcaggcggcgacagctggatccagggggaggccagggccccccacctgtcactctggctgctgccaaaaaagccaagtctgagactgtgctgacctgtgccacagggcgtgcccactgtgtgtggctagagtgccccatccctgatgcccccgttgtcaccaacgtgactgtgaaggcacgagtgtggaacagcaccttcatcgaggattacagagactttgaccgagtccgggtaaatggctgggctaccctattcctccgaaccagcatccccaccatcaacatggagaacaagaccacgtggttctctgtggacattgactcggagctggtggaggagctgccggccgaaatcgagctgtggctggtgctggtggccgtgggtgcagggctgctgctgctggggctgatcatcctcctgctgtggaagtgtgacttctttaagcggacccgctattatcagatcatgcccaagtaccacgcagtgcggatccgggaggaggagcgctacccacctccagggagcaccctgcccaccaagaagcactgggtgaccagctggcagactcgggaccaatactactgacgtcctccctgatcccaccccctcctcccccagtgtcccctttcttcctatttatcataagttatgcctctgacagtccacaggggccaccacctttggctggtagcagcaggctcaggcacatacacctcgtcaagagcatgcacatgctgtctggccctggggatcttcccacaggagggccagcgctgtggaccttacaacgccgagtgcactgcattcctgtgccctagatgcacgtggggcccactgctcgtggactgtgctggtgcatcacggatggtgcatgggctcgccgtgtctcagcctctgccagcgccaaaacaagccaaagagcctcccaccagagccgggaggaaaaggcccctgcaatgtggtgacacctccccctttcacactggatccatcttgagccacagtcactggattgactttgctgtcaaaactactgacagggagcagcccccgggccgctggctggtgggcccccaatgacacccatgccagagaggtggggatcctgcctaaggttgtctacgggggcacttggaggacctggcgtgctcagacccaacagcaaaggaactagaaagaaggacccagaacggcttgctttcctgcatctctgtgaagcctctctccttggccacagactgaactcgcagggaatgcagcaggaaggaacaaagacaggcaaacggcaacgtagcctgggctcactgtgctggggcacggcgggatcctccacagagaggaggggaccaattctggacagacagatgttgggaggatacagaggagatgccacttctcactcaccactaccagccagcctcagaaggccccagagagaccctgcaagaccacggagggagcgacacttgaatgtagaataggcagggggccctgccccaccccatccagccagaccccacgctgaccatgcgtcaggggcctagaggtggagttcttagctatccttggctttcagagccagcctggctctgccccctcccccatgggctgtgtcctaaggcccatttgagaagctgaggctagttccagaaaacctctcctgacccctgcctgttggcaggcccactccccagccccagccccttccatggtactgtagcaggggaattccctccccctccttgtgccttctttgtatataggcttctcacggcgaccaataaacagctcccagtttgt

SEQ ID NO: 6303 - DNA, 5580 bp, Homo sapiens
  II.61 (XM_034770)
agctcctgtgacagacggagctggagcggcggggcggcggcggagtccggcggccgggagagcgagtgagcgagcggaggagcagcgacacgggagtctagggagcgagaaggagaaggaggggagcgctcgggcgcgagcgagagaaaccgcgagcgccgagcttggactcgagccccggaacggctgaggagcccgcccgctcccctcccctccccctccccgggcccgggcccagcgcgccatcctcccccctccttccctccctccctccttcctccctcccctctccctccccctcccccgccggtggatgggagtgaaggacggaagaggccctgcggaggcggcggtgcagcgctccggtggaatgaatcttacttgttgaatatcttctggttactagttggattcatttgtgaaagaatcattttcccctgtgtggaagacacttagtggcatatttaaattataagtccacggatcaaaaagctttttgatttcccaaaggagggacataccactatatcagataagcttgacattacagccaagatggtgctgtcccagagacaacgagatgaactaaatcgagctatagcagattatcttcgttcaaatggctatgaagaggcatattcagtttttaaaaaggaagctgaattagatgtgaatgaagaattagataaaaagtatgctggtcttttggaaaaaaaatggacatctgttattagattacaaaagaaggttatggaattagaatcaaagctaaatgaagcaaaagaagaatttacgtcaggtggacctcttggtcagaaacgagacccaaaagaatggattccccgtccgccagaaaaatatgcattgagtggtcacaggagtccagtcactcgagtcattttccatcctgtgttcagtgttatggtctctgcttcagaggatgctacaattaaggtgtgggattatgagactggagattttgaacgaactcttaaaggacatacagactctgtacaggacatttcattcgaccacagcggcaagcttctggcttcctgttctgcagatatgaccattaaactatgggattttcagggctttgaatgcatcagaaccatgcacggccatgaccacaatgtttcttcagtagccatcatgcccaatggagatcatatagtgtctgcctcaagggataaaactataaaaatgtgggaagtgcaaactggctactgtgtgaagacattcacaggacacagagaatgggtacgtatggtacggccaaatcaagatggcactctgatagccagctgttccaatgaccagactgtgcgtgtatgggtcgtagcaacaaaggaatgcaaggctgagctccgagagcatgagcatgtggtagaatgcatttcctgggctccagaaagctcatattcctccatctctgaagcaacaggatctgagactaaaaaaagtggtaaacctgggccattcttgctgtctggatccagagacaagactattaagatgtgggatgtcagtactggcatgtgccttatgaccctcgtgggtcatgataactgggtacgtggagttctgttccattctggggggaagtttattttgagttgtgctgatgacaagaccctacgcgtatgggattacaagaacaagcgatgcatgaagaccctcaatgcgcatgaacactttgttacctccttggatttccacaagacggcaccctatgtcgtcactggcagcgtagatcaaacagtaaaagtgtgggagtgccgttgattgtgtctccttcggcccctcctccctcttttcctctggatgcactctgatgataccatggttaccccattgagctctgtttaaataaatattgtcctttcatgtaaattattctggatgtagattgagcttattaaatgttacacacaaagtattcatgcatggtgaatccaaattgtatactgtaaatttacatacgttgtctagaagtaccatagggtttaaaaacctgggctggcattggtcacaccaggcctaagaaggcagaagttgaatcaattgaactagggcactaaactgaatagttgacagtgtcattttatgttggattattaattcctgtttttctttctgctatctgttggtgcctgacttgatggcctcatttggggaaaagtggtggttattagggctttttctgaaatgtgtatctatgtaacatcacttaagtgtgcttaataaatcttctgtaaggattttagatgataaggctacaattcagaatcttctgaaccatctatgtaatgaatggggattatacattggaatttttgtcatgacacatttgccaaatcagtaggatatatttgttttggcagcctatcacgcagaggctagtggtatatttatgtaagaaaatgactgtaaatctcaagaaaaatctcagcagctaatagcaactcatttatttcattttggtcttaatgctttgtaaacaggtcaaaaaatactgtcatactctaagcttctattttccacactggacatacttctagttgtattctccatactattagactgtgtagtgatgtgacttccaagtagaatttaatctccccattgagtgtgtcatggtacaaatcactattcgtttttggtgttttttagggatgtgcaatgtgcattacataatgacagaaatactgagaaggttctgtgtgcccatttgaaaggagtgggaggaatacagcagtttgtttttcaacatgaatctgatattgatttaaactgtgtttcacttacaagttttaaaaaaatgacagggtttaatggagcgtgcataaaaatgtactgttttcaccttttgtttatatgtaaatgtttgtaagtatatgggcctatctgtaagtggataagtctgtatgtgtgtatcatacacatcaacctccatgtccttagtcctgggtttttgaaaaagtgctaaaacggacaagtagaataaatgttgctgtggaatgccatgctttagaacaaaccctttttgatcttaatgcttctgaaaactaggtctgactctggggatttttttccagccgaaggaaaatcacttccgttatgtccccctctaatttagccgctcgacattttacacaacccggatatgttgtatattttgacccaaagttacaggtaggtttaagagaatttttagccatgacttttggagcactattccattgtcagttattaataaagaattccattgcttagctaaccaacaggttttttttgtttccaagagagttatttgaaaagttaacagaacaatgagataacagtgacagtttaacaaagataaaattctgaactgcgttttattcatttgtgtactatgtgattttttaaatgtcccctttagtatttaatggaaaattggttcctgcaaaagacaaagggtgagagttagcgtcctgtagatacacacagagactaggccgtatattaactagaagcagctttatgtctagcttgtgtctttttgtttgtttgcttgtttgtttttagattcctgagagatgtctctggaagggaaagttttgagaactaatggctatttttgaggacaaaaattacatcttaagctaattccttaaatacatacagtaggtgaattttcaggacaatattgcctcacaaccctgcttacattgaaaagtctttttcccttagctcttctgactggatttttctacaaaaactatggaaaatatctttgttcttgtttgctgctattttctgtcctattttgagaaatataaatacatagaaatggtgcatcttaacatttgtttgtacatgtataaatgtcttgtattttaattcatttttagcatgaattgtttaagggtaagccacaacatctagaaatcactcatagatattgaacaataaaggagaatggtaccgatgcaggaggaagcaagcgtgtcttcccctgcagcacacagcgacttgcgttgacaaaggaggaggaaacgattactctgtaaacaaagttatccttacttgggagattgccacagcctgctgctgagttgagttaccagacatcctccatgtgagaagcagcgaacattgaatctcagggatggcccacaactgggtccacatgtaatgagccctgtttaataacgaaggggtgggggagagcagtccgtctacaacctggaatcagatttgcaaaatttcctgcactgctgtctgacactgtcctgttgatgccctttctgactgtgttctctgttttctctgtctgctgtctaaccctgtgccttgcctgggataaggacaatgatgaggttactggtttggattgtaagtagaggacttttattaattggtttagaggttcactgctgctttgtcactttctcaatcaaattggccacttaagaaataaagagctggtagaattgcatcctcagatgattattgactgtgtgtgtgtgtgaaaacagacattccagtgccacccaaatatatatctgtaacgtgcccaagaaatcctagctgcgctcttgagagtgcatgccatggagactggtttagacaccgcgtggagcctagttgcctgttgtcacggcatcttgcactttaggagactaagaccgtcctggttcgtctgtgtgtggtgtgaccaatggtgtgcccagagcactactctcaaaatcactagtgttagcaagtcgtcccgggctggggagcgttcgccgtagtctttggaagctttggctttagatttaccaagccccgcctccccgctgccagtgccctgctctcccgttcgcctctttctgtttctgtgtgaactttcccggtaatatcactcgttaaataggttttctttaaacttaattaaagaaaaactatttaaaggtaaaggatattttgttgacatcggtggctcgatcatccttaagcaactgaagttaaaattgttgaaggaaaaggcacttaaattggttactttcatgtccagctgtatataagtccagtgtgttcatctagatgacgcaaagaatctcctggtagagaagcgacatgtaaaaaactggtggaaaaaggttttggattttttttccagtggggtggggggagggcaagctggatttacaggtcacggctggactgaatgggcctttttatcttcccactgtatcatggaagtagctgcttgcttgtactgtccatccttcaggcatccctaaagctcactctgaagatgttagagacaaacacaaactcttcgagttaaagttgatcctgacactgacatgaaggcaagccttgatttcgtatgaacgttgctgaagtggtaattgaggaaaacagttccccagattgttaagagttcactgaagatattgacacaattttaaaaaatcagtaaaggaatgtatataatattgctctcgtgttttacagtaagatttgttgctctcagactgtgtaaaacaaaatttattcatgttttctgcatattaaaaaatcttattgtaccaactggtaaac

SEQ ID NO: 6304 - DNA, 2644 bp, Homo sapiens
  II.62 (NM_014326)
gaccgcggcagctcagcctcccgccgattgtatgttccaggcctcaatgaggagtccaaacatggagccattcaagcagcagaaggtggaggacttttatgacatcggagaggagctggggagtggccagtttgccatcgtgaagaagtgccgggagaagagcacggggcttgagtatgcagccaagttcatcaagaagcggcagagccgggcgagccggcgcggtgtgagccgggaggagatcgagcgggaggtgagcatcctgcggcaggtgctgcaccacaatgtcatcacgctgcacgacgtctatgagaaccgcaccgacgtggtgctcatccttgagctagtgtctggaggagagctcttcgatttcctggcccagaaggagtcactgagtgaggaggaggccaccagcttcattaagcagatcctggatggggtgaactaccttcacacaaagaaaattgctcactttgatctcaagccagaaaacattatgttgttagacaagaatattcccattccacacatcaagctgattgactttggtctggctcacgaaatagaagatggagttgaatttaagaatatttttgggacgccggaatttgttgctccagaaattgtgaactacgagcccctgggtctggaggctgacatgtggagcataggcgtcatcacctacatcctcttaagtggagcatcccctttcctgggagacacgaagcaggaaacactggcaaatatcacagcagtgagttacgactttgatgaggaattcttcagccagacgagcgagctggccaaggactttattcggaagcttctggttaaagagacccggaaacggctcacaatccaagaggctctcagacacccctggatcacgccggtggacaaccagcaagccatggtgcgcagggagtctgtggtcaatctggagaacttcaggaagcagtatgtccgcaggcggtggaagctttccttcagcatcgtgtccctgtgcaaccacctcacccgctcgctgatgaagaaggtgcacctgaggccggatgaggacctgaggaactgtgagagtgacactgaggaggacatcgccaggaggaaagccctccacccacggaggaggagcagcacctcctaactggcctgacctgcagtggccgccagggaggtctgggcccagcggggctcccttctgtgcagacttttggacccagctcagcaccagcacccgggcgtcctgagcactttgcaagagagatgggcccaaggaattcagaagagcttgcaggcaagccaggagaccctgggagctgtggctgtcttctgtggaggaggctccagcattcccaaagctcttaattctccataaaatgggctttcctctgtctgccatcctcagagtctggggtgggagtgtggacttaggaaaacaatataaaggacatcctcatcatcacggggtgaaggtcagactaaggcagccttcttcacaggctgagggggttcagaaccagcctggccaaaaattacaccagagagacagagtcctccccattgggaacagggtgattgaggaaagtgaaccttgggtgtgagggaccaatcctgtgacctcccagaaccatggaagccaggacgtcaggctgaccaacacctcagaccttctgaagcagcccattgctggcccgccatgttgtaattttgctcatttttattaaacttctggtttacctgatgcttggcttcttttagggctacccccatctcatttcctttagcccgtgtgcctgtaactctgagggggggcacccagtggggtgctgagtgggcagaatctcagaaggtcctcctgaaccgtccgcgcaggcctgcagtgggcctgcctcctccttgcttccctaacaggaaggtgtccagttcaagagaacccacccagagactgggagtggtggctcacgcctataatccctgcgctttggcagtccgaggcaggggaattgcttgaactcaggagttggagaccagcctgggcaacatggcaaaactcagtctgtacaaaaaatacaaaaaattagccaggtgtaggggtaggcacctggcatcccagctactccaggggctgaggtgacagcattgcttaagcccagaaggtcgaggctgcagtgagctgagatcacgccactgcactccagtctgggtgacagagagagaccatatccaaaaaaaaaaaaagttgccagagacgagtatgcccatgctccctctacctcactgccaccactcctgcttttaggagctgagtgtgtctccctaaaatttctatgttgaagtcttaacccttggtaccacagaatatcactgtatttggagatggggtctttagaaaggcacttaaattaaaatgagctcactgatatgggccccgatgcaatataattggtgtccttataagaaggggaggttaggacacgcaggaaagaccacatgaaggcccaggagtgggagggggaatagccatcgacaaactaagggggcctcagaggaaaccaaccctgctgacacctcaatcttagactctggcctcaaaaattgtaagaaaataaacttctgtcttttaagccaaaaaaaaaaaaaaaaa

SEQ ID NO: 6305 - DNA, 2470 bp, Homo sapiens
  II.63 (XM_043864)
gacgagccgagccgagccaagcggagctgggccactgtgcacgcccggagggtcctggcggcgcccccgctcctgcgcgcactctcggcgccggacacgagcactgcctgccgggaacaggctggggggaggtgcgggggcttggcccacttggtggaagaacagctttggggattttttttttttcattgtcggatacaggcatttcaaagggaaaccgttgaaatgcataacctgcaaacactgcctcctaaaccaccaaaacctactactgtagccaacaacggtatgaataacaatatgtccttacaagatgctgaatggtactggggagatatctcgagggaagaagtgaatgaaaaacttcgagatacagcagacgggacctttttggtacgagatgcgtctactaaaatgcatggtgattatactcttacactaaggaaagggggaaataacaaattaatcaaaatatttcatcgagatgggaaatatggcttctctgacccattaaccttcagttctgtggttgaattaataaaccactaccggaatgaatctctagctcagtataatcccaaattggatgtgaaattactttatccagtatccaaataccaacaggatcaagttgtcaaagaagataatattgaagctgtagggaaaaaattacatgaatataacactcagtttcaagaaaaaagtcgagaatatgatagattatatgaagaatatacccgcacatcccaggaaatccaaatgaaaaggacagctattgaagcatttaatgaaaccataaaaatatttgaagaacagtgccagacccaagagcggtacagcaaagaatacatagaaaagtttaaacgtgaaggcaatgagaaagaaatacaaaggattatgcataattatgataagttgaagtctcgaatcagtgaaattattgacagtagaagaagattggaagaagacttgaagaagcaggcagctgagtatcgagaaattgacaaacgtatgaacagcattaaaccagaccttatccagctgagaaagacgagagaccaatacttgatgtggttgactcaaaaaggtgttcggcaaaagaagttgaacgagtggttgggcaatgaaaacactgaagaccaatattcactggtggaagatgatgaagatttgccccatcatgatgagaagacatggaatgttggaagcagcaaccgaaacaaagctgaaaacctgttgcgagggaagcgagatggcacttttcttgtccgggagagcagtaaacagggctgctatgcctgctctgtagtggtggacggcgaagtaaagcattgtgtcataaacaaaacagcaactggctatggctttgccgagccctataacttgtacagctctctgaaagaactggtgctacattaccaacacacctcccttgtgcagcacaacgactccctcaatgtcacactagcctacccagtatatgcacagcagaggcgatgaagcgcttactctttgatccttctcctgaagttcagccaccctgaggcctctggaaagcaaagggctcctctccagtctgatctgtgaattgagctgcagaaacgaagccatctttctttggatgggactagagctttctttcacaaaaaagaagtaggggaagacatgcagcctaaggctgtatgatgaccacacgttcctaagctggagtgcttatcccttctttttctttttttctttggtttaatttaaagccacaaccacatacaacacaaagagaaaaagaaatgcaaaaatctctgcgtgcagggacaaagaggcctttaaccatggtgcttgttaatgctttctgaagctttaccagctgaaagttgggactctggagagcggaggagagagaggcagaagaaccctggcctgagaaggtttggtccagcctggtttagcctggatgttgctgtgcacggtggacccagacacatcgcactgtggattatttcattttgtaacaaatgaacgatatgtagcagaaaggcacgtccactcacaagggacgctttgggagaatgtcagttcatgtatgttcagaagaaattctgtcatagaaagtgccagaaagtgtttaacttgtcaaaaaacaaaaacccagcaacagaaaaatggagtttggaaaacaggacttaaaatgacattcagtatataaaatatgtacataatattggatgactaactatcaaatagatggatttgtatcaataccaaatagcttctgttttgttttgctgaaggctaaattcacagcgctatgcaattcttaattttcattaagttgttatttcagttttaaatgtaccttcagaataagcttccccaccccagtttttgttgcttgaaaatattgttgtcccggatttttgttaatattcatttttgttatccttttttaaaagtaaatgtacaggatgccagt

SEQ ID NO: 6306 - DNA, 3383 bp, Homo sapiens
  II.64 (U54994)
agaagagctgagacatccgttcccctacaagaaactctccccgggtggaacaagatggattatcaagtgtcaagtccaatctatgacatcaattattatacatcggagccctgccaaaaaatcaatgtgaagcaaatcgcagcccgcctcctgcctccgctctactcactggtgttcatctttggttttgtgggcaacatgctggtcatcctcatcctgataaactgcaaaaggctgaagagcatgactgacatctacctgctcaacctggccatctctgacctgtttttccttcttactgtccccttctgggctcactatgctgccgcccagtgggactttggaaatacaatgtgtcaactcttgacagggctctattttataggcttcttctctggaatcttcttcatcatcctcctgacaatcgataggtacctggctgtcgtccatgctgtgtttgctttaaaagccaggacggtcacctttggggtggtgacaagtgtgatcacttgggtggtggctgtgtttgcgtctctcccaggaatcatctttaccagatctcaaaaagaaggtcttcattacacctgcagctctcattttccatacagtcagtatcaattctggaagaatttccagacattaaagatagtcatcttggggctggtcctgccgctgcttgtcatggtcatctgctactcgggaatcctaaaaactctgcttcggtgtcgaaatgagaagaagaggcacagggctgtgaggcttatcttcaccatcatgattgtttattttctcttctgggctccctacaacattgtccttctcctgaacaccttccaggaattctttggcctgaataattgcagtagctctaacaggttggaccaagctatgcaggtgacagagactcttgggatgacgcactgctgcatcaaccccatcatctatgcctttgtcggggagaagttcagaaactacctcttagtcttcttccaaaagcacattgccaaacgcttctgcaaatgctgttctattttccagcaagaggctcccgagcgagcaagctcagtttacacccgatccactggggagcaggaaatatctgtgggcttgtgacacggactcaagtgggctggtgacccagtcagagttgtgcacatggcttagttttcatacacagcctgggctgggggtggggtgggagaggtcttttttaaaaggaagttactgttatagagggtctaagattcatccatttatttggcatctgtttaaagtagattagatcttttaagcccatcaattatagaaagccaaatcaaaatatgttgatgaaaaatagcaacctttttatctccccttcacatgcatcaagttattgacaaactctcccttcactccgaaagttccttatgtatatttaaaagaaagcctcagagaattgctgattcttgagtttagtgatctgaacagaaataccaaaattatttcagaaatgtacaactttttacctagtacaaggcaacatataggttgtaaatgtgtttaaaacaggtctttgtcttgctatggggagaaaagacatgaatatgattagtaaagaaatgacacttttcatgtgtgatttcccctccaaggtatggttaataagtttcactgacttagaaccaggcgagagacttgtggcctgggagagctggggaagcttcttaaatgagaaggaatttgagttggatcatctattgctggcaaagacagaagcctcactgcaagcactgcatgggcaagcttggctgtagaaggagacagagctggttgggaagacatggggaggaaggacaaggctagatcatgaagaaccttgacggcattgctccgtctaagtcatgagctgagcagggagatcctggttggtgttgcagaaggtttactctgtggccaaaggagggtcaggaaggatgagcatttagggcaaggagaccaccaacagccctcaggtcagggtgaggatggcctctgctaagctcaaggcgtgaggatgggaaggagggaggtattcgtaaggatgggaaggagggaggtattcgtgcagcatatgaggatgcagagtcagcagaactggggtggatttggtttggaagtgagggtcagagaggagtcagagagaatccctagtcttcaagcagattggagaaacccttgaaaagacatcaagcacagaaggaggaggaggaggtttaggtcaagaagaagatggattggtgtaaaaggatgggtctggtttgcagagcttgaacacagtctcacccagactccaggctgtctttcactgaatgcttctgacttcatagatttccttcccatcccagctgaaatactgaggggtctccaggaggagactagatttatgaatacacgaggtatgaggtctaggaacatacttcagctcacacatgagatctaggtgaggattgattacctagtagtcatttcatgggttgttgggaggattctatgaggcaaccacaggcagcatttagcacatactacacattcaataagcatcaaactcttagttactcattcagggatagcactgagcaaagcattgagcaaaggggtcccatataggtgagggaagcctgaaaaactaagatgctgcctgcccagtgcacacaagtgtaggtatcattttctgcatttaaccgtcaataggcaaaggggggaagggacatattcatttggaaataagctgccttgagccttaaaacccacaaaagtacaatttaccagcctccgtatttcagactgaatgggggtggggggggcgccttaggtacttattccagatgccttctccagacaaaccagaagcaacagaaaaaatcgtctctccctccctttgaaatgaatataccccttagtgtttgggtatattcatttcaaagggagagagagaggtttttttctgttctttctcatatgattgtgcacatacttgagactgttttgaatttgggggatggctaaaaccatcatagtacaggtaaggtgagggaatagtaagtggtgagaactactcagggaatgaaggtgtcagaataataagaggtgctactgactttctcagcctctgaatatgaacggtgagcattgtggctgtcagcaggaagcaacgaagggaaatgtctttccttttgctcttaagttgtggagagtgcaacagtagcataggaccctaccctctgggccaagtcaaagacattctgacatcttagtatttgcatattcttatgtatgtgaaagttacaaattgcttgaaagaaaatatgcatctaataaaaaacaccttctaaaataaaaaaaaaaaaaaaaaaaaaaaaaaa

SEQ ID NO: 6307 - DNA, 420 bp, Homo sapiens
  II.65 (NM_004089)
gggggctggccgagcgccgtgcgcgcttgggagaaggccggaagcttaccagccgagaaggaattcctagctagcttcagagccggtgcctccggagccagcgtggtggccatagacaacaagttcgaacaggccatggatctggtgaagaatcatctgatgtatgctgtgagagaggaggtggagatcctgaaggagcagatccgagagctggtggagaagaactcccagctagagcgtgagaacaccctgttgaagaccctggcaagcccagagcagctggagaagttccagtcctgtctgagccctgaagagccagctcccgaatccccacaagtgcccgaggcccctggtggttctgcggtgtaagtcgctctgtcctcagggtgggcagagccactaaacttgttttacctaggg

SEQ ID NO: 6308 - DNA, 3590 bp, Homo sapiens
  II.66 (XM_037260)
ggggcgcacagagccagaggggcttgcgagcggcggctgagggaccgcggggagggggcgccgagcggctccagcgcagagactctcactgcacgccggagggcgcccttcctcgctcgcgcccgcgcgaccgcgcgccccagtcccgccccgccccgctaaccgccccagacacagcgctcgccgagggtcgcttggaccctgatcttacccgtgggcaccctgcgctctgcctgccgcgaagaccggctccccgacccgcagaagtcaggagagagggtgaagcggagcagcccgaggcggggcagcctcccggagcagcgccgcgcagagcccgggacaatggggccgcggcggctgctgctggtggccgcctgcttcagtctgtgcggcccgctgttgtctgcccgcacccgggcccgcaggccagaatcaaaagcaacaaatgccaccttagatccccggtcatttcttctcaggaaccccaatgataaatatgaaccattttgggaggatgaggagaaaaatgaaagtgggttaactgaatacagattagtctccatcaataaaagcagtcctcttcaaaaacaacttcctgcattcatctcagaagatgcctccggatatttgaccagctcctggctgacactctttgtcccatctgtgtacaccggagtgtttgtagtcagcctcccactaaacatcatggccatcgttgtgttcatcctgaaaatgaaggtcaagaagccggcggtggtgtacatgctgcacctggccacggcagatgtgctgtttgtgtctgtgctcccctttaagatcagctattacttttccggcagtgattggcagtttgggtctgaattgtgtcgcttcgtcactgcagcattttactgtaacatgtacgcctctatcttgctcatgacagtcataagcattgaccggtttctggctgtggtgtatcccatgcagtccctctcctggcgtactctgggaagggcttccttcacttgtctggccatctgggctttggccatcgcaggggtagtgcctctgctcctcaaggagcaaaccatccaggtgcccgggctcaacatcactacctgtcatgatgtgctcaatgaaaccctgctcgaaggctactatgcctactacttctcagccttctctgctgtcttcttttttgtgccgctgatcatttccacggtctgttatgtgtctatcattcgatgtcttagctcttccgcagttgccaaccgcagcaagaagtcccgggctttgttcctgtcagctgctgttttctgcatcttcatcatttgcttcggacccacaaacgtcctcctgattgcgcattactcattcctttctcacacttccaccacagaggctgcctactttgcctacctcctctgtgtctgtgtcagcagcataagctgctgcatcgaccccctaatttactattacgcttcctctgagtgccagaggtacgtctacagtatcttatgctgcaaagaaagttccgatcccagcagttataacagcagtgggcagttgatggcaagtaaaatggatacctgctctagtaacctgaataacagcatatacaaaaagctgttaacttaggaaaagggactgctgggaggttaaaaagaaaagtttataaaagtgaataacctgaggattctattagtccccacccaaactttattgattcacctcctaaaacaacagatgtacgacttgcatacctgctttttatgggagctgtcaagcatgtatttttgtcaattaccagaaagataacaggacgagatgacggtgttattccaagggaatattgccaatgctacagtaataaatgaatgtcacttctggatatagctaggtgacatatacatacttacatgtgtgtatatgtagatgtatgcacacacatatattatttgcagtgcagtatagaataggcactttaaaacactctttccccgcaccccagcaattatgaaaataatctctgattccctgatttaatatgcaaagtctaggttggtagagtttagccctgaacatttcatggtgttcatcaacagtgagagactccatagtttgggcttgtaccacttttgcaaataagtgtattttgaaattgtttgacggcaaggtttaagttattaagaggtaagacttagtactatctgtgcgtagaagttctagtgttttcaattttaaacatatccaagtttgaattcctaaaattatggaaacagatgaaaagcctctgttttgatatgggtagtattttttacattttacacactgtacacataagccaaaactgagcataagtcctctagtgaatgtaggctggctttcagagtaggctattcctgagagctgcatgtgtccgcccccgatggaggactccaggcagcagacacatgccagggccatgtcagacacagattggccagaaaccttcctgctgagcctcacagcagtgagactggggccactacatttgctccatcctcctgggattggctgtgaactgatcatgtttatgagaaactggcaaagcagaatgtgatatcctaggaggtaatgaccatgaaagacttctctacccatcttaaaaacaacgaaagaaggcatggacttctggatgcccatccactgggtgtaaacacatctagtagttgttctgaaatgtcagttctgatatggaagcacccattatgcgctgtggccactccaataggtgctgagtgtacagagtggaataagacagagacctgccctcaagagcaaagtagatcatgcatagagtgtgatgtatgtgtaataaatatgtttcacacaaacaaggcctgtcagctaaagaagtttgaacatttgggttactatttcttgtggttataacttaatgaaaacaatgcagtacaggacatatattttttaaaataagtctgatttaattgggcactatttatttacaaatgttttgctcaatagattgctcaaatcaggttttcttttaagaatcaatcatgtcagtctgcttagaaataacagaagaaaatagaattgacattgaaatctaggaaaattattctataatttccatttacttaagacttaatgagactttaaaagcattttttaacctcctaagtatcaagtatagaaaatcttcatggaattcacaaagtaatttggaaattaggttgaaacatatctcttatcttacgaaaaaatggtagcattttaaacaaaatagaaagttgcaaggcaaatgtttatttaaaagagcaggccaggcgcggtggctcacgcctgtaatcccagcactttgggaggctgaggcgggtggatcacgaggtcaggagatcgagaccatcctggctaacacggtgaaacccgtctctactaaaaatgcaaaaaaaattagccgggcgtggtggcaggcacctgtagtcccagctactcgggaggctgaggcaggagactggcgtgaacccaggaggcggaccttgtagtgagccgagatcgcgccactgtgctccagcctgggcaacagagcaagactccatctc

SEQ ID NO: 6309 - DNA, 8615 bp, Homo sapiens
  II.67 (NM_172217)
gagtttgcagaagagagtcttcccgagaaggcagaacgagggtgtgtggagcactgcgggcgagatggagctgagggaaggcagagctgggtctcactctgttgcccaggctggagttcagcggtgcaatcccggctcactgcagccttgactccgtgagctcagggactcatgaagtggcagctaagccctgtccagtggccacccgtcagccaagggccagagaccaggaaaggaagaaaggcagcttcacttcctctttgaggatggagtcgcacagccgcgctggaaagagcagaaaatctgcaaaatttcggtccatctccaggtccctgatgctctgtaatgctaagaccagtgatgatggctctagccctgatgagaaatatcctgatccctttgagatttccttggcccagggcaaggagggaattttccactcatctgtgcagctggcagacacatcggaggctgggcccagcagtgttcctgatctagcactggcctcggaggctgctcaactccaagcagctgggaatgatcgaggcaagacctgtaggaggatattcttcatgaaggaatcttccacagcttcctctcgagaaaagcctggaaaactagaagcacaaagtagtaacttcctgtttcctaaagcctgccaccaaagggcacgcagcaactcaaccagtgttaatccctattgcacaagagaaattgattttccaatgaccaagaaatctgcagcgcccacggacaggcagccttactctctctgcagtaacaggaagtccctctctcaacaattggactgtccagcaggaaaggctgcgggaacttcgagaccaacacggtccctgagcacagctcagctcgtgcagccatctgggggcctccaggcttcagtcatctccaacatcgtgctgatgaagggccaggctaagggtctgggcttcagcatcgttgggggaaaagacagcatttatggccccattgggatttacgtcaaaaccatttttgcagggggagcagcagcagccgatggaaggctacaggaaggtgatgaaattctggagctcaatggtgaatcaatggctggactaacacatcaggatgctttgcagaagttcaagcaagccaaaaaggggctcctcaccctcaccgtgagaacccgcctgacggcgcctccttccctgtgcagccacctgtctcccccactgtgccgctccctgagctccagcacttgtatcaccaaggacagcagctccttcgccttggaaagcccctcggctcccatcagcaccgccaagcccaattacagaatcatggtggaggtttctctgcagaaagaggccggcgtgggcctgggcatcggcctgtgcagcgttccctacttccaatgcatctctggcattttcgtccacacgctgtcaccaggatccgtggcgcacctggacggacgtctccggtgtggggacgagattgtggaaatcagtgattcccctgtgcactgcctgacgctcaatgaagtctacacgatcctgagtcactgtgatcccggtccagtccccatcattgttagccgacatccagacccacaggtctctgaacagcaactcaaagaagctgtggcccaggctgtggaaaacaccaagtttggaaaggagaggcatcagtggagtctggaaggtgtcaaaaggctggaaagcagttggcacgggcggcccaccttggagaaggaacgagagaagaactcagcacccccgcatcgcagggctcagaaggtcatgatccgctccagcagtgacagcagctacatgtctgggtccccagggggaagtcctgggagtggcagtgctgagaagccgtcctctgacgtggacatcagcacacacagccccagcttgcctctggcacgggagccagtggtgctttctatagcatcctccaggctgccccaggagagcccacccctcccagagagccgggacagccacccgccgctgagactgaagaaatcctttgagattttggaagcgagagagctgctgccactgctgctaccacaggaagacacagcagggagaagccctagtgcctctgccggctgcccaggacctggtatcggcccacagaccaagtcctccacagagggcgagccagggtggagaagagccagcccagtgacccaaacatccccgataaaacacccactgcttaagaggcaggctcggatggactatagctttgataccacagccgaagacccttgggttaggatttctgactgcatcaaaaacttatttagccccatcatgagtgagaaccatggccacatgcctctacagcccaatgccagcctgaatgaagaagaagggacacagggccacccagatgggaccccaccaaagctggacaccgccaatggcactcccaaagtttacaagtcagcagacagcagcactgtgaagaaaggtcctcctgtggctcccaagccagcctggtttcgccaaagcttgaaaggtttgaggaatcgtgcttcagacccaagagggctccctgatcctgccttgtccacccagccagcacctgcttccagggagcacctaggatcacacatccgggcctcctcctcctcctcctccatcaggcagagaatcagctcctttgaaacctttggctcctctcaactgcctgacaaaggagcccagagactgagcctccagccctcctctggggaggcagcaaaacctcttgggaagcatgaggaaggacggttttctggactcttggggcgaggggctgcacccactcttgtgccccagcagcctgagcaagtactgtcctcggggtcccctgcagcctccgaggccagagacccaggtgtgtctgagtcccctcccccagggcggcagcccaatcagaaaactctcccccctggcccggacccgctcctaaggctgctgtcaacacaggctgaggaatctcaaggcccagtgctcaagatgcctagccagcgagcacggagcttccccctgaccaggtcccagtcctgtgagacgaagctacttgacgaaaagaccagcaaactctattctatcagcagccaagtgtcatcggctgtcatgaaatccttgctgtgccttccatcttctatctcctgtgcccagactccctgcatccccaaggaaggggcatctccaacatcatcatccaacgaagactcagctgcaaatggttctgctgaaacatctgccttggacacggggttctcgctcaacctttcagagctgagagaatatacagagggtctcacggaagccaaggaagacgatgatggggaccacagttcccttcagtctggtcagtccgttatctccctgctgagctcagaagaattaaaaaaactcatcgaggaggtgaaggttctggatgaagcaacattaaagcaattagacggcatccatgtcaccatcttacacaaggaggaaggtgctggtcttgggttcagcttggcaggaggagcagatctagaaaacaaggtgattacggttcacagagtgtttccaaatgggctggcctcccaggaagggactattcagaagggcaatgaggttctttccatcaacggcaagtctctcaaggggaccacgcaccatgatgccttggccatcctccgccaagctcgagagcccaggcaagctgtgattgtcacaaggaagctgactccagaggccatgcccgacctcaactcctccactgactctgcagcctcagcctctgcagccagtgatgtttctgtagaatctacagcagaggccacagtctgcacggtgacactggagaagatgtcggcagggctgggcttcagcctggaaggagggaagggctccctacacggagacaagcctctcaccattaacaggattttcaaaggtggacacagaggacttcgtgccagaggcaagatccctgtaaatattgttgcacaaaaatctcactagctctcttcccataccacccaatgctgatgtcctcaccacatgcggagaacaaatgtgaagggagtaggatattgggtcagtgtccaaagcagggtctgggcaggactcagctccccagagtcctctatgaactatggacggtgctccaggcaggctaaggcgtggagctgcctgatatttccctcccctggggacagcaagggctatccctttccaaaggccatggagagctggagcctggtgccctaacctctgagtcaccatcttaagagatgcctcattttagaaccaccaacaagcaagctcccaagggatggtgccctgttctctaccaagctatcctggctctttggagatcaaggagaggaggcaactttccttgttccccatcatctgtggaacccattaccttctccctcatttcaggagcagcctcagaacaaagtgagacagtccagcctggagatgaaatcttgcagctgggtggcactgccatgcagggcctcacacggtttgaagcctggaacatcatcaaggcactgcctgatggacctgtcacgattgtcatcaggagaaaaagcctccagtccaaggaaaccacagctgctggagactcctaggcaggacatgctgaagccaaagccaataacacacagctaacacacagctcccataaccgctgattctcagggtctctgctgccgccccacccagatgggggaaagcacaggtgggcttcccagtggctgctgcccaggcccagaccttctaggacgccacccagcaaaaggttgttcctaaaataagggcagagtcacacgggggcagctgatacaaattgcagactgtgtaaaaagagagcttaatgataatattgtggtgccacaaataaaatggatttattagaatttcatatgacattcatgcctggcttcgcaaaatgtttcaagtactgtaactgtgtcatgattcacccccaaacagtgacatttatttttctcatgaatctgcaatgtgggcagagattggaatgggcagctcatctctgtcccacttggcatcagctggcgtcatgcaaagtcatgcaaaggctgggaccacgtgagatcattcactcatacatctggccgttgatgttggctgggaactcacctggggctgctggcctgaatgcttataggtggcctctccttgtggcctgggcctcctcacaacatggtgtctggattcccaggatgagcatcccaggatcgcaagagccatgtagaagctgcatcttgtttatacctttgccttggaagttgcatggcatcacctccaccatactccatcagttagagctgacacaaacctgcctgggtttaaggggagaggaaatattgctggggtcatttatgaaaaatacagtttgtcacatgaaacatttgcaaaattgtttttggttggattggagaagtaatcctagggaagggtggtggagccagtaaacagaggagtacaggtgaagcaccaagctcaaagcgtggacaggtgtgccgacagaaggaaccagcgtgtatatgagggtatcaaataaaattgctactacttacctaccacatgccaagcactgtgctcagggctaaacgggcattgcctttagtgatcacagcagcttctacggtgtatggttctgtgccaatgtattgataagagggcacacactgtgtacagtaaatggcttatccagctggtgagtgatgcggcagattgagttttcttctgtgattcggtggagactatcagcccaagatgctttaagtgcacaacattacagggaatgcctgagtgcctggccaaagggatatttggtttggccatctctggatgcctgattgccaagctcaggaccaggcaatgtgactttgcatcagcaacaaccagcatcccttgaccaggcctgggccagagtattggtctcctctcagcccctgatcctgtgaagtaaggatgtgggggaagacctggcaaggacacagatgaaacacaaacaatagtaattctcaggccatcatcagtggagccatgttaatgtaatctgatggcttctccagggtccacaggaagtgaagaatctgtttcccagcagtggactcaaaacccatctgggctcctaaccttcctgtaaacccctttagtggcttcattagagcaggcgttcagctcactgttctattcatctcaaggaataatgggcttagagcagtttctgtcctgctggttaacttgtttggcctattccattctggattttgtcaagcagtagacaagcaattagacaagaacttggaggcaccatttgtatccactttttagacttaatagaaacattgaagatgaacataatctaccaacgaaagacgtgattcaattcaacactcccttcccatgacccaggctgggcaaggaggccacgtgatgtggagggcacattccttgcctgcacaaactcaccatctgtgcacgcagtggccttccctaaaatcagggaattgttttaagtcttatcaagcagccaagggatgaaagagaaggtgggttttcatcaagactggaaggtggggacagggatgagcatggagctggccgtgggcctggggtaccaagagactccttgagagaccaggcaaagcaagtgattgggacagaggttatctgtcccaggttatctgggcatagatgcaggtgagcccatggccctcccagtacctcctgtctctggcctgttttagaaggttctctcctccccaaggagacacaacaactcctagggccactgaagatataactattgcccaggtttctggtctctaggctggggaagtcctctgggtaggaatcagcaagaagatcctaaaacaaaagctcatccatttgcgttccatgatgctgggatttacacttgaggcttagctttgctctgccaacttcttcagagctgacacaggatgaaggcaatgccatcctcaaacactgcaggcatcacagctaacaattgtgaagtcgtcttaactcaccataaaaaggaatccactcccaggcagccctacttctttgctttgcccagcattttactgattcatacattatctcacttgtgccaacactcaagaagcaggctacactgacactggtattcctgcctccatattttctttaaaagacaaatcaaagcagatatattaagtgactgttcaagagcacacttggcccaagtggcagagcttggactggatgcatgttttccagctcctcatccagggctctgaccagtttaacctgatgcagtcacgtggaggagcagtgcaggcacagtatgtcccataggcccagtgagatgcattcttggttggctggccttccacttggctacacagggatgtacaaggcgatcccatcttgataagaccaccacctcagagtatggagctcagagagggcaggcatgaagtttccttggctggtgcacctagaattggctgaactcatgagaagttgatatagaacagtgcttgccacagagcggggactcggtaagcacttaatgaatgaatgaattctaagtcaatccaagagtctgatgatttcttgaaaagggtgttagctaaaggatcttaggcatgactgtagaatttgtagttgcaatagaacagagaaagaggaagctttctgtctccttaacactgagctgtcatgttttaaagcttgctcacatcttggcacatttaagagacagtcaccccaggactcaaaaatagggaagtaacagtaacgcaggggaaacgttttctgtttggaggagcaaaggctgagaacactgtgaaaacattttgcgcgcacaatagtaacctgggtaaatgcagcgtgaagggattttagtcacacgtggtctttcttacaaggaaggtggtgggggtgcagatgaggttgctagagaatgttagaggatccctctctggattggagatagggaaagaaagttgcacggctgctgaggccccttctaggtggcaaggctgtgctccctggttctgatgatgtgcctgggtggacatggcccctgtgagtttgtacagtcttgcagcaggatctagaggggggatttccagccagggctgctagacggaggcctactcttccatctttcctgatggcaggatggcctggccagggcctggaagacagagacctcctgcctccgcctcagtaagacgacaaggaaaggcaaatgcccaagggaaagaaaaggaaggctcttctccccagagttccccatgcagacatgagtgcgtgctcagttcagaatcacttctgagaactcatccctaatgctgcagatttgggctggaacagattcacactgtctggtttcaccgaggacatgaaactccaccttgcggggataaagagagaaaaacaaattcatcaaatggaagacacattgaaagtgtttttccttaatgcttatcctgtttttaaaccattatttccaagttgacaccttttttaaggaaaaataaatattttgcggcattaaagccataaaaaaaaaaaaaaaaaaaaaaaaaaaaaaaa

SEQ ID NO: 6310 - DNA, 2448 bp, Homo sapiens
  II.68 (AF244129)
cttcagtctcagttctgaaaatagatcatcatggtggcaccaaagagtcacacagatgactgggctcctgggcctttctccagtaagccacagaggagtcagctgcaaatattctcttctgttctacagacctctctcctcttcctgctcatgggactaagagcctctggaaaggactcagccccaacagtggtgtcagggatcctagggggttccgtgactctccccctaaacatctcagtagacacagagattgagaacgtcatctggattggtcccaaaaatgctcttgctttcgcacgtcccaaagaaaatgtaaccattatggtcaaaagctacctgggccgactagacatcaccaagtggagttactccctgtgcatcagcaatctgactctgaatgatgcaggatcctacaaagcccagataaaccaaaggaattttgaagtcaccactgaggaggaattcaccctgttcgtctatgagcagctgcaggagccccaagtcaccatgaagtctgtgaaggtgtctgagaacttctgtaacatcactctaatgtgctccgtgaagggggcagagaaaagtgttctgtacagctggaccccaagggaaccccatgcttctgagtccaatggaggctccattcttaccgtctcccgaacaccatgtgacccagacctgccatacatctgcacagcccagaaccccgtcagccagagaagctccctccctgtccatgttgggcagttctgtacagatccaggagcctccagaggaggaacaacgggggagactgtggtaggggtcctgggagagccagtcaccctgccacttgcactcccagcctgccgggacacagagaaggttgtctggttgtttaacacatccatcattagcaaagagagggaagaagcagcaacggcagatccactcattaaatccagggatccttacaagaacagggtgtgggtctccagccaggactgctccctgaagatcagccagctgaagatagaggacgccggcccctaccatgcctacgtgtgctcagaggcctccagcgtcaccagcatgacacatgtcaccctgctcatctaccgcaggctgaggaagcccaaaatcacgtggagcctcaggcacagtgaggatggcatctgcaggatcagcctgacctgctccgtggaggacgggggaaacactgtcatgtacacatggaccccgctgcagaaggaagctgttgtgtcccaaggggaatcacacctcaatgtctcatggagaagcagtgaaaatcaccccaacctcacatgcacagccagcaaccctgtcagcaggagttcccaccagtttctttctgagaacatctgttcaggacctgagagaaacacaaagctttggattgggttgttcctgatggtttgccttctgtgcgttgggatcttcagctggtgcatttggaagcgaaaaggacggtgttcagtcccagccttctgttccagccaagctgaggccccagcggatacaccagaacccacagctggccacacgctatactctgtgctctcccaaggatatgagaagctggacactcccctcaggcctgccaggcaacagcctacacccacctcagacagcagctctgacagcaacctcacaactgaggaggatgaggacaggcctgaggtgcacaagcccatcagtggaagatatgaggtgtttgaccaggtcactcaggagggcgctggacatgacccagcccctgagggccaagcagactatgatcccgtcactccatatgtcacggaagttgagtctgtggttggagagaacaccgtgtatgcacaagtgttcaacttacagggaaagaccccagtttctcagaaggaagagagctcagccacaatctactgctccatacggaaacctcaggtggtgccaccaccacaacagaatgatcttgagattcctgaaagtcctacctatgaaaatttcacctgaaaggaaaagcagctgctgcctctctcctgggaccgtggggttggaaagtcagctggacctcatggggcctggggctcgctgacagaagcacctcagaatttccttcagtgcctcagagatgcctggatgtggcccctccccctccttctcacccttaaggactcccaaacccattaatagttcagacacaggctccttcttggagcctatgggcttcagatgtctttgccccatttgtcacctcgcacacttatagcgtttcctcctcgaaattctaccaagactggtcaaatgttgctgaggggcctggaccagctgtcctttacaccaccttctcaacactgctgaaaagaaccccaagagaattgtcacacatgacacaagatgtacataatatcatgctcacgcctggagtgttatttaaaataaaaggcaggaaataaaaaaaaaaaa

SEQ ID NO: 6311 - DNA, 1566 bp, Homo sapiens
  II.69 (NM_003775)
gagtcagcccccgggggaggccatgaacgccacggggaccccggtggcccccgagtcctgccaacagctggcggccggcgggcacagccggctcattgttctgcactacaaccactcgggccggctggccgggcgcggggggccggaggatggcggcctgggggccctgcgggggctgtcggtggccgccagctgcctggtggtgctggagaacttgctggtgctggcggccatcaccagccacatgcggtcgcgacgctgggtctactattgcctggtgaacatcacgctgagtgacctgctcacgggcgcggcctacctggccaacgtgctgctgtcgggggcccgcaccttccgtctggcgcccgcccagtggttcctacgggagggcctgctcttcaccgccctggccgcctccaccttcagcctgctcttcactgcaggggagcgctttgccaccatggtgcggccggtggccgagagcggggccaccaagaccagccgcgtctacggcttcatcggcctctgctggctgctggccgcgctgctggggatgctgcctttgctgggctggaactgcctgtgcgcctttgaccgctgctccagccttctgcccctctactccaagcgctacatcctcttctgcctggtgatcttcgccggcgtcctggccaccatcatgggcctctatggggccatcttccgcctggtgcaggccagcgggcagaaggccccacgcccagcggcccgccgcaaggcccgccgcctgctgaagacggtgctgatgatcctgctggccttcctggtgtgctggggcccactcttcgggctgctgctggccgacgtctttggctccaacctctgggcccaggagtacctgcggggcatggactggatcctggccctggccgtcctcaactcggcggtcaaccccatcatctactccttccgcagcagggaggtgtgcagagccgtgctcagcttcctctgctgcgggtgtctccggctgggcatgcgagggcccggggactgcctggcccgggccgtcgaggctcactccggagcttccaccaccgacagctctctgaggccaagggacagctttcgcggctcccgctcgctcagctttcggatgcgggagcccctgtccagcatctccagcgtgcggagcatctgaagttgcagtcttgcgtgtggatggtgcagccaccgggtgcgtgccaggcaggccctcctggggtacaggaagctgtgtgcacgcagcctcgcctgtatggggagcagggaacgggacaggcccccatggtcttcccggtggcctctcggggcttctgacgccaaatgggcttcccatggtcaccctggacaaggaggtaaccaccccacctccccgtaggagcagagagcaccctggtgtgggggcgagtggttccccacaaccccgcttctgtgtgattctggggaagtcccggcccctctctgggcctcagtagggctcccaggctgcaaggggtggactgtgggatgcatgccctggcaacattgaagttcgatcatggtaaaaaa

SEQ ID NO: 6312 - DNA, 1702 bp, Homo sapiens
  II.70 (NM_001781)
agactcaacaagagctccagcaaagactttcactgtagcttgacttgacctgagattaactagggaatcttgagaataaagatgagctctgaaaattgtttcgtagcagagaacagctctttgcatccggagagtggacaagaaaatgatgccaccagtccccatttctcaacacgtcatgaagggtccttccaagttcctgtcctgtgtgctgtaatgaatgtggtcttcatcaccattttaatcatagctctcattgccttatcagtgggccaatacaattgtccaggccaatacacattctcaatgccatcagacagccatgtttcttcatgctctgaggactgggttggctaccagaggaaatgctactttatttctactgtgaagaggagctggacttcagcccaaaatgcttgttctgaacatggtgctactcttgctgtcattgattctgaaaaggacatgaactttctaaaacgatacgcaggtagagaggaacactgggttggactgaaaaaggaacctggtcacccatggaagtggtcaaatggcaaagaatttaacaactggttcaacgttacagggtctgacaagtgtgtttttctgaaaaacacagaggtcagcagcatggaatgtgagaagaatttatactggatatgtaacaaaccttacaaataataaggaaacatgttcacttattgactattatagaatggaactcaaggaaatctgtgtcagtggatgctgctctgtggtccgaagtcttccatagagactttgtgaaaaaaaattttatagtgtcttgggaattttcttccaaacagaactatggaaaaaaaggaagaaattccaggaaaatctgcactgtgggcttttattgccatgagctagaagcatcacaggttgaccaataaccatgcccaagaatgagaagaatgactatgcaacctttggatgcactttatattattttgaatccagaaataatgaaataactaggcgtggacttactatttattgctgaatgactaccaacagtgagagcccttcatgcatttgcactactggaaggagttagatgttggtactagatactgaatgtaaacaaaggaattatggctggtaacataggtttttagtctaattgaatcccttaaactcagggagcatttataaatggacaaatgcttatgaaactaagatttgtaatatttctctctttttagagaaatttgccaatttactttgttatttttccccaaaaagaatgggatgatcgtgtatttatttttttacttcctcagctgtagacaggtccttttcgatggtacatatttctttgcctttataatcttttatacagtgtcttacagagaaaagacataagcaaagactatgaggaatatttgcaagacatagaatagtgttggaaaatgtgcaatatgtgatgtggcaaatctctattaggaaatattctgtaatcttcagacctagaataatactagtcttataataggtttgtgactttcctaaatcaattctattacgtgcaatacttcaatacttcatttaaaatatttttatgtgcaataaaatgtatttgtttgtattttgtgttcagtacaattataagctgtttttatatatgtgaaataaaagtagaataaacacaaaaaaaaaaaaaaaaaaaaaaaaaaaa

SEQ ID NO: 6313 - DNA, 1349 bp, Homo sapiens
  II.71 (NM_019846)
cctgatcgaacagcctcacttgtgttgctgtcagtgccagtagggcaggcaggaatgcagcagagaggactcgccatcgtggccttggctgtctgtgcggccctacatgcctcagaagccatacttcccattgcctccagctgttgcacggaggtttcacatcatatttccagaaggctcctggaaagagtgaatatgtgtcgcatccagagagctgatggggattgtgacttggctgctgtcatccttcatgtcaagcgcagaagaatctgtgtcagcccgcacaaccatactgttaagcagtggatgaaagtgcaagctgccaagaaaaatggtaaaggaaatgtttgccacaggaagaaacaccatggcaagaggaacagtaacagggcacatcaggggaaacacgaaacatacggccataaaactccttattagagagtctacagataaatctacagagacaattcctcaagtggacttggccatgattggttagtctcactctatcacacaggctggagggcagtggcaggatctcagttcaccccaacctttgcctcacgggttcaagggattctcgtgcctcagccttccaagtagctgggattacaggtgtgcgccagtacgcctggctagttttagtattttttgttacagacggggtttcaccatgttggctgggctggtctcaaacttctgatctcaagtgatccatctgccttggcctcccaaagtgctgggattacaggcatgagccactgcacctggcctacgtattaggctttatgtaagatgtacatagtactccatactcctttccttttcctcctattgaaactgttcctataaactttataaaattaatcagagaagaagagagggtgagaaacataaataatccaagcttgcaccacattcagcattaatcactaggtcactttgcttgctgaccccttcctcatagttgtttggctattgcttcagaattatgtggagtctgttacaagattatagttccccttaactgctctatagataacagcttgaacattatgaaatgctaagttttcccttcgagacattctttcaggtcctgcatactgatgaaactactgatgtcagctggtctgaaggaccctaccagaagctaaatcatcaaagaatgcaatttccatatcctaatgattcaatctcccttaccctgaccaatcagtggcccaaattttccagccccttgcctcccagaaccccagcccagaactcttcagagatttaagaatctcctcctacctcctgactcagcaccatgtaatcattaaactctctgctgcaaaaaaaaaaaaaaa

SEQ ID NO: 6314 - DNA, 1103 bp, Homo sapiens
  II.72 (NM_001511)
cacagagcccgggccgcaggcacctcctcgccagctcttccgctcctctcacagccgccagacccgcctgctgagccccatggcccgcgctgctctctccgccgcccccagcaatccccggctcctgcgagtggcactgctgctcctgctcctggtagccgctggccggcgcgcagcaggagcgtccgtggccactgaactgcgctgccagtgcttgcagaccctgcagggaattcaccccaagaacatccaaagtgtgaacgtgaagtcccccggaccccactgcgcccaaaccgaagtcatagccacactcaagaatgggcggaaagcttgcctcaatcctgcatcccccatagttaagaaaatcatcgaaaagatgctgaacagtgacaaatccaactgaccagaagggaggaggaagctcactggtggctgttcctgaaggaggccctgcccttataggaacagaagaggaaagagagacacagctgcagaggccacctggattgtgcctaatgtgtttgagcatcgcttaggagaagtcttctatttatttatttattcattagttttgaagattctatgttaatattttaggtgtaaaataattaagggtatgattaactctacctgcacactgtcctattatattcattctttttgaaatgtcaaccccaagttagttcaatctggattcatatttaatttgaaggtagaatgttttcaaatgttctccagtcattatgttaatatttctgaggagcctgcaacatgccagccactgtgatagaggctggcggatccaagcaaatggccaatgagatcattgtgaaggcaggggaatgtatgtgcacatctgttttgtaactgtttagatgaatgtcagttgttatttattgaaatgatttcacagtgtgtggtcaacatttctcatgttgaaactttaagaactaaaatgttctaaatatcccttggacattttatgtctttcttgtaaggcatactgccttgtttaatggtagttttacagtgtttctggcttagaacaaaggggcttaattattgatgttttcatagagaatataaaaataaagcacttatag

SEQ ID NO: 6315 - DNA, 3215 bp, Homo sapiens
  II.73 (NM_006505)
cttgaagaagtgggtattccccttcccaccccaggcactggaggagcggccccccggggattccaggacctgagctccgggagctggactcgcagcgaccgcggcagagcgagctggcgccgggaagcgaggagacgcccgcgggaggcccagctgctcggagcaactggcatggcccgagccatggccgccgcgtggccgctgctgctggtggcgctactggtgctgtcctggccacccccaggaaccggggacgtcgtcgtgcaggcgcccacccaggtgcccggcttcttgggcgactccgtgacgctgccctgctacctacaggtgcccaacatggaggtgacgcatgtgtcacagctgacttgggcgcggcatggtgaatctggcagcatggccgtcttccaccaaacgcagggccccagctattcggagtccaaacggctggaattcgtggcagccagactgggcgcggagctgcggaatgcctcgctgaggatgttcgggttgcgcgtagaggatgaaggcaactacacctgcctgttcgtcacgttcccgcagggcagcaggagcgtggatatctggctccgagtgcttgccaagccccagaacacagctgaggttcagaaggtccagctcactggagagccagtgcccatggcccgctgcgtctccacagggggtcgcccgccagcccaaatcacctggcactcagacctgggcgggatgcccaatacgagccaggtgccagggttcctgtctggcacagtcactgtcaccagcctctggatattggtgccctcaagccaggtggacggcaagaatgtgacctgcaaggtggagcacgagagctttgagaagcctcagctgctgactgtgaacctcaccgtgtactaccccccagaggtatccatctctggctatgataacaactggtaccttggccagaatgaggccaccctgacctgcgatgctcgcagcaacccagagcccacaggctataattggagcacgaccatgggtcccctgccaccctttgctgtggcccagggcgcccagctcctgatccgtcctgtggacaaaccaatcaacacaactttaatctgcaacgtcaccaatgccctaggagctcgccaggcagaactgaccgtccaggtcaaagagggacctcccagtgagcactcaggcatgtcccgtaacgccatcatcttcctggttctgggaatcctggtttttctgatcctgctggggatcgggatttatttctattggtccaaatgttcccgtgaggtcctttggcactgtcatctgtgtccctcgagtacagagcatgccagcgcctcagctaatgggcatgtctcctattcagctgtgagcagagagaacagctcttcccaggatccacagacagagggcacaaggtgacagcgtcgggactgagaggggagagagactggagctggcaaggacgtgggcctccagagttggacccgaccccaatggatgaagaccccctccaaagagaccagcctccctccctgtgccagacctcaaaacgacgggggcaggtgcaagttcataggtctccaagaccaccctcctttcatttgctagaaggactcactagactcaggaaagctgttaggctcacagttacagtttattacagtaaaaggacagagattaagatcagcaaagggaggaggtgcacagcacacgttccacgacagatgaggcgacggcttccatctgccctctcccagtggagccatataggcagcacctgattctcacagcaacatgtgacaacatgcaagaagtactgccaatactgccaaccagagcagctcactcgagatctttgtgtccagagttttttgtttgtcttgagacagggtctggctctgttggcagactagagtacagtggtgagatcacagttcattgcagccttgacttctcaacgccaagtcatcctcccacctcagcctcctgagtagctatgactacaggtatgtgccaccacgtctggctaatctttttattatttgtaaagtcgaggtttccctgtgttgcccaggctggtcttgaactcttggctccaagtgatacttctgccttggcctcccaaagtgctgaattaagcagctcaccatccacacggctgacctcatacatcaagccaataccgtgtggcccaagacccccaccataaatcacatcattagcatgaaccacccagagtggcccaagactcccagatcagctaccaggcaggatattccaagggcttagagatgaatgcccaggagctgaggataaagggcccgatctttctttgggcaaggttaagcctttactgcatagcagaccacacagaagggtgtgggccaccagagaattttggtaaaaatttggcctctggccttgagcttctaaatctctgtatccgtcagatctctgtggttacaagaaacagccactgaccctggtcaccagaggctgcaattcaggccgcaagcagctgcctagggggtgtccaaggagcagagaaaactactagatgtgaacttgaagaaggttgtcagctgcagccactttctgccagcatctgcagccactttctgccagcatctgcagccagcaagctgggactggcaggaaataacccacaaaagaagcaaatgcaatttccaacacaagggggaagggatgcagggggaggcagcgctgcagttgctcaggacacgctcctataggaccaagatggatgcgacccaagacccaggaggcccagctgctcagtgcaactgacaagttaaaaaggtctatgatcttgagggcagacagcagaattcctcttataaagaaaactgtttgggaaaatacgttgagggagagaagaccttgggccaagatgctaaatgggaatgcaaagcttgagctgctctgcaagagaaaataagcaggacagaggatttgctctggacagagatggaagagccgggaacagagaagtgtggggaagagataggaaccagcaggatggcaggggcaaagggctcaagggtgaggaggccagtgggaccccacagagttggggagataaaggaacattggttgctttggtggcacgtaagctccttgtctgtctccagcacccagaatctcattaaagcttatttattgtacctccaaaaaaaaaaaaaaaaaaa

SEQ ID NO: 6316 - DNA, 1474 bp, Homo sapiens
  II.74 (NM_000075)
agccctcccagtttccgcgcgcctctttggcagctggtcacatggtgagggtgggggtgagggggcctctctagcttgcggcctgtgtctatggtcgggccctctgcgtccagctgctccggaccgagctcgggtgtatggggccgtaggaaccggctccggggccccgataacgggccgcccccacagcaccccgggctggcgtgagggtctcccttgatctgagaatggctacctctcgatatgagccagtggctgaaattggtgtcggtgcctatgggacagtgtacaaggcccgtgatccccacagtggccactttgtggccctcaagagtgtgagagtccccaatggaggaggaggtggaggaggccttcccatcagcacagttcgtgaggtggctttactgaggcgactggaggcttttgagcatcccaatgttgtccggctgatggacgtctgtgccacatcccgaactgaccgggagatcaaggtaaccctggtgtttgagcatgtagaccaggacctaaggacatatctggacaaggcacccccaccaggcttgccagccgaaacgatcaaggatctgatgcgccagtttctaagaggcctagatttccttcatgccaattgcatcgttcaccgagatctgaagccagagaacattctggtgacaagtggtggaacagtcaagctggctgactttggcctggccagaatctacagctaccagatggcacttacacccgtggttgttacactctggtaccgagctcccgaagttcttctgcagtccacatatgcaacacctgtggacatgtggagtgttggctgtatctttgcagagatgtttcgtcgaaagcctctcttctgtggaaactctgaagccgaccagttgggcaaaatctttgacctgattgggctgcctccagaggatgactggcctcgagatgtatccctgccccgtggagcctttccccccagagggccccgcccagtgcagtcggtggtacctgagatggaggagtcgggagcacagctgctgctggaaatgctgacttttaacccacacaagcgaatctctgcctttcgagctctgcagcactcttatctacataaggatgaaggtaatccggagtgagcaatggagtggctgccatggaaggaagaaaagctgccatttcccttctggacactgagagggcaatctttgcctttatctctgaggctatggagggtcctcctccatctttctacagagattactttgctgccttaatgacattcccctcccacctctccttttgaggcttctccttctccttcccatttctctacactaaggggtatgttccctcttgtccctttccctacctttatatttggggtccttttttatacaggaaaaacaaaacaaagaaataatggtcttttttttttttttaaaaaaaaaaaaaaaaaaaaaaaaaaaaaaaa

SEQ ID NO: 6317 - DNA, 4689 bp, Homo sapiens
  II.75 (XM_042066)
cgagccctgaggcaggcggcggcggaggagccctcaaggcgagcagcgcgcccgcggctgccgcgggactgctgcgggaggcgggcagcgggggccgcgagcgggcggactggcggcggcggcagctgcgcaaagtgcggagtgtggagctggaccagctgcctgagcagccgctcttccttgccgcctcaccgccggcctcctcgacttccccgtcgccggagcccgcggacgcagcggggagtgggaccggcttccagcctgtggcggtgccgccgccccacggagccgcgagccgcggcggcgcccaccttaccgagtcggtggcggcgccggacagcggcgcctcgagtcccgcagcggccgagcccggggagaagcgggcgcccgccgccgagccgtctcctgcagcggcccccgccggtcgtgagatggagaataaagaaactctcaaagggttgcacaagatggatgatcgtccagaggaacgaatgatcagggagaaactgaaggcaacctgtatgccagcctggaagcacgaatggttggaaaggagaaataggcgagggcctgtggtggtaaaaccaatcccagttaaaggagatggatctgaaatgaatcacttagcagctgagtctccaggagaggtccaggcaagtgcggcttcaccagcttccaaaggccgacgcagtccttctcctggcaactccccatcaggtcgcacagtgaaatcagaatctccaggagtaaggagaaaaagagtttccccagtgccttttcagagtggcagaatcacaccaccccgaagagccccttcaccagatggcttctcaccatatagccctgaggaaacaaaccgccgtgttaacaaagtgatgcgggccagactgtacttactgcagcagatagggcctaactctttcctgattggaggagacagcccagacaataaataccgggtgtttattgggcctcagaactgcagctgtgcacgtggaacattctgtattcatctgctatttgtgatgctccgggtgtttcaactagaaccttcagacccaatgttatggagaaaaactttaaagaattttgaggttgagagtttgttccagaaatatcacagtaggcgtagctcaaggatcaaagctccatctcgtaacaccatccagaagtttgtttcacgcatgtcaaattctcatacattgtcatcatctagtacttctacgtctagttcagaaaacagcataaaggatgaagaggaacagatgtgtcctatttgcttgttgggcatgcttgatgaagaaagtcttacagtgtgtgaagacggctgcaggaacaagctgcaccaccactgcatgtcaatttgggcagaagagtgtagaagaaatagagaacctttaatatgtcccctttgtagatctaagtggagatctcatgatttctacagccacgagttgtcaagtcctgtggattccccttcttccctcagagctgcacagcagcaaaccgtacagcagcagcctttggctggatcacgaaggaatcaagagagcaattttaaccttactcattatggaactcagcaaatccctcctgcttacaaagatttagctgagccatggattcaggtgtttggaatggaactcgttggctgcttattttctagaaactggaatgtgagagagatggccctcaggcgtctttcccatgatgtcagtggggccctgctgttggcaaatggggagagcactggaaattctgggggcagcagtggaagcagcccgagtgggggagccaccagtgggtcttcccagaccagtatctcaggagatgtggtggaggcatgctgcagcgttctgtcaatggtctgtgctgaccctgtctacaaagtgtacgttgctgctttaaaaacattgagagccatgctggtatatactccttgccacagtttagcggaaagaatcaaacttcagagacttctccagccagttgtagacaccatcctagtcaaatgtgcagatgccaatagccgcacaagtcagctgtccatatcaacactgttggaactgtgcaaaggccaagcaggagagttggcagttggcagagaaatactaaaagctggatccattggtattggtggtgttgattatgtcttaaattgtattcttggaaaccaaactgaatcaaacaattggcaagaacttcttggccgcctttgtcttatagatagactgttgttggaatttcctgctgaattttatcctcatattgtcagtactgatgtttcacaagctgagcctgttgaaatcaggtataagaagctgctgtccctcttaacctttgctttgcagtccattgataattcccactcaatggttggcaaactttccagaaggatctacttgagttctgcaagaatggttactacagtaccccatgtgttttcaaaactgttagaaatgctgagtgtttccagttccactcacttcaccaggatgcgtcgccgtttgatggctattgcagatgaggtggaaattgccgaagccatccagttgggcgtagaagacactttggatggtcaacaggacagcttcttgcaggcatctgttcccaacaactatctggaaaccacagagaacagttcccctgagtgcacagtccatttagagaaaactggaaaaggattatgtgctacaaaattgagtgccagttcagaggacatttctgagagactggccagcatttcagtaggaccttctagttcaacaacaacaacaacaacaacaacagagcaaccaaagccaatggttcaaacaaaaggcagaccccacagtcagtgtttgaactcctctcctttatctcatcattcccaattaatgtttccagccttgtcaaccccttcttcttctaccccatctgtaccagctggcactgcaacagatgtctctaagcatagacttcagggattcattccctgcagaataccttctgcatctcctcaaacacagcgcaagttttctctacaattccacagaaactgtcctgaaaacaaagactcagataaactttccccagtctttactcagtcaagacccttgccctccagtaacatacacaggccaaagccatctagacctaccccaggtaatacaagtaaacagggagatccctcaaaaaatagcatgacacttgatctgaacagtagttccaaatgtgatgacagctttggctgtagcagcaatagtagtaatgctgttatacccagtgacgagacagtgttcaccccagtagaggagaaatgcagattagatgtcaatacagagctcaactccagtattgaggaccttcttgaagcatctatgccttcaagtgatacaacagtaacttttaagtcagaagttgctgtcctgtctcctgaaaaggctgaaaatgatgatacctacaaagatgatgtgaatcataatcaaaagtgcaaagagaagatggaagctgaagaagaagaagctttagcaattgccatggcaatgtcagcgtctcaggatgccctccccatagttcctcagctgcaggttgaaaatggagaagatatcatcattattcaacaggatacaccagagactctaccaggacataccaaagcaaaacaaccgtatagagaagacactgaatggctgaaaggtcaacagataggccttggagcattttcttcttgttatcaggctcaagatgtgggaactggaactttaatggctgttaaacaggtgacttatgtcagaaacacatcttctgagcaagaagaagtagtagaagcactaagagaagagataagaatgatgagccatctgaatcatccaaacatcattaggatgttgggagccacgtgtgagaagagcaattacaatctcttcattgaatggatggcagggggatcggtggctcatttgctgagtaaatatggagccttcaaagaatcagtagttattaactacactgaacagttactccgtggcctttcgtatctccatgaaaaccaaatcattcacagagatgtcaaaggtgccaatttgctaattgacagcactggtcagagactaagaattgcagattttggagctgcagccaggttggcatcaaaaggaactggtgcaggagagtttcagggacaattactggggacaattgcatttatggcacctgaggtactaagaggtcaacagtatggaaggagctgtgatgtatggagtgttggctgtgctattatagaaatggcttgtgcaaaaccaccatggaatgcagaaaaacactccaatcatcttgctttgatatttaagattgctagtgcaactactgctccatcgatcccttcacatttgtctcctggtttacgagatgtggctcttcgttgtttagaacttcaacctcaggacagacctccatcaagagagctactgaagcatccagtctttcgtactacatggtagccaattatgcagatcaactacagtagaaacaggatgctcaacaagagaaaaaaaacttgtggggaaccacattgatattctactggccatgatgccactgaacagctatgaacgaggccagtggggaacccttacctaagtatgtgattgacaaatcatgatctgtacctaagctcagtatgcaaaagcccaaactagtgcagaaact

SEQ ID NO: 6318 - DNA, 2090 bp, Homo sapiens
  II.76 (NM_003242)
gttggcgaggagtttcctgtttcccccgcagcgctgagttgaagttgagtgagtcactcgcgcgcacggagcgacgacacccccgcgcgtgcacccgctcgggacaggagccggactcctgtgcagcttccctcggccgccgggggcctccccgcgcctcgccggcctccaggcccctcctggctggcgagcgggcgccacatctggcccgcacatctgcgctgccggcccggcgcggggtccggagagggcgcggcgcggagcgcagccaggggtccgggaaggcgccgtccgtgcgctgggggctcggtctatgacgagcagcggggtctgccatgggtcgggggctgctcaggggcctgtggccgctgcacatcgtcctgtggacgcgtatcgccagcacgatcccaccgcacgttcagaagtcggttaataacgacatgatagtcactgacaacaacggtgcagtcaagtttccacaactgtgtaaattttgtgatgtgagattttccacctgtgacaaccagaaatcctgcatgagcaactgcagcatcacctccatctgtgagaagccacaggaagtctgtgtggctgtatggagaaagaatgacgagaacataacactagagacagtttgccatgaccccaagctcccctaccatgactttattctggaagatgctgcttctccaaagtgcattatgaaggaaaaaaaaaagcctggtgagactttcttcatgtgttcctgtagctctgatgagtgcaatgacaacatcatcttctcagaagaatataacaccagcaatcctgacttgttgctagtcatatttcaagtgacaggcatcagcctcctgccaccactgggagttgccatatctgtcatcatcatcttctactgctaccgcgttaaccggcagcagaagctgagttcaacctgggaaaccggcaagacgcggaagctcatggagttcagcgagcactgtgccatcatcctggaagatgaccgctctgacatcagctccacgtgtgccaacaacatcaaccacaacacagagctgctgcccattgagctggacaccctggtggggaaaggtcgctttgctgaggtctataaggccaagctgaagcagaacacttcagagcagtttgagacagtggcagtcaagatctttccctatgaggagtatgcctcttggaagacagagaaggacatcttctcagacatcaatctgaagcatgagaacatactccagttcctgacggctgaggagcggaagacggagttggggaaacaatactggctgatcaccgccttccacgccaagggcaacctacaggagtacctgacgcggcatgtcatcagctgggaggacctgcgcaagctgggcagctccctcgcccgggggattgctcacctccacagtgatcacactccatgtgggaggcccaagatgcccatcgtgcacagggacctcaagagctccaatatcctcgtgaagaacgacctaacctgctgcctgtgtgactttgggctttccctgcgtctggaccctactctgtctgtggatgacctggctaacagtgggcaggtgggaactgcaagatacatggctccagaagtcctagaatccaggatgaatttggagaatgctgagtccttcaagcagaccgatgtctactccatggctctggtgctctgggaaatgacatctcgctgtaatgcagtgggagaagtaaaagattatgagcctccatttggttccaaggtgcgggagcacccctgtgtcgaaagcatgaaggacaacgtgttgagagatcgagggcgaccagaaattcccagcttctggctcaaccaccagggcatccagatggtgtgtgagacgttgactgagtgctgggaccacgacccagaggcccgtctcacagcccagtgtgtggcagaacgcttcagtgagctggagcatctggacaggctctcggggaggagctgctcggaggagaagattcctgaagacggctccctaaacactaccaaatagctcttatggggcaggctgggcatgtccaaagaggctgcccctctcaccaaa

SEQ ID NO: 6319 - DNA, 3299 bp, Homo sapiens
  II.77 (NM_003874)
ccacgcgtccgtgcttttccacagaaggttagaccctgaaagagatggctcagcaccacctatggatcttgctcctttgcctgcaaacctggccggaagcagctggaaaagactcagaaatcttcacagtgaatgggattctgggagagtcagtcactttccctgtaaatatccaagaaccacggcaagttaaaatcattgcttggacttctaaaacatctgttgcttatgtaacaccaggagactcagaaacagcacccgtagttactgtgacccacagaaattattatgaacggatacatgccttaggtccgaactacaatctggtcattagcgatctgaggatggaagacgcaggagactacaaagcagacataaatacacaggctgatccctacaccaccaccaagcgctacaacctgcaaatctatcgtcggcttgggaaaccaaaaattacacagagtttaatggcatctgtgaacagcacctgtaatgtcacactgacatgctctgtagagaaagaagaaaagaatgtgacatacaattggagtcccctgggagaagagggtaatgtccttcaaatcttccagactcctgaggaccaagagctgacttacacgtgtacagcccagaaccctgtcagcaacaattctgactccatctctgcccggcagctctgtgcagacatcgcaatgggcttccgtactcaccacaccgggttgctgagcgtgctggctatgttctttctgcttgttctcattctgtcttcagtgtttttgttccgtttgttcaagagaagacaagatgctgcctcaaagaaaaccatatacacatatatcatggcttcaaggaacacccagccagcagagtccagaatctatgatgaaatcctgcagtccaaggtgcttccctccaaggaagagccagtgaacacagtttattccgaagtgcagtttgctgataagatggggaaagccagcacacaggacagtaaacctcctgggacttcaagctatgaaattgtgatctaggctgctgggctgaattctccctctggaaactgagttacaaccaccaatactggcaggttccctggatccagatcttctctgcccaactcttactgggagattgcaaactgccacatctcagcctgtaagcaaagcaggaaaccttctgctgggcatagcttgtgcctaaatggacaaatggatgcatacccttcctgaaatgactcccttctgaatgaatgacaaagcaggttacctagtatagttttcccaaacttcttcccatcatagcacatgtagaaaataatatttttatggcacactgggataaacaagcaagattgctcacttctggaagctgcatatgactagaggcctcttgtgactggaggtaacaaccctgcccagtaactgtgggagaaggggatcaatattttgcacacctgtaataggccatggcacaccagccaagatgctctgctcacagtcagtatgtgtgaagatccctggtgcgtggccttcaccacgcatcttgagcaaattaggaaaatgtacccttcgcttgaggcagatgcagcccttcccccgagtgcatggcttggagagcagaatgtgggctgcatataagcacactcatccctttgtctgggaatctttgtgcagggcataacaggcttagtaagtccaaacacagatgacagtgctgtgtgggtctctgtcagagttgtggctctcagccatgtagacacactctccaaatggagtgttggaaaatgttctttctgcagggtctagagactgctgggacacttttcttggagtgctacttcagaagccttataggattttctttctggccaagatttccttctgtatcactccaagcagcctcagcagaagaagcagccatgcccagtattcccactctccaaaaggaactgaccagcttatatttctcacacttctggggaactgggtataatccaaccatcaaaatagaagaccttgcaagaagcagagtcattctccagaaggaacttgggagatgatggtgcagatgatgaaactgggttcatcccagttccaaagactcagagaactagagtttaagctgaggcagagtgccgccaccctggcatgccccacaaacagatcaccagccagcttacacaggcattaactctcctcaatgaggaagaatcattcacaactgagcaagacattcatatgatcatttaaggaagtgtttcccttatgtgttagcaagtataatcggctaactcctaaatcccaatgaatagtcctaggctggacagcaatgggctgcaattaggcagataaagacatcagtcccagtaaatgaatccatagactcatctagcaccaactaccattagcactatgttaggagctgcaaggccccaaagtagaagatgtgcataatgtctgctcttgtgtagctcaggagacaattccagcacagacactacagttaacgctgaactgcagctgcaagtaatagcatgaacagtcagaaaaataccttatgagggggcagggctgaagctgggccttgaaggatggatgaaatttggatagagaatgaggaagacagagggcctccaagtgagagaagcatgaaaaatgagcaggggcctggatcagtggggtgtattcagagcacctctccagatgcaccatgcatgctcacagtcccttgcctatgtgtggcagagtgtcccagccagatgtgtgcccccaccccatgtccatttacatgtccttcaatgcccacctcaaaaggtacctcttctgtaaagctttccctggtatcaggaatcaaaattaatcagggatcttttcacactgctgttttttcctctttggtccttctatcactaaaactcatctcattcagccttacagcataactaattatttgttttcctcactacattgtacatgtgggaattacagataaacggaagccggctggggtggtggctcacgcctgtaaccccaacactttgggaggccaaggcaggcggatcacctgaggtcaggagttcgagattagtctggccaacatggtgaaaccccatctctactaaaaatacgaaattagccaggtgtggtggcacacatctgtagtcccagctactctggaggctgagacaggagaatcgcttgaacccaggaagtggaggttgcagtgagctgagatcacaccactgcactccagcctgggagagagagagtgagtctccatctcaaaaaaaaaaaaaaaaa

SEQ ID NO: 6320 - DNA, 2558 bp, Homo sapiens
  II.78 (XM_033972)
aaaagtagtttgtctttactaggccaccgtctcgtcagcgttacggagtattttgtccgcctgccgccgccgtcccagatattaatcacggagttccagggagaaggaacttgtgaaatgggggagccggctggggttgccggcaccatggagtcaccttttagcccgggactctttcacaggctggatgaagattgggattctgctctctttgctgaactcggttatttcacagacactgatgagctgcaattggaagcagcaaatgagacgtatgaaaacaattttgataatcttgattttgatttggatttgatgccttgggagtcagacatttgggacatcaacaaccaaatctgtacagttaaagatattaaggcagaacctcagccactttctccagcctcctcaagttattcagtctcgtctcctcggtcagtggactcttattcttcaactcagcatgttcctgaggagttggatttgtcttctagttctcagatgtctcccctttccttatatggtgaaaactctaatagtctctcttcagcggagccactgaaggaagataagcctgtcactggtcctaggaacaagactgaaaatggactgactccaaagaaaaaaattcaggtgaattcaaaaccttcaattcagcccaagcctttattgcttccagcagcacccaagactcaaacaaactccagtgttccagcaaaaaccatcattattcagacagtaccaacgcttatgccattggcaaagcagcaaccaattatcagtttacaacctgcacccactaaaggccagacggttttgctgtctcagcctactgtggtacaacttcaagcacctggagttctgccctctgctcagccagtccttgctgttgctgggggagtcacacagctccctaatcacgtggtgaatgtggtaccagccccttcagcgaatagcccagtgaatggaaaactttccgtgactaaacctgtcctacaaagtaccatgagaaatgtcggttcagatattgctgtgctaaggagacagcaacgtatgataaaaaatcgagaatccgcttgtcagtctcgcaagaagaagaaagaatatatgctagggttagaggcgagattaaaggctgccctctcagaaaacgagcaactgaagaaagaaaatggaacactgaagcggcagctggatgaagttgtgtcagagaaccagaggcttaaagtccctagtccaaagcgaagagttgtctgtgtgatgatagtattggcatttataatactgaactatggacctatgagcatgttggaacaggattccaggagaatgaaccctagtgtgagccctgcaaatcaaaggaggcaccttctaggattttctgctaaagaggcacaggacacatcagatggtattatccagaaaaacagctacagatatgatcattctgtttcaaatgacaaagccctgatggtgctaactgaagaaccattgctttacattcctccacctccttgtcagcccctaattaacacaacagagtctctcaggttaaatcatgaacttcgaggatgggttcatagacatgaagtagaaaggaccaagtcaagaagaatgacaaataatcaacagaaaacccgtattcttcagggtgctctggaacagggctcaaattctcagctgatggctgttcaatacacagaaaccactagtagtatcagcaggaactcagggagtgagctacaagtgtattatgcttcacccagaagttatcaagacttttttgaagccatccgcagaaggggagacacattttatgttgtgtcatttcgaagggatcacctgctgttaccagctaccacccataacaagaccacaagaccaaaaatgtcaattgtgttaccagcaataaacataaatgagaatgtgatcaatgggcaggactacgaagtgatgatgcagattgactgtcaggtgatggacaccaggatcctccatatcaaaagttcgtcagttcctccttacctccgagatcagcagaggaatcaaaccaacaccttctttggctcccctcccgcagccacagaggcaacccacgttgtcagcaccatccctgagtcattacaatagcaccctgcagctatgctggaaaactgagcgtgggaccctgccagactgaagagcaggtgagcaaaatgctgctttctgccttggtggcaggcagagaactgtctcgtactagaattcaaggaggaaagaagaagaaataaaagaagctgctccatttttcatcatctacccatctatttggaaagcactggaattcagatgcaagagaacaatgtttcttcagtggcaaatgtagccctgcatcctccagtgttacctggtgtagatttttttttctgtacctttctaaacctctcttccctctgtgatggttttgtgtttaaacagtcatcttcttttaaataatatccacctctcctttttgccatttcacttattgattcataaagtgaattttatttaaagctatgccacacatgcatgttcaa

SEQ ID NO: 6321 - DNA, 828 bp, Homo sapiens
  II.79 (XM_001840)
caactctggagtcctctgagagagccaccaaggaggagcaggggagcgacggccggggcagaagttgagaccacccagcagaggagctaggccagtccatctgcatttgtcacccaagaactcttaccatgaagaccctcctactgttggcagtgatcatgatctttggcctactgcaggcccatgggaatttggtgaatttccacagaatgatcaagttgacgacaggaaaggaagccgcactcagttatggcttctacggctgccactgtggcgtgggtggcagaggatcccccaaggatgcaacggatcgctgctgtgtcactcatgactgttgctacaaacgtctggagaaacgtggatgtggcaccaaatttctgagctacaagtttagcaactcggggagcagaatcacctgtgcaaaacaggactcctgcagaagtcaactgtgtgagtgtgataaggctgctgccacctgttttgctagaaacaagacgacctacaataaaaagtaccagtactattccaataaacactgcagagggagcacccctcgttgctgagtcccctcttccctggaaaccttccacccagtgctgaatttccctctctcataccctccctccctaccctaaccaagttccttggccatgcagaaagcatccctcacccatcctagaggccaggcaggagcccttctatacccacccagaatgagacatccagcagatttccagccttctactgctctcctccacctcaactccgtgcttaaccaaagaagctgtactccggggggtctcttctgaataaagcaattagcaaatc

SEQ ID NO: 6322 - DNA, 1978 bp, Homo sapiens
  II.80 (NM_018310)
cgggggtgcaaccctttgaagtgtcccctcctacttcttgctgcctcacggttgctgttgcagacccaggagtctctgaaggcttccgcggctttggggccggttgtgagatgccaggcagaggccgctgcccggactgcggctccacggagctggtggaagactcgcactattcgcagagccagctggtgtgctccgactgcggctgcgtggtcaccgagggggtccttaccactaccttcagcgacgagggcaatctccgagaggtaacatattcccgaagcacaggggaaaacgaacaagttagtcgcagccagcaacgaggtctccggcgagtgagagacctttgtcgagttctgcagttgccaccaacatttgaggataccgcggttgcctactaccaacaggcatatcggcactctggcatccgagcggccaggctgcaaaagaaggaggtgttggttgggtgctgcgtcttaatcacctgccgacagcataactggcccctaacaatgggggccatctgcacgctgttgtatgcagatttggatgtgttttctagcacttacatgcagatagtgaagctcctgggactggatgtgccatctctgtgcttggcagaactggtgaagacctattgcagcagcttcaaactgttccaagcttcaccttctgtgccagccaaatacgtggaagacaaagagaagatgctgtctcgaacaatgcagttggtggagctggcaaatgagacgtggctggtgaccgggaggcatcccttgcccgtcatcactgctgcgactttcctggcttggcagtcgctgcagcctgcagatcggctttcatgttcccttgcccgattttgtaaattggcaaatgtggacctgccctacccggcgtcctcccgcctgcaggagctgctggctgtgctgctgcggatggctgagcagctggcctggttacgagttctgagacttgacaaacggtctgtggtgaagcacatcggtgaccttctccagcaccgccagtcactggtccgctctgcctttcgggatgggacagcagaagtggagacccgagagaaggagccaccggggtggggacaggggcaaggagaaggggaggtgggaaataattccttaggtttaccccaggggaagcggccggccagtcctgcccttctcttgccaccctgcatgttgaagtccccgaagcggatctgccctgtaccccctgtctccactgtcactggagatgagaacatttctgatagtgaaatagaacagtatttgcgtacccctcaggaagttagggactttcagagagcccaggctgctagacaggctgccacgagtgtccctaaccctccctgatggatatccactgggagcacttcatcctgttctgacagcttgataacattcctgttataaccaaggatggaagtgtacaccagtccgtaggtattgcttttcttgtttgaaggaaccaagaggggctctgccattagttggaccctgggtcctggagtaaagtcaggagtgcagggatgactataggtaggagagattcccatcccttggtgtgggagagcaagttgcctatgtccatgttctgtgagatggctttcctcatagatggatgggaaaatgtcaggctctttgctgctggtttgaattggacacactgctgcggctcctcctgcaggcctgagggggcttccctctgcttgtggagtggttggcattcccagcagtatcaaccctcagaggagcgggaactggggaattctggccctacgtgcattcacaggcaatgatgggtttgtgtgtatggtgtcatgagatcctctacctcataacaaaaggacagtgggtagactaaggcagtagctcaaagggctttgcaaaattttaatatattaaaacaagaggcatctgctagaaaacattctattgtataaaacccgagttcttaaaaa

SEQ ID NO: 6323 - DNA, 1816 bp, Homo sapiens
  II.81 (AF212365)
gcacgagcgatgtcgctcgtgctgctaagcctggccgcgctgtgcaggagcgccgtaccccgagagccgaccgttcaatgtggctctgaaactgggccatctccagagtggatgctacaacatgatctaatccccggagacttgagggacctccgagtagaacctgttacaactagtgttgcaacaggggactattcaattttgatgaatgtaagctgggtactccgggcagatgccagcatccgcttgttgaaggccaccaagatttgtgtgacgggcaaaagcaacttccagtcctacagctgtgtgaggtgcaattacacagaggccttccagactcagaccagaccctctggtggtaaatggacattttcctacatcggcttccctgtagagctgaacacagtctatttcattggggcccataatattcctaatgcaaatatgaatgaagatggcccttccatgtctgtgaatttcacctcaccaggctgcctagaccacataatgaaatataaaaaaaagtgtgtcaaggccggaagcctgtgggatccgaacatcactgcttgtaagaagaatgaggagacagtagaagtgaacttcacaaccactcccctgggaaacagatacatggctcttatccaacacagcactatcatcgggttttctcaggtgtttgagccacaccagaagaaacaaacgcgagcttcagtggtgattccagtgactggggatagtgaaggtgctacggtgcagctgactccatattttcctacttgtggcagcgactgcatccgacataaaggaacagttgtgctctgcccacaaacaggcgtccctttccctctggataacaacaaaagcaagccgggaggctggctgcctctcctcctgctgtctctgctggtggccacatgggtgctggtggcagggatctatctaatgtggaggcacgaaaggatcaagaagacttccttttctaccaccacactactgccccccattaaggttcttgtggtttacccatctgaaatatgtttccatcacacaatttgttacttcactgaatttcttcaaaaccattgcagaagtgaggtcatccttgaaaagtggcagaaaaagaaaatagcagagatgggtccagtgcagtggcttgccactcaaaagaaggcagcagacaaagtcgtcttccttctttccaatgacgtcaacagtgtgtgcgatggtacctgtggcaagagcgagggcagtcccagtgagaactctcaagactcttccccttgcctttaaccttttctgcagtgatctaagaagccagattcatctgcacaaatacgtggtggtctactttagagagattgatacaaaagacgattacaatgctctcagtgtctgccccaagtaccacctcatgaaggatgccactgctttctgtgcagaacttctccatgtcaagtagcaggtgtcagcaggaaaaagatcacaagcctgccacgatggctgctgctccttgtagcccacccatgagaagcaagagaccttaaaggcttcctatcccaccaattacagggaaaaaacgtgtgatgatcctgaagcttactatgcagcctacaaacagccttagtaattaaaacattttataccaataaaattttcaaatattgctaactaatgtagcattaactaacgattggaaactacatttacaacttcaaagctgttttatacatagaaatcaattacagttttaattgaaaactataaccattttgataatgcaacaataaagcatcttcagccaaaaaaaaaaaaaaaa

SEQ ID NO: 6324 - DNA, 1281 bp, Homo sapiens
  II.82 (XM_056798)
ccggcccgcgccccgcaggccgcccgccgcccgcgccgccatgggagtggagggctgcaccaagtgcatcaagtacctgctcttcgtcttcaatttcgtcttctggctggctggaggcgtgatcctgggtgtggccctgtggctccgccatgacccgcagaccaccaacctcctgtatctggagctgggagacaagcccgcgcccaacaccttctatgtaggcatctacatcctcatcgctgtgggcgctgtcatgatgttcgttggcttcctgggctgctacggggccatccaggaatcccagtgcctgctggggacgttcttcacctgcctggtcatcctgtttgcctgtgaggtggccgccggcatctggggctttgtcaacaaggaccagatcgccaaggatgtgaagcagttctatgaccaggccctacagcaggccgtggtggatgatgacgccaacaacgccaaggctgtggtgaagaccttccacgagacgcttgactgctgtggctccagcacactgactgctttgaccacctcagtgctcaagaacaatttgtgtccctcgggcagcaacatcatcagcaacctcttcaaggaggactgccaccagaagatcgatgacctcttctccgggaagctgtacctcatcggcattgctgccatcgtggtcgctgtgatcatgatcttcgagatgatcctgagcatggtgctgtgctgtggcatccggaacagctccgtgtactgaggccccgcagctctggccacagggacctctgcagtgccccctaagtgacccggacacttccgagggggccatcaccgcctgtgtatataacgtttccggtattactctgctacacgtagcctttttacttttggggttttgtttttgttctgaactttcctgttaccttttcagggctgacgtcacatgtaggtggcgtgtatgagtggagacgggcctgggtcttggggactggagggcaggggtccttctgccctggggtcccagggtgctctgcctgctcagccaggcctctcctgggagccactcgcccagagactcagcttggccaacttggggggctgtgtccacccagcccgcccgtcctgtgggctgcacagctcaccttgttccctcctgccccggttcgagagccgagtctgtgggcactctctgccttcatgcacctgtcctttctaacacgtcgccttcaactgtaatcacaacatcctgactccgtcatttaataaagaaggaacatcaggcatgct

SEQ ID NO: 6325 - DNA, 2591 bp, Homo sapiens
  II.83 (NM_000061)
ctcagactgtccttcctctctggactgtaagaatatgtctccagggccagtgtctgctgcgatcgagtcccaccttccaagtcctggcatctcaatgcatctgggaagctacctgcattaagtcaggactgagcacacaggtgaactccagaaagaagaagctatggccgcagtgattctggagagcatctttctgaagcgatcccaacagaaaaagaaaacatcacctctaaacttcaagaagcgcctgtttctcttgaccgtgcacaaactctcctactatgagtatgactttgaacgtgggagaagaggcagtaagaagggttcaatagatgttgagaagatcacttgtgttgaaacagtggttcctgaaaaaaatcctcctccagaaagacagattccgagaagaggtgaagagtccagtgaaatggagcaaatttcaatcattgaaaggttcccttatcccttccaggttgtatatgatgaagggcctctctacgtcttctccccaactgaagaactaaggaagcggtggattcaccagctcaaaaacgtaatccggtacaacagtgatctggttcagaaatatcacccttgcttctggatcgatgggcagtatctctgctgctctcagacagccaaaaatgctatgggctgccaaattttggagaacaggaatggaagcttaaaacctgggagttctcaccggaagacaaaaaagcctcttcccccaacgcctgaggaggaccagatcttgaaaaagccactaccgcctgagccagcagcagcaccagtctccacaagtgagctgaaaaaggttgtggccctttatgattacatgccaatgaatgcaaatgatctacagctgcggaagggtgatgaatattttatcttggaggaaagcaacttaccatggtggagagcacgagataaaaatgggcaggaaggctacattcctagtaactatgtcactgaagcagaagactccatagaaatgtatgagtggtattccaaacacatgactcggagtcaggctgagcaactgctaaagcaagaggggaaagaaggaggtttcattgtcagagactccagcaaagctggcaaatatacagtgtctgtgtttgctaaatccacaggggaccctcaaggggtgatacgtcattatgttgtgtgttccacacctcagagccagtattacctggctgagaagcaccttttcagcaccatccctgagctcattaactaccatcagcacaactctgcaggactcatatccaggctcaaatatccagtgtctcaacaaaacaagaatgcaccttccactgcaggcctgggatacggatcatgggaaattgatccaaaggacctgaccttcttgaaggagctggggactggacaatttggggtagtgaagtatgggaaatggagaggccagtacgacgtggccatcaagatgatcaaagaaggctccatgtctgaagatgaattcattgaagaagccaaagtcatgatgaatctttcccatgagaagctggtgcagttgtatggcgtctgcaccaagcagcgccccatcttcatcatcactgagtacatggccaatggctgcctcctgaactacctgagggagatgcgccaccgcttccagactcagcagctgctagagatgtgcaaggatgtctgtgaagccatggaatacctggagtcaaagcagttccttcaccgagacctggcagctcgaaactgtttggtaaacgatcaaggagttgttaaagtatctgatttcggcctgtccaggtatgtcctggatgatgaatacacaagctcagtaggctccaaatttccagtccggtggtccccaccggaagtcctgatgtatagcaagttcagcagcaaatctgacatttgggcttttggggttttgatgtgggaaatttactccctggggaagatgccatatgagagatttactaacagtgagactgctgaacacattgcccaaggcctacgtctctacaggcctcatctggcttcagagaaggtatataccatcatgtacagttgttggcatgagaaagcagatgagcgtcccactttcaaaattcttctgagcaatattctagatgtcatggatgaagaatcctgagctcgccaataagcttcttggttctacttctcttctccacaagccccaatttcactttctcagaggaaatcccaagcttaggagccctggagcctttgtgctcccactcaatacaaaaaggcccctctctacatctggggatgcacctcttctttgattccctgggatagtggcttctgagcaaaggccaaaaaattattgtgcctgaaatttcccgagagaattaagacagactgaatttgcgatgaaaatattttttaggagggaggatgtaaatagccgcacaaaggggtccaacagctctttgagtaggcatttggtagagcttgggggtgtgtgtgtgggggtggaccgaatttggcaagaatgaaatggtgtcataaagatgggaggggagggtgttttgataaaataaattctagaaagcttaaaaaaaaaaaaaaaaaaa

SEQ ID NO: 6326 - DNA, 3321 bp, Homo sapiens
  II.84 (XM_001472)
gacatcatgggctatttttaggggttgactggtagcagataagtgttgagctcgggctggataagggctcagagttgcactgagtgtggctgaagcagcgaggcgggagtggaggtgcgcggagtcaggcagacagacagacacagccagccagccaggtcggcagtatagtccgaactgcaaatcttattttcttttcaccttctctctaactgcccagagctagcgcctgtggctcccgggctggtgtttcgggagtgtccagagagcctggtctccagccgcccccgggaggagagccctgctgcccaggcgctgttgacagcggcggaaagcagcggtacccacgcgcccgccgggggaagtcggcgagcggctgcagcagcaaagaactttcccggctgggaggaccggagacaagtggcagagtcccggagccaacttttgcaagcctttcctgcgtcttaggcttctccacggcggtaaagaccagaaggcggcggagagccacgcaagagaagaaggacgtgcgctcagcttcgctcgcaccggttgttgaacttgggcgagcgcgagccgcggctgccgggcgccccctccccctagcagcggaggaggggacaagtcgtcggagtccgggcggccaagacccgccgccggccggccactgcagggtccgcactgatccgctccgcggggagagccgctgctctgggaagtgagttcgcctgcggactccgaggaaccgctgcgcacgaagagcgctcagtgagtgaccgcgacttttcaaagccgggtagcgcgcgcgagtcgacaagtaagagtgcgggaggcatcttaattaaccctgcgctccctggagcgagctggtgaggagggcgcagcggggacgacagccagcgggtgcgtgcgctcttagagaaactttccctgtcaaaggctccggggggcgcgggtgtcccccgcttgccacagccctgttgcggccccgaaacttgtgcgcgcagcccaaactaacctcacgtgaagtgacggactgttctatgactgcaaagatggaaacgaccttctatgacgatgccctcaacgcctcgttcctcccgtccgagagcggaccttatggctacagtaaccccaagatcctgaaacagagcatgaccctgaacctggccgacccagtggggagcctgaagccgcacctccgcgccaagaactcggacctcctcacctcgcccgacgtggggctgctcaagctggcgtcgcccgagctggagcgcctgataatccagtccagcaacgggcacatcaccaccacgccgacccccacccagttcctgtgccccaagaacgtgacagatgagcaggagggcttcgccgagggcttcgtgcgcgccctggccgaactgcacagccagaacacgctgcccagcgtcacgtcggcggcgcagccggtcaacggggcaggcatggtggctcccgcggtagcctcggtggcagggggcagcggcagcggcggcttcagcgccagcctgcacagcgagccgccggtctacgcaaacctcagcaacttcaacccaggcgcgctgagcagcggcggcggggcgccctcctacggcgcggccggcctggcctttcccgcgcaaccccagcagcagcagcagccgccgcaccacctgccccagcagatgcccgtgcagcacccgcggctgcaggccctgaaggaggagcctcagacagtgcccgagatgcccggcgagacaccgcccctgtcccccatcgacatggagtcccaggagcggatcaaggcggagaggaagcgcatgaggaaccgcatcgctgcctccaagtgccgaaaaaggaagctggagagaatcgcccggctggaggaaaaagtgaaaaccttgaaagctcagaactcggagctggcgtccacggccaacatgctcagggaacaggtggcacagcttaaacagaaagtcatgaaccacgttaacagtgggtgccaactcatgctaacgcagcagttgcaaacattttgaagagagaccgtcgggggctgaggggcaacgaagaaaaaaaataacacagagagacagacttgagaacttgacaagttgcgacggagagaaaaaagaagtgtccgagaactaaagccaagggtatccaagttggactgggttgcgtcctgacggcgcccccagtgtgcacgagtgggaaggacttggcgcgccctcccttggcgtggagccagggagcggccgcctgcgggctgccccgctttgcggacgggctgtccccgcgcgaacggaacgttggacttttcgttaacattgaccaagaactgcatggacctaacattcgatctcattcagtattaaaggggggagggggagggggttacaaactgcaatagagactgtagattgcttctgtagtactccttaagaacacaaagcggggggagggttggggaggggcggcaggagggaggtttgtgagagcgaggctgagcctacagatgaactctttctggcctgccttcgttaactgtgtatgtacatatatatattttttaatttgatgaaagctgattactgtcaataaacagcttcatgcctttgtaagttatttcttgtttgtttgtttgggtatcctgcccagtgttgtttgtaaataagagatttggagcactctgagtttaccatttgtaataaagtatataatttttttatgttttgtttctgaaaattccagaaaggatatttaagaaaatacaataaactattggaaagtactcccctaacctcttttctgcatcatctgtagatactagctatctaggtggagttgaaagagttaagaatgtcgattaaaatcactctcagtgcttcttactattaagcagtaaaaactgttctctattagactttagaaataaatgtacctgatgtacctgatgctatggtcaggttatactcctcctcccccagctatctatatggaattgcttaccaaaggatagtgcgatgtttcaggaggctggaggaaggggggttgcagtggagagggacagcccactgagaagtcaaacatttcaaagtttggattgtatcaagtggcatgtgctgtgaccatttataatgttagtagaaattttacaataggtgcttattctcaaagcaggaattggtggcagattttacaaaagatgtatccttccaatttggaatcttctctttgacaattcctagataaaaagatggcctttgcttatgaatatttataacagcattcttgtcacaataaatgtattcaaatacc

SEQ ID NO: 6327 - DNA, 4175 bp, Homo sapiens
  II.85 (XM_007258)
ccagggtgatgctgaagatgatgaccttcttccaaggcctctagagccatcagcctgtgccaggcaccctcgacttgcctagaggcccccaaaagttgcagtccacatcagaggcagagtcagaggcctccatgtcggaggcctcctctgaggacctggtgccacccctggaggctggggcagccccatatagggaggaggaagaggcggcgaagaagaagaaggagaagaagaagaagtccaaaggcctggccaatgtgttctgcgtcttcaccaaagggaagaagaagaagggtcagcccagctcagcggagcccgaggacgcagccgggtccaggcaggggctggatggcccgccccccacagtggaggagctgaaggcggcgctggagcgcgggcagctggaggcggcgcggccgctgctggcgctggagcgggagctggcggcggcggcggcggcgggcggtgtgagcgaggaggagctggtgcggcgccagagcaaggtggaggcgctgtacgagctgctgcgcgaccaggtgctgggcgtgctgcggcggccgctggaggcgccgcccgagcggctgcgccaggcgctggccgtggtggcggagcaggagcgcgaggaccgccaggcggcggcggcggggccggggacctcggggctggcggccacgcgcccgcggcgctggctgcagctgtggcggcgcggcgtggcggaggcggccgaggagcgcatgggccagcggccggccgcgggcgccgaggtccccgagagcgtctttctgcacttgggccgcaccatgaaggaggacctggaggccgtggtggagcggctgaagccgctgttccccgccgagttcggcgtcgtggcggcctacgccgagagctaccaccagcacttcgcggcccacctggccgccgtggcgcagttcgagctgtgcgagcgcgacacctacatgctgctgctctgggtgcagaacctctaccccaatgacatcatcaacagccccaagctggtgggtgagctgcagggtatggggctcgggagcctcctgccccccaggcagatccgactgctggaggccacattcctgtccagtgaggcggccaatgtgagggagttgatggaccgagctctggagctagaggcacggcgctgggctgaggatgtgcctccccagaggctggacggccactgccacagcgagctggccatcgacatcatccagatcacctcccaggcccaggccaaggccgagagcatcacgctggacttgggctcacagataaagcgggtgctgctggtggagctgcctgcgttcctgaggagctaccagcgcgcctttaatgaatttctggagagaggcaagcagctgacgaattacagggccaatgttattgccaacatcaacaactgcctgtccttccggatgtccatggagcagaattggcaggtaccccaggacaccctgagcctcctgctgggccccctgggtgagctcaagagccacggctttgacaccctgctccagaacctgcatgaggacctgaagccactgttcaagaggttcacgcacacccgctgggcggcccctgtggagaccctggaaaacatcatcgccactgtagacacgaggctgcctgagttctcagagctgcagggctgtttccgggaggagctcatggaggccttgcacctgcacctggtgaaggagtacatcatccaactcagcaaggggcgcctggtcctcaagacggccgagcagcagcagcagctggctgggtacatcctggccaatgctgacaccatccagcacttctgcacccagcacggctccccggcgacctggctgcagcctgctctccctacgctggccgagatcattcgcctgcaggaccccagtgccatcaagattgaggtggccacttatgccacctgctaccctgacttcagcaaaggccacctgagcgctatcctggccatcaaggggaacctatccaacagtgaggtcaagcgcatccggagcatcttggacgtcagcatgggggcgcaggagccctcccggcccctattttcccttataaaggttggttagcttttcctgtggcctgacctgcctgtgagtgcccagcaagccttgggcacaccccgctgggagctgttaagagcagcgctggttctcggttcctcccgggtctcctgtgctctgatgctacttctgcctagccctggcggaggtgcaggccctgtcagctggaactggacagaccttggtttgtttacatgtccgatgggggcaggagctcccatcctgggcagccaaccaggcaacaccaaggactctttgtaaacgatagctgatcgtgtgcacgcaaggaaagaaccaggagggagagtgcagccaggctcagggatccccggacacctctgtccagagcccctccacagtcggcctcatgactgtcctcctcgtgggtggggccgagggccctcttcagctctctggagacaggggccgagcctcacccatctgccctctgcagcccagggccgccgtgagcgggattcagcaatggtggaatggaagacagaactggaagagaaagaaggaaaagatgagctctcgtctggcaggggcttttagggtcctgtggcgagctgtgagcaccgccagcattagacgtcacatccaggtggccccacggcccctacaggctggccctgcaatggggccctgagccctccctcttcatcccccaaggcctcaactagagggtggtcccccgagggcttggtgtctactaccgaagggcccaagacctcctgggtcctctcaggctcccccttccccaaggcagggacaggccctgggggtgccaccgtgggccctgccacccagaagtctggctgaggtctgggcaggggcagggcaagcttgacctctcactgttgaccctttggcctctgtatttgtttcctattgccgtgacaggtttccacaaacttcgtggatcaaaacgaggtcttccagttctgcgggtcagaaggctgacccggggctcaaatctgggtgtcggcagtcctgcactccttctggaggctctaggggagaattcatttctggccttttcatttttagaggctgaccgtaattcttgacttcaggctcctccatcttcagagccagctgtgggtagttgaatctttttcccgtcacctcattgaggcctcccctctcctgcctccctccaccacttttttttttttttttttgagacagggtcttgctgtgttgcccaggctggagtgcagtggcctggtcatggcatcaaggctcactgcagcctggacctcctggttcaagtgatcctcttgtctcagtcccctgagacaatcccccacgcccagctacatattttttgtggatacagggtctcattctgttgcctaggcttgtctggaactcctgggctcaagggatcttgtagccttagcctcctaaagtgctgggattataggcatgagtcactgtacccggcctgctctaccgcttttaaggacgcttatgatcacattgcgcctacccagagaacccaggtcgtctttctattttcaggtcagctgattagccaccttagttccatctgcaactttagttcccactggctgtgtaacctaacatagtcacaggctctggggactgtcacgtggacatctttgggaggccgttattctgcccaccgcaccctccgttcatcccctgccctgccgggcacctcgctctaccccaggaaaatgtgagctcgttttcctgctcggcatgtgctccccctaaggctctgctcctccctgggcctgaaagttccttctcagcctgagagggggcccttcggactcaggcatgactcagcccggctgatgcctctgcagtgctgagtcaggatttggggccggctctcttgggtccgtccccttttcccaggtactgccttacaaagctgtggccaggaagtggccggtataaaggatgcccaaggtctttgtacgtgtgtaggagttagcgtgtttgatattgttaatataataataattattttttagagtactgcttttgtatgtatgttgaacaggatccaggtttttatagcttgatataaaacagaattcaaaagtg

SEQ ID NO: 6328 - DNA, 1389 bp, Homo sapiens
  II.86 (XM_048555)
gcccccgcgccggcggcggcgcggcgcccgcgcttccgtatcgctcctcgtaggccggggctcggcgcgcgcacccgcactaaagacgcttcttcccggcgggtaggaatcccgccggcgagccgaacagttccccgagcgcagcccgcggaccaccacccggccgcacgggccgcttttgtcccccgcccgccgcttctgtccgagaggccgcccgcgaggcgcatcctgaccgcgagcgtcgggtcccagagccgggcgcggctggggcccgaggctagcatctctcgggagccgcaaggcgagagctgcaaagatgtaaaagtcaagagaagactctaaaaatagcaaagatgcttttgagccagaatgccttcatcttcagatcacttaatttggttctcatggtgtatatcagcctcgtgtttggtatttcatatgattcgcctgattacacagatgaatcttgcactttcaagatatcattgcgaaatttccggtccatcttatcatgggaattaaaaaaccactccattgtaccaactcactatacattgctgtatacaatcatgagtaaaccagaagatttgaaggtggttaagaactgtgcaaataccacaagatcattttgtgacctcacagatgagtggagaagcacacacgaggcctatgtcaccgtcctagaaggattcagcgggaacacaacgttgttcagttgctcacacaatttctggctggccatagacatgtcttttgaaccaccagagtttgagattgttggttttaccaaccacattaatgtgatggtgaaatttccatctattgttgaggaagaattacagtttgatttatctctcgtcattgaagaacagtcagagggaattgttaagaagcataaacccgaaataaaaggaaacatgagtggaaatttcacctatatcattgacaagttaattccaaacacgaactactgtgtatctgtttatttagagcacagtgatgagcaagcagtaataaagtctcccttaaaatgcaccctccttccacctggccaggaatcagaatcagcagaatctgccaaaataggaggaataattactgtgtttttgatagcattggtcttgacaagcaccatagtgacactgaaatggattggttatatatgcttaagaaatagcctccccaaagtcttgaggcaaggtctcgctaagggctggaatgcagtggctattcacaggtgcagtcataatgcactacagtctgaaactcctgagctcaaacagtcgtcctgcctaagcttccccagtagctgggattacaagcgtgcatccctgtgccccagtgattaagttttattatgtagaaaataaagagcaaacagtacagctg

SEQ ID NO: 6329 - DNA, 2084 bp, Homo sapiens
  II.87 (XM_041060)
aaccgcatctgcagcgagcatctgagaagccaagactgagccggcggccgcggcgcagcgaacgagcagtgaccgtgctcctacccagctctgctccacagcgcccacctgtctccgcccctcggcccctcgcccggctttgcctaaccgccacgatgatgttctcgggcttcaacgcagactacgaggcgtcatcctcccgctgcagcagcgcgtccccggccggggatagcctctcttactaccactcacccgcagactccttctccagcatgggctcgcctgtcaacgcgcaggacttctgcacggacctggccgtctccagtgccaacttcattcccacggtcactgccatctcgaccagtccggacctgcagtggctggtgcagcccgccctcgtctcctccgtggccccatcgcagaccagagcccctcaccctttcggagtccccgccccctccgctggggcttactccagggctggcgttgtgaagaccatgacaggaggccgagcgcagagcattggcaggaggggcaaggtggaacagttatctccagaagaagaagagaaaaggagaatccgaagggaaaggaataagatggctgcagccaaatgccgcaaccggaggagggagctgactgatacactccaagcggagacagaccaactagaagatgagaagtctgctttgcagaccgagattgccaacctgctgaaggagaaggaaaaactagagttcatcctggcagctcaccgacctgcctgcaagatccctgatgacctgggcttcccagaagagatgtctgtggcttcccttgatctgactgggggcctgccagaggttgccaccccggagtctgaggaggccttcaccctgcctctcctcaatgaccctgagcccaagccctcagtggaacctgtcaagagcatcagcagcatggagctgaagaccgagccctttgatgacttcctgttcccagcatcatccaggcccagtggctctgagacagcccgctccgtgccagacatggacctatctgggtccttctatgcagcagactgggagcctctgcacagtggctccctggggatggggcccatggccacagagctggagcccctgtgcactccggtggtcacctgtactcccagctgcactgcttacacgtcttccttcgtcttcacctaccccgaggctgactccttccccagctgtgcagctgcccaccgcaagggcagcagcagcaatgagccttcctctgactcgctcagctcacccacgctgctggccctgtgagggggcagggaaggggaggcagccggcacccacaagtgccactgcccgagctggtgcattacagagaggagaaacacatcttccctagagggttcctgtagacctagggaggaccttatctgtgcgtgaaacacaccaggctgtgggcctcaaggacttgaaagcatccatgtgtggactcaagtccttacctcttccggagatgtagcaaaacgcatggagtgtgtattgttcccagtgacacttcagagagctggtagttagtagcatgttgagccaggcctgggtctgtgtctcttttctctttctccttagtcttctcatagcattaactaatctattgggttcattattggaattaacctggtgctggatattttcaaattgtatctagtgcagctgattttaacaataactactgtgttcctggcaatagtgtgttctgattagaaatgaccaatattatactaagaaaagatacgactttattttctggtagatagaaataaatagctatatccatgtactgtagtttttcttcaacatcaatgttcattgtaatgttactgatcatgcattgttgaggtggtctgaatgttctgacattaacagttttccatgaaaacgttttattgtgtttttaatttatttattaagatggattctcagatatttatatttttattttatttttttctaccttgaggtcttttgacatgtggaaagtgaatttgaatgaaaaatttaagcattgtttgcttattgttccaagacattgtcaataaa

SEQ ID NO: 6330 - DNA, 858 bp, Homo sapiens
  II.88 (XM_056556)
gccccgggagggggctgcagtttccttccttccttctcggcagcgctccgcgcccccatcgcccctcctgcgctagcggaggtgatcgccgcggcgatgccggaggagggttcgggctgctcggtgcggcgcaggccctatgggtgcgtcctgcgggctgctttggtcccattggtcgcgggcttggtgatctgcctcgtggtgtgcatccagcgcttcgcacaggctcagcagcagctgccgctcgagtcacttgggtgggacgtagctgagctgcagctgaatcacacaggacctcagcaggaccccaggctatactggcaggggggcccagcactgggccgctccttcctgcatggaccagagctggacaaggggcagctacgtatccatcgtgatggcatctacatggtacacatccaggtgacgctggccatctgctcctccacgacggcctccaggcaccaccccaccaccctggccgtgggaatctgctctcccgcctcccgtagcatcagcctgctgcgtctcagcttccaccaaggttgtaccattgcctcccagcgcctgacgcccctggcccgaggggacacactctgcaccaacctcactgggacacttttgccttcccgaaacactgatgagaccttctttggagtgcagtgggtgcgcccctgaccactgctgctgattagggttttttaaattttattttattttatttaagttcaagagaaaaagtgtacacacaggggccacccggggttggggtgggagtgtggtggggcgtagtggtggcaggacaagagaaggcattgagctttttctttcattttcctattaaaaaatacaaaaatc

SEQ ID NO: 6331 - DNA, 5061 bp, Homo sapiens
  II.89 (XM_016747)
gtgggctctctcttttcccctcttgctcctttcttttctttttttctgtttttttaaaccttccaaggcaagttcatggatactaagctgatgtgtttgttgttctttttctccctgcctccgctcctagtgagtaaccacactggccgcatcaaggtggtctttactccgagcatctgtaaagtgacctgcaccaagggcagctgtcagaacagctgtgagaaggggaacaccaccactctcattagtgagaatggtcatgctgccgacaccctgacggccacgaacttccgagtggtaatttgccatcttccatgtatgaatggtggccagtgcagttcaagggacaaatgtcagtgccctccaaatttcacaggaaaactttgtcagatcccagtccatggtgccagcgtgcctaaactttatcagcattcccagcagccaggcaaggcgttggggacgcatgtcatccattcaacacataccttgcctctgaccgtgactagccagcaaggagtcaaagtgaaatttcctcctaacatagtcaatatccatgtgaaacatcctcctgaagcttccgtccagatacatcaggtttcaagaattgatggcccaacaggccagaagacaaaagaagctcaaccaggccaatcccaagtctcgtaccaagggcttcctgtccagaagacccagaccatacattccacatactcccaccagcaggtcattcctcacgtctaccccgtggctgctaagacacagcttggccggtgcttccaggaaaccattgggtcacagtgtggcaaagcgctccctggcctttcaaagcaagaggactgctgtggaactgtgggtacctcctggggctttaacaaatgccagaaatgccccaagaaaccatcttatcatggatacaaccaaatgatggaatgcctaccgggttataagcgggttaacaacaccttttgccaagatattaatgaatgtcagctacaaggtgtatgccctaatggtgagtgtttgaataccatgggcagctatcgatgtacctgcaaaataggatttgggccggatcctaccttttcaagttgtgttcctgatccccctgtgatctcggaagagaaagggccctgttaccgacttgtcagttctggaagacagtgtatgcaccctctgtctgttcacctcaccaagcagctctgctgttgtagtgtgggcaaggcctggggcccacactgtgagaaatgtccccttccaggcacagctgcttttaaggaaatctgtcctggtggaatgggttatacggtttctggcgttcatagacgcaggccaatccatcaccatgtaggtaaaggacctgtatttgtcaagccaaagaacactcaacctgttgctaaaagtactcatcctccacctctcccagccaaggaagagccagtggaggccctgaccttctcccgggaacacgggccaggagtggcggagccagaagtggcaactgcaccccctgaaaaggaaataccttcattggatcaagagaaaaccaaacttgagcctggtcaaccccagctgtctccaggcatttccactattcatctgcatccacagtttccagtagtgattgaaaaaacatcacctcctgtgcctgttgaagtagctcctgaagcttctacgtctagtgccagccaagtgattgctcctactcaagtgacagaaatcaatgaatgtactgtgaaccctgatatctgtggagcaggacactgcattaacctaccagtgagatatacctgtatatgctacgagggctacaggttcagtgaacaacagaggaaatgtgtggatattgatgagtgtactcaggtccaacacctctgctcccagggccgctgtgaaaacaccgagggaagtttcttgtgcatttgcccagcaggatttatggccagtgaggagggtactaactgcatagatgttgacgaatgcctgaggccggacgtctgtggggaggggcactgtgtcaatactgtgggggccttccggtgtgaatactgtgacagcgggtaccgcatgactcagagaggccgttgtgaggatattgatgaatgtttgaatccaagcacttgtccagatgagcagtgtgtgaattctcctggatcttaccagtgcgttccctgcacagaaggattccgaggctggaatggacagtgccttgatgtggacgagtgcctggaaccaaacgtctgcgcaaatggtgattgttccaaccttgaaggctcctacatgtgttcatgccacaaaggctatacccggactccggaccacaagcactgtagagatattgatgaatgtcagcaagggaatctatgtgtaaacgggcagtgcaaaaataccgagggctccttcaggtgcacctgtggacaggggtaccagctgtcggcagctaaagaccagtgtgaagacattgatgaatgccagcaccgtcatctctgtgctcatgggcagtgcaggaacactgagggctcttttcaatgtgtgtgtgaccagggttacagagcatctgggcttggagaccactgtgaagatatcaatgaatgcttggaggacaagagtgtttgccagagaggagactgcattaatactgcagggtcctatgattgtacttgtccggatggatttcagctagatgacaataaaacatgtcaagatattaatgaatgtgaacatccagggctctgtggtccgcaaggggagtgcctaaacacagagggttctttccattgtgtctgccagcagggtttctcaatctctgcagatggccgtacgtgtgaagatattgatgaatgtgtaaacaacactgtttgtgacagtcacgggttttgtgacaatacagctggctccttccgctgcctctgttatcagggctttcaagccccacaggatgggcaagggtgtgtggatgtgaatgaatgtgaactgctcagtggggtgtgtggtgaagccttctgtgaaaacgtggaagggtccttcctgtgcgtgtgtgctgatgaaaaccaagagtacagccccatgactgggcagtgccgctcccggacctccacagatttagatgtagatgtagatcaacccaaagaagaaaagaaagaatgctactataatctcaatgacgccagtctctgtgataatgtgttggcccccaatgtcacgaaacaagaatgctgctgtacatcaggcgtgggatggggagataactgcgaaatcttcccctgcccggtcttgggaactgctgagttcactgaaatgtgtcccaaagggaaaggttttgtgcctgctggagaatcatcttctgaagctggtggtgagaactataaagatgcagatgaatgcctactttttggacaagaaatctgcaaaaatggtttctgtttgaacactcggcctgggtatgaatgctactgtaagcaagggacgtactatgatcctgtgaaactgcagtgctttgatatggatgaatgtcaagaccccagtagttgtattgatggccagtgtgttaatacagagggctcttacaactgcttctgtactcaccccatggtcctggatgcgtcagaaaaaagatgtatacgaccggctgagtcaaacgaacaaatagaagaaactgatgtctaccaagatttgtgctgggaacatctgagtgatgaatacgtgtgtagccggcctcttgtgggcaagcagacaacgtacactgagtgctgctgtctgtatggagaggcctggggcatgcagtgtgccctctgccccctgaaggattcagatgactatgctcagctgtgtaacatccccgtgacgggacgccggcagccatatggacgggacgccttggttgacttcagtgaacagtatactccagaagccgatccctacttcatccaagaccgttttctaaatagctttgaggagttacaggctgaggaatgcggcatcctcaatggatgtgaaaatggtcgctgtgtgagggtccaggaaggttacacctgcgattgctttgatgggtatcacttggatacggccaagatgacctgtgtcgatgtaaatgaatgcgatgagttgaacaaccggatgtctctctgcaagaatgccaagtgcattaacaccgatggttcctacaagtgtttgtgtctgccaggctacgtgccttctgacaagccaaactactgcactccgttgaataccgccttgaatttagagaaagacagtgacctggagtgaaacagaatctacataacctaagcccatatactctgcactgtgtaaaggaaaagggagaaatgtattatacttgagacattgcacctaccccggaaggctggaaatacagaaacagcatggaattgcaagtcctctgaagacaatgagaggatttaggatgagcccgataggtgtggcagaccaaatggacatttctctaaaaaaccagtatatatagtctgttcatatgtaaaattcaatggaagagaggtggaacagtgctgttattttaaacagaaggttgtattattatgttgttttgtttttttactattgcttgattaaatttggcatttaaatagtggtggaaatattttatataattttcattttttggttgtgcagttccttggctactgtttttcttttacttcagttttttaaaaatctcaaatgaaaaagtcttcgatacaatattgttaagctgtattataagtattgttacacagggttatgcaattcccggcctggagcatttttgaaattcaaattgtctgtcctgtggagcaggcagtgattttgttccaaaactttgtatacacatttggagaaaagtactttatattttcagtgttttgtctgattttaatgtccgttcttagccaagctgctagcaggtgttaattggatccctttccttcactgaaatggaagagtttataagcttacgttagtattgtaatatgtaaagtaagcccaacaaaaatttttaaaaatttgatgatccccaatatatctaccattgtatgttaaataaat

SEQ ID NO: 6332 - DNA, 1204 bp, Homo sapiens
  II.90 (XM_006953)
ggggtgcaaagaagagacagcagcgcccagcttggaggtgctaactccagaggccagcatcagcaactgggcacagaaaggagccgcctgggcagggaccatggcacggccacatccctggtggctgtgcgttctggggaccctggtggggctctcagctactccagcccccaagagctgcccagagaggcactactgggctcagggaaagctgtgctgccagatgtgtgagccaggaacattcctcgtgaaggactgtgaccagcatagaaaggctgctcagtgtgatccttgcataccgggggtctccttctctcctgaccaccacacccggccccactgtgagagctgtcggcactgtaactctggtcttctcgttcgcaactgcaccatcactgccaatgctgagtgtgcctgtcgcaatggctggcagtgcagggacaaggagtgcaccgagtgtgatcctcttccaaacccttcgctgaccgctcggtcgtctcaggccctgagcccacaccctcagcccacccacttaccttatgtcagtgagatgctggaggccaggacagctgggcacatgcagactctggctgacttcaggcagctgcctgcccggactctctctacccactggccaccccaaagatccctgtgcagctccgattttattcgcatccttgtgatcttctctggaatgttccttgttttcaccctggccggggccctgttcctccatcaacgaaggaaatatagatcaaacaaaggagaaagtcctgtggagcctgcagagccttgtcattacagctgccccagggaggaggagggcagcaccatccccatccaggaggattaccgaaaaccggagcctgcctgctccccctgagccagcacctgcgggagctgcactacagccctggcctccacccccaccccgccgaccatccaagggagagtgagacctggcagccacaactgcagtcccatcctcttgtcagggccctttcctgtgtacacgtgacagagtgccttttcgagactggcagggacgaggacaaatatggatgaggtggagagtgggaagcaggagcccagccagctgcgcctgcgctgcaggagggcgggggctctggttgtaaaacacacttcctgctgcgaaagacccacatgctacaagacgggcaaaataaagtgacagatgaccacc

SEQ ID NO: 6333 - DNA, 1833 bp, Homo sapiens
  II.91 (NM_015927)
ggcacgaggggagaataaaataatcaggaggctgggtttgtgcttggctccaagcatgccctgctctctgacctggagactaccacctcgcacatgccaaggtcaggggctcccaaagagcgccctgcggagcctctcacccctcccccatcctatggccaccagccacagacagggtctggggagtcttcaggagcctcgggggacaaggaccacctgtacagcacggtatgcaagcctcggtccccaaagcctgcagccccggcggcccctccattctcctcttccagcggtgtcttgggtaccgggctctgtgagctagatcggttgcttcaggaacttaatgccactcagttcaacatcacagatgaaatcatgtctcagttcccatctagcaaggtggcttcaggagagcagaaggaggaccagtctgaagataagaaaagacccagcctcccttccagcccgtctcctggcctcccaaaggcttctgccacctcagccactctggagctggatagactgatggcctcactctctgacttccgcgttcaaaaccatcttccagcctctgggccaactcagccaccggtggtgagctccacaaatgagggctccccatccccaccagagccgactggcaagggcagcctagacaccatgctggggctgctgcagtccgacctcagccgccggggtgttcccacccaggccaaaggcctctgtggctcctgcaataaacctattgctgggcaagtggtgacggctctgggccgcgcctggcaccccgagcacttcgtttgcggaggctgttccaccgccctgggaggcagcagcttcttcgagaaggatggagcccccttctgccccgagtgctactttgagcgcttctcgccaagatgtggcttctgcaaccagcccatccgacacaagatggtgaccgccttgggcactcactggcacccagagcatttctgctgcgtcagttgcggggagcccttcggagatgagggtttccacgagcgcgagggccgcccctactgccgccgggacttcctgcagctgttcgccccgcgctgccagggctgccagggccccatcctggataactacatctcggcgctcagcgcgctctggcacccggactgtttcgtctgcagggaatgcttcgcgcccttctcgggaggcagctttttcgagcacgagggccgcccgttgtgcgagaaccacttccacgcacgacgcggctcgctgtgcgccacgtgtggcctccctgtgaccggccgctgcgtgtcggccctgggtcgccgcttccacccggaccacttcacatgcaccttctgcctgcgcccgctcaccaaggggtccttccaggagcgcgccggcaagccctactgccagccctgcttcctgaagctcttcggctgacagcccgctcggctcgccctctcccccggaggccgcgccctcccggaaaagccgggtcctccagaccccgaggccttgctctcagagcgggaggccccacccactggagagccccgcccctaaggtactatgagttctcaggggtcaagttcagaaacggcccagccagacctaaacccacacgcccacaaagtggattgcacacagacaagaactcccgtgcgggcctccactctattcccacccttgagggagcccccttactgggggagggtccttgcaattccagcgaatcggaggccaggccaggacgtccttgctccctgcaccctcactgttctgtgcactttttctacctacataaacacacgcattccacctctaaaaaaaaaaaaaaaaaaaaaa

SEQ ID NO: 6334 - DNA, 2687 bp, Homo sapiens
  II.92 (XM_010807)
ggctggggcctgaggcctggggctcacccacgcccccgccgacgcctgccgcgccgccgccacccccgccacccggatccccgggtggctcgcaggacacctgtacgtcgtgcggcggcttccggcggccagaggagctcggccgagtggacggcgacttcctggaggcggtgaagcggcacatcttgagccgcctgcagatgcggggccggcccaacatcacgcacgccgtgcctaaggccgccatggtcacggccctgcgcaagctgcacgcgggcaaggtgcgcgaggacggccgcgtggagatcccgcacctcgacggccacgccagcccgggcgccgacggccaggagcgcgtttccgaaatcatcagcttcgccgagacagatggcctcgcctcctcccgggtccgcctatacttcttcatctccaacgaaggcaaccagaacctgtttgtggtccaggccagcctgtggctttacctgaaactcctgccctacgtcctggagaagggcagccggcggaaggtgcgggtcaaagtgtacttccaggagcagggccacggtgacaggtggaacatggtggagaagagggtggacctcaagcgcagcggctggcataccttcccactcacggaggccatccaggccttgtttgagcggggcgagcggcgactcaacctagacgtgcagtgtgacagctgccaggagctggccgtggtgccggtgttcgtggacccaggcgaagagtcgcaccggccctttgtggtggtgcaggctcggctgggcgacagcaggcaccgcattcgcaagcgaggcctggagtgcgatggccggaccaacctctgttgcaggcaacagttcttcattgacttccgcctcatcggctggaacgactggatcatagcacccaccggctactacgggaactactgtgagggcagctgcccagcctacctggcaggggtccccggctctgcctcctccttccacacggctgtggtgaaccagtaccgcatgcggggtctgaaccccggcacggtgaactcctgctgcattcccaccaagctgagcaccatgtccatgctgtacttcgatgatgagtacaacatcgtcaagcgggacgtgcccaacatgattgtggaggagtgcggctgcgcctgacagtgcaaggcaggggcacggtggtggggcacggagggcagtcccgggtgggcttcttccagcccccgcgggaacgggggtacacggtgggctgagtacagtcattctgttgggctgtggagatagtgccagggtgcggcctgagatatttttctacagcttcatagagcaaccagtcaaaaccagagcgagaaccctcaactgacatgaaatactttaaaatgcacacgtagccacgcacagccagacgcatcctgccacccacacagcagcctccaggataccagcaaatggatgcggtgacaaatggcagcttagctacaaatgcctgtcagtcggagagaatggggtgagcagccaccattcccaccagctggcccggccactctgaattgcgccttccgagcacacataaaagcacaaagacagagacgcagagagagagagagagccacggagaggaaaagcagatgcaggggtggggagcgcagctcggcggaggctgcgtgtgccccgtggcttttaccaggcctgctctgcctggctcgatgtctgcttcttccccagcctgggatccttcgtgcttcaaggcctggggagcctgtccttccatgcccttgtcgagggaaagagacccagaaaggacacaacccgtcagagacctgggagcaggggcaatgaccgtttgactgtttgtggcttgggcctctgacatgacttatgtgtgtgtgtgtttttggggtggggagggagggagagaagagggggctaaatttgatgctttaactgatctccaacagttgacaggtcatccttgccagttgtataactgaaaaaggacttttctaccaggtatgaccttttaagtgaaaatctgaattgttctaaatggaaagaaaaaaagttgcaatctgtgcccttcattggggacattcctctaggactggtttggggacgggtgggaatgacccctaggcaaggggatgagaccgcaggaggaaatggcggggaggaggcattcttgaactgctgaggatggggggtgtcccctcagcggaggccaagggaggggagcagcctagttggtcttggagagatggggaaggctttcagctgatttgcagaagttgcccatgtgggccccagccatcagggctggccgtggacgtggcccctgcccactcacctgcccgcctgcccgcccgcccgcatagcacttgcagacctgcctgaacgcacatgacatagcacttgccgatctgcgtgtgtccagaagtggcccttggccgagcgccgaactcgctcgccctctagatgtccaagtgccacgtgaactatgcaatttaaagggttgacccacactagacgaaactggactcgtacgactctttttatattttttatacttgaaatgaaatcctttgcttcttttttaagcgaatgattgcttttaatgtttgcactgatttagttgcatgattagtcagaaactgccatttgaaaaaaagttatttttatagcagc

SEQ ID NO: 6335 - DNA, 3242 bp, Homo sapiens
  II.93 (NM_002184)
gagcagccaaaaggcccgcggagtcgcgctgggccgccccggcgcagctgaaccgggggccgcgcctgccaggccgacgggtctggcccagcctggcgccaaggggttcgtgcgctgtggagacgcggagggtcgaggcggcgcggcctgagtgaaacccaatggaaaaagcatgacatttagaagtagaagacttagcttcaaatccctactccttcacttactaattttgtgatttggaaatatccgcgcaagatgttgacgttgcagacttggctagtgcaagccttgtttattttcctcaccactgaatctacaggtgaacttctagatccatgtggttatatcagtcctgaatctccagttgtacaacttcattctaatttcactgcagtttgtgtgctaaaggaaaaatgtatggattattttcatgtaaatgctaattacattgtctggaaaacaaaccattttactattcctaaggagcaatatactatcataaacagaacagcatccagtgtcacctttacagatatagcttcattaaatattcagctcacttgcaacattcttacattcggacagcttgaacagaatgtttatggaatcacaataatttcaggcttgcctccagaaaaacctaaaaatttgagttgcattgtgaacgaggggaagaaaatgaggtgtgagtgggatggtggaagggaaacacacttggagacaaacttcactttaaaatctgaatgggcaacacacaagtttgctgattgcaaagcaaaacgtgacacccccacctcatgcactgttgattattctactgtgtattttgtcaacattgaagtctgggtagaagcagagaatgcccttgggaaggttacatcagatcatatcaattttgatcctgtatataaagtgaagcccaatccgccacataatttatcagtgatcaactcagaggaactgtctagtatcttaaaattgacatggaccaacccaagtattaagagtgttataatactaaaatataacattcaatataggaccaaagatgcctcaacttggagccagattcctcctgaagacacagcatccacccgatcttcattcactgtccaagaccttaaaccttttacagaatatgtgtttaggattcgctgtatgaaggaagatggtaagggatactggagtgactggagtgaagaagcaagtgggatcacctatgaagatagaccatctaaagcaccaagtttctggtataaaatagatccatcccatactcaaggctacagaactgtacaactcgtgtggaagacattgcctccttttgaagccaatggaaaaatcttggattatgaagtgactctcacaagatggaaatcacatttacaaaattacacagttaatgccacaaaactgacagtaaatctcacaaatgatcgctatctagcaaccctaacagtaagaaatcttgttggcaaatcagatgcagctgttttaactatccctgcctgtgactttcaagctactcaccctgtaatggatcttaaagcattccccaaagataacatgctttgggtggaatggactactccaagggaatctgtaaagaaatatatacttgagtggtgtgtgttatcagataaagcaccctgtatcacagactggcaacaagaagatggtaccgtgcatcgcacctatttaagagggaacttagcagagagcaaatgctatttgataacagttactccagtatatgctgatggaccaggaagccctgaatccataaaggcataccttaaacaagctccaccttccaaaggacctactgttcggacaaaaaaagtagggaaaaacgaagctgtcttagagtgggaccaacttcctgttgatgttcagaatggatttatcagaaattatactatattttatagaaccatcattggaaatgaaactgctgtgaatgtggattcttcccacacagaatatacattgtcctctttgactagtgacacattgtacatggtacgaatggcagcatacacagatgaaggtgggaaggatggtccagaattcacttttactaccccaaagtttgctcaaggagaaattgaagccatagtcgtgcctgtttgcttagcattcctattgacaactcttctgggagtgctgttctgctttaataagcgagacctaattaaaaaacacatctggcctaatgttccagatccttcaaagagtcatattgcccagtggtcacctcacactcctccaaggcacaattttaattcaaaagatcaaatgtattcagatggcaatttcactgatgtaagtgttgtggaaatagaagcaaatgacaaaaagccttttccagaagatctgaaatcattggacctgttcaaaaaggaaaaaattaatactgaaggacacagcagtggtattggggggtcttcatgcatgtcatcttctaggccaagcatttctagcagtgatgaaaatgaatcttcacaaaacacttcgagcactgtccagtattctaccgtggtacacagtggctacagacaccaagttccgtcagtccaagtcttctcaagatccgagtctacccagcccttgttagattcagaggagcggccagaagatctacaattagtagatcatgtagatggcggtgatggtattttgcccaggcaacagtacttcaaacagaactgcagtcagcatgaatccagtccagatatttcacattttgaaaggtcaaagcaagtttcatcagtcaatgaggaagattttgttagacttaaacagcagatttcagatcatatttcacaatcctgtggatctgggcaaatgaaaatgtttcaggaagtttctgcagcagatgcttttggtccaggtactgagggacaagtagaaagatttgaaacagttggcatggaggctgcgactgatgaaggcatgcctaaaagttacttaccacagactgtacggcaaggcggctacatgcctcagtgaaggactagtagttcctgctacaacttcagcagtacctataaagtaaagctaaaatgattttatctgtgaattcagattttaaaaagtcttcactctctgaagatgatcatttgcccttaaggacaaaaatgaactgaagtttcacatgagctatttccattccagaatatctgggattctactttaagcactacataaactgactttatcctcagaaaaaaaaaaaaaaa

SEQ ID NO: 6336 - DNA, 2155 bp, Homo sapiens
  II.94 (XM_008570)
tctttccgtcccgggcagccagcgccagtcggagccagcgcgagccgccgccgccatcactgccgctgccaagtcctccacccgctgcccccgccatgtctgctaccgctgccacggccccccctgctgccccggctggggagggtggtccccctgcaccccctccaaacctcaccagtaacaggagactgcagcagacccaggcccaggtggatgaggtggtggacatcatgagggtgaacgtggacaaggtcctggagcgagaccagaagctgtcggagctggacgaccgtgcagatgcactccaggcgggggcctcccagtttgaaacaagcgcagccaagctcaagcgcaaatactggtggaaaaacctcaagatgatgatcatcttgggagtgatttgcgccatcatcctcatcatcatcatagtttacttcagcacttaaatccccgaggagtctgccctgcctagagaagggcctctcccccaaccctcagccgttcctccacctctcagccatatctttcagcccccactcccctggatccgtgtgtgtgtgtgtccgtgtgtgtgtccccctgtaaatagccagctgttatttatacatatataatattatatatatttggtctgtttgtagttttattactagatgatttttccggttgtccttaacaccccttcctgaggttcccttcacccctctctcttgccttccttccctttccctttcttcctgactagccccaagtcccttcatttgcatctgctatgcaatagtccctctcctttccttcttcttccctcagatttagctgatccttcctcccaccctggccttcctttcctctttcctcctcactctccccgtcatgctccctctgccccgccctcaaaaaaaaaaaaaaaaaaaaaaaaacaacagcacctgtccaggcttccttaggtacatcttctttgtatccattgggaggctctgagactggccccacttggtcctaagaatcccaaggtctttgggagcgtccagcatgttaattagcgtatcattacatactgctatccctttccatttctttttgttccatcactcttctctcaacctgtgtttctttttttactgaggagttagtccccattagttcttgtatcacattttcatttgcacgacattactcgcaggtggtggggagcctgggcttttggggaaccaggctgctctggtccccagcattgcctcctcctagcccctctagtccagtttgcctcccttaccctcattttccaaacctcttgtaccctcctctccctcccccagctggtatgtaagtgtcttgaagttcagtatgttatgatggaccaataattctgccacttcgggtttctccctacattcctgctccccagttttcatgtggggtactcaactgacattcccatggggtttccctcccatctgcctgatccacctcctcctcccaccaggagagttgggggttggccacaattgatctcttgtgagaggggtggctaccagtgtgtgtgtgggggtcatcactgccttggggaggagtggggcagggcagagaatccccccaattcctgcctgaaatctctggcctcacccctgctgggggttggactgaaaaccctcctccccaatttggggggtgttgccccatcactgcccagctcctctgactgccccccctgaatttagggtgggggtactagtcactgccaatgtgtgtatgggacttgctggaaaacggggatgcttgcccctctccaggactattgagcccagagagagctgtcctctcattgggtgaactgattgaggaagggtctattgtctttttaaatggcacaattttaagggtttgagggtacagtcccttaacctgccacgggagggggcccccaaactttcttccccccacacttctggttttctgtgtggagggggagcagggatatctaagctgtggtgtgaaagggtaggagagatgctggaggtgggggtgctgtgttttagaccccccatattatcccagtgtcccctgcccccctcttcccccaccccatgcccccaattctgtggcgcatccagattgtgaaaatgtacaataaatgtgtaatgagtaaccaggt

SEQ ID NO: 6337 - DNA, 2758 bp, Homo sapiens
  II.95 (NM_006856)
gaattcaggggggaaaggaggagctggagacagattgtaggaccgagcgcgggcaggcgggaggcaacggagctaccagccgctcctctctgctatatgaaatatgggagacgacagaccgtttgtgtgcaatgccccgggctgtggacagagatttacaaacgaggaccacctggcagttcataaacacaagcatgagatgacattgaaatttggcccagcccgaactgactcagtcatcattgcagatcaaacgcctactccaactagattcctgaagaactgtgaggaggtgggactcttcaatgaactagctagctcctttgaacatgaattcaagaaagctgcagatgaggatgagaaaaaggctgctgctgggccccttgacatgtctctgccttccacaccagacatcaaaatcaaagaagaagagccagtggaggtagactcatccccacctgatagccctgcctctagtccctgttccccaccactgaaggagaaggaggttaccccaaagcctgttctgatctctacccccacacccaccattgtacgtcctggctccctgcctctccacttgggctatgatccacttcatccaacccttccctccccaacctctgtcatcacacaggctccaccatccaacaggcaaatggggtctcccactggctccctccctcttgtcatgcatcttgctaatggacagaccatgcctgtgttgccagggcctccagtacagatgccgtctgttatatcgctggccagacctgtgtccatggtgcccaacattcctggtatccctggcccaccagttaacagtagtggctccatttctccctctggccaccctataccatcagaagccaagatgagactgaaagccaccctaactcaccaagtctcctcaatcaatggtggttgtggaatggtggtgggtactgccagcaccatggtgacagcccgcccagagcagagccagattctcatccagcaccctgatgccccatcccctgcccagccacaggtctcaccagctcagcccacccctagtactggggggcgacggcggcgcacagtagatgaagatccagatgagcgacggcagcgctttctggagcgcaaccgggctgcagcctcccgctgccgccaaaagcgaaagctgtgggtgtcctccctagagaagaaggccgaagaactcacttctcagaacattcagctgagtaatgaagtcacattactacgcaatgaggtggcccagttgaaacagctactgttagctcataaagactgcccagtcactgcactacagaaaaagactcaaggctatttagaaagccccaaggaaagctcagagccaacgggttctccagcccctgtgattcagcacagctcagcaacagcccctagcaatggcctcagtgttcgctctgcagctgaagctgtggccacctcggtcctcactcagatggccagccaaaggacagaactgagcatgccgatacaatcgcatgtaatcatgaccccacagtcccagtctgcgggcagatgatgcctcctctggtggagaggtcctcagccagagctcgcccgcccaagagccaagagagatgtcatcttatcccctcccatctgccttggacatggcaatatgggtggggggaattgtgtgttgtgagtaatggacagatatggggctttttagccatgtggtcatgtacgtttgacacctgtgctgggggcctcccagccccggagcctcatagatcatcccccagggtggggtttctgatgcatccacagccaaaggcctttccagatggtccgaacaatcacccctgccccatgcacgtgtatctgtctcttttaacactaacccttggcacttctaggtttggggtttctcagttccctctcttcccactaagccgtggctgttacctttttgttccttaccagcatgccacttcctgccagatagagggaggctagatttgatgacatattacccgctgacccagccccagccaccccatggactcaggactcaggtctcccatagctgcttatttacccgtttcctttttcctcttccttaattctagttaaaacattcacttacggagaatgtaaggttacctttgatgtatgaagtagcagtattttccagtttttccataagctttattccttctctctacctgccaccaaaaagaaagaaaccctcaagagttctaattctttttcatctatttgcacagctatttgggtacctcattttgtcccttgactttagtgtagtggtggggtctttcccaccaccccactaagccttggcaacctcattttgtggccttattattaaagattgcttggtagtgaaaagggaagggcccagaatctgactggctgattctgtctcctcccctccctccttctttagtttaaccatcagggcagacaggaacaaagtatttcaaagcttgttccatcaagttagggattaatcgattcctttatgttttataagagtttaccggccaaagcatattgtcatctttggtcatttttctgctcctgcttctctctcttcattggggtatcaacattaccgcccctgtctctcttcattcccctatcaacattaccgcccctgtctcttctgtaactacttcagactcagccctcctggaggctgtcatgtaggggactctcgaggttcctttgttctaccccatctctcccccccgaattc

SEQ ID NO: 6338 - DNA, 2900 bp, Homo sapiens
  II.96 (NM_000674)
atgagtgtcagaagtgtgaagggtgcctgttctgaatcccagagcctcctctccctctgtgaggctggcaggtgaggaagggtttaacctcactggaaggaatccctggagctagcggctgctgaaggcgtcgaggtgtgggggcacttggacagaacagtcaggcagccgggagctctgccagctttggtgaccttgggccgggctgggagcgctgcggcgggagccggaggactatgagctgccgcgcgttgtccagagcccagcccagccctacgcgcgcggcccggagctctgttccctggaactttgggcactgcctctgggacccctgccggccagcaggcaggatggtgcttgcctcgtgccccttggtgcccgtctgctgatgtgcccagcctgtgcccgccatgccgccctccatctcagctttccaggccgcctacatcggcatcgaggtgctcatcgccctggtctctgtgcccgggaacgtgctggtgatctgggcggtgaaggtgaaccaggcgctgcgggatgccaccttctgcttcatcgtgtcgctggcggtggctgatgtggccgtgggtgccctggtcatccccctcgccatcctcatcaacattgggccacagacctacttccacacctgcctcatggttgcctgtccggtcctcatcctcacccagagctccatcctggccctgctggcaattgctgtggaccgctacctccgggtcaagatccctctccggtacaagatggtggtgaccccccggagggcggcggtggccatagccggctgctggatcctctccttcgtggtgggactgacccctatgtttggctggaacaatctgagtgcggtggagcgggcctgggcagccaacggcagcatgggggagcccgtgatcaagtgcgagttcgagaaggtcatcagcatggagtacatggtctacttcaacttctttgtgtgggtgctgcccccgcttctcctcatggtcctcatctacctggaggtcttctacctaatccgcaagcagctcaacaagaaggtgtcggcctcctccggcgacccgcagaagtactatgggaaggagctgaagatcgccaagtcgctggccctcatcctcttcctctttgccctcagctggctgcctttgcacatcctcaactgcatcaccctcttctgcccgtcctgccacaagcccagcatccttacctacattgccatcttcctcacgcacggcaactcggccatgaaccccattgtctatgccttccgcatccagaagttccgcgtcaccttccttaagatttggaatgaccatttccgctgccagcctgcacctcccattgacgaggatctcccagaagagaggcctgatgactagaccccgccttccgctcccaccagcccacatccagtggggtctcagtccagtcctcacatgcccgctgtcccaggggtctccctgagcctgccccagctgggctgttggctgggggcatgggggaggctctgaagagatacccacagagtgtggtccctccactaggagttaactaccctacacctctgggccctgcaggaggcctgggagggcaagggtcctacggagggaccaggtgtctagaggcaacagtgttctgagcccccacctgcctgaccatcccatgagcagtccagcgcttcagggctgggcaggtcctggggaggctgagactgcagaggagccacctgggctgggagaaggtgcttgggcttctgcggtgaggcaggggagtctgcttgtcttagatgttggtggtgcagccccaggaccaagcttaaggagaggagagcatctgctctgagacggatggaaggagagaggttgaggatgcactggcctgttctgtaggagagactggccagaggcagctaaggggcaggaatcaaggagcctccgttcccacctctgaggactctggaccccaggccataccaggtgctagggtgcctgctctccttgccctgggccagcccaggattgtacgtgggagaggcagaaagggtaggttcagtaatcatttctgatgatttgctggagtgctggctccacgccctggggagtgagcttggtgcggtaggtgctggcctcaaacagccacgaggtggtagctctgagccctccttcttgccctgagctttccggggaggagcctggagtgtaattacctgtcatctgggccaccagctccactggcccccgttgccgggcctggactgtcctaggtgaccccatctctgctgcttctgggcctgatggagaggagaacactagacatgccaactcgggagcattctgcctgcctgggaacggggtggacgagggagtgtctgtaaggactcagtgttgactgtaggcgcccctggggtgggtttagcaggctgcagcaggcagaggaggagtacccccctgagagcatgtgggggaaggccttgctgtcatgtgaatccctcaatacccctagtatctggctgggttttcaggggctttggaagctctgttgcaggtgtccgggggtctaggactttagggatctgggatctggggaaggaccaacccatgccctgccaagcctggagcccctgtgttggggggcaaggtgggggagcctggagcccctgtgtgggagggcgaggcgggggagcctggagcccctgtgtgggagggcgaggcgggggatcctggagcccctgtgtcggggggcgagggaggggaggtggccgtcggttgaccttctgaacatgagtgtcaactccaggacttgcttccaagcccttccctctgttggaaattgggtgtgccctggctcccaagggaggcccatgtgactaataaaaaactgtgaaccct

SEQ ID NO: 6339 - DNA, 2480 bp, Homo sapiens
  II.97 (NM_000173)
gacgctctgtgccttcggaggtctttctgcctgcctgtcctcatgcctctcctcctcttgctgctcctgctgccaagccccttacacccccaccccatctgtgaggtctccaaagtggccagccacctagaagtgaactgtgacaagaggaatctgacagcgctgcctccagacctgccgaaagacacaaccatcctccacctgagtgagaacctcctgtacaccttctccctggcaaccctgatgccttacactcgcctcactcagctgaacctagataggtgcgagctcaccaagctccaggtcgatgggacgctgccagtgctggggaccctggatctatcccacaatcagctgcaaagcctgcccttgctagggcagacactgcctgctctcaccgtcctggacgtctccttcaaccggctgacctcgctgcctcttggtgccctgcgtggtcttggcgaactccaagagctctacctgaaaggcaatgagctgaagaccctgcccccagggctcctgacgcccacacccaagctggagaagctcagtctggctaacaacaacttgactgagctccccgctgggctcctgaatgggctggagaatctcgacacccttctcctccaagagaactcgctgtatacaataccaaagggcttttttgggtcccacctcctgccttttgcttttctccacgggaacccctggttatgcaactgtgagatcctctattttcgtcgctggctgcaggacaatgctgaaaatgtctacgtatggaagcaaggtgtggacgtcaaggccatgacctctaacgtggccagtgtgcagtgtgacaattcagacaagtttcccgtctacaaatacccaggaaaggggtgccccacccttggtgatgaaggtgacacagacctatatgattactacccagaagaggacactgagggcgataaggtgcgtgccacaaggactgtggtcaagttccccaccaaagcccatacaaccccctggggtctattctactcatggtccactgcttctctagacagccaaatgccctcctccttgcatccaacacaagaatccactaaggagcagaccacattcccacctagatggaccccaaatttcacacttcacatggaatccatcacattctccaaaactccaaaatccactactgaaccaaccccaagcccgaccacctcagagcccgtcccggagcccgccccaaacatgaccaccctggagcccactccaagcccgaccaccccagagcccacctcagagcccgcccccagcccgaccaccccggagcccaccccaatcccgaccatcgccacaagcccgaccatcctggtgtctgccacaagcctgatcactccaaaaagcacatttttaactaccacaaaacccgtatcactcttagaatccaccaaaaaaaccatccctgaacttgatcagccaccaaagctccgtggggtgctccaagggcatttggagagctccagaaatgacccttttctccaccccgacttttgctgcctcctccccctgggcttctatgtcttgggtctcttctggctgctctttgcctctgtggtcctcatcctgctgctgagctgggttgggcatgtgaaaccacaggccctggactctggccaaggtgctgctctgaccacagccacacaaaccacacacctggagctgcagaggggacggcaagtgacagtgccccgggcctggctgctcttccttcgaggttcgcttcccactttccgctccagcctcttcctgtgggtacggcctaatggccgtgtggggcctctagtggcaggaaggaggccctcagctctgagtcagggtcgtggtcaggacctgctgagcacagtgagcattaggtactctggccacagcctctgagggtgggaggtttggggaccttgagagaagagcctgtgggctctcctattggaatctagttgggggttggaggggtaaggaacacagggtgataggggaggggtcttagttcctttttctgtatcagaagccctgtcttcacaacacaggcacacaatttcagtcccagccaaagcagaaggggtaatgacatggacttggcggggggacaagacaaagctcccgatgctgcatggggcgctgccagatctcacggtgaaccattttggcagaatacagcatggttcccacatgcatttatgcacagaagaaaatctggaaagtgatttatcaggatgtgagcactcgttgtgtctggatgttacaaatatgggtggttttattttctttttccctgtttagcattttctagttttcttatcaggatgtgagcactcgttgtgtctggatgttacaaatatgggtggttttattttctttttccctgtttagcattttctagttttccactattattgtatattatctgtataataaaaaataattttagggttggg

SEQ ID NO: 6340 - DNA, 3274 bp, Homo sapiens
  II.98 (XM_048068)
gcactgagctctgccgcctggctctagccgcctgcctggcccccgccgggactcttgcccaccctcagccatggctccgatatctctgtcgtggctgctccgcttggccaccttctgccatctgactgtcctgctggctggacagcaccacggtgtgacgaaatgcaacatcacgtgcagcaagatgacatcaaagatacctgtagctttgctcatccactatcaacagaaccaggcatcatgcggcaaacgcgcaatcatcttggagacgagacagcacaggctgttctgtgccgacccgaaggagcaatgggtcaaggacgcgatgcagcatctggaccgccaggctgctgccctaactcgaaatggcggcaccttcgagaagcagatcggcgaggtgaagcccaggaccacccctgccgccgggggaatggacgagtctgtggtcctggagcccgaagccacaggcgaaagcagtagcctggagccgactccttcttcccaggaagcacagagggccctggggacctccccagagctgccgacgggcgtgactggttcctcagggaccaggctccccccgacgccaaaggctcaggatggagggcctgtgggcacggagcttttccgagtgcctcccgtctccactgccgccacgtggcagagttctgctccccaccaacctgggcccagcctctgggctgaggcaaagacctctgaggccccgtccacccaggacccctccacccaggcctccactgcgtcctccccagccccagaggagaatgctccgtctgaaggccagcgtgtgtggggtcagggacagagccccaggccagagaactctctggagcgggaggagatgggtcccgtgccagcgcacacggatgccttccaggactgggggcctggcagcatggcccacgtctctgtggtccctgtctcctcagaagggacccccagcagggagccagtggcttcaggcagctggacccctaaggctgaggaacccatccatgccaccatggacccccagaggctgggcgtccttatcactcctgtccctgacgcccaggctgccacccggaggcaggcggtggggctgctggccttccttggcctcctcttctgcctgggggtggccatgttcacctaccagagcctccagggctgccctcgaaagatggcaggagagatggcggagggccttcgctacatcccccggagctgtggtagtaattcatatgtcctggtgcccgtgtgaactcctctggcctgtgtctagttgtttgattcagacagctgcctgggatccctcatcctcatacccacccccacccaagggcctggcctgagctgggatgattggaggggggaggtgggatcctccaggtgcacaagctccaagctcccaggcattccccaggaggccagccttgaccattctccaccttccagggacagagggggtggcctcccaactcaccccagccccaaaactctcctctgctgctggctggttagaggttccctttgacgccatcccagccccaatgaacaattatttattaaatgcccagccccttctgacccatgctgccctgtgagtactacagtcctcccatctcacacatgagcatcaggccaggccctctgcccactccctgcaacctgattgtgtctcttggtcctgctgcagttgccagtcaccccggccacctgcggtgctatctcccccagccccatcctctgtacagagcccacgcccccactggtgacatgtcttttcttgcatgaggctagtgtggtgtttcctggcactgcttccagtgaggctctgcccttggttaggcattgtgggaaggggagataagggtatctggtgactttcctctttggtctacactgtgctgagtctgaaggctgggttctgatcctagttccaccatcaagccaccaacatactcccatctgtgaaaggaaagagggaggtaaggaatacctgtccccctgacaacactcattgacctgaggcccttctctccagcccctggatgcagcctcacagtccttaccagcagagcaccttagacagtccctgccaatggactaacttgtctttggaccctgaggcccagagggcctgcaagggagtgagttgatagcacagaccctgccctgtgggcccccaaatggaaatgggcagagcagagaccatccctgaaggccccgcccaggcttagtcactgagacagcccgggctctgcctcccatcacccgctaagagggagggagggctccagacacatgtccaagaagcccaggaaaggctccaggagcagccacattcctgatgcttcttcagagactcctgcaggcagccaggccacaagacccttgtggtcccaccccacacacgccagattctttcctgaggctgggctcccttcccacctctctcactccttgaaaacactgttctctgccctccaagaccttctccttcacctttgtccccaccgcagacaggaccagggatttccatgatgttttccatgagtcccctgtttgtttctgaaagggacgctacccgggaagggggctgggacatgggaaaggggaagttgtaggcataaagtcaggggttcccttttttggctgctgaaggctcgagcatgcctggatggggctgcaccggctggcctggcccctcagggtccctggtggcagctcacctctcccttggattgtccccgacccttgccgtctacctgaggggcctcttatgggctgggttctacccaggtgctaggaacactccttcacagatgggtgcttggaggaaggaaacccagctctggtccatagagagcaagacgctgtgctgccctgcccacctggcctctgcactcccctgctgggtgtggcgcagcatattcaggaagctcagggcctggctcaggtggggtcactctggcagctcagagagggtgggagtgggtccaatgcactttgttctggctcttccaggctgggagagcctttcaggggtgggacaccctgtgatggggccctgcctcctttgtgaggaagccgctggggccagttggtcccccttccatggactttgttagtttctccaagcaggacatggacaaggatgatctaggaagactttggaaagagtaggaagactttggaaagacttttccaaccctcatcaccaacgtctgtgccattttgtattttactaataaaatttaaaagtcttgtg

SEQ ID NO: 6341 - DNA, 4485 bp, Homo sapiens
  II.99 (NM_022162)
gtagacagatccaggctcaccagtcctgtgccactgggcttttggcgttctgcacaaggcctacccgcagatgccatgcctgctcccccagcctaatgggctttgatgggggaagagggtggttcagcctctcacgatgaggaggaaagagcaagtgtcctcctcggacattctccgggttgtgaaatgtgctcgcaggaggcttttcaggcacagaggagccagctggtcgagctgctggtctcagggtccctggaaggcttcgagagtgtcctggactggctgctgtcctgggaggtcctctcctgggaggactacgagggcttccacctcctgggccagcctctctcccacttggccaggcgccttctggacaccgtctggaataagggtacttgggcctgtcagaagctcatcgcggctgcccaagaagcccaggccgacagccagtcccccaagctgcatggctgctgggacccccactcgctccacccagcccgagacctgcagagtcaccggccagccattgtcaggaggctccacagccatgtggagaacatgctggacctggcatgggagcggggtttcgtcagccagtatgaatgtgatgaaatcaggttgccgatcttcacaccgtcccagagggcaagaaggctgcttgatcttgccacggtgaaagcgaatggattggctgccttccttctacaacatgttcaggaattaccagtcccattggccctgcctttggaagctgccacatgcaagaagtatatggccaagctgaggaccacggtgtctgctcagtctcgcttcctcagtacctatgatggagcagagacgctctgcctggaggacatatacacagagaatgtcctggaggtctgggcagatgtgggcatggctggacccccgcagaagagcccagccaccctgggcctggaggagctcttcagcacccctggccacctcaatgacgatgcggacactgtgctggtggtgggtgaggcgggcagtggcaagagcacgctcctgcagcggctgcacttgctgtgggctgcagggcaagacttccaggaatttctctttgtcttcccattcagctgccggcagctgcagtgcatggccaaaccactctctgtgcggactctactctttgagcactgctgttggcctgatgttggtcaagaagacatcttccagttactccttgaccaccctgaccgtgtcctgttaacctttgatggctttgacgagttcaagttcaggttcacggatcgtgaacgccactgctccccgaccgaccccacctctgtccagaccctgctcttcaaccttctgcagggcaacctgctgaagaatgcccgcaaggtggtgaccagccgtccggccgctgtgtcggcgttcctcaggaagtacatccgcaccgagttcaacctcaagggcttctctgaacagggcatcgagctgtacctgaggaagcgccatcatgagcccggggtggcggaccgcctcatccgcctgctccaagagacctcagccctgcacggtttgtgccacctgcctgtcttctcatggatggtgtccaaatgccaccaggaactgttgctgcaggagggggggtccccaaagaccactacagatatgtacctgctgattctgcagcattttctgctgcatgccacccccccagactcagcttcccaaggtctgggacccagtcttcttcggggccgcctccccaccctcctgcacctgggcagactggctctgtggggcctgggcatgtgctgctacgtgttctcagcccagcagctccaggcagcacaggtcagccctgatgacatttctcttggcttcctggtgcgtgccaaaggtgtcgtgccagggagtacggcgcccctggaattccttcacatcactttccagtgcttctttgccgcgttctacctggcactcagtgctgatgtgccaccagctttgctcagacacctcttcaattgtggcaggccaggcaactcaccaatggccaggctcctgcccacgatgtgcatccaggcctcggagggaaaggacagcagcgtggcagctttgctgcagaaggccgagccgcacaaccttcagatcacagcagccttcctggcagggctgttgtcccgggagcactggggcctgctggctgagtgccagacatctgagaaggccctgctccggcgccaggcctgtgcccgctggtgtctggcccgcagcctccgcaagcacttccactccatcccgccagctgcaccgggtgaggccaagagcgtgcatgccatgcccgggttcatctggctcatccggagcctgtacgagatgcaggaggagcggctggctcggaaggctgcacgtggcctgaatgttgggcacctcaagttgacattttgcagtgtgggccccactgagtgtgctgccctggcctttgtgctgcagcacctccggcggcccgtggccctgcagctggactacaactctgtgggtgacattggcgtggagcagctgctgccttgccttggtgtctgcaaggctctgtatttgcgcgataacaatatctcagaccgaggcatctgcaagctcattgaatgtgctcttcactgcgagcaattgcagaagttagctctattcaacaacaaattgactgacggctgtgcacactccatggctaagctccttgcatgcaggcagaacttcttggcattgaggctggggaataactacatcactgccgcgggagcccaagtgctggccgaggggctccgaggcaacacctccttgcagttcctgggattctggggcaacagagtgggtgacgagggggcccaggccctggctgaagccttgggtgatcaccagagcttgaggtggctcagcctggtggggaacaacattggcagtgtgggtgcccaagccttggcactgatgctggcaaagaacgtcatgctagaagaactctgcctggaggagaaccatctccaggatgaaggtgtatgttctctcgcagaaggactgaagaaaaattcaagtttgaaaatcctgaagttgtccaataactgcatcacctacctaggggcagaagccctcctgcaggcccttgaaaggaatgacaccatcctggaagtctggctccgagggaacactttctctctagaggaggttgacaagctcggctgcagggacaccagactcttgctttgaagtctccgggaggatgttcgtctcagtttgtttgtgagcaggctgtgagtttgggccccagaggctgggtgacatgtgttggcagcctcttcaaaatgagccctgtcctgcctaaggctgaacttgttttctgggaacaccataggtcacctttattctggcagaggagggagcatcagtgccctccaggatagacttttcccaagcctacttttgccattgacttcttcccaagattcaatcccaggatgtacaaggacagcccctcctccatagtatgggactggcctctgctgatcctcccaggcttccgtgtgggtcagtggggcccatggatgtgcttgttaactgagtgccttttggtggagaggcccggcctctcacaaaagaccccttaccactgctctgatgaagaggagtacacagaacacataattcaggaagcagctttccccatgtctcgactcatccatccaggccattccccgtctctggttcctcccctcctcctggactcctgcacacgctccttcctctgaggctgaaattcagaatattagtgacctcagctttgatatttcacttacagcacccccaaccctggcacccagggtgggaagggctacaccttagcctgccctcctttccggtgtttaagacatttttggaaggggacacgtgacagccgtttgttccccaagacattctaggtttgcaagaaaaatatgaccacactccagctgggatcacatgtggacttttatttccagtgaaatcagttactcttcagttaagcctttggaaacagctcgactttaaaaagctccaaatgcagctttaaaaaattaatctgggccagaatttcaaacggcctcactaggcttctggttgatgcctgtgaactgaactctgacaacagacttctgaaatagacccacaagaggcagttccatttcatttgtgccagaatgctttaggatgtacagttatggattgaaagtttacaggaaaaaaaattaggccgttccttcaaagcaaatgtcttcctggattattcaaaatgatgtatgttgaagcctttgtaaattgtcagatgctgtgcaaatgttattattttaaacattatgatgtgtgaaaactggttaatatttataggtcactttgttttactgtcttaagtttatactcttatagacaacatggccgtgaactttatgctgtaaataatcagaggggaataaactgttgagtcaaaac

SEQ ID NO: 6342 - DNA, 2487 bp, Homo sapiens
  II.100 (NM_001199)
gccgcttccctcgccgccgccccgccagcatgcccggcgtggcccgcctgccgctgctgctcgggctgctgctgctcccgcgtcccggccggccgctggacttggccgactacacctatgacctggcggaggaggacgactcggagcccctcaactacaaagacccctgcaaggcggctgcctttcttggggacattgccctggacgaagaggacctgagggccttccaggtacagcaggctgtggatctcagacggcacacagctcgtaagtcctccatcaaagctgcagttccaggaaacacttctacccccagctgccagagcaccaacgggcagcctcagaggggagcctgtgggagatggagaggtagatcccgtagccggcgggcggcgacgtcccgaccagagcgtgtgtggcccgatggggtcatcccctttgtcattgggggaaacttcactggtagccagagggcagtcttccggcaggccatgaggcactgggagaagcacacctgtgtcaccttcctggagcgcactgacgaggacagctatattgtgttcacctatcgaccttgcgggtgctgctcctacgtgggtcgccgcggcgggggcccccaggccatctccatcggcaagaactgtgacaagttcggcattgtggtccacgagctgggccacgtcgtcggcttctggcacgaacacactcggccagaccgggaccgccacgtttccatcgttcgtgagaacatccagccagggcaggagtataacttcctgaagatggagcctcaggaggtggagtccctgggggagacctatgacttcgacagcatcatgcattacgctcggaacacattctccaggggcatcttcctggataccattgtccccaagtatgaggtgaacggggtgaaacctcccattggccaaaggacacggctcagcaagggggacattgcccaagcccgcaagctttacaagtgcccagcctgtggagagaccctgcaagacagcacaggcaacttctcctcccctgaataccccaatggctactctgctcacatgcactgcgtgtggcgcatctctgtcacacccggggagaagatcatcctgaacttcacgtccctggacctgtaccgcagccgcctgtgctggtacgactatgtggaggtccgagatggcttctggaggaaggcgcccctccgaggccgcttctgcgggtccaaactccctgagcctatcgtctccactgacagccgcctctgggttgaattccgcagcagcagcaattgggttggaaagggcttctttgcagtctacgaagccatctgcgggggtgatgtgaaaaaggactatggccacattcaatcgcccaactacccagacgattaccggcccagcaaagtctgcatctggcggatccaggtgtctgagggcttccacgtgggcctcacattccagtcctttgagattgagcgccacgacagctgtgcctacgactatctggaggtgcgcgacgggcacagtgagagcagcaccctcatcgggcgctactgtggctatgagaagcctgatgacatcaagagcacgtccagccgcctctggctcaagttcgtctctgacgggtccattaacaaagcgggctttgccgtcaactttttcaaagaggtggacgagtgctctcggcccaaccgcgggggctgtgagcagcggtgcctcaacaccctgggcagctacaagtgcagctgtgaccccgggtacgagctggccccagacaagcgccgctgtgaggctgcttgtggcggattcctcaccaagctcaacggctccatcaccagcccgggctggcccaaggagtacccccccaacaagaactgcatctggcagctggtggcccccacccagtaccgcatctccctgcagtttgacttctttgagacagagggcaatgatgtgtgcaagtacgacttcgtggaggtgcgcagtggactcacagctgactccaagctgcatggcaagttctgtggttctgagaagcccgaggtcatcacctcccagtacaacaacatgcgcgtggagttcaagtccgacaacaccgtgtccaaaaagggcttcaaggcccacttcttctcagaaaagaggccagctctgcagccccctcggggacgcccccaccagctcaaattccgagtgcagaaaagaaaccggaccccccagtgaggcctgccaggcctcccggaccccttgttactcaggaacctcaccttggacggaatgggatgggggcttcggtgcccaccaaccccccacctccactctgccattccggcccacctccctctggccggacagaactggtgctctcttctccccactgtgcccgtccgcggaccggggacccttccccgtgccctaccccctcccattttgatggtgtctgtgacatttcctgttgtgaagtaaaagagggacccctgcgtcctgc

SEQ ID NO: 6343 - DNA, 1862 bp, Homo sapiens
  II.101 (NM_000960)
agcaagtgaaggcacagacgcacgggacaggagagcctgggcaagactggagagcccagacctgggatggcggattcgtgcaggaacctcacctacgtgcggggctcggtggggccggccaccagcaccctgatgttcgtggccggtgtggtgggcaacgggctggccctgggcatcctgagcgcacggcgaccggcgcgcccctcggccttcgcggtgctggtcaccggactggcggccaccgacctgctgggcaccagcttcctgagcccggccgtgttcgtggcctatgcgcgcaacagctccctgctgggcctggcccgaggcggccccgccctgtgcgatgccttcgccttcgccatgaccttcttcggcctggcgtccatgctcatcctctttgccatggccgtggagcgctgcctggcgctgagccacccctacctctacgcgcagctggacgggccccgctgcgcccgcctggcgctgccagccatctacgccttctgcgtcctcttctgcgcgctgcccctgctgggcctgggccaacaccagcagtactgccccggcagctggtgcttcctccgcatgcgctgggcccagccgggcggcgccgccttctcgctggcctacgccggcctggtggccctgctggtggctgccatcttcctctgcaacggctcggtcaccctcagcctctgccgcatgtaccgccagcagaagcgccaccagggctctctgggtccacggccgcgcaccggagaggacgaggtggaccacctgatcctgctggccctcatgacagtggtcatggccgtgtgctccctgcctctcacgatccgctgcttcacccaggctgtcgcccctgacagcagcagtgagatgggggacctccttgccttccgcttctacgccttcaaccccatcctggacccctgggtcttcatccttttccgcaaggctgtcttccagcgactcaagctctgggtctgctgcctgtgcctcgggcctgcccacggagactcgcagacacccctttcccagctcgcctccgggaggagggacccaagggccccctctgctcctgtgggaaaggaggggagctgcgtgcctttgtcggcttggggcgaggggcaggtggagcccttgcctcccacacagcagtccagcggcagcgccgtgggaacgtcgtccaaagcagaagccagcgtcgcctgctccctctgctgacatttcaagctgaccctgtgatctctgccctgtcttcgggcgacaggagccagaaaatcagggacatggctgatggctgcggatgctggaaccttggcccccaaactctggggccgatcagctgctgtttctcctgcggcagggcagtcgctgctggctctgggaagagagtgagggacagaggaaacgtttatcctggagtgcagaaagaatggttctctcaaaataaccagtggcctggccgacctgctctggccctggattccccatccatctcattgtctaaatatttagaaggcggagaagttcccagaggcttctgtacagtcaggtctgctctggtctgggtgctggctccaatctgcgtccacttaggaggcccaactgcccaccccaagtccccaggggatggccctccccctctaccaagccactccaagagccagccccctttctgctccacaaaaaccacagttattggaaaagctccctgccttcccttgccgctggtcccccaccaggcttgggagccctggcatcccaaaggggcaacgggaggaaggggaggctgctgcattgtgggtgatgacgtaggacatgtgcttggtacaaaaagggcctgagacattccacct

SEQ ID NO: 6344 - DNA, 2857 bp, Homo sapiens
  II.102 (XM_012039)
ctgctcctgcgcggcagctgctttagaaggtctcgagcctcctgtaccttcccagggatgaaccgggccttccctctggaaggcgagggttcgggccacagtgagcgagggccagggcggtgggcgcgcgcagagggaaaccggatcagttgagagagaatcaagagtagcggatgaggcgcttgtggggcgcggcccggaagccctcgggcgcgggctgggagaaggagtgggcggaggcgccgcaggaggctcccggggcctggtcgggccggctgggccccgggcgcagtggaagaaagggacgggcggtgcccggttgggcgtcctggccagctcaccttgccctggcggctcgccccgcccggcacttgggaggagcagggcagggcccgcggcctttgcattctgggaccgcccccttccattcccgggccagcggcgagcggcagcgacggctggagccgcagctacagcatgagagccggtgccgctcctccacgcctgcggacgcgtggcgagcggaggcagcgctgcctgttcgcgccatgggggcaccgtggggctcgccgacggcggcggcgggcgggcggcgcgggtggcgccgaggccgggggctgccatggaccgtctgtgtgctggcggccgccggcttgacgtgtacggcgctgatcacctacgcttgctgggggcagctgccgccgctgccctgggcgtcgccaaccccgtcgcgaccggtgggcgtgctgctgtggtgggagcccttcggggggcgcgatagcgccccgaggccgccccctgactgccggctgcgcttcaacatcagcggctgccgcctgctcaccgaccgcgcgtcctacggagaggctcaggccgtgcttttccaccaccgcgacctcgtgaaggggccccccgactggcccccgccctggggcatccaggcgcacactgccgaggaggtggatctgcgcgtgttggactacgaggaggcagcggcggcggcagaagccctggcgacctccagccccaggcccccgggccagcgctgggtttggatgaacttcgagtcgccctcgcactccccggggctgcgaagcctggcaagtaacctcttcaactggacgctctcctaccgggcggactcggacgtctttgtgccttatggctacctctaccccagaagccaccccggcgacccgccctcaggcctggccccgccactgtccaggaaacaggggctggtggcatgggtggtgagccactgggacgagcgccaggcccgggtccgctactaccaccaactgagccaacatgtgaccgtggacgtgttcggccggggcgggccggggcagccggtgcccgaaattgggctcctgcacacagtggcccgctacaagttctacctggctttcgagaactcgcagcacctggattatatcaccgagaagctctggcgcaacgcgttgctcgctggggcggtgccggtggtgctgggcccagaccgtgccaactacgagcgctttgtgccccgcggcgccttcatccacgtggacgacttcccaagtgcctcctccctggcctcgtacctgcttttcctcgaccgcaaccccgcggtctatcgccgctacttccactggcgccggagctacgctgtccacatcacctccttctgggacgagccttggtgccgggtgtgccaggctgtacagagggctggggaccggcccaagagcatacggaacttggccagctggttcgagcggtgaagccgcgctcccctggaagcgacccaggggaggccaagttgtcagctttttgatcctctactgtgcatctccttgactgccgcatcatgggagtaagttcttcaaacacccatttttgctctatgggaaaaaaacgatttaccaattaatattactcagcacagagatgggggcccggtttccatattttttgcacagctagcaattgggctccctttgctgctgatgggcatcattgtttaggggtgaaggagggggttcttcctcaccttgtaaccagtgcagaaatgaaatagcttagcggcaagaagccgttgaggcggtttcctgaatttccccatctgccacaggccatatttgtggcccgtgcagcttccaaatctcatacacaactgttcccgattcacgtttttctggaccaaggtgaagcaaatttgtggttgtagaaggagccttgttggtggagagtggaaggactgtggctgcaggtgggactttgttgtttggattcctcacagccttggctcctgagaaaggtgaggagggcagtccaagaggggccgctgacttctttcacaagtactatctgttcccctgtcctgtgaatggaagcaaagtgctggattgtccttggaggaaacttaagatgaatacatgcgtgtacctcactttacataagaaatgtattcctgaaaagctgcatttaaatcaagtcccaaattcattgacttaggggagttcagtatttaatgaaaccctatggagaatttatccctttacaatgtgaatagtcatctcctaatttgtttcttctgtctttatgtttttctataacctggattttttaaatcatattaaaattacagatgtgaaaataaagcagaagcaacctttttccctcttcccagaaaaccagtctgtgtttacagacagaagagaaggaagccatagtgtcacttccacacaattatttatttcatgtctttactggacctgaaatttaaactgcaatgccagtcctgcaggagtgctggcattaccctctgcagaacagtgaaaggtattgcactacattatggaatcatgcaaaa

SEQ ID NO: 6345 - DNA, 3855 bp, Homo sapiens
  II.103 (XM_034166)
ctctcggccacctttgatgaggggactgggcagttctagacagtcccgaagttctcaaggcacaggtctcttcctggtttgactgtccttaccccggggaggcagtgcagccagctgcaagccccacagtgaagaacatctgagctcaaatccagataagtgacataagtgacctgctttgtaaagccatagagatggcctgtccttggaaatttctgttcaagaccaaattccaccagtatgcaatgaatggggaaaaagacatcaacaacaatgtggagaaagccccctgtgccacctccagtccagtgacacaggatgaccttcagtatcacaacctcagcaagcagcagaatgagtccccgcagcccctcgtggagacgggaaagaagtctccagaatctctggtcaagctggatgcaaccccattgtcctccccacggcatgtgaggatcaaaaactggggcagcgggatgactttccaagacacacttcaccataaggccaaagggattttaacttgcaggtccaaatcttgcctggggtccattatgactcccaaaagtttgaccagaggacccagggacaagcctacccctccagatgagcttctacctcaagctatcgaatttgtcaaccaatattacggctccttcaaagaggcaaaaatagaggaacatctggccagggtggaagcggtaacaaaggagatagaaacaacaggaacctaccaactgacgggagatgagctcatcttcgccaccaagcaggcctggcgcaatgccccacgctgcattgggaggatccagtggtccaacctgcaggtcttcgatgcccgcagctgttccactgcccgggaaatgtttgaacacatctgcagacacgtgcgttactccaccaacaatggcaacatcaggtcggccatcaccgtgttcccccagcggagtgatggcaagcacgacttccgggtgtggaatgctcagctcatccgctatgctggctaccagatgccagatggcagcatcagaggggaccctgccaacgtggaattcactcagctgtgcatcgacctgggctggaagcccaagtacggccgcttcgatgtggtccccctggtcctgcaggccaatggccgtgaccctgagctcttcgaaatcccacctgaccttgtgcttgaggtggccatggaacatcccaaatacgagtggtttcgggaactggagctaaagtggtacgccctgcctgcagtggccaacatgctgcttgaggtgggcggcctggagttcccagggtgccccttcaatggctggtacatgggcacagagatcggagtccgggacttctgtgacgtccagcgctacaacatcctggaggaagtgggcaggagaatgggcctggaaacgcacaagctggcctcgctctggaaagaccaggctgtcgttgagatcaacattgctgtgctccatagtttccagaagcagaatgtgaccatcatggaccaccactcggctgcagaatccttcatgaagtacatgcagaatgaataccggtcccgtgggggctgcccggcagactggatttggctggtccctcccatgtctgggagcatcacccccgtgtttcaccaggagatgctgaactacgtcctgtcccctttctactactatcaggtagaggcctggaaaacccatgtctggcaggacgagaagcggagacccaagagaagagagattccattgaaagtcttggtcaaagctgtgctctttgcctgtatgctgatgcgcaagacaatggcgtcccgagtcagagtcaccatcctctttgcgacagagacaggaaaatcagaggcgctggcctgggacctgggggccttattcagctgtgccttcaaccccaaggttgtctgcatggataagtacaggctgagctgcctggaggaggaacggctgctgttggtggtgaccagtacgtttggcaatggagactgccctggcaatggagagaaactgaagaaatcgctcttcatgctgaaagagctcaacaacaaattcaggtacgctgtgtttggcctcggctccagcatgtaccctcggttctgcgcctttgctcatgacattgatcagaagctgtcccacctgggggcctctcagctcaccccgatgggagaaggggatgagctcagtgggcaggaggacgccttccgcagctgggccgtgcaaaccttcaaggcagcctgtgagacgtttgatgtccgaggcaaacagcacattcagatccccaagctctacacctccaatgtgacctgggacccgcaccactacaggctcgtgcaggactcacagcctttggacctcagcaaagccctcagcagcatgcatgccaagaacgtgttcaccatgaggctcaaatctcggcagaatctacaaagtccgacatccagccgtgccaccatcctggtggaactctcctgtgaggatggccaaggcctgaactacctgccgggggagcaccttggggtttgcccaggcaaccagccggccctggtccaaggtatcctggagcgagtggtggatggccccacaccccaccagacagtgcgcctggaggccctggatgagagtggcagctactgggtcagtgacaagaggctgcccccctgctcactcagccaggccctcacctacttcctggacatcaccacacccccaacccagctgctgctccaaaagctggcccaggtggccacagaagagcctgagagacagaggctggaggccctgtgccagccctcagagtacagcaagtggaagttcaccaacagccccacattcctggaggtgctagaggagttcccgtccctgcgggtgtctgctggcttcctgctttcccagctccccattctgaagcccaggttctactccatcagctcctcccgggatcacacgcccacagagatccacctgactgtggccgtggtcacctaccacacccgagatggccagggtcccctgcaccacggcgtctgcagcacatggctcaacagcctgaagccccaagacccagtgccctgctttgtgcggaatgccagcggcttccacctccccgaggatccctcccatccttgcatcctcatcgggcctggcacaggcatcgcgcccttccgcagtttctggcagcaacggctccatgactcccagcacaagggagtgcggggaggccgcatgaccttggtgtttgggtgccgccgcccagatgaggaccacatctaccaggaggagatgctggagatggcccagaagggggtgctgcatgcggtgcacacagcctattcccgcctgcctggcaagcccaaggtctatgttcaggacatcctgcggcagcagctggccagcgaggtgctccgtgtgctccacaaggagccaggccacctctatgtttgcggggatgtgcgcatggcccgggacgtggcccacaccctgaagcagctggtggctgccaagctgaaattgaatgaggagcaggtcgaggactatttctttcagctcaagagccagaagcgctatcacgaagatatctttggtgctgtatttccttacgaggcgaagaaggacagggtggcggtgcagcccagcagcctggagatgtcagcgctctgagggcctacaggaggggttaaagctgccggcacagaacttaaggatggagccagctctgcattatctgaggtcacagggcctggggagatggaggaaagtgatatcccccagcctcaagtcttatttcctcaacgttgctccccatcaagccctttacttgacctcctaacaagtagcaccctggattgatcggagcctc

SEQ ID NO: 6346 - DNA, 2912 bp, Homo sapiens
  II.104 (NM_003188)
tccctccttttctttccaagtcacaaaattctcccctcccctaccccggagtttacggccctcctcctgtttccgatttcagcccggaaccggaagtgtagtgggcggggcccgtcggcggaaaacgcagcggagccagagccggacacggctgtggccgctgcctctacccccgccacggatcgccgggtagtaggactgcgcggctccaggctgagggtcggtccggaggcgggtgggcgcgggtctcacccggattgtccgggtggcaccgttcccggccccaccgggcgccgcgagggatcatgtctacagcctctgccgcctcctcctcctcctcgtcttcggccggtgagatgatcgaagccccttcccaggtcctcaactttgaagagatcgactacaaggagatcgaggtggaagaggttgttggaagaggagcctttggagttgtttgcaaagctaagtggagagcaaaagatgttgctattaaacaaatagaaagtgaatctgagaggaaagcgtttattgtagagcttcggcagttatcccgtgtgaaccatcctaatattgtaaagctttatggagcctgcttgaatccagtgtgtcttgtgatggaatatgctgaagggggctctttatataatgtgctgcatggtgctgaaccattgccatattatactgctgcccacgcaatgagttggtgtttacagtgttcccaaggagtggcttatcttcacagcatgcaacccaaagcgctaattcacagggacctgaaaccaccaaacttactgctggttgcaggggggacagttctaaaaatttgtgattttggtacagcctgtgacattcagacacacatgaccaataacaaggggagtgctgcttggatggcacctgaagtttttgaaggtagtaattacagtgaaaaatgtgacgtcttcagctggggtattattctttgggaagtgataacgcgtcggaaaccctttgatgagattggtggcccagctttccgaatcatgtgggctgttcataatggtactcgaccaccactgataaaaaatttacctaagcccattgagagcctgatgactcgttgttggtctaaagatccttcccagcgcccttcaatggaggaaattgtgaaaataatgactcacttgatgcggtactttccaggagcagatgagccattacagtatccttgtcagtattcagatgaaggacagagcaactctgccaccagtacaggctcattcatggacattgcttctacaaatacgagtaacaaaagtgacactaatatggagcaagttcctgccacaaatgatactattaagcgcttagaatcaaaattgttgaaaaatcaggcaaagcaacagagtgaatctggacgtttaagcttgggagcctcccgtgggagcagtgtggagagcttgcccccaacctctgagggcaagaggatgagtgctgacatgtctgaaatagaagctaggatcgccgcaaccacaggcaacggacagccaagacgtagatccatccaagacttgactgtaactggaacagaacctggtcaggtgagcagtaggtcatccagtcccagtgtcagaatgattactacctcaggaccaacctcagaaaagccaactcgaagtcatccatggacccctgatgattccacagataccaatggatcagataactccatcccaatggcttatcttacactggatcaccaactacagcctctagcaccgtgcccaaactccaaagaatctatggcagtgtttgaacagcattgtaaaatggcacaagaatatatgaaagttcaaacagaaattgcattgttattacagagaaagcaagaactagttgcagaactggaccaggatgaaaaggaccagcaaaatacatctcgcctggtacaggaacataaaaagcttttagatgaaaacaaaagcctttctacttactaccagcaatgcaaaaaacaactagaggtcatcagaagtcagcagcagaaacgacaaggcacttcatgattctctgggaccgttacattttgaaatatgcaaagaaagactttttttttaaggaaaggaaaaccttataatgacgattcatgagtgttagctttttggcgtgttctgaatgccaactgcctatatttgctgcatttttttcattgtttattttccttttctcatggtggacatacaattttactgtttcattgcataacatggtagcatctgtgacttgaatgagcagcactttgcaacttcaaaacagatgcagtgaactgtggctgtatatgcatgctcattgtgtgaaggctagcctaacagaacaggaggtatcaaactagctgctatgtgcaaacagcgtccattttttcatattagaggtggaacctcaagaatgactttattcttgtatctcatctcaaaatattaataatttttttcccaaaagatggtatataccaagttaaagacagggtattataaatttagagtgattggtggtatattacggaaatacggaacctttagggatagttccgtgtaagggctttgatgccagcatccttggatcagtactgaactcagttccatccgtaaaatatgtaaaggtaagtggcagctgctctatttaatgaaagcagttttaccggattttgttagactaaaatttgattgtgatacattgaacaaaatggaactcatttttttttaaggagtaaagatttttaattctgtgattgtgtgtatgtgtgttgaaactgtaaagcttttatgactctaatattaatctcttaaatgaaattaaaaggcaaaagaacatgattgagcttaaatgatcatttcttcctgcagtgattcttggattgttttctcatgtatttg

SEQ ID NO: 6347 - DNA, 3336 bp, Homo sapiens
  II.105 (NM_006609)
ttttattaatatgctgatctgttttatcttctcacggccataaagaatgctgatgggagaaccattttcctaattttcaaattgttgagctgtttgccataatggatgatcagcaagctttgaactcaatcatgcaagatttggctgtccttcataaggccagtcgaccagcattatccttgcaggaaaccagaaaagcaaaatcttcatcaccaaaaaaacagaatgatgtccgagtcaaatttgaacatagaggagaaaaaagaatccttcagttccccagaccagttaaactggaagatctgagatctaaagctaaaattgcctttggacagtctatggatctacattataccaataacgagttggtaattccattaactactcaagatgacttggacaaagctctggaactgctggatcgtagtattcatatgaagagcctcaagatattacttgtaataaatggaagtacacaggctactaatttagaaccattgccatcactagaagatttggataatacagtatttggagcagagaggaaaaaacggctatctataataggtcctactagtagagatagaagttctcctcccccgggttacattccagatgaattacaccaggttgcccggaatgggtcattcactagtatcaacagtgaaggagagttcattccagagagcatggaacaaatgctggatccattatctttaagcagccctgaaaattctggctcaggaagttgtccatcacttgatagtcctttggatggagagagctatccaaaatcacgaatgcctagggctcagagctacccagataatcatcaggaattttcagactatgataaccctatctttgagaaatttggaaaaggaggaacatatccaagaaggtatcatgtttcatatcatcatcaagaggtaataatgatggtcgtaaaacttttccaagagctagaaggacccaggggaaccagcttacggtctcctgtgagtttcagtcctactgatcattccttaagcactagtagtggaagcagtatctttaccccagagtatgatgatagtcgaataagaagaaggggaagtgacatagacaatcctactttgacagtaatggacatcagcccacccagccgttcacctcgagctccgaccaactggagattgggcaaactgcttggccaaggagcctttggaagggtctacctctgttatgatgttgatacaggaagagaattggctgttaagcaagttcaatttgaccccgatagtcctgagaccagcaaggaagtaaatgcacttgagtgtgaaattcagttgctgaaaaacttgctacatgagcgaattgttcagtattatggctgtttgagggatccccaggaaaaaacactttccatatttatggaatatatgccagggggttcaattaaggaccaattaaaagcatatggcgctcttactgagaatgtgactaggaaatacacccgtcagattctggagggtgtccattatttgcacagtaatatgattgtcctacgagatatcaaaggcgcaaatatcctgcgagattcaacaggcaacgtcaaactaggagattttggggccagcaaacggcttcagaccatctgtctctcagggacaggaatgaagtctgtcacgggcacaccatactggatgagccctgaagtcatcagtggagaaggctatggaagaaaagcagacatctggagtgttgcatgtactgtggtagaaatgctaactgaaaagccgccttgggctgaatttgaagcaatggctgccatctttaaaatcgccactcagccaacaaacccaaagctgccacctcatgtctcagactatactcgagatttcctcaaacggatttttgtagaggccaaactgagaccttcagctgatgaactcttaaggcacatgtttgtgcattatcactagcagccagtaacctctcctgtgcctctacctagctcccatctattcattcaccttctctctgactgcacttttcttttttataaaaaaagagagatgggggagaaaaaagacaagagggaaagtatttctcttgattcttggttaaatttgtttaataataataatatcctaaattttttatatttaatctttttttcccttacaagaacttgaagttttttttttaatttttataatgtactgatgtggttcagagagataaagcactttagtacatagtcactctttttagtacaaacaaatcatttggaatacctaaagattgtagagtcattccctctatcactgacacatcagtgacgatgggaagacatggaaaacaaggagaagaaaatgatgtataatttgtagtttttagtgatagtatttaaaatatatcctcatttgtggggttgagccctaaactttagtttagggtaggtactcaacttaaagaatataggtttcttcttatatctgtattctttagatcctaacctctgtctaccaacctttttgctcagtaggagtcttgatagaagatatgaatctctgagaggtatgtttatttgttaatcctaaccagtataataagcaaatacactataatagatccacgttactggaatctgtaaaccttgagggatagctttctgcttaaaaacacacacacacacacacacacacggaaaacctttattttaaagtcaagttgtgagcaaatagaaataaaagacaaaaggacatcactcttatcaaatgtgtgagcagtagaagagaccacatttacagtcaatagaaataatgaaaaaaaattaggtgtttagtgtattttaaacagttttgttttgttttacttgagggggacgtcccaaaattaaaggaatggagaaataatcaaaatcatgtataccatcttctatttccagctcctgattccccataggtaacatcccttaggagcgaagagttcaattagtaatgtttatgtgttatgtcaggagatgaaacccttgttcttaggatcacagaatactaaagcacctcaaaaaaacaggtatcatgtgaaacagtggttgccaaaagtggagcgaggatgatttcactaggcatttggcaattcttagagacatttccggttgtcacaattggagggatactagtagcatgaattgggtagaggccagggatgttgctaaatagattataatacacaaggaaagcagcctcaaagaattacccctcccaaaatgtcagaagtgctgaggctgagaaaccctgatgtaaagatcagtcccagttataaactgaaaacagctatttacaaagcagt

SEQ ID NO: 6348 - DNA, 1552 bp, Homo sapiens
  II.106 (XM_027358)
actcttgggaaaactgctgggcaccgtcgtcgcgctgaaggtggttctgtacctgctccgagtgtgcttagcgatggcctggaaatccggcggcgccagccactcggagctaatccacaatctccgcaaaaatggaatcatcaagacagataaagtatttgaagtgatgctggctacagaccgctcccactatgcaaaatgtaacccatacatggattctccacaatcaataggtttccaagcaacaatcagtgctccacacatgcatgcatatgcgctagaacttctatttgatcagttgcatgaaggagctaaagctcttgatgtaggatctggaagtggaatccttactgcatgttttgcacgtatggttggatgtactggaaaagtcataggaattgatcacattaaagagctagtagatgactcagtaaataatgtcaggaaggacgatccaacacttctgtcttcagggagagtacagcttgttgtgggggatggaagaatgggatatgctgaagaagccccttatgatgccattcatgtgggagctgcagcccctgttgtaccccaggcgctaatagatcagttaaagcccggaggaagattgatattgcctgttggtcctgcaggcggaaaccaaatgttggagcagtatgacaagctacaagatggcagcatcaaaatgaagcctctgatgggggtgatatacgtgcctttaacagataaagaaaagcagtggtccagggatgaattgtaaaagcaacatcagcttgaccagtataaaattacagtggattgctcatctcagtcctcaaagctttttgaaaaccaacaccatcacagcttgttttggactttgttacactgttattttcagcatgaaaatgtgtgtttttttagggtttctgattcttcaaagaggcacagagccaaattggtagaggaaggatgcaaagtataaatttgtgtaatattactttaacatgcccatattttacttggaaatattaaaagaaagggttctgtaaaatggaaaacttagtttgtgaattgattttgaggagtggtttttcttttcttggacacttaattctgttctgatattaatttatcagattgcttttgtgcattggataacaccaccattcacaagttaagattcttggtatttggatatctgttagatgctactaagaaaatagagatgagctttctttttaaagcttttgatgtggtgtcatagaatagcatgttgtagatacaatcagctgctttgttaccttaaaactaggcatttgtaaatattaaaccataagatggcaggtgatgtcctgtaaacactcagctgttcagattggacataactgacttagttcttcccttctctctctctcaaaattataggagacttgtagtttagtgtggttttctgtttctaatttgctgctgataatgtatatgaacttaacatgctgtgtaagctgtgtcctagttcttgaacagtttatgcagtgctgctttgccaaataaagttaaaagtaaaagaggc

SEQ ID NO: 6349 - DNA, 5722 bp, Homo sapiens
  II.107 (XM_007189)
gcagccgccacattcaacaggcagcagcgcagcgggcgcgccgctggggagagcaagcggcccgcggcgtccgtccgtccttccgtccgcggccctgtcagctggagcgcggcgcaggctctgccccggcccggcggctctggccggccgtccagtccgtgcggcggaccccgaggagcctcgatgtggatggccccgcgaagttaagttctgggctcgcgcttccactccgccgcgccttcctcccagtttccgtccgctcgccgcaccggcttcgttcccccaaatctcggaccgtcccttcgcgccccctccccgtccgcccccagtgctgcgttctccccctcttggctctcctgcggctgggggaggggcgggggtcaccatggccgaggcgcctcaggtggtggagatcgacccggacttcgagccgctgccccggccgcgctcgtgcacctggccgctgcccaggccggagtttagccagtccaactcggccacctccagcccggcgccgtcgggcagcgcggctgccaaccccgacgccgcggcgggcctgccctcggcctcggctgccgctgtcagcgccgacttcatgagcaacctgagcttgctggaggagagcgaggacttcccgcaggcgcccggctccgtggcggcggcggtggcggcggcggccgccgcggccgccaccggggggctgtgcggggacttccagggcccggaggcgggctgcctgcacccagcgccaccgcagcccccgccgcccgggccgctgtcgcagcacccgccggtgccccccgccgccgctgggccgctcgcggggcagccgcgcaagagcagctcgtcccgccgcaacgcgtggggcaacctgtcctacgccgacctcatcaccaaggccatcgagagctcggcggagaagcggctcacgctgtcgcagatctacgagtggatggtcaagagcgtgccctacttcaaggataagggtgacagcaacagctcggcgggctggaagaattcaattcgtcataatctgtccctacacagcaagttcattcgtgtgcagaatgaaggaactggaaaaagttcttggtggatgctcaatccagagggtggcaagagcgggaaatctcctaggagaagagctgcatccatggacaacaacagtaaatttgctaagagccgaagccgagctgccaagaagaaagcatctctccagtctggccaggagggtgctggggacagccctggatcacagttttccaaatggcctgcaagccctggctctcacagcaatgatgactttgataactggagtacatttcgccctcgaactagctcaaatgctagtactattagtgggagactctcacccattatgaccgaacaggatgatcttggagaaggggatgtgcattctatggtgtacccgccatctgccgcaaagatggcctctactttacccagtctgtctgagataagcaatcccgaaaacatggaaaatcttttggataatctcaaccttctctcatcaccaacatcattaactgtttcgacccagtcctcacctggcaccatgatgcagcagacgccgtgctactcgtttgcgccaccaaacaccagtttgaattcacccagcccaaactaccaaaaatatacatatggccaatccagcatgagccctttgccccagatgcctatacaaacacttcaggacaataagtcgagttatggaggtatgagtcagtataactgtgcgcctggactcttgaaggagttgctgacttctgactctcctccccataatgacattatgacaccagttgatcctggggtagcccagcccaacagccgggttctgggccagaacgtcatgatgggccctaattcggtcatgtcaacctatggcagccaggcatctcataacaaaatgatgaatcccagctcccatacccaccctggacatgctcagcagacatctgcagttaacgggcgtcccctgccccacacggtaagcaccatgccccacacctcgggtatgaaccgcctgacccaagtgaagacacctgtacaagtgcctctgccccaccccatgcagatgagtgccctggggggctactcctccgtgagcagctgcaatggctatggcagaatgggccttctccaccaggagaagctcccaagtgacttggatggcatgttcattgagcgcttagactgtgacatggaatccatcattcggaatgacctcatggatggagatacattggattttaactttgacaatgtgttgcccaaccaaagcttcccacacagtgtcaagacaacgacacatagctgggtgtcaggctgagggttagtgagcaggttacacttaaaagtacttcagattgtctgacagcaggaactgagagaagcagtccaaagatgtctttcaccaactcccttttagttttcttggttaaaaaaaaaaacaaaaaaaaaaaccctccttttttcctttcgtcagacttggcagcaaagacatttttcctgtacaggatgtttgcccaatgtgtgcaggttatgtgctgctgtagataaggactgtgccattggaaatttcattacaatgaagtgccaaactcactacaccatataattgcagaaaagattttcagatcctggtgtgctttcaagttttgtatataagcagtagatacagattgtatttgtgtgtgtttttggtttttctaaatatccaattggtccaaggaaagtttatactctttttgtaatactgtgatgggcctcatgtcttgataagttaaacttttgtttgtactacctgttttctgcggaactgacggatcacaaagaactgaatctccattctgcatctccattgaacagccttggacctgttcacgttgccacagaattcacatgagaaccaagtagcctgttatcaatctgctaaattaatggacttgttaaacttttggaaaaaaaaagattaaatgccagctttgtacaggtcttttctatttttttttgtttattttgttatttgcaaatttgtacaaacatttaaatggttctaatttccagataaatgatttttgatgttattgttgggacttaagaacatttttggaatagatattgaactgtaataatgttttcttaaaactagagtctactttgttacatagtcagcttgtaaattttgtggaaccacaggtatttggggcagcattcataattttcattttgtattctaactggattagtactaattttatacatgcttaactggtttgtacactttgggatgctacttagtgatgtttctgactaatcttaaatcattgtaattagtacttgcatattcaacgtttcaggccctggttgggcaggaaagtgatgtatagttatggacactttgcgtttcttatttaggataacttaatatgtttttatgtatgtattttaaagaaatttcatctgcttctactgaactatgcgtactgcatagcatcaagtcttctctagagacctctgtagtcctgggaggcctcataatgtttgtagatcagaaaagggagatctgcatctaaagcaatggtcctttgtcaaacgagggattttgatccacttcaccattttgagttgagctttagcaaaagtttcccctcataattctttgctcttgtttcagtccaggtggaggttggttttgtagttctgccttgaggaattatgtcaacactcatacttcatctcattctcccttctgccctgcagattagattacttagcacactgtggaagtttaagtggaaggagggaatttaaaaatgggacttgagtggtttgtagaatttgtgttcataagttcagatgggtagcaaatggaatagaacttacttaaaaattggggagatttatttgaaaaccagctgtaagttgtgcattgagattatgttaaaagccttggcttaagaatttgaaaatttctttagcctgtagcaacctaaactgtaattcctatcattatgttttattactttccaattacctgtaactgacagaccaaattaattggctttgtgtcctatttagtccatcagtattttcaagtcatgtggaaagcccaaagtcatcacaatgaagagaacaggtgcacagcactgttcctcttgtgttcttgagaaggatctaatttttctgtatatagcccacatcacacttgctttgtcttgtatgttaattgcatcttcattggcttggtatttcctaaatgtttaacaagaacacaagtgttcctgataagatttcctacagtaagccagctctattgtaagcttcccactgtgatgatcatttttttgaagattcattgaacagccaccactctatcatcctcattttggggcagtccaagacatagctggttttagaaacccaagttcctctaagcacagcctcccgggtatgtaactgaacttggtgccaaagtacttgtgtactaatttctattactacgtactgtcactttcctcccgtgccattactgcatcataatacaaggaacctcagagcccccatttgttcattaaagaggcaactacagccaaaatcactgttaaaatcttactacttcatggagtagctcttaggaaaatatatcttcctcctgagtctgggtaattatacctctcccaagcccccattgtgtgttgaaatcctgtcatgaatccttggtagctctctgagaacagtgaagtccagggaaaggcatctggtctgtctggaaagcaaacattatgtggcctctggtagtttttttcctgtaagaatactgactttctggagtaatgagtatatatcagttattgtacatgattgctttgtgaaatgtgcaaatgatatcacctatgcagccttgtttgatttattttctctggtttgtactgttattaaaagcatattgtattatagagctattcagatattttaaatataaagatgtattgtttccgtaatatagacgtatggaatatatttaggtaatagatgtattacttggaaagttctgctttgacaaactgacaaagtctaaatgagcacatgtatcccagtgagcagtaaatcaatggaacatcccaagaagaggataaggatgcttaaaatggaaatcattctccaacgatatacaaattggacttgttcaactgctggatatatgctaccaataaccccagccccaacttaaaattcttacattcaagctcctaagagttcttaatttataactaattttaaaagagaagtttcttttctggttttagtttgggaataatcattcattaaaaaaaatgtattgtggtttatgcgaacagaccaacctggcattacagttggcctctccttgaggtgggcacagcctggcagtgtggccaggggtggccatgtaagtcccatcaggacgtagtcatgcctcctgcatttcgctacccgagtttagtaacagtgcagattccacgttcttgttccgatactctgagaagtgcctgatgttgatgtacttacagacacaagaacaatctttgctataattgtataaagccataaatgtacataaattatgtttaaatggcttggtgtctttcttttctaattatgcagaataagctctttattaggaattttttgtgaagctattaaatacttgagttaa

SEQ ID NO: 6350 - DNA, 2769 bp, Homo sapiens
  II.108 (XM_030523)
ggatcccagtggcccggcgtgctcggctcccacaggcctgcagccagcatcgcaccgaaccttcggggggccgcggctggagcgctcggccggcgtgggagcgccaaggccgcagatgcaatcttcttaccgcgaagaagccaggggaataggtagccacatcttgtttgcagataagaaaggaagctaacgcagtatctgcaaagccaggagtctgactcagtacttttctcactcatgcatacaaagcagctaaaaatgacacagcttatttaccatgcccctgacactgcactgagcactttatgagcttgaactctgttaatcctcacgaccacctcatgagactctccagaaagagcaacagtaatggagtacatgagcactggaagtgacaataaagaagagattgatttattaattaaacatttaaatgtgtctgatgtaatagacattatggaaaatctttatgcaagtgaagagccagcagtttatgaacccagtctaatgaccatgtgtcaagacagtaatcaaaacgatgagcgttctaagtctctgctgcttagtggccaagaggtaccatggttgtcatcagtcagatatggaactgtggaggatttgcttgcttttgcaaaccatatatccaacactgcaaagcatttttatggacaacgaccacaggaatctggaattttattaaacatggtcatcactccccaaaatggacgttaccaaatagattccgatgttctcctgatcccctggaagctgacttacaggaatattggttctgattttattcctcggggcgcctttggaaaggtatacttggcacaagatataaagacgaagaaaagaatggcgtgtaaactgatcccagtagatcaatttaagccatctgatgtggaaatccaggcttgcttccggcacgagaacatcgcagagctgtatggcgcagtcctgtggggtgaaactgtccatctctttatggaagcaggcgagggagggtctgttctggagaaactggagagctgtggaccaatgagagaatttgaaattatttgggtgacaaagcatgttctcaagggacttgattttctacactcaaagaaagtgatccatcatgatattaaacctagcaacattgttttcatgtccacaaaagctgttttggtggattttggcctaagtgttcaaatgaccgaagatgtctattttcctaaggacctccgaggaacagagatttacatgagcccagaggtcatcctgtgcaggggccattcaaccaaagcagacatctacagcctgggggccacgctcatccacatgcagacgggcaccccaccctgggtgaagcgctaccctcgctcagcctatccctcctacctgtacataatccacaagcaagcacctccactggaagacattgcagatgactgcagtccagggatgagagagctgatagaagcttccctggagagaaaccccaatcaccgcccaagagccgcagacctactaaaacatgaggccctgaacccgcccagagaggatcagccacgctgtcagagtctggactctgccctcttggagcgcaagaggctgctgagtaggaaggagctggaacttcctgagaacattgctgattcttcgtgcacaggaagcaccgaggaatctgagatgctcaagaggcaacgctctctctacatcgacctcggcgctctggctggctacttcaatcttgttcggggaccaccaacgcttgaatatggctgaaggatgccatgtttgctctaaattaagacagcattgatctcctggaggctggttctgctgcctctacacaggggccctgtacagtgaatggtgccattttcgaaggagcagtgtgacctcctgtgacccgtgaatgtgcctccaagcggccctgtgtgtttgacatgtgaagctatttgatatgcaccaggtctcaaggttctcatttctcaggtgacgtgattctaaggcaggaatttgagagttcacagaaggatcgtgtctgctgactgtttcattcactgtgcactttgctcaaaattttaaaaataccaatcacaaggataatagagtagcctaaaattactattcttggttcttatttaagtatggaatattcattttactcagaatagctgttttgtgtatattggtgtatattatataactctttgagcctttattggtaaattctggtatacattgaattcattataatttgggtgactagaacaacttgaagattgtagcaataagctggactagtgtcctaaaaatggctaactgatgaattagaagccatctgacagcaggccactagtgacagtttcttttgtgttcctatggaaacattttatactgtacatgctatgctgaagacattcaaaacgtgatgttttgaatgtggataaaactgtgtaaaccacataatttttgtacatcccaaaggatgagaatgtgacctttaagaaaaatgaaaacttttgtaaattattgatgattttgtaattcttatgactaaattttcttttaagcatttgtatattaaaatagcatactgtgtatgttttatatcaaatgccttcatgaatctttcatacatatatatatttgtaacattgtaaagtatgtgagtagtcttatgtaaagtatgtttttacattatgcaaataaaacccaatacttttgtccaatgtggttggtcaaatcaactgaataaattcagtattttgcctt

SEQ ID NO: 6351 - DNA, 2273 bp, Homo sapiens
  II.109 (XM_002923)
caggactgcctgagacaagccacaagctgaacagagaaagtggattgaacaaggacgcatttccccagtacatccacaacatgctgtccacatctcgttctcggtttatcagaaataccaacgagagcggtgaagaagtcaccaccttttttgattatgattacggtgctccctgtcataaatttgacgtgaagcaaattggggcccaactcctgcctccgctctactcgctggtgttcatctttggttttgtgggcaacatgctggtcgtcctcatcttaataaactgcaaaaagctgaagtgcttgactgacatttacctgctcaacctggccatctctgatctgctttttcttattactctcccattgtgggctcactctgctgcaaatgagtgggtctttgggaatgcaatgtgcaaattattcacagggctgtatcacatcggttattttggcggaatcttcttcatcatcctcctgacaatcgatagatacctggctattgtccatgctgtgtttgctttaaaagccaggacggtcacctttggggtggtgacaagtgtgatcacctggttggtggctgtgtttgcttctgtcccaggaatcatctttactaaatgccagaaagaagattctgtttatgtctgtggcccttattttccacgaggatggaataatttccacacaataatgaggaacattttggggctggtcctgccgctgctcatcatggtcatctgctactcgggaatcctgaaaaccctgcttcggtgtcgaaacgagaagaagaggcatagggcagtgagagtcatcttcaccatcatgattgtttactttctcttctggactccctataacattgtcattctcctgaacaccttccaggaattcttcggcctgagtaactgtgaaagcaccagtcaactggaccaagccacgcaggtgacagagactcttgggatgactcactgctgcatcaatcccatcatctatgccttcgttggggagaagttcagaagcctttttcacatagctcttggctgtaggattgccccactccaaaaaccagtgtgtggaggtccaggagtgagaccaggaaagaatgtgaaagtgactacacaaggactcctcgatggtcgtggaaaaggaaagtcaattggcagagcccctgaagccagtcttcaggacaaagaaggagcctagagacagaaatgacagatctctgctttggaaatcacacgtctggcttcacagatgtgtgattcacagtgtgaatcttggtgtctacgttaccaggcaggaaggctgagaggagagagactccagctgggttggaaaacagtattttccaaactaccttccagttcctcatttttgaatacaggcatagagttcagactttttttaaatagtaaaaataaaattaaagctgaaaactgcaacttgtaaatgtggtaaagagttagtttgagttactatcatgtcaaacgtgaaaatgctgtattagtcacagagataattctagctttgagcttaagaattttgagcaggtggtatgtttgggagactgctgagtcaacccaatagttgttgattggcaggagttggaagtgtgtgatctgtgggcacattagcctatgtgcatgcagcatctaagtaatgatgtcgtttgaatcacagtatacgctccatcgctgtcatctcagctggatctccattctctcaggcttgctgccaaaagccttttgtgttttgttttgtatcattatgaagtcatgcgtttaatcacattcgagtgtttcagtgcttcgcagatgtccttgatgctcatattgttccctattttgccagtgggaactcctaaatcaaattggcttctaatcaaagcttttaaaccctattggtaaagaatggaaggtggagaagctccctgaagtaagcaaagactttcctcttagtcgagccaagttaagaatgttcttatgttgcccagtgtgtttctgatctgatgcaagcaagaaacactgggcttctagaaccaggcaacttgggaactagactcccaagctggactatggctctactttcaggccacatggctaaagaaggtttcagaaagaagtggggacagagcagaactttcaccttcatatatttgtatgatcctaatgaatgcataaaatgttaagttgatggtgatgaaatgtaaatactgtttttaacaactatgatttggaaaataaatcaatgctataactatgttgataaaag

SEQ ID NO: 6352 - DNA, 3674 bp, Homo sapiens
  II.110 (XM_054837)
gcgagcgcagcggagcctggagagaaggcgctgggctgcgagggcgcgagggcgcgagggcagggggcaaccggaccccgcccgcacccatggcgcccgtcgccgtctgggccgcgctggccgtcggactggagctctgggctgcggcgcacgccttgcccgcccaggtggcatttacaccctacgccccggagcccgggagcacatgccggctcagagaatactatgaccagacagctcagatgtgctgcagcaaatgctcgccgggccaacatgcaaaagtcttctgtaccaagacctcggacaccgtgtgtgactcctgtgaggacagcacatacacccagctctggaactgggttcccgagtgcttgagctgtggctcccgctgtagctctgaccaggtggaaactcaagcctgcactcgggaacagaaccgcatctgcacctgcaggcccggctggtactgcgcgctgagcaagcaggaggggtgccggctgtgcgcgccgctgcgcaagtgccgcccgggcttcggcgtggccagaccaggaactgaaacatcagacgtggtgtgcaagccctgtgccccggggacgttctccaacacgacttcatccacggatatttgcaggccccaccagatctgtaacgtggtggccatccctgggaatgcaagcatggatgcagtctgcacgtccacgtcccccacccggagtatggccccaggggcagtacacttaccccagccagtgtccacacgatcccaacacacgcagccaactccagaacccagcactgctccaagcacctccttcctgctcccaatgggccccagccccccagctgaagggagcactggcgacttcgctcttccagttggactgattgtgggtgtgacagccttgggtctactaataataggagtggtgaactgtgtcatcatgacccaggtgaaaaagaagcccttgtgcctgcagagagaagccaaggtgcctcacttgcctgccgataaggcccggggtacacagggccccgagcagcagcacctgctgatcacagcgccgagctccagcagcagctccctggagagctcggccagtgcgttggacagaagggcgcccactcggaaccagccacaggcaccaggcgtggaggccagtggggccggggaggcccgggccagcaccgggagctcagattcttcccctggtggccatgggacccaggtcaatgtcacctgcatcgtgaacgtctgtagcagctctgaccacagctcacagtgctcctcccaagccagctccacaatgggagacacagattccagcccctcggagtccccgaaggacgagcaggtccccttctccaaggaggaatgtgcctttcggtcacagctggagacgccagagaccctgctggggagcaccgaagagaagcccctgccccttggagtgcctgatgctgggatgaagcccagttaaccaggccggtgtgggctgtgtcgtagccaaggtgggctgagccctggcaggatgaccctgcgaaggggccctggtccttccaggcccccaccactaggactctgaggctctttctgggccaagttcctctagtgccctccacagccgcagcctccctctgacctgcaggccaagagcagaggcagcgagttgtggaaagcctctgctgccatggcgtgtccctctcggaaggctggctgggcatggacgttcggggcatgctggggcaagtccctgactctctgtgacctgccccgcccagctgcacctgccagcctggcttctggagcccttgggttttttgtttgtttgtttgtttgtttgtttgtttctccccctgggctctgccccagctctggcttccagaaaaccccagcatccttttctgcagaggggctttctggagaggagggatgctgcctgagtcacccatgaagacaggacagtgcttcagcctgaggctgagactgcgggatggtcctggggctctgtgcagggaggaggtggcagccctgtagggaacggggtccttcaagttagctcaggaggcttggaaagcatcacctcaggccaggtgcagtggctcacgcctatgatcccagcactttgggaggctgaggcgggtggatcacctgaggttaggagttcgagaccagcctggccaacatggtaaaaccccatctctactaaaaatacagaaattagccgggcgtggtggcgggcacctatagtcccagctactcagaagcctgaggctgggaaatcgtttgaacccgggaagcggaggttgcagggagccgagatcacgccactgcactccagcctgggcgacagagcgagagtctgtctcaaaagaaaaaaaaaagcaccgcctccaaatgccaacttgtccttttgtaccatggtgtgaaagtcagatgcccagagggcccaggcaggccaccatattcagtgctgtggcctgggcaagataacgcacttctaactagaaatctgccaattttttaaaaaagtaagtaccactcaggccaacaagccaacgacaaagccaaactctgccagccacatccaaccccccacctgccatttgcaccctccgccttcactccggtgtgcctgcagccccgcgcctccttccttgctgtcctaggccacaccatctcctttcagggaatttcaggaactagagatgactgagtcctcgtagccatctctctactcctacctcagcctagaccctcctcctcccccagaggggtgggttcctcttccccactccccaccttcaattcctgggccccaaacgggctgccctgccactttggtacatggccagtgtgatcccaagtgccagtcttgtgtctgcgtctgtgttgcgtgtcgtgggtgtgtgtagccaaggtcggtaagttgaatggcctgccttgaagccactgaagctgggattcctccccattagagtcagccttccccctcccagggccagggccctgcagaggggaaaccagtgtagccttgcccggattctgggaggaagcaggttgaggggctcctggaaaggctcagtctcaggagcatggggataaaggagaaggcatgaaattgtctagcagagcaggggcagggtgataaattgttgataaattccactggacttgagcttggcagctgaactattggagggtgggagagcccagccattaccatggagacaagaagggttttccaccctggaatcaagatgtcagactggctggctgcagtgacgtgcacctgtactcaggaggctgaggggaggatcactggagcccaggagtttgaggctgcagcgagctatgatcgcgccactacactccagcctgagcaacagagtgagaccctgtctcttaaagaaaaaaaaagtcagactgctgggactggccaggtttctgcccacattggacccacatgaggacatgatggagcgcacctgccccctggtggacagtcctgggagaacctcaggcttccttggcatcacagggcagagccgggaagcgatgaatttggagactctgtggggccttggttcccttgtgtgtgtgtgttgatcccaagacaatgaaagtttgcactgtatgctggacggcattcctgcttatcaataaacctgtttgtttt

SEQ ID NO: 6353 - DNA, 2502 bp, Homo sapiens
  II.111 (NM_000634)
tattcatcaagtgccctctagctgttaagtcactctgatctctgactgcagctcctactgttggacacacctggccggtgcttcagttagatcaaaccattgctgaaactgaagaggacatgtcaaatattacagatccacagatgtgggattttgatgatctaaatttcactggcatgccacctgcagatgaagattacagcccctgtatgctagaaactgagacactcaacaagtatgttgtgatcatcgcctatgccctagtgttcctgctgagcctgctgggaaactccctggtgatgctggtcatcttatacagcagggtcggccgctccgtcactgatgtctacctgctgaacctggccttggccgacctactctttgccctgaccttgcccatctgggccgcctccaaggtgaatggctggatttttggcacattcctgtgcaaggtggtctcactcctgaaggaagtcaacttctacagtggcatcctgctgttggcctgcatcagtgtggaccgttacctggccattgtccatgccacacgcacactgacccagaagcgtcacttggtcaagtttgtttgtcttggctgctggggactgtctatgaatctgtccctgcccttcttccttttccgccaggcttaccatccaaacaattccagtccagtttgctatgaggtcctgggaaatgacacagcaaaatggcggatggtgttgcggatcctgcctcacacctttggcttcatcgtgccgctgtttgtcatgctgttctgctatggattcaccctgcgtacactgtttaaggcccacatggggcagaagcaccgagccatgagggtcatctttgctgtcgtcctcatcttcctgctttgctggctgccctacaacctggtcctgctggcagacaccctcatgaggacccaggtgatccaggagagctgtgagcgccgcaacaacatcggccgggccctggatgccactgagattctgggatttctccatagctgcctcaaccccatcatctacgccttcatcggccaaaattttcgccatggattcctcaagatcctggctatgcatggcctggtcagcaaggagttcttggcacgtcatcgtgttacctcctacacttcttcgtctgtcaatgtctcttccaacctctgaaaaccatcgatgaaggaatatctcttctcagaaggaaagaataaccaacaccctgaggttgtgtgtggaaggtgatctggctctggacaggcactatctgggttttggggggacgctataggatgtggggaagttaggaactggtgtcttcaggggccacaccaaccttctgaggagctgttgaggtacctccaaggaccggcctttgcacctccatggaaacgaagcaccatcattcccgttgaacgtcacatctttaacccactaactggctaattagcatggccacatctgagccccgaatctgacattagatgagagaacagggctgaagctgtgtcctcatgagggctggatgctctcgttgaccctcacaggagcatctcctcaactctgagtgttaagcgttgagccaccaagctggtggctctgtgtgctctgatccgagctcaggggggtggttttcccatctcaggtgtgttgcagtgtctgctggagacattgaggcaggcactgccaaaacatcaacctgccagctggccttgtgaggagctggaaacacatgttccccttgggggtggtggatgaacaaagagaaagagggtttggaagccagatctatgccacaagaaccccctttacccccatgaccaacatcgcagacacatgtgctggccacctgctgagccccaagtggaacgagacaagcagcccttagcccttcccctctgcagcttccaggctggcgtgcagcatcagcatccctagaaagccatgtgcagccaccagtccattgggcaggcagatgttcctaataaagcttctgttccgtgcttgtccctgtggaagtatcttggttgtgacagagtcaagggtgtgtgcagcattgttggctgttcctgcagtagaatgggggcagcacctcctaagaaggcacctctctgggttgaagggcagtgttccctggggctttaactcctgctagaacagtctcttgaggcacagaaactcctgttcatgcccatacccctggccaaggaagatccctttgtccacaagtaaaaggaaatgctcctccagggagtctcagcttcaccctgaggtgagcatcatcttctgggttaggccttgcctaggcatagccctgcctcaagctatgtgagctcaccagtccctccccaaatgctttccatgagttgcagttttttcctagtctgttttccctccttggagacagggccctgtcggtttattcactgtatgtccttggtgcctggagcctactaaatgctcaataaataatgatcacaggaaaaaaaaaaaaaaaaaa

SEQ ID NO: 6354 - DNA, 1497 bp, Homo sapiens
  II.112 (NM_004590)
cggaccaccagcaacagacaacatcttcattcggctctccctgaagctgtactgcctcgctgagaggatgaaggtctccgaggctgccctgtctctccttgtcctcatccttatcattacttcggcttctcgcagccagccaaaagttcctgagtgggtgaacaccccatccacctgctgcctgaagtattatgagaaagtgttgccaaggagactagtggtgggatacagaaaggccctcaactgtcacctgccagcaatcatcttcgtcaccaagaggaaccgagaagtctgcaccaaccccaatgacgactgggtccaagagtacatcaaggatcccaacctacctttgctgcctaccaggaacttgtccacggttaaaattattacagcaaagaatggtcaaccccagctcctcaactcccagtgatgaccaggctttagtggaagcccttgtttacagaagagaggggtaaacctatgaaaacaggggaagccttattaggctgaaactagccagtcacattgagagaagcagaacaatgatcaaaataaaggagaagtatttcgaatattttctcaatcttaggaggaaataccaaagttaagggacgtgggcagaggtacgctcttttatttttatatttatatttttatttttttgagatagggtcttactctgtcacccaggctggagtgcagtggtgtgatcttggctcacttgatcttggctcactgtaacctccacctcccaggctcaagtgatcctcccaccccagcctcctgagtagctgggactacaggcttgcgccaccacacctggctaatttttgtatttttggtagagacgggattctaccatgttgcccaggctggtctcaaactcgtgtgcccaagcaatccacctgcctcagccttccaaaagtgctgggattacaggcgtgagccaccacatccggccagtgcactcttaatacacagaaaaatatatttcacatccttctcctgctctctttcaattcctcacttcacaccagtacacaagccattctaaatacttagccagtttccagccttccagatgatctttgccctctgggtcttgacccattaagagccccatagaactcttgatttttcctgtccatctttatggatttttctggatctatattttcttcaattattctttcattttataatgcaactttttcataggaagtccggatgggaatattcacattaatcatttttgcagagactttgctagatcctctcatattttgtcttcctcagggtggcaggggtacagagagtgcctgattggaaaaaaaaaaaaaagagagagagagagaagaagaagaagaagagacacaaatctctacctcccatgttaagctttgcaggacagggaaagaaagggtatgagacacggctaggggtaaactcttagtccaaaacccaagcatgcaataaataaaactcccttatttgaca

SEQ ID NO: 6355 - DNA, 1973 bp, Homo sapiens
  II.113 (XM_012717)
ggcggctcctttaggcagctgaaaggggatttaggcccggaagatccgagtccatccgcggcggggagagggcaagcgggaccggtagggcatgcagcggcggcgccgatcggacatgtcccatccgccccgtattgaggcgctgggagcgcggtgcgcgacaggaaagcgatggtgaaagcggggccgtgaggtgggcggcaggaacggccggacccgcagtagcgcagcagcggcgccgcctcccagagttcagacccaggaagcggccgggaggcaggagcgaatcgggccgccgccgccatggagctgagagtcgggaacaggtaccggctgggccggaagcatcggcagcggctccttcggagacatctatctcggtacggacattgctgcaggagaagaggttgccatcaagcttgaatgtgtcaaaaccaaacaccctcagctccacattgagagcaaaatctacaagatgatgcagggaggagtgggcatccccaccatcagatggtgcggggcagagggggactacaacgtcatggtgatggagctgctggggccaagcctggaggacctcttcaacttctgctccaggaaattcagcctcaaaaccgtcctgctgcttgctgaccaaatgatcagtcgcatcgaatacattcattcaaagaacttcatccaccgggatgtgaagccagacaacttcctcatgggcctggggaagaagggcaacctggtgtacatcatcgacttcgggctggccaagaagtaccgggatgcacgcacccaccagcacatcccctatcgtgagaacaagaacctcacggggacggcgcggtacgcctccatcaacacgcaccttggaattgaacaatcccgaagagatgacttggagtctctgggctacgtgctaatgtacttcaacctgggctctctcccctggcaggggctgaaggctgccaccaagagacagaaatacgaaaggattagcgagaagaaaatgtccacccccatcgaagtgttgtgtaaaggctacccttccgaatttgccacatacctgaatttctgccgttccttgcgttttgacgacaagcctgactactcgtacctgcggcagcttttccggaatctgttccatcgccagggcttctcctatgactacgtgttcgactggaacatgctcaaatttggtgccagccgggccgccgatgacgccgagcgggagcgcagggaccgagaggagcggctgagacactcgcggaacccggctacccgcggcctcccttccacagcctccaggccgtctgcgggggacgcagggaatgtggctccccccacacccctcacccctacctcacacacggctaacacctccccccggcccgtctccggcatggagagagagcggaaagtgagtatgcggctgcacccggggcccccgtcaacatctcctcgtccgacctcacaggccgacaagatacctctcgcatgtccacctcacagattcctggtcgggtggcttccagtggtcttcagtctgtcgtgcaccgatgagaactctccttattgctgtgaagggcagacaatgcatggctgatctactctgttaccaatggctttactagtgacacgtcccccggtctaggatcgaaatgttaacaccgggagctctccaggccactcacccagcgacgctcgtgggggaaacatactaaacggacagactccaagagctgccaccgctggggctgcactgcggccccccacgtgaactcggttgtaacggggctgggaagaaaagcagagagagaattgcagagaatcagactccttttccagggcctcagctccctccagtggtggccgccctgtactccctgacgattccactgtaactaccaatcttctacttggttaagacagttttgtatcattttgctaaaaattattggcttaaatctgtgtaaagaaaa

SEQ ID NO: 6356 - DNA, 805 bp, Homo sapiens
  II.114 (XM_012649)
agcagaggggctgagaccaaaccagaaacctccaattctcatgtggaagcccatgccctcaccctccaacatgaaagcctctgcagcacttctgtgtctgctgctcacagcagctgctttcagcccccaggggcttgctcagccagttgggattaatacttcaactacctgctgctacagatttatcaataagaaaatccctaagcagaggctggagagctacagaaggaccaccagtagccactgtccccgggaagctgtaatcttcaagaccaaactggacaaggagatctgtgctgaccccacacagaagtgggtccaggactttatgaagcacctggacaagaaaacccaaactccaaagctttgaacattcatgactgaactgaaaacaagccatgacttgagaaacaaataatttgtataccctgtcctttctcagagtggttctgagattattttaatctaattctaaggaatatgagctttatgtaataatgtgaatcatggtttttcttagtagattttaaaagttattaatattttaatttaatcttccatggattttggtgggttttgaacataaagccttggatgtatatgtcatctcagtgctgtaaaaactgtgggatgctcctcccttctctacctcatgggggtattgtataagtccttgcaagaatcagtgcaaagatttgctttaattgttaagatatgatgtccctatggaagcatattgttattatataattacatatttgcatatgtatgactcccaaattttcacataaaatagatttttgta

SEQ ID NO: 6357 - DNA, 2621 bp, Homo sapiens
  II.115 (XM_008679)
acttgtcatggcgactgtccagctttgtgccaggagcctcgcaggggttgatgggattggggttttcccctcccatgtgctcaagactggcgctaaaagttttgagcttctcaaaagtctagagccaccgtccagggagcaggtagctgctgggctccggggacactttgcgttcgggctgggagcgtgctttccacgacggtgacacgcttccctggattggcagccagactgccttccgggtcactgccatggaggagccgcagtcagatcctagcgtcgagccccctctgagtcaggaaacattttcagacctatggaaactacttcctgaaaacaacgttctgtcccccttgccgtcccaagcaatggatgatttgatgctgtccccggacgatattgaacaatggttcactgaagacccaggtccagatgaagctcccagaatgccagaggctgctccccgcgtggcccctgcaccagcagctcctacaccggcggcccctgcaccagccccctcctggcccctgtcatcttctgtcccttcccagaaaacctaccagggcagctacggtttccgtctgggcttcttgcattctgggacagccaagtctgtgacttgcacgtactcccctgccctcaacaagatgttttgccaactggccaagacctgccctgtgcagctgtgggttgattccacacccccgcccggcacccgcgtccgcgccatggccatctacaagcagtcacagcacatgacggaggttgtgaggcgctgcccccaccatgagcgctgctcagatagcgatggtctggcccctcctcagcatcttatccgagtggaaggaaatttgcgtgtggagtatttggatgacagaaacacttttcgacatagtgtggtggtgccctatgagccgcctgaggttggctctgactgtaccaccatccactacaactacatgtgtaacagttcctgcatgggcggcatgaaccggaggcccatcctcaccatcatcacactggaagactccagtggtaatctactgggacggaacagctttgaggtgcgtgtttgtgcctgtcctgggagagaccggcgcacagaggaagagaatctccgcaagaaaggggagcctcaccacgagctgcccccagggagcactaagcgagcactgcccaacaacaccagctcctctccccagccaaagaagaaaccactggatggagaatatttcacccttcagatccgtgggcgtgagcgcttcgagatgttccgagagctgaatgaggccttggaactcaaggatgcccaggctgggaaggagccaggggggagcagggctcactccagccacctgaagtccaaaaagggtcagtctacctcccgccataaaaaactcatgttcaagacagaagggcctgactcagactgacattctccacttcttgttccccactgacagcctcccacccccatctctccctcccctgccattttgggttttgggtctttgaacccttgcttgcaataggtgtgcgtcagaagcacccaggacttccatttgctttgtcccggggctccactgaacaagttggcctgcactggtgttttgttgtggggaggaggatggggagtaggacataccagcttagattttaaggtttttactgtgagggatgtttgggagatgtaagaaatgttcttgcagttaagggttagtttacaatcagccacattctaggtaggggcccacttcaccgtactaaccagggaagctgtccctcactgttgaattttctctaacttcaaggcccatatctgtgaaatgctggcatttgcacctacctcacagagtgcattgtgagggttaatgaaataatgtacatctggccttgaaaccaccttttattacatggggtctagaacttgacccccttgagggtgcttgttccctctccctgttggtcggtgggttggtagtttctacagttgggcagctggttaggtagagggagttgtcaagtctctgctggcccagccaaaccctgtctgacaacctcttggtgaaccttagtacctaaaaggaaatctcaccccatcccacaccctggaggatttcatctcttgtatatgatgatctggatccaccaagacttgttttatgctcagggtcaatttcttttttcttttttttttttttttttctttttctttgagactgggtctcgctttgttgcccaggctggagtggagtggcgtgatcttggcttactgcagcctttgcctccccggctcgagcagtcctgcctcagcctccggagtagctgggaccacaggttcatgccaccatggccagccaacttttgcatgttttgtagagatggggtctcacagtgttgcccaggctggtctcaaactcctgggctcaggcgatccacctgtctcagcctcccagagtgctgggattacaattgtgagccaccacgtccagctggaagggtcaacatcttttacattctgcaagcacatctgcattttcaccccacccttcccctccttctccctttttatatcccatttttatatcgatctcttattttacaataaaactttgctgcca

SEQ ID NO: 6358 - DNA, 5600 bp, Homo sapiens
  II.116 (XM_030509)
ggagtgggccaggccgccagccccgccagccccgccagccccgccagccccgcgatggcttgggccgcgctcctcggcctcctggccgcactgttgctgctgctgctactgagccgccgccgcacgcggcgacctggtgagcctcccctggacctgggcagcatcccctggttggggtatgccttggactttggaaaagatgctgccagcttcctcacgaggatgaaggagaagcacggtgacatctttactatactggttgggggcaggtatgtcaccgttctcctggacccacactcctacgacgcggtggtgtgggagcctcgcaccaggctcgacttccatgcctatgccatcttcctcatggagaggatttttgatgtgcagcttccacattacagccccagtgatgaaaaggccaggatgaaactgactcttctccacagagagctccaggcactcacagaagccatgtataccaacctccatgcagtgctgttgggcgatgctacagaagcaggcagtggctggcacgagatgggtctcctcgacttctcctacagcttcctgctcagagccggctacctgactctttacggaattgaggcgctgccacgcacccatgaaagccaggcccaggaccgcgtccactcagctgatgtcttccacacctttcgccagctcgaccggctgctccccaaactggcccgtggctccctgtcagtgggggacaaggaccacatgtgcagtgtcaaaagtcgcctgtggaagctgctatccccagccaggctggccaggcgggcccaccggagcaaatggctggagagttacctgctgcacctggaggagatgggtgtgtcagaggagatgcaggcacgggccctggtgctgcagctgtgggccacacaggggaatatgggtcccgctgccttctggctcctgctcttccttctcaagaatcctgaagccctggctgctgtccgcggagagctcgagagtatcctttggcaagcggagcagcctgtctcgcagacgaccactctcccacagaaggttctagacagcacacctgtgcttgatagcgtgctgagtgagagcctcaggcttacagctgcccccttcatcacccgcgaggttgtggtggacctggccatgcccatggcagacgggcgagaattcaacctgcgacgtggtgaccgcctcctcctcttccccttcctgagcccccagagagacccagaaatctacacagacccagaggtatttaaatacaaccgattcctgaaccctgacggatcagagaagaaagacttttacaaggatgggaaacggctgaagaattacaacatgccctggggggcggggcacaatcactgcctggggaggagttatgcggtcaacagcatcaaacaatttgtgttccttgtgctggtgcacttggacttggagctgatcaacgcagatgtggagatccctgagtttgacctcagcaggtacggcttcggtctgatgcagccggaacacgacgtgcccgtccgctaccgcatccgcccatgacacagggagcagatggatccacgtgctcgcctctgcccagcctgccccagcctgccccagcctcccagctttctgtgtgcacagttggcccgggtgcaggtgctagcattaccacttccctgcttttctcccagaaggctgggtccaggggagggaaaagctaagagggtgaacaaagaaaagacattgaaagctctatggattatccactgcaaagttttctttccaaaatcaggctttgtctgctcccaattcacctcgttactctcacctcgtgatatccacaaatgctattcagataaggcagaactaggagtcttcactgctctgcccccaactcccggaggtgtcaccttcctagttcttatgagctagcatggcccgggccttatccagtcaaagcggatgctggccacagaaaggccactcaggatgtcctttgtgtccattgatgtcattcagcagtcagtcccccaataatccttaaactagctaaaaccaaaggagtcccttagaagatctgcttccctggggccccatttgccagattgccccattgctcacactacttgagaaaatgcaggagagcttcccccaaggctgatgcattcccggtgcagaacaggggcaccctccaaacactgggctctgaggagtggagttctctgttctagagtgacaggcaccagatgggatgggctttctcagtgtcagcactcaggtagggagctaaggaagacacagcccagacaagatggctggaaggagccagccaggactccttagactgatcaagccaaaaaagaaggtgccgatttcatgcattctagtgcagaagccccaactgtgatcacgatccagtctgcagacgtgttttgtttggacttcacttaaaaaaatgccttagttgttatcatctttgggagagttcattcaaaatgtccagcttctcttgaaaacttggtatatctggccacactgggctcacattcccaagggtaactcttggccagagctgagtggcagccgcctcccttatgcaggacatgtgctctcggcttcaccagggttctgaccgggtctgcttctgcattcacagcgcctcctggacctgaaggcatctgagtgtgagaccctgttctaactcttagaagtgacattgtaagaggtggtggggaccagctaattggtccaacccagcctgagtgcaccaccctttgaacaaatgtatcagtgatgaaaatttgcctttgccccggcttgcctgtaatcccagcactttgggaggccgaggtgggcggatcacttgaggtcgggagttcaagaccagcctggccaacatggcgaaaccccgtctctactaaacataaaaaaattagtcaggtgtggcggtgcgtgcctgtaatcccagctattcaggaggctgaggcaccagaattgcttgaacccaggaggtggaggttgcagtgaactgagactgcgccacggcactccagcctgggcgacagagcaagactctgtctcaataaataaataattaattaaaataaaaaacagcttaaagagaaaaatggcctgcaaaccttttttatgatgctatttttattaatataaagtcctgtttattgagaccctttaaatgcctgcgagagaccctacagacagtatgtctactcctcacagcatctctatgaagagaaggagggttgtgcccacttcatagatgagaaaactgagaggtgaggtgacttgcctggggccacatagctcataagctgtagaactctgcaggcagatttactgtcccaggagcaaatgctggatgagcaactcctgttctttgggctcaaggggactggtgatgggacaattcttctcgacttcaggagctgacagagccagaggcacctaaacttgggtacatcttgtaagacacataatgaggtccctctagctttagctggagggagataaaagaaccccagacctctgaatgtcccagaggctagtctcttctcagagcagcactggggtttgggggcttccctgggcctcagcctccaggcacccccaggattcccagagagacgctgtgattggcaggaggcaggatatccccagggaaacccatcttcacgcctgggtgacccccactgccgcctccttcttaactctgcaggaaatcagagctggcagcctccagtgggaggacagagccggtttccgtggcaaccctcagctgcctcatcgtggctgggaagggaaggaagcaagccggcagaaatagctatggaaggtcttgcgcaggctgcaaccctggtgtgctgggcgaaaacccttatgactccccccttccaaatcaggctgggttgtcactgagactagattctcacctgccttcaaagaagggccaattccctttaaaggtcgcacctccttggaaccacagtcattagtgaattacactcaaggaaaagatgtgctcccaccaggcagctccagctgttacctgagatactgaagtgcagctcaggagacgattatttaaacctgcccttgttttaatcgttatttttctctttaaaaaaaatagaagctataaagaaaagagggagagatgagtgggttagctacctgctatgcgctagttaggaagttacctggatgccattgtatttcttcatcccttgcttaagaatcaaaattactggacatatgttaggaatactctttctttctttctttctttttaagctcagtggcaagaatgaaatactctttttttttttttttttttgagatggagtctcgctctgctgcccaggctagagtgcagtggcgtgatctcggctcactgcaagctctgcctcccgtgttcacaccattctcctgcctcagcctcctgagtagctgggactacaggcacccgccaccacacccggctaatttttggatttttagtagagatgggatttcaccgtattagccaggatggtcttgatctcctgagctcgtgatctgcccgcctcggcctcccaaagtgctgggattacaggtgtgagccaccgcgcccagccaagaataaaatactcttaagttgatctaatgaagtgtttccttaccattgtgattattgttactattatttgctatattttaatattgttgtttaccaaatattctcctttaaacagactcgctttttaaacttttttttttttttttgagacggagtttcacgcttattgcccaggctggagtgcaatggcacgatctcagctcaccacaacctccacctcctgggtttaagcaatgcttctgcctcagcttcccaagtagctgagattacaggcgcacaccaccacgcccaactgatttttgtatttttagtagagacggggtttccccatgttggtcaggctggtctcgaactcctgacctcgtgatttgcctgcctgggcctcccaaagtgctaggattacaggcatgagccaccatgcccggcctaaactttgtttttaaaatgaactttttttccccccaattgctgccaatagtggataacatgtatcactcactgccaaaaatagaaagtgaccatgaaaaataaattcgctggggaagggggctccatgctggtgtggccaaggctgagagctctctcttctctgttacaaaacgagataagcaagtgttagaattgccttaaggccacactggcatctccctgaccttctccagggacagaagcaggagtaagtttctcatcccatgggcgaccagggccatctcctcccaccagtggcccccactcacagggagctggcaatgccctacctgcctgttctccagatggagaaacaggctctgagatttcacaggtcttgcccaaagtcattgattttgatgattaaaaagaataaacacagtgtttcctgagtagcagtgattgttatgccttgctattttaataaagattctattttcgtataacattgtcaagtggaaacatgctgaaatctattaaaccatctttgtttgtg

SEQ ID NO: 6359 - DNA, 430 bp, Homo sapiens
  II.117 (XM_039086)
gacagccacgaagatcctaccaaaatgaagcgcttcctcttcctcctactcaccatcagcctcctggttatggtacagatacaaactggactctcaggacaaaacgacaccagccaaaccagcagcccctcagcatccagcaacataagcggaggcattttccttttcttcgtggccaatgccataatccacctcttctgcttcagttgaggtgacacgtctcagccttagccctgtgccccctgaaacagctgccaccatcactcgcaagagaatcccctccatctttgggaggggttgatgccagacatcaccaggttgtagaagttgacaggcagtgccatgggggcaacagccaaaataggggggtaatgatgtaggggccaagcagtgcccagctgggggtcaataaagttacccttgtacttgc

SEQ ID NO: 6360 - DNA, 2056 bp, Homo sapiens
  II.118 (XM_027978)
cgagtctcaactaaaagggactcccggagctaggggtggggactcggcctcacacagtgagtgccggctattggacttttgtccagtgacagctgagacaacaaggaccacgggaggaggtgtaggagagaagcgccgcgaacagcgatcgcccagcaccaagtccgcttccaggctttcggtttctttgcctccatcttgggtgcgccttcccggcgtctaggggagcgaaggctgaggtggcagcggcaggagagtccggccgcgacaggacgaactcccccactggaaaggattctgaaagaaatgaagtcagccctcagaaatgaagttgactgcctgctggctttctgttgactggcccggagctgtactgcaagacccttgtgagcttccctagtctaagagtaggatgtctgctgaagtcatccatcaggttgaagaagcacttgatacagatgagaaggagatgctgctctttttgtgccgggatgttgctatagatgtggttccacctaatgtcagggaccttctggatattttacgggaaagaggtaagctgtctgtcggggacttggctgaactgctctacagagtgaggcgatttgacctgctcaaacgtatcttgaagatggacagaaaagctgtggagacccacctgctcaggaaccctcaccttgtttcggactatagagtgctgatggcagagattggtgaggatttggataaatctgatgtgtcctcattaattttcctcatgaaggattacatgggccgaggcaagataagcaaggagaagagtttcttggaccttgtggttgagttggagaaactaaatctggttgccccagatcaactggatttattagaaaaatgcctaaagaacatccacagaatagacctgaagacaaaaatccagaagtacaagcagtctgttcaaggagcagggacaagttacaggaatgttctccaagcagcaatccaaaagagtctcaaggatccttcaaataacttcaggagcatacctgaagagagatacaagatgaagagcaagcccctaggaatctgcctgataatcgattgcattggcaatgagacagagcttcttcgagacaccttcacttccctgggctatgaagtccagaaattcttgcatctcagtatgcatggtatatcccagattcttggccaatttgcctgtatgcccgagcaccgagactacgacagctttgtgtgtgtcctggtgagccgaggaggctcccagagtgtgtatggtgtggatcagactcactcagggctccccctgcatcacatcaggaggatgttcatgggagattcatgcccttatctagcagggaagccaaagatgttttttattcagaactatgtggtgtcagagggccagctggaggacagcagcctcttggaggtggatgggccagcgatgaagaatgtggaattcaaggctcagaagcgagggctgtgcacagttcaccgagaagctgacttcttctggagcctgtgtactgcggacatgtccctgctggagcagtctcacagctcaccatccctgtacctgcagtgcctctcccagaaactgagacaagaaagaaaacgcccactcctggatcttcacattgaactcaatggctacatgtatgattggaacagcagagtttctgccaaggagaaatattatgtctggctgcagcacactctgagaaagaaacttatcctctcctacacataagaaaccaaaaggctgggcgtagtggctcacacctgtaatcccagcactttgggaggccaaggagggcagatcacttcaggtcaggagttcgagaccagcctggccaacatggtaaacgctgtccctagtaaaaatacaaaaattagctgggtgtgggtgtgggtacctgtattcccagttacttgggaggctgaggtgggaggatcttttgaacccaggagttcagggtcatagcatgctgtgattgtgcctacgaatagccactgcataccaacctgggcaatatagcaagatcccatctcttta

SEQ ID NO: 6361 - DNA, 570 bp, Homo sapiens
  II.119 (NM_005343)
atgacggaatataagctggtggtggtgggcgccggcggtgtgggcaagagtgcgctgaccatccagctgatccagaaccattttgtggacgaatacgaccccactatagaggattcctaccggaagcaggtggtcattgatggggagacgtgcctgttggacatcctggataccgccggccaggaggagtacagcgccatgcgggaccagtacatgcgcaccggggagggcttcctgtgtgtgtttgccatcaacaacaccaagtcttttgaggacatccaccagtacagggagcagatcaaacgggtgaaggactcggatgacgtgcccatggtgctggtggggaacaagtgtgacctggctgcacgcactgtggaatctcggcaggctcaggacctcgcccgaagctacggcatcccctacatcgagacctcggccaagacccggcagggagtggaggatgccttctacacgttggtgcgtgagatccggcagcacaagctgcggaagctgaaccctcctgatgagagtggccccggctgcatgagctgcaagtgtgtgctctcctga

SEQ ID NO: 6362 - DNA, 1489 bp, Homo sapiens
  II.120 (XM_043574)
gtgcaaggatgatgctgaaaggaataacaaggcttatctctaggatccataagttggaccctgggcgttttttacacatggggacccaggctcgccaaagcattgctgctcacctagataaccaggttccagttgagagtccgagagctatttcccgcaccaatgagaatgacccggccaagcatggggatcagcacgagggtcagcactacaacatctccccccaggatttggagactgtatttccccatggccttcctcctcgctttgtgatgcaggtgaagacattcagtgaagcttgcctgatggtaaggaaaccagccctagaacttctgcattacctgaaaaacaccagttttgcttatccagctatacgatatcttctgtatggagagaagggaacaggaaaaaccctaagtctttgccatgttattcatttctgtgcaaaacaggactggctgatactacatattccagatgctcatctttgggtgaaaaattgtcgggatcttctgcagtccagctacaacaaacagcgctttgatcaacctttagaggcttcaacctggctgaagaatttcaaaactacaaatgagcgcttcctgaaccagataaaagttcaagagaagtatgtctggaataagagagaaagcactgagaaagggagtcctctgggagaagtggttgaacagggcataacacgggtgaggaacgccacagatgcagttggaattgtgctgaaagagctaaagaggcaaagttctttgggtatgtttcacctcctagtggccgtggatggaatcaatgctctttggggaagaaccactctgaaaagagaagataaaagcccgattgcccccgaggaattagcacttgttcacaacttgaggaaaatgatgaaaaatgattggcatggaggcgccattgtgtcggctttgagccagactgggtctctctttaagccccggaaagcctatctgccccaggagttgctgggaaaggaaggatttgatgccctggatccctttattcccatcctggtttccaactataacccaaaggaatttgaaagttgtattcagtattatttggaaaacaattggcttcaacatgagaaagctcctacagaagaagggaaaaaagagctgctgttcctaagtaacgcgaacccctcgctgctggagcggcactgtgcctacctctaagccaagatcacagcatgtgaggaagacagtggacatctgctttatgctggacccagtaagatgaggaagtcgggcagtacacaggaagaggagccaggcccttgtacctatgggattggacaggactgcagttggctctggacctgcattaaaatgggtttcactgtgaatgcgtgacaataagatattcccttgttcctaaaactttatatcagtttattggatgtggtttttcacatttaagataattatggctcttttcctaaaaaataaaatatctttct

SEQ ID NO: 6363 - DNA, 1283 bp, Homo sapiens
  II.121 (NM_002188)
aagccacccagcctatgcatccgctcctcaatcctctcctgttggcactgggcctcatggcgcttttgttgaccacggtcattgctctcacttgccttggcggctttgcctccccaggccctgtgcctccctctacagccctcagggagctcattgaggagctggtcaacatcacccagaaccagaaggctccgctctgcaatggcagcatggtatggagcatcaacctgacagctggcatgtactgtgcagccctggaatccctgatcaacgtgtcaggctgcagtgccatcgagaagacccagaggatgctgagcggattctgcccgcacaaggtctcagctgggcagttttccagcttgcatgtccgagacaccaaaatcgaggtggcccagtttgtaaaggacctgctcttacatttaaagaaactttttcgcgagggacggttcaactgaaacttcgaaagcatcattatttgcagagacaggacctgactattgaagttgcagattcatttttctttctgatgtcaaaaatgtcttgggtaggcgggaaggagggttagggaggggtaaaattccttagcttagacctcagcctgtgctgcccgtcttcagcctagccgacctcagccttccccttgcccagggctcagcctggtgggcctcctctgtccagggccctgagctcggtggacccagggatgacatgtccctacacccctcccctgccctagagcacactgtagcattacagtgggtgccccccttgccagacatgtggtgggacagggacccacttcacacacaggcaactgaggcagacagcagctcaggcacacttcttcttggtcttatttattattgtgtgttatttaaatgagtgtgtttgtcaccgttggggattggggaagactgtggctgctggcacttggagccaagggttcagagactcagggccccagcactaaagcagtggaccccaggagtccctggtaataagtactgtgtacagaattctgctacctcactggggtcctggggcctcggagcctcatccgaggcagggtcaggagaggggcagaacagccgctcctgtctgccagccagcagccagctctcagccaacgagtaatttattgtttttcctcgtatttaaatattaaatatgttagcaaagagttaatatatagaagggtaccttgaacactgggggaggggacattgaacaagttgtttcattgactatcaaactgaagccagaaataaagttggtgacagata

SEQ ID NO: 6364 - DNA, 1842 bp, Homo sapiens
  II.122 (XM_055699)
gagtctaacgtgaagacattttgctccaagaatatcctagccatccttggcttctcctctatcatagctgtgatagctttgcttgctgtggggttgacccagaacaaagcattgccagaaaacgttaagtatgggattgtgctggatgcgggttcttctcacacaagtttatacatctataagtggccagcagaaaaggagaatgacacaggcgtggtgcatcaagtagaagaatgcagggttaaaggtcctggaatctcaaaatttgttcagaaagtaaatgaaataggcatttacctgactgattgcatggaaagagctagggaagtgattccaaggtcccagcaccaagagacacccgtttacctgggagccacggcaggcatgcggttgctcaggatggaaagtgaagagttggcagacagggttctggatgtggtggagaggagcctcagcaactacccctttgacttccagggtgccaggatcattactggccaagaggaaggtgcctatggctggattactatcaactatctgctgggcaaattcagtcagaaaacaaggtggttcagcatagtcccatatgaaaccaataatcaggaaacctttggagctttggaccttgggggagcctctacacaagtcacttttgtaccccaaaaccagactatcgagtccccagataatgctctgcaatttcgcctctatggcaaggactacaatgtctacacacatagcttcttgtgctatgggaaggatcaggcactctggcagaaactggccaaggacattcaggttgcaagtaatgaaattctcagggacccatgctttcatcctggatataagaaggtagtgaacgtaagtgacctttacaagaccccctgcaccaagagatttgagatgactcttccattccagcagtttgaaatccagggtattggaaactatcaacaatgccatcaaagcatcctggagctcttcaacaccagttactgcccttactcccagtgtgccttcaatgggattttcttgccaccactccagggggattttggggcattttcagctttttactttgtgatgaagtttttaaacttgacatcagagaaagtctctcaggaaaaggtgactgagatgatgaaaaagttctgtgctcagccttgggaggagataaaaacatcttacgctggagtaaaggagaagtacctgagtgaatactgcttttctggtacctacattctctccctccttctgcaaggctatcatttcacagctgattcctgggagcacatccatttcattggcaagatccagggcagcgacgccggctggactttgggctacatgctgaacctgaccaacatgatcccagctgagcaaccattgtccacacctctctcccactccacctatgtcttcctcatggttctattctccctggtccttttcacagtggccatcataggcttgcttatctttcacaagccttcatatttctggaaagatatggtatagcaaaagcagctgaaatatgctggctggagtgaggaaaaaaatcgtccagggagcattttcctccatcgcagtgttcaaggccatccttccctgtctgccagggccagtcttgacgagtgtgaagcttccttggcttttactgaagcctttcttttggaggtattcaatatcctttgcctcaaggacttcggcagatactgtctctttcatgagtttttcccagctacacctttctcctttgtactttgtgcttgtataggttttaaagacctgacacctttcataatctttgctttataaaagaacaatattgactttgtctag

SEQ ID NO: 6365 - DNA, 4176 bp, Homo sapiens
  II.123 (NM_000565)
ggcggtcccctgttctccccgctcaggtgcggcgctgtggcaggaagccaccccctcggtcggccggtgcgcggggctgttgcgccatccgctccggctttcgtaaccgcaccctgggacggcccagagacgctccagcgcgagttcctcaaatgttttcctgcgttgccaggaccgtccgccgctctgagtcatgtgcgagtgggaagtcgcactgacactgagccgggccagagggagaggagccgagcgcggcgcggggccgagggactcgcagtgtgtgtagagagccgggctcctgcggatgggggctgcccccggggcctgagcccgcctgcccgcccaccgccccgccccgcccctgccacccctgccgcccggttcccattagcctgtccgcctctgcgggaccatggagtggtagccgaggaggaagcatgctggccgtcggctgcgcgctgctggctgccctgctggccgcgccgggagcggcgctggccccaaggcgctgccctgcgcaggaggtggcgagaggcgtgctgaccagtctgccaggagacagcgtgactctgacctgcccgggggtagagccggaagacaatgccactgttcactgggtgctcaggaagccggctgcaggctcccaccccagcagatgggctggcatgggaaggaggctgctgctgaggtcggtgcagctccacgactctggaaactattcatgctaccgggccggccgcccagctgggactgtgcacttgctggtggatgttccccccgaggagccccagctctcctgcttccggaagagccccctcagcaatgttgtttgtgagtggggtcctcggagcaccccatccctgacgacaaaggctgtgctcttggtgaggaagtttcagaacagtccggccgaagacttccaggagccgtgccagtattcccaggagtcccagaagttctcctgccagttagcagtcccggagggagacagctctttctacatagtgtccatgtgcgtcgccagtagtgtcgggagcaagttcagcaaaactcaaacctttcagggttgtggaatcttgcagcctgatccgcctgccaacatcacagtcactgccgtggccagaaacccccgctggctcagtgtcacctggcaagacccccactcctggaactcatctttctacagactacggtttgagctcagatatcgggctgaacggtcaaagacattcacaacatggatggtcaaggacctccagcatcactgtgtcatccacgacgcctggagcggcctgaggcacgtggtgcagcttcgtgcccaggaggagttcgggcaaggcgagtggagcgagtggagcccggaggccatgggcacgccttggacagaatccaggagtcctccagctgagaacgaggtgtccacccccatgcaggcacttactactaataaagacgatgataatattctcttcagagattctgcaaatgcgacaagcctcccagtgcaagattcttcttcagtaccactgcccacattcctggttgctggagggagcctggccttcggaacgctcctctgcattgccattgttctgaggttcaagaagacgtggaagctgcgggctctgaaggaaggcaagacaagcatgcatccgccgtactctttggggcagctggtcccggagaggcctcgacccaccccagtgcttgttcctctcatctccccaccggtgtcccccagcagcctggggtctgacaatacctcgagccacaaccgaccagatgccagggacccacggagcccttatgacatcagcaatacagactacttcttccccagatagctggctgggtggcaccagcagcctggaccctgtggatgataaaacacaaacgggctcagcaaaagatgcttctcactgccatgccagcttatctcaggggtgtgcggcctttggcttcacggaagagccttgcggaaggttctacgccaggggaaaatcagcctgctccagctgttcagctggttgaggtttcaaacctccctttccaaatgcccagcttaaaggggctagagtgaacttgggccactgtgaagagaaccatatcaagactctttggacactcacacggacactcaaaagctgggcaggttggtgggggcctcggtgtggagaagcggctggcagcccacccctcaacacctctgcacaagctgcaccctcaggcaggtgggatggatttccagccaaagcctcctccagccgccatgctcctggcccactgcatcgtttcatcttccaactcaaactcttaaaacccaagtgccttagcaaattctgtttttctaggcctggggacggcttttacttaaaccgccaaggctgggggaagaagctctctcctccctttcttccctacagttgaaaaacagctgagggtgagtgggtgaataatacagtatctcagggcctggtcgttttcaacagaattataattagttcctcattagcattttgctaaatgtgaatgatgatcctaggcatttgctgaatacagaggcaactgcattggctttgggttgcaggacctcaggtgagaagcagaggaaggagaggagaggggcacagggtctctaccatcccctgtagagtgggagctgagtgggggatcacagcctctgaaaaccaatgttctctcttctccacctcccacaaaggagagctagcagcagggagggcttctgccatttctgagatcaaaacggttttactgcagctttgtttgttgtcagctgaacctgggtaactagggaagataatattaaggaagacaatgtgaaaagaaaaatgagcctggcaagaatgtgtttaaacttggtttttaaaaaactgctgactgttttctcttgagagggtggaatatccaatattcgctgtgtcagcatagaagtaacttacttaggtgtgggggaagcaccataactttgtttagcccaaaaccaagtcaagtgaaaaaggaggaagagaaaaaatattttcctgccaggcatggtggcccacgcacttcgggaggtcgaggcaggaggatcacttgagtccagaagtttgagatcagcctgggcaatgtgataaaaccccatctctacaaaaagcataaaaattagccaagtgtggtagagtgtgcctgaagtcccagatacttggggggctgaggtgggaggatctcttgagcctgggaggtcaaggctgcagtgagccgagattgcaccactgcactccagcctgggtgacagagcaagtgagaccctgtctcaaaaaaagaaaaagaaaaagaaaaaatattttccctattagagaagagattgtggtttcattctgtattttgtttttgtcttaaaaagtggaaaaatagcctgcctcttctctactctagggaaaaaccagcgtgtgactactcccccaggtggttatggagagggtgtccggtccctgtcccagtgccgagaaggaagcctcccacgactgcccggcagggtcctagaaattccccaccctgaaagccctgagctttctgctatcaaagaggttttaaaaaaatcccatttaaaaaaaatcccttacctcggtgccttcctctttttatttagttccttgagttgattcagctctgcaagaattgaagcaggactaaatgtctagttgtaacaccatgattaaccacttcagctgacttttctgtccgagctttgaaaattcagtggtgttagtggttacccagttagctctcaagttatcagggtattccagagtggggatatgatttaaatcagccgtgtaaccatggacccaatatttaccagaccacaaaacttttctaatactctaccctcttagaaaaaccaccaccatcaccagacaggtgcgaaaggatgaaagtgaccatgttttgtttacggttttccaggtttaagctgttactgtcttcagtaagccgtgattttcattgctgggcttgtctgtagattttagaccctattgctgcttgaggcaactcatcttaggttggcaaaaaggcaggatggccgggcgcggtggctcacgcctgtaatcctagcactttgggaggccaaggtgggaggattgcttgagctcaggagtttgagaccaacctggg

SEQ ID NO: 6366 - DNA, 3700 bp, Homo sapiens
  II.124 (NM_002211)
agccgccgccacccgccgcgcccgacacccgggaggccccgccagcccgcgggagaggcccagcgggagtcgcggaacagcaggcccgagcccaccgcgccgggccccggacgccgcgcggaaaagatgaatttacaaccaattttctggattggactgatcagttcagtttgctgtgtgtttgctcaaacagatgaaaatagatgtttaaaagcaaatgccaaatcatgtggagaatgtatacaagcagggccaaattgtgggtggtgcacaaattcaacatttttacaggaaggaatgcctacttctgcacgatgtgatgatttagaagccttaaaaaagaagggttgccctccagatgacatagaaaatcccagaggctccaaagatataaagaaaaataaaaatgtaaccaaccgtagcaaaggaacagcagagaagctcaagccagaggatattactcagatccaaccacagcagttggttttgcgattaagatcaggggagccacagacatttacattaaaattcaagagagctgaagactatcccattgacctctactaccttatggacctgtcttactcaatgaaagacgatttggagaatgtaaaaagtcttggaacagatctgatgaatgaaatgaggaggattacttcggacttcagaattggatttggctcatttgtggaaaagactgtgatgccttacattagcacaacaccagctaagctcaggaacccttgcacaagtgaacagaactgcaccagcccatttagctacaaaaatgtgctcagtcttactaataaaggagaagtatttaatgaacttgttggaaaacagcgcatatctggaaatttggattctccagaaggtggtttcgatgccatcatgcaagttgcagtttgtggatcactgattggctggaggaatgttacacggctgctggtgttttccacagatgccgggtttcactttgctggagatgggaaacttggtggcattgttttaccaaatgatggacaatgtcacctggaaaataatatgtacacaatgagccattattatgattatccttctattgctcaccttgtccagaaactgagtgaaaataatattcagacaatttttgcagttactgaagaatttcagcctgtttacaaggagctgaaaaacttgatccctaagtcagcagtaggaacattatctgcaaattctagcaatgtaattcagttgatcattgatgcatacaattccctttcctcagaagtcattttggaaaacggcaaattgtcagaaggagtaacaataagttacaaatcttactgcaagaacggggtgaatggaacaggggaaaatggaagaaaatgttccaatatttccattggagatgaggttcaatttgaaattagcataacttcaaataagtgtccaaaaaaggattctgacagctttaaaattaggcctctgggctttacggaggaagtagaggttattcttcagtacatctgtgaatgtgaatgccaaagcgaaggcatccctgaaagtcccaagtgtcatgaaggaaatgggacatttgagtgtggcgcgtgcaggtgcaatgaagggcgtgttggtagacattgtgaatgcagcacagatgaagttaacagtgaagacatggatgcttactgcaggaaagaaaacagttcagaaatctgcagtaacaatggagagtgcgtctgcggacagtgtgtttgtaggaagagggataatacaaatgaaatttattctggcaaattctgcgagtgtgataatttcaactgtgatagatccaatggcttaatttgtggaggaaatggtgtttgcaagtgtcgtgtgtgtgagtgcaaccccaactacactggcagtgcatgtgactgttctttggatactagtacttgtgaagccagcaacggacagatctgcaatggccggggcatctgcgagtgtggtgtctgtaagtgtacagatccgaagtttcaagggcaaacgtgtgagatgtgtcagacctgccttggtgtctgtgctgagcataaagaatgtgttcagtgcagagccttcaataaaggagaaaagaaagacacatgcacacaggaatgttcctattttaacattaccaaggtagaaagtcgggacaaattaccccagccggtccaacctgatcctgtgtcccattgtaaggagaaggatgttgacgactgttggttctattttacgtattcagtgaatgggaacaacgaggtcatggttcatgttgtggagaatccagagtgtcccactggtccagacatcattccaattgtagctggtgtggttgctggaattgttcttattggccttgcattactgctgatatggaagcttttaatgataattcatgacagaagggagtttgctaaatttgaaaaggagaaaatgaatgccaaatgggacacgggtgaaaatcctatttataagagtgccgtaacaactgtggtcaatccgaagtatgagggaaaatgagtactgcccgtgcaaatcccacaacactgaatgcaaagtagcaatttccatagtcacagttaggtagctttagggcaatattgccatggttttactcatgtgcaggttttgaaaatgtacaatatgtataatttttaaaatgttttattattttgaaaataatgttgtaattcatgccagggactgacaaaagacttgagacaggatggttattcttgtcagctaaggtcacattgtgcctttttgaccttttcttcctggactattgaaatcaagcttattggattaagtgatatttctatagcgattgaaagggcaatagttaaagtaatgagcatgatgagagtttctgttaatcatgtattaaaactgatttttagctttacaaatatgtcagtttgcagttatgcagaatccaaagtaaatgtcctgctagctagttaaggattgttttaaatctgttattttgctatttgcctgttagacatgactgatgacatatctgaaagacaagtatgttgagagttgctggtgtaaaatacgtttgaaatagttgatctacaaaggccatgggaaaaattcagagagttaggaaggaaaaaccaatagctttaaaacctgtgtgccattttaagagttacttaatgtttggtaacttttatgccttcactttacaaattcaagccttagataaaagaaccgagcaattttctgctaaaaagtccttgatttagcactatttacatacaggccatactttacaaagtatttgctgaatggggaccttttgagttgaatttattttattatttttattttgtttaatgtctggtgctttctatcacctcttctaatcttttaatgtatttgtttgcaattttggggtaagacttttttatgagtactttttctttgaagttttagcggtcaatttgcctttttaatgaacatgtgaagttatactgtggctatgcaacagctctcacctacgcgagtcttactttgagttagtgccataacagaccactgtatgtttacttctcaccatttgagttgcccatcttgtttcacactagtcacattcttgttttaagtgcctttagttttaacagttcactttttacagtgctatttactgaagttatttattaaatatgcctaaaatacttaaatcgga

SEQ ID NO: 6367 - DNA, 1512 bp, Homo sapiens
  II.125 (XM_049864)
agcccggagcctgcagcccagccccacccagacccatggctggacctgccacccagagccccatgaagctgatggccctgcagctgctgctgtggcacagtgcactctggacagtgcaggaagccacccccctgggccctgccagctccctgccccagagcttcctgctcaagtgcttagagcaagtgaggaagatccagggcgatggcgcagcgctccaggagaagctggtgagtgagtgtgccacctacaagctgtgccaccccgaggagctggtgctgctcggacactctctgggcatcccctgggctcccctgagcagctgccccagccaggccctgcagctggcaggctgcttgagccaactccatagcggccttttcctctaccaggggctcctgcaggccctggaagggatctcccccgagttgggtcccaccttggacacactgcagctggacgtcgccgactttgccaccaccatctggcagcagatggaagaactgggaatggcccctgccctgcagcccacccagggtgccatgccggccttcgcctctgctttccagcgccgggcaggaggggtcctggttgcctcccatctgcagagcttcctggaggtgtcgtaccgcgttctacgccaccttgcccagccctgagccaagccctccccatcccatgtatttatctctatttaatatttatgtctatttaagcctcatatttaaagacagggaagagcagaacggagccccaggcctctgtgtccttccctgcatttctgagtttcattctcctgcctgtagcagtgagaaaaagctcctgtcctcccatcccctggactgggaggtagataggtaaataccaagtatttattactatgactgctccccagccctggctctgcaatgggcactgggatgagccgctgtgagcccctggtcctgagggtccccacctgggacccttgagagtatcaggtctcccacgtgggagacaagaaatccctgtttaatatttaaacagcagtgttccccatctgggtccttgcacccctcactctggcctcagccgactgcacagcggcccctgcatccccttggctgtgaggcccctggacaagcagaggtggccagagctgggaggcatggccctggggtcccacgaatttgctggggaatctcgtttttcttcttaagacttttgggacatggtttgactcccgaacatcaccgacgcgtctcctgtttttctgggtggcctcgggacacctgccctgcccccacgagggtcaggactgtgactctttttagggccaggcaggtgcctggacatttgccttgctggacggggactggggatgtgggagggagcagacaggaggaatcatgtcaggcctgtgtgtgaaaggaagctccactgtcaccctccacctcttcaccccccactcaccagtgtcccctccactgtcacattgtaactgaacttcaggataataaagtgtttgcctcc

SEQ ID NO: 6368 - DNA, 1126 bp, Homo sapiens
  II.126 (XM_045933)
aagggcagtgacgcgctcctctccaacaccgtgggcacgcccgccttcatggcacccgagtcgctctctgagacccgcaagatcttctctgggaaggccttggatgtttgggccatgggtgtgacactatactgctttgtctttggccagtgcccattcatggacgagcggatcatgtgtttacacagtaagatcaagagtcaggccctggaatttccagaccagcccgacatagctgaggacttgaaggacctgatcacccgtatgctggacaagaaccccgagtcgaggatcgtggtgccggaaatcaagctgcacccctgggtcacgaggcatggggcggagccgttgccgtcggaggatgagaactgcacgctggtcgaagtgactgaagaggaggtcgagaactcagtcaaacacattcccagcttggcaaccgtgatcctggtgaagaccatgatacgtaaacgctcctttgggaacccattcgagggcagccggcgggaggaacgctcactgtcagcgcctggaaacttgctcaccaaaaaaccaaccagggaatgtgagtccctgtctgagctcaagacctagaaaataagtccccttcctgcctgttgcaaagtaacgtaagagttccctcacccgagtggatgcagaccttcttgctgtcagccacccttccttcatacacatagccagcccaggtgaccagaacctcccaggacagatgaggctttgtgtccttatgagactgggagaacctgctgggcacccctgctgcaggtgctgtggtgggtggggaccccactgcccttcccactgagcacatcatggctacctgacttggtgggagctccaggcagtcacttctgtttcttaaacatagctttactgaggtacaattcacataccatgtaattcacccacgggaagtgtatgattcagtggtttctaatacagacttctgcagccattaccaccgtcaactttacgacattttcatcagcccaagaagacaccctacactccttagctgtccccatccaactcccccaccccagtaaccactcagaataggtatggatttgcctattctggacgtttcgtataaatggcgtcatacact

SEQ ID NO: 6369 - DNA, 3023 bp, Homo sapiens
  II.127 (NM_033357)
gattctgcctttctgctggagggaagtgttttcacaggttctcctccttttatcttttgtgttttttttcaagccctgctgaatttgctagtcaactcaacaggaagtgaggccatggagggaggcagaagagccagggtggttattgaaagtagaagaaacttcttcctgggagcctttcccacccccttccctgctgagcacgtggagttaggcaggttaggggactcggagactgcgatggtgccaggaaagggtggagcggattatattctcctgccttttaaaaagatggacttcagcagaaatctttatgatattggggaacaactggacagtgaagatctggcctccctcaagttcctgagcctggactacattccgcaaaggaagcaagaacccatcaaggatgccttgatgttattccagagactccaggaaaagagaatgttggaggaaagcaatctgtccttcctgaaggagctgctcttccgaattaatagactggatttgctgattacctacctaaacactagaaaggaggagatggaaagggaacttcagacaccaggcagggctcaaatttctgcctacagggtcatgctctatcagatttcagaagaagtgagcagatcagaattgaggtcttttaagtttcttttgcaagaggaaatctccaaatgcaaactggatgatgacatgaacctgctggatattttcatagagatggagaagagggtcatcctgggagaaggaaagttggacatcctgaaaagagtctgtgcccaaatcaacaagagcctgctgaagataatcaacgactatgaagaattcagcaaagagagaagcagcagccttgaaggaagtcctgatgaattttcaaatggggaggagttgtgtggggtaatgacaatctcggactctccaagagaacaggatagtgaatcacagactttggacaaagtttaccaaatgaaaagcaaacctcggggatactgtctgatcatcaacaatcacaattttgcaaaagcacgggagaaagtgcccaaacttcacagcattagggacaggaatggaacacacttggatgcaggtacagtagaacccaaaagagaaaagtaaaatatttcttatgcctatttttttttaaatcaaaagggagagaacaaaagctataccaaaagggccatgtttcaagaaaatggatttaaacatatttccctgtggaggggctttgaccacgacctttgaagagcttcattttgagatcaagccccacgatgactgcacagtagagcaaatctatgagattttgaaaatctaccaactcatggaccacagtaacatggactgcttcatctgctgtatcctctcccatggagacaaaggcatcatctatggcactgatggacaggaggcccccatctatgagctgacatctcagttcactggtttgaagtgcccttcccttgctggaaaacccaaagtgttttttattcaggcttgtcagggggataactaccagaaaggtatacctgttgagactgattcagaggagcaaccctatttagaaatggatttatcatcacctcaaacgagatatatcccggatgaggctgactttctgctggggatggccactgtgaataactgtgtttcctaccgaaaccctgcagagggaacctggtacatccagtcactttgccagagcctgagagagcgatgtcctcgaggcgatgatattctcaccatcctgactgaagtgaactatgaagtaagcaacaaggatgacaagaaaaacatggggaaacagatgcctcagcctactttcacactaagaaaaaaacttgtcttcccttctgattgatggtgctattttgtttgttttgttttgttttgtttttttgagacagaatctcgctctgtcgcccaggctggagtgcagtggcgtgatctcggctcaccgcaagctccgcctcccgggttcacgccattctcctgcctcagcctcccgagtagctgggactacaggggcccgccaccacacctggctaattttttaaaaatatttttagtagagacagggtttcactgtgttagccagggtggtcttgatctcctgacctcgtgatccacccacctcggcctcccaaagtgctgggattacaggcgtgagccaccgcgcctggccgatggtactatttagatataacactatgtttatttactaattttctagattttctactttattaattgttttgcacttttttataagagctaaagttaaataggatattaacaacaataacactgtctcctttctcttacgcttaaggctttgggaatgtttttagctggtggcaataaataccagacacgtacaaaatccagctatgaatatagagggcttatgattcagattgttatctatcaactataagcccactgttaatattctattaactttaattctctttcaaagctaaattccacactaccacattaaaaaaattagaaagtagccacgtatggtggctcatgtctataatcccagcactttgggaggttgaggtgggaggatttgcttgaacccaagaggtccaaggctgcagtgagccatgttcacaccgctgcactcaagcttgggtgacagagcaagaccccgtccccaaaaaaattttttttttaataaacccaaatttgtttgaaaacttttaaaaattcaaatgatttttacaagttttaaataagctctccccaaacttgctttatgccttcttattgcttttatgatatatatatgcttggctaactatatttgctttttgctaacaatgctctggggtctttttatgcatttgcatttgctctttcatctctgcttggattattttaaatcattaggaattaagttatctttaaaatttaagtatcttttttccaaaacattttttaatagaataaaatataatttgatcttaaaaaaaaaaaaaaaaaaaaaaaaaaaaaaaaaaaaaaaa

SEQ ID NO: 6370 - DNA, 2563 bp, Homo sapiens
  II.128 (XM_008704)
cgctcccctcagctcctgcagtgctaattaagggagggagcagcggggagcttgcagtgaccaagagggtgttgaggctaggaggccacgataaacaggatacgataaaagtccttaaccaagacgcagatgggaagaagcgttagagcgagcagcactcacatctcaagaaccagcctttcaaacagtttccagagatggattatcctactttacttttggctcttcttcatgtatacagagctctatgtgaagaggtgctttggcatacatcagttccctttgccgagaacatgtctctagaatgtgtgtatccatcaatgggcatcttaacacaggtggagtggttcaagatcgggacccagcaggattccatagccattttcagccctactcatggcatggtcataaggaagccctatgctgagagggtttactttttgaattcaacgatggcttccaataacatgactcttttctttcggaatgcctctgaagatgatgttggctactattcctgctctctttacacttacccacagggaacttggcagaaggtgatacaggtggttcagtcagatagttttgaggcagctgtgccatcaaatagccacattgtttcggaacctggaaagaatgtcacactcacttgtcagcctcagatgacgtggcctgtgcaggcagtgaggtgggaaaagatccagccccgtcagatcgacctcttaacttactgcaacttggtccatggcagaaatttcacctccaagttcccaagacaaatagtgagcaactgcagccacggaaggtggagcgtcatcgtcatccccgatgtcacagtctcagactcggggctttaccgctgctacttgcaggccagcgcaggagaaaacgaaaccttcgtgatgagattgactgtagccgagggtaaaaccgataaccaatataccctctttgtggctggagggacagttttattgttgttgtttgttatctcaattaccaccatcattgtcattttccttaacagaaggagaaggagagagagaagagatctatttacagagtcctgggatacacagaaggcacccaataactatagaagtcccatctctaccagtcaacctaccaatcaatccatggatgatacaagagaggatatttatgtcaactatccaaccttctctcgcagaccaaagactagagtttaagcttattcttgacatgagtgcattagtaatgactcttatgtactcatgcatggatctttatgcaatttttttccactacccaaggtctaccttagatactagttgtctgaattgagttactttgataggaaaaatacttcattacctaaaatcatttttcatagaactgtttcagaaaacctgactctaactggtttatatacaaaagaaaacttactgtatcatataacagaatgatccaggggagattaagctttgggcaagggctatttaccagggcttaaatgttgtgtctagaattaagtatgggcataaactggcttctgaatccctttccagagtgttggatccatttccctggtcttggcctcactctcatgcaggctttcctcttgtgttggcaagatggctgccaactcttggcaattcatacatccttgtttctgtctggtagagagtttgcttctcaaatggagcaaacaaatttgattattttttcattgttaaataggcaacatgaccagaaaggatggaatggcttaagtaaactaagggttcacttctagagctgagaagcagggtcaaagcacaatactgggcaattcagagcatggttagaagaggaaaggggagtctcaaagctggagagtttaccaacaaatattgactgcagtgattaaccaagacatttttgttaactaaaaagtgaaatatgggatggattctagaaatggggtatctctgtccatacttctagaatccactctatcagcatagtccagaagaatacctggcagtagaagaaatgaatattcaagaggaagataaatgcgagagggcaatcctttactattctcatatttatttatctctcattctgtatagaattcttgccgccatcccaggtctagccttaggagcaaatgtagtagatagtcgaataataaataacttaatgttttggacatattttgtctacttttgagaattatttttaatatgtaaattctctcaaaagggtcaggcacctagttattattttttaatgattatgtgaaagttgaatataatataccactaaaagtgacagttgaaagtggtggcataggacggtagggtagaaatttgggagggaaaaaagaaattgggagggtacaggcaacaggagaaaggaatcaaaccacagaaaaatacaaagggaaacttctgcttcactattcagacaaagacagccctaatgacatcaccaacagtcaaagcaattagagaccatacctaatattgtttaaattctagatgtaggctaacaatgaaaagtatttgccaaactgaataaaactgtcatggttaccttg

SEQ ID NO: 6371 - DNA, 3952 bp, Homo sapiens
  II.129 (NM_030751)
attttagacacaagcgagaggatcatggcggatggccccaggtgtaagcgcagaaagcaggcgaacccgcggcgcaataacgttacaaattataatactgtggtagaaacaaattcagattcagatgatgaagacaaactgcatattgtggaagaagaaagtgttacagatgcagctgactgtgaaggtgtaccagaggatgacctgccaacagaccagacagtgttaccagggaggagcagtgaaagagaagggaatgctaagaactgctgggaggatgacagaaaggaagggcaagaaatcctggggcctgaagctcaggcagatgaagcaggatgtacagtaaaagatgatgaatgcgagtcagatgcagaaaatgagcaaaaccatgatcctaatgttgaagagtttctacaacaacaagacactgctgtcatttttcctgaggcacctgaagaggaccagaggcagggcacaccagaagccagtggtcatgatgaaaatggaacaccagatgcattttcacaattactcacctgtccatattgtgatagaggctataaacgctttacctctctgaaagaacacattaaatatcgtcatgaaaagaatgaagataactttagttgctccctgtgcagttacacctttgcatacagaacccaacttgaacgtcacatgacatcacataaatcaggaagagatcaaagacatgtgacgcagtctgggtgtaatcgtaaattcaaatgcactgagtgtggaaaagctttcaaatacaaacatcacctaaaagagcacttaagaattcacagtggagagaagccatatgaatgcccaaactgcaagaaacgcttttcccattctggctcctatagctcacacataagcagtaagaaatgtatcagcttgatacctgtgaatgggcgaccaagaacaggactcaagacatctcagtgttcttcaccgtctctttcagcatcaccaggcagtcccacacgaccacagatacggcaaaagatagagaataaaccccttcaagaacaactttctgttaaccaaattaaaactgaacctgtggattatgaattcaaacccatagtggttgcttcaggaatcaactgttcaacccctttacaaaatggggttttcactggtggtggcccattacaggcaaccagttctcctcagggcatggtgcaagctgttgttctgccaacagttggtttggtgtctcccataagtatcaatttaagtgatattcagaatgtacttaaagtggcgatagatggtaatgtaataaggcaagtgttggagaataatcaagccaatcttgcatccaaagaacaagaaacaatcaatgcttcacccatacaacaaggtggccattctgttatttcagccatcagtcttcctttggttgatcaagatggaacaaccaaaattatcatcaactacagtcttgagcagcctagccaacttcaagttgttcctcaaaatttaaaaaaagaaaatccagtcgctacaaacagttgtaaaagtgaaaagttaccagaagatcttactgttaagtctgagaaggacaaaagctttgaagggggggtgaatgatagcacttgtcttctgtgtgatgattgtccaggagatattaatgcacttccagaattaaagcactatgacctaaagcagcctactcagcctcctccactccctgcagcagaagctgagaagcctgagtcctctgtttcatcagctactggagatggcaatttgtctcctagtcagccacctttaaagaacctcttgtctctcctaaaagcatattatgctttgaatgcacaaccaagtgcagaagagctctcaaaaattgctgattcagtaaacctaccactggatgtagtaaaaaagtggtttgaaaagatgcaagctggacagatttcagtgcagtcttctgaaccatcttctcctgaaccaggcaaagtaaatacccctgccaagaacaatgatcagcctcaatctgcaaatgcaaatgaaccccaggacagcacagtaaatctacaaagtcctttgaagatgactaactccccagttttaccagtgggatcaaccaccaatggttccagaagtagtacaccatccccatcacctctaaacctttcctcatccagaaatacacagggttacttgtacacagctgagggtgcacaagaagagccacaagtagaacctcttgatctttcactaccaaagcaacagggagaattattagaaaggtcaactatcactagtgtttaccagaacagtgtttattctgtccaggaagaacccttgaacttgtcttgcgcaaaaaaggagccacaaaaggacagttgtgttacagactcagaaccagttgtaaatgtaatcccaccaagtgccaaccccataaatatcgctatacctacagtcactgcccagttacccacaatcgtggccattgctgaccagaacagtgttccatgcttaagagcgctagctgccaataagcaaacgattctgattccccaggtggcatacacctactcaactacggtcagccctgcagtccaagaaccacccttgaaagtgatccagccaaatggaaatcaggatgaaagacaagatactagctcagaaggagtatcaaatgtagaggatcagaatgactctgattctacaccgcccaaaaagaaaatgcggaagacagaaaatggaatgtatgcttgtgatttgtgtgacaagatattccaaaagagtagttcattattgagacataaatatgaacacacaggtaaaagacctcatgagtgtggaatctgtaaaaaggcatttaaacacaaacatcatttgattgaacacatgcgattacattctggagaaaagccctatcaatgtgacaaatgtggaaagcgcttctcacactctgggtcttattctcaacacatgaatcatcgctactcctactgtaagagagaagcggaagaacgtgacagcacagagcaggaagaggcagggcctgaaatcctctcgaatgagcacgtgggtgccagggcgtctccctcacagggcgactcggacgagagagagagtttgacaagggaagaggatgaagacagtgaaaaagaggaagaggaggaggataaagagatggaagaattgcaggaagaaaaagaatgtgaaaaaccacaaggggatgaggaagaggaggaggaggaggaagaagtggaagaagaagaggtagaagaggcagagaatgagggagaagaagcaaaaactgaaggtctgatgaaggatgacagggctgaaagtcaagcaagcagcttaggacaaaaagtaggcgagagtagtgagcaagtgtctgaagaaaagacaaatgaagcctaatcgtttttctagaaggaaaataaattctaattgataatgaatttcgttcaatattatccttgcttttcatggaaacacagtaacctgtatgctgtgattcctgttcactactgtgtaaagtaaaaactaaaaaaatacaaaatacaaaacacacacacacacacacacacacacacacacacacacacacacaaaataaatccgggtgtgcctgaacctcagacctagtaatttttcatgcagttttcaaagttaggaacaagtttgtaacatgcagcagattagaaaaccttaatgactcagagagcaacaatacaagaggttaaaggaagctgattaattagatatgcatctggcattgttttatcttatcagtattatcactcttatgttggtttattcttaagctgtacaattgggagaaattttataattttttattggtaaacatatgctaaatccgcttcagtattttattatgttttttaaaatgtgagaacttctgcactacaaaattcccttcacagagaagtataatgtagttccggaattc

SEQ ID NO: 6372 - DNA, 70 bp, Homo sapiens
  II.130 (D49410)
aaatgaaaaaaaataatagttcactcaaacacaacttccgggttgaaggttcaacgattctcctcctcac

SEQ ID NO: 6373 - DNA, 1451 bp, Homo sapiens
  III.1 (L35279)
gacaaggacgagtgctccaaggataacggcggctgccagcaggactgcgtcaacacgttcggcagttatgagtgccaatgccgcagtggcttcgtcctccatgacaacaagcacgactgcaaagaagccggctgtaaccacaaggtgacatccaccagtggtaccatcaccagccccaactggcctgacaagtatcccagcaagaaggagtgcacgtgggccatctccagcacccccgggcaccgggtcaagctgaccttcatggagatggacatcgagtcccagcctgagtgtgcctacgaccacctagaggtgttcgacgggcgagacgccaaggcccccgtcctcggccgcttctgtgggagcaagaagcccgagcccgtcctggccacaggcagccgcatgttcctgcgcttctactcagataactcggtccagcgaaagggcttccaggcctcccacgccacagagtgcgggggccaggtacgggcagacgtgaagaccaaggacctttactcccacgcccagtttggcgacaacaactaccctgggggtgtggactgtgagtgggtcattgtggccgaggaaggctacggcgtggagctcgtgttccagacctttgaggtggaggaggagaccgactgcggctatgactacatggagctcttcgacggctacgacagcacagcccccagcctggggcgctactgtggctcagggcctcctgaggaggtgtactcggcgggagattctgtcctggtgaagttccactcggatgacaccatcaccaaaaaaggtttccacctgcgatacaccagcaccaagttccaggacacactccacagcaggaagtgaccactgcctgagcaggggcggggactggagcctgctgcccttggtcgcctagactggatagtgggggtgggcggaaggcaacgcaccatccctctcccccaggccccaggacctgcagggccaatggcctggtgagactgtccacaggaggtgggggaactggactccggcataagccacttccccacaaacccccaccagcaaggggctggggccagggagcagagcttccacaagacatttcgaagtcatcattcctctcttagggggccctgcctggtggcaagagggaatgtcagcaggaccccatcgccatccctgtgtctctacacgctgtattgtgtattaccgggggcattattttcattgtaatgttcatttcccacccctgctccagcctcgatttggttttattttgagcccccattccaccaccccagtttcctggggcacaagtgtctgtgcatgtcccccaggagccaccgtggggagccgatggggaggggatggagaaacaagacagggcttctctcaggcccagtggccggtcagccacaccagggcaccgcagccaataaaccgaaagtgttacagcc

SEQ ID NO: 6374 - DNA, 1355 bp, Homo sapiens
  III.2 (XM_039021)
ggtgtctggctgcgcgtttggctgcaatgagctcggcctcggggctccgcagggggcacccggcaggtggggaagaaaacatgacagaaacagatgccttctataaaagagaaatgtttgatccggcagaaaagtacaaaatggaccacaggaggagaggaattgctttaatcttcaatcatgagaggttcttttggcacttaacactgccagaaaggcggggcacctgcgcagatagagacaatcttacccgcaggttttcagatctaggatttgaagtgaaatgctttaatgatcttaaagcagaagaactactgctcaaaattcatgaggtgtcaactgttagccacgcagatgccgattgctttgtgtgtgtcttcctgagccatggcgaaggcaatcacatttatgcatatgatgctaaaatcgaaattcagacattaactggcttgttcaaaggagacaagtgtcacagcctggttggaaaacccaagatatttatcattcaggcatgtcggggaaaccagcacgatgtgccagtcattcctttggatgtagtagataatcagacagagaagttggacaccaacataactgaggtggatgcagcctccgtttacacgctgcctgctggagctgacttcctcatgtgttactctgttgcagaaggatattattctcaccgggaaactgtgaacggctcatggtacattcaagatttgtgtgagatgttgggaaaatatggctcctccttagagttcacagaactcctcacactggtgaacaggaaagtttctcagcgccgagtggacttttgcaaagacccaagtgcaattggaaagaagcaggttccctgttttgcctcaatgctaactaaaaagctgcatttctttccaaaatctaattaattaatagaggctatctaattttacactctgtattgaaaatggctttctcagccaggcgtggttactcacacctgtaatcccagcactttgggagtccaaggtgggcggatcacctgaggtcgggagttcgagaccagcctgaccaacatggagaagccccgtctctactaaaaatgcaaaaaaaaatttagctaggcatggcggcgcatgcctgcaatcccagctacttggaaggctgaggcaggagaatcacttgaacccaggaggtggaggctgcggtgagccgagattgcgccattgcactccagcctgggcaacgagtgaaactccgtctcaaaaaaaagaaaatgtctttctcttccttttatataaatatcgttagggtgaagcattatggtctaatgattcaaatgttttaaagtttaatgcctagcagagaactgcctt

SEQ ID NO: 6375 - DNA, 1522 bp, Homo sapiens; identical to SEQ ID NO: 6276
  III.3 (BC001374)

SEQ ID NO: 6376 - DNA, 1207 bp, Homo sapiens
  III.4 (NM_001765)
acagagatcagcaaacagcttttctgagagaaagaaacatctgcaaatgacatgctgtttctgcagtttctgctgctagctcttcttctcccaggtggtgacaatgcagacgcatcccaggaacacgtctccttccatgtcatccagatcttctcatttgtcaaccaatcctgggcacgaggtcagggctcaggatggctggacgagttgcagactcatggctgggacagtgaatcaggcacaataattttcctgcataactggtccaagggcaacttcagcaatgaagagttgtcagacctagagttgttatttcgtttctacctctttggattaactcgggagattcaagaccatgcaagtcaagattactcgaaatatccctttgaagtacaggtgaaagcgggctgtgagctgcattctggaaagagcccagaaggcttctttcaggtagctttcaacggattagatttactgagtttccagaatacaacatgggtgccatctccaggctgtggaagtttggcccaaagtgtctgtcatctactcaatcatcagtatgaaggcgtcacagaaacagtgtataatctcataagaagcacttgcccccgatttctcttgggtctcctggatgcagggaagatgtatgtacacaggcaagtgaggccagaagcctggctgtccagtcgccccagccttgggtctggccagctgttgctggtttgtcatgcctccggcttctacccaaagcctgtttgggtgacatggatgcggaatgaacaggagcaactgggcactaaacatggtgatattcttcctaatgctgatgggacatggtatcttcaggtgatcctggaggtggcatctgaggagcctgctggcctgtcttgtcgagtgagacacagcagtctaggaggccaggacatcatcctctactggggacaccactcttccatgaattggattgccttggtagtgatagtgcccttggtgattctaatagtccttgtgttatggtttaagaagcactgctcatatcaggacatcctgtgagactcttccccctgactcccccattgtgttaagaacccagcaacccaggagcctagtacaatatagtgatgccatcccgtcgactctccatttaaattgtttctctttctgcataataaacatttgttaataaaaaccaaaaaaaaaaaaaaaa

SEQ ID NO: 6377 - DNA, 2116 bp, Homo sapiens
  III.5 (NM_013230)
cggttctccaagcacccagcatcctgctagacgcgccgcgcaccgacggaggggacatgggcagagcaatggtggccaggctggggctggggctgctgctgctggcactgctcctacccacgcagatttattccagtgaaacaacaactggaacttcaagtaactcctcccagagtacttccaactctgggttggccccaaatccaactaatgccaccaccaaggcggctggtggtgccctgcagtcaacagccagtctcttcgtggtctcactctctcttctgcatctctactcttaagagactcaggccaagaaacgtcttctaaatttccccatcttctaaacccaatccaaatggcgtctggaagtccaatgtggcaaggaaaaacaggtcttcatcgaatctactaattccacaccttttattgacacagaaaatgttgagaatcccaaatttgattgatttgaagaacatgtgagaggtttgactagatgatgaatgccaatattaaatctgctggagtttcatgtacaagatgaaggagaggcaacatccaaaatagttaagacatgatttccttgaatgtggcttgagaaatatggacacttaatactaccttgaaaataagaatagaaataaaggatgggattgtggaatggagattcagttttcattggttcattaattctataaggccataaaacaggtaatataaaaagcttccatcgatctatttatatgtacatgagaaggaatccccaggtgttactgtaattcctcaacgtattgtttcgacggcactaatttaatgccgatatactctagatgaatgtttacattgttgagctattgctgttctcttgggaactgaactcactttcctcctgaggctttggatttgacattgcatttgaccttttaggtagtaattgacatgtgccagggcaatgatgaatgagaatctaccccagatccaagcatcctgagcaactcttgattatccatattgagtcaaatggtaggcatttcctatcacctgtttccattcaacaagagcactacattcttttagctaaacggattccaaagagtagaattgcattgaccacgactaatttcaaaatgctttttattattattattttttagacagtctcactttgtcgcccaggccggagtgcagtggtgcgatctcagatcagtgtaccatttgcctcccgggctcaagcgattctcctgcctcagcctcccaagtagctgggattacaggcacctgccaccatgcccggctaatttttgtaattttagtagagacagggtttcaccatgttgcccaggctggtttagaactcctgacctcaggtgatccacccgcctcggcctcccaaagtgctgggattacaggcttgagcccccgcgcccagccatcaaaatgctttttatttctgcatatgtttgaatactttttacaatttaaaaaaatgatctgttttgaaggcaaaattgcaaatcttgaaattaagaaggcaaaatgtaaaggagtcaaactataaatcaagtatttgggaagtgaagactggaagctaatttgcataaattcacaaacttttatactctttctgtatatacattttttttctttaaaaaacaactatggatcagaatagcaacatttagaacactttttgttatcagtcaatatttttagatagttagaacctggtcctaagcctaaaagtgggcttgattctgcagtaaatcttttacaactgcctcgacacacataaacctttttaaaaatagacactccccgaagtcttttgtttgtatggtcacacactgatgcttagatgttccagtaatctaatatggccacagtagtcttgatgaccaaagtcctttttttccatctttagaaaactacatgggaacaaacagatcgaacagttttgaagctactgtgtgtgtgaatgaacactcttgctttattccagaatgctgtacatctattttggattgtatattgtggttgtgtatttacgctttgattcatagtaacttcttatggaattgatttgcattgaacgacaaactgtaaataaaaagaaacggtg

SEQ ID NO: 6378 - DNA, 823 bp, Homo sapiens; identical to SEQ ID NO: 6296
  III.6 (XM_006454)

SEQ ID NO: 6379 - DNA, 1720 bp, Homo sapiens
  III.7 (XM_043767)
gggggagtgcgaatttcttggccctgtcggcaggtgctttctcaaaggccccacagtcctccacttcctggggaggtagctgcagaataaaaccagcagagactccttttctcctaaccgtcccggccaccgctgcctcagcctctgcctcccagcctctttctgagggaaaggacaagatgaagtggaaggcgcttttcaccgcggccatcctgcaggcacagttgccgattacagaggcacagagctttggcctgctggatcccaaactctgctacctgctggatggaatcctcttcatctatggtgtcattctcactgccttgttcctgagagtgaagttcagcaggagcgcagacgcccccgcgtaccagcagggccagaaccagctctataacgagctcaatctaggacgaagagaggagtacgatgttttggacaagagacgtggccgggaccctgagatggggggaaagccgagaaggaagaaccctcaggaaggcctgtacaatgaactgcagaaagataagatggcggaggcctacagtgagattgggatgaaaggcgagcgccggaggggcaaggggcacgatggcctttaccagggtctcagtacagccaccaaggacacctacgacgcccttcacatgcaggccctgccccctcgctaacagccaggggatttcaccactcaaaggccagacctgcagacgcccagattatgagacacaggatgaagcatttacaacccggttcactcttctcagccactgaagtattcccctttatgtacaggatgctttggttatatttagctccaaaccttcacacacagactgttgtccctgcactctttaagggagtgtactcccagggcttacggccctggccttgggccctctggtttgccggtggtgcaggtagacctgtctcctggcggttcctcgttctccctgggaggcgggcgcactgcctctcacagctgagttgttgagtctgttttgtaaagtccccagagaaagcgcagatgctagcacatgccctaatgtctgtatcactctgtgtctgagtggcttcactcctgctgtaaatttggcttctgttgtcaccttcacctcctttcaaggtaactgtactgggccatgttgtgcctccctggtgagagggccgggcagaggggcagatggaaaggagcctaggccaggtgcaaccagggagctgcaggggcatgggaaggtgggcgggcaggggagggtcagccagggcctgcgagggcagcgggagcctccctgcctcaggcctctgtgccgcaccattgaactgtaccatgtgctacaggggccagaagatgaacagactgaccttgatgagctgtgcacaaagtggcataaaaaacatgtggttacacagtgtgaataaagtgctgcggagcaagaggaggccgttgattcacttcacgctttcagcgaatgacaaaatcatctttgtgaaggcctcgcaggaagacccaacacatgggacctataactgcccagcggacagtggcaggacaggaaaaacccgtcaatgtactaggatactgctgcgtcattacagggcacaggccatggatggaaaacgctctctactctgctttttttctactgttttaatttatactggcatgctaaagccttcctattttgcataataaatgcttcagtgaaaatgcagctttact

SEQ ID NO: 6380 - DNA, 1281 bp, Homo sapiens; identical to SEQ ID NO: 6324
  III.8 (XM_056798)

SEQ ID NO: 6381 - DNA, 1729 bp, Homo sapiens
  III.9 (M26315)
aaaacagcagcaacaacaacagcaacaacaaaaaatacactgtctttgggactattgatggataggggcactcactttttcccttctttttccttatccagggaaccgaagacgtgtttgcaaatgtccccggtgagtctcttttgaactctcagcctgctcaccttggccagccctggggtggggtcctggttggttctcagacctttcaaaggctgggggattgggaggctggacgtggctggatggatgctgcactggcggggttctggctacaatgatggtcgctttcctctctttcaggcctgtggtcaaatcgggagacaagcccagcctttcggcgagatacgtctaaccctgtgcaacagccactacattacttcaaactgagatccttccttttgagggagcaagtccttccctttcattttttccagtcttcctccctgtgtattcattctcatgattattattttagtgggggcggggtgggaaagattactttttctttatgtgtttgacgggaaacaaaactaggtaaaatctacagtacaccacaagggtcacaatactgttgtgcgcacatcgcggtagggcgtggaaaggggcaggccagagctacccgcagagttctcagaatcatgctgagagagctggaggcacccatgccatctcaacctcttccccgcccgttttacaaagggggaggctaaagcccagagacagcttgatcaaaggcacacagcaagtcagggttggagcagtagctggagggaccttgtctcccagctcagggctctttcctccacaccattcaggtctttctttccgaggcccctgtctcagggtgaggtgcttgagtctccaacggcaagggaacaagtacttcttgatacctgggatactgtgcccagagcctcgaggaggtaatgaattaaagaagagaactgcctttggcgaagttctataatgtaaacaatatcagactttttttttttataatcaagcctaaaattgtatagacctaaaataaaatgaagtggtgagcttaaccctggaaaatgaatccctctatctctaaagaaaatctctgtgaaacccctatgtggaggcggaattgctctcccagcccttgcattgcagaggggcccatgaaagaggacaggctacccctttacaaatagaatttgagcatcagtgaggttaaactaaggccctcttgaatctctgaatttgagatacaaacatgttcctgggatcactgatgactttttatactttgtaaagacaattgttggagagcccctcacacagccctggcctctgctcaactagcagatacagggatgaggcagacctgactctcttaaggaggctgagagcccaaactgctgtcccaaacatgcacttccttgcttaaggtatggtacaagcaatgcctgcccattggagagaaaaaacttaagtagataaggaaataagaaccactcataattcttcaccttaggaataatctcctgttaatatggtgtacattcttcctgattattttctacacatacatgtaaaatatgtctttcttttttaaatagggttgtactatgctgttatgagtggctttaatgaataaacatttgtagcatcctctttaatgggtaaacagcatccgattttggttgtgccatgcatttatttaactattacctgatatttagttgtttccaacctt

SEQ ID NO: 6382 - DNA, 1410 bp, Homo sapiens; identical to SEQ ID NO: 6295
  III.10 (NM_004931)

SEQ ID NO: 6383 - DNA, 6436 bp, Homo sapiens
  III.11 (XM_057158)
  misc_feature (3793)..(3793): n is a, c, g, or t
  misc_feature (3794)..(3794): n is a, c, g, or t
  misc_feature (3795)..(3795): n is a, c, g, or t
  misc_feature (3796)..(3796): n is a, c, g, or t
  misc_feature (3797)..(3797): n is a, c, g, or t
  misc_feature (3798)..(3798): n is a, c, g, or t
  misc_feature (3799)..(3799): n is a, c, g, or t
  misc_feature (3800)..(3800): n is a, c, g, or t
  misc_feature (3801)..(3801): n is a, c, g, or t
  misc_feature (3802)..(3802): n is a, c, g, or t
  misc_feature (3803)..(3803): n is a, c, g, or t
  misc_feature (3804)..(3804): n is a, c, g, or t
  misc_feature (3805)..(3805): n is a, c, g, or t
  misc_feature (3806)..(3806): n is a, c, g, or t
  misc_feature (3807)..(3807): n is a, c, g, or t
  misc_feature (3808)..(3808): n is a, c, g, or t
  misc_feature (3809)..(3809): n is a, c, g, or t
  misc_feature (3810)..(3810): n is a, c, g, or t
  misc_feature (3811)..(3811): n is a, c, g, or t
  misc_feature (3812)..(3812): n is a, c, g, or t
  misc_feature (3813)..(3813): n is a, c, g, or t
  misc_feature (3814)..(3814): n is a, c, g, or t
  misc_feature (3815)..(3815): n is a, c, g, or t
  misc_feature (3816)..(3816): n is a, c, g, or t
  misc_feature (3817)..(3817): n is a, c, g, or t
  misc_feature (3818)..(3818): n is a, c, g, or t
  misc_feature (3819)..(3819): n is a, c, g, or t
ccggtctataggtgcataccaccacaccaggctaatttttttttttttgagacggagtctcactctgtcacccaggctggagtgcaatggcgcgatctttgctcactgcaacctctgccacccgggttcaagcaattctcctgcctcagctcctgagtagctgggattacaggcgcccgccaccacgcccggctaatttttgtatttttagtagagacgaggtttcaccatcttggccaggctggtcttgaactcctgaccttgtgatctacctgccagggccttccaaagtgctgggattacggacgtgagccaccacgcctggcccaggctaattttttgaaattttaatagaggcagggtcttgctgtattgcccaggttgctctcacattcctagccttaagccatcctcctatctcggcctcacaaagtgctgggattacaggtgtaagccactgtgcctggttttgggcaagtttcttgtcctgactgtgtcttgggttctcacctgttgattggggatacccttgttgcctacctccaagtaattttatgaggatgaaactcatagcttgtcagtgggaagtgcttaggtaatgagctactagtggtggcagtggctgtgatggtggtattaataccactcctactggatggtctctaatactatctccttccttccctaccagcaacatgtcatggtttagtggcctcctggtccctaaagtggatgaacggaaaacagcctggggtgaacgcaatgggcagaagcgttcgcggcgccgtggcactcgggccggtggcttctgcacgccccgctatatgagctgcctccgggatgcagagccacccagccccacccctgcgggcccccctcggtgcccctggcaggatgacgccttcatccggaggggcggcccaggcaagggcaaggagctggggctgcgggcagtggccctgggcttcgaggataccgaggtgacaacgacagcgggcgggacggctgaggtggcgcccgacgcggtgcccaggagtgggcgatcctgctggcgccgtctggtgcaggtgttccagtcgaagcagttccgttcggccaagctggagcgcctgtaccagcggtacttcttccagatgaaccagagcagcctgacgctgctgatggcggtgctggtgctgctcacagcggtgctgctggctttccacgccgcacccgcccgccctcagcctgcctatgtggcactgttggcctgtgccgccgccctgttcgtggggctcatggtggtgtgtaaccggcatagcttccgccaggactccatgtgggtggtgagctacgtggtgctgggcatcctggcggcagtgcaggtcgggggcgctctcgcagcagacccgcgcagcccctctgcgggcctctggtgccctgtgttctttgtctacatcgcctacacgctcctccccatccgcatgcgggctgccgtcctcagcggcctgggcctctccaccttgcatttgatcttggcctggcaacttaaccgtggtgatgccttcctctggaagcagctcggtgccaatgtgctgctgttcctctgcaccaacgtcattggcatctgcacacactatccagcagaggtgtctcagcgccaggcctttcaggagacccgcggttacatccaggcccggctccacctgcagcatgagaatcggcagcaggagcggctgctgctgtcggtattgccccagcacgttgccatggagatgaaagaagacatcaacacaaaaaaagaagacatgatgttccacaagatctacatacagaagcatgacaatgtcagcatcctgtttgcagacattgagggcttcaccagcctggcatcccagtgcactgcgcaggagctggtcatgaccctgaatgagctctttgcccggtttgacaagctggctgcggagaatcactgcctgaggatcaagatcttgggggactgttactactgtgtgtcagggctgccggaggcccgggccgaccatgcccactgctgtgtggagatgggggtagacatgattgaggccatctcgctggtacgtgaggtgacaggtgtgaatgtgaacatgcgcgtgggcatccacagcgggcgcgtgcactgcggcgtccttggcttgcggaaatggcagttcgatgtgtggtccaatgatgtgaccctggccaaccacatggaggcaggaggccgggctggccgcatccacatcactcgggcaacactgcagtacctgaacggggactacgaggtggagccaggccgtggtggcgagcgcaacgcgtacctcaaggagcagcacattgagactttcctcatcctgggcgccagccagaaacggaaagaggagaaggccatgctggccaagctgcagcggactcgggccaactccatggaagggctgatgccgcgctgggttcctgatcgtgccttctcccggaccaaggactccaaggccttccgccagatgggcattgatgattccagcaaagacaaccggggcacccaagatgccctgaaccctgaggatgaggtggatgagttcctgagccgtgccatcgatgcccgcagcattgatcagctgcggaaggaccatgtgcgccggtttctgctcaccttccagagagaggatcttgagaagaagtactcccggaaggtggatccccgcttcggagcctacgttgcctgtgccctgttggtcttctgcttcatctgcttcatccagcttctcatcttcccacactccaccctgatgcttgggatctatgccagcatcttcctgctgctgctaatcaccgtgctgatctgtgctgtgtactcctgtggttctctgttccctaaggccctgcaacgtctgtcccgcagcattgtccgctcacgggcacatagcaccgcagttggcatcttttccgtcctgcttgtgtttacttctgccattgccaacatgtacttcatcgggaacatgctgctgagtctcttggccagctctgtcttcctgcacatcagcagcatcgggaagttggccatgatctttgtcttggggctcatctatttggtgctgcttctgctgggtcccccagccaccatctttgacaactatgacctactgcttggcgtccatggcttggcttcttccaatgagacctttgatgggctggactgtccagctgcagggagggtggccctcaaatatatgacccctgtgattctgctggtgtttgcgctggcgctgtatctgcatgctcagcaggtggagtcgactgcccgcctagacttcctctggaaactacaggcaacaggggagaaggaggagatggaggagctacaggcatacaaccggaggctgctgcataacattctgcccaaggacgtggcggcccacttcctggcccgggagcgccgcaatgatgaactctactatcagtcgtgtgagtgtgtggctgttatgtttgcctccattgccaacttctctgagttctatgtggagctggaggcaaacaatgagggtgtcgagtgcctgcggctgctcaacgagatcatcgctgactttgatgagattatcagcgaggagcggttccggcagctggaaaagatcaagacgattggtagcacctacatggctgcctcagggctgaacgccagcacctacgatcaggtgggccgctcccacatcactgccctggctgactacgccatgcggctcatggagcagatgaagcacatcaatgagcactccttcaacaatttccagatgaagattgnnnnnnnnnnnnnnnnnnnnnnnnnnngtgtcatcggggctcggaagccacagtatgacatctgggggaacacagtgaatgtctctagtcgtatggacagcacgggggtccccgaccgaatccaggtgaccacggacctgtaccaggttctagctgccaagggctaccagctggagtgtcgaggggtggtcaaggtgaagggcaagggggagatgaccacctacttcctcaatgggggccccagcagttaacagggcccagccacaaattcagctgaagggaccaaggtgggcattgagtggactctgtgctcactgggtggagctgtggcagggggcactgagcctccagaccctgctaaccacaaaagggaacatcccagcaggctgtgcttggatcatgctcgtctgccctcaagctggaaaacaaggggctacctaccgagaggattatgcaagtgactttctttcttacttggggtagggctgttccctctccaatcttccagcctttgggagcaggggaggggtcagtagcagaagcagagggaggcctcttgcctgagggattaaaatggcagcttgccatgcctacccttccctgtctgtctgggcagcaggttcagggctgagcccttcttttccctcttttttcctgggaatattttgtacaatattttgtacaaagacaggcatgaggagtgcctattccatgcttgcctttgcaatacctgcatccccagcactggtcctgggcacttccccaccccagccaggtgtccctcctatgcacagagcagaggagggagaagctctggggagccagctttggccatatttcaggagaatgtttccatgtgccaaatcttagtcccatgatctgtccccaaaggggaacaaagggacctctgacagcttagatttagccccagttcctgcacgctccagggaacggggtgtctggcctcactggtactgtgaaaaatgctcagagagcaagcctgtgtgtggggatgtcaggtcaggagctggaagttcacctgcaggtgccaaagagcaggccggccagggctggggcagtgccagactctgatctgaggaccccgtcggggtccagatcaggtcactctgccccagtgctctcttgctgtctgctgacaagggggcatggagcatctcttcctcttctgttgccaaatagaaaagggtcagggcatggagaaaggtgaccctgatcccaaacctgccctcccaagtctctggtgttggggagggcccgtgtgtttgtgtaactgtgtgtgcatgttggtctttgtgtgcatatctgttttccaggtctatgtgagtccttgtgctcctgctcctcagctctccaccccaggttgcctctctcctgtgggcctctgtcttctgggaataaagcagggtttcctacttcaggggatgtagagagatgcccaggttgcacaggagtgggatggggtgtggtagcaaaaggagggagaggagtcctttttgtgccaaatccctaagtgccgttcgggggccatgtgtgcagcatgactctccctgtctgtggcagggacccaagcgcttgcttaagccccagtgctccatgccagcacttgaactgtctggggtttgatggacagaggctgaggaatttcctggcttccccagatagtgtcctgggacatggtatgctttggggctggggtagcatggaatccctctgaggacctggatactggtactacggggtggggaagaggaaccttaaacttggctttccccagccttcagcctgagtctagcatgtttctagctccccagtcccttgtgaagccttgagggctggcagaagggttaggaggttgaactctagattcccttcctgtctttgccttccttttacccctttccctgcaacctccttgactctggcctgaatttgttggtgcctcagtttctctgtctgtacctatttaagccaaaggcactagcctgaattttgcttgaagatcactttgtcttggaaatgactagagaggcagaggagaagggtttccagagttgctaggtttgggagtggaaggggcaggcagtgcacttgcccctcctcatgccccttctgacaccagctccctgtggaggcctggtttctgggtaatgcctcccttgggcatcttcatgcatcaaccaaatgggccatcaggtacttcattagtcatggcagaaggaggggaaaagacttgttttccagacagaaaatctactcccctgtccccagccatatccctggataggaagggataggaagagactacttggtgccatggggtaggggtgagggtataagtagatcagagtgggaagacctcagccttgggtggcttgtctctgcttcttgccaggtgggagggcctgtccacaccctggatccccgtaccacagtgccagccatgcccttcccctgggctaccattgtccctttcctcacccagttggtagaggagtcaggaggtgggaggccgtgggctttggttttataatgtaaccactgtgggggtgggggaggatggtgaaccatgtatttcagtgaaatatttaatatatttaaatatcaataaaatcaaactctttgt

SEQ ID NO: 6384 - DNA, 1267 bp, Homo sapiens
  III.12 (XM_005313)
tgccgcagcccccgcccgcccgcagagcttttgaaaggcggcgggaggcggcgagcgccatggccagtccgggctgcctgctgtgcgtgctgggcctgctactctgcggggcggcgagcctcgagctgtctagaccccacggcgacaccgccaagaagcccatcatcggaatattaatgcaaaaatgccgtaataaagtcatgaaaaactatggaagatactatattgctgcgtcctatgtaaagtacttggagtctgcaggtgcgagagttgtaccagtaaggctggatcttacagagaaagactatgaaatacttttcaaatctattaatggaatccttttccctggaggaagtgttgacctcagacgctcagattatgctaaagtggccaaaatattttataacttgtccatacagagttttgatgatggagactattttcctgtgtggggcacatgccttggatttgaagagctttcactgctgattagtggagagtgcttattaactgccacagatactgttgacgtggcaatgccgctgaacttcactggaggtcaattgcacagcagaatgttccagaattttcctactgagttgttgctgtcattagcagtagaacctctgactgccaatttccataagtggagcctctccgtgaagaattttacaatgaatgaaaagttaaagaagtttttcaatgtcttaactacaaatacagatggcaagattgagtttatttcaacaatggaagggatataagtatccagtatatggtgtccagtggcatccagagaaagcaccttatgagtggaagaatttggatggcatttcccatgcacctaatgctgtgaaaaccgcattttatttagcagagttttttgttaatgaagctcggaaaaacaaccatcattttaaatctgaatctgaagaggagaaagcattgatttatcagttcagtccaatttatactggaaatatttcttcatttcagcaatgttacatatttgattgaaagtcttcaatttgttaacagagcaaatttgaataattccatgattaaactgttagaataacttgctactcatggcaagattaggaagtcacagattcttttctataatgtgcctggctctgattcttcattctgtatgtgactatttatataacattagataattaaatagtgagacataaatagagtgtttttcatggaaaagccttcttatatctgaagattgaaaaaaataaatttactgaaatac

SEQ ID NO: 6385 - DNA, 1103 bp, Homo sapiens; identical to SEQ ID NO: 6314
  III.13 (NM_001511)

SEQ ID NO: 6386 - DNA, 1035 bp, Homo sapiens
  III.14 (XM_044428)
atctccctccaggcagcccttggctggtccctgcgagcccgtggagactgccagagatgtcctctttcggttacaggaccctgactgtggccctcttcaccctgatctgctgtccaggatcggatgagaaggtattcgaggtacacgtgaggccaaagaagctggcggttgagcccaaagggtccctcgaggtcaactgcagcaccacctgtaaccagcctgaagtgggtggtctggagacctctctagataagattctgctggacgaacaggctcagtggaaacattacttggtctcaaacatctcccatgacacggtcctccaatgccacttcacctgctccgggaagcaggagtcaatgaattccaacgtcagcgtgtaccagcctccaaggcaggtcatcctgacactgcaacccactttggtggctgtgggcaagtccttcaccattgagtgcagggtgcccaccgtggagcccctggacagcctcaccctcttcctgttccgtggcaatgagactctgcactatgagaccttcgggaaggcagcccctgctccgcaggaggccacagccacattcaacagcacggctgacagagaggatggccaccgcaacttctcctgcctggctgtgctggacttgatgtctcgcggtggcaacatctttcacaaacactcagccccgaagatgttggagatctatgagcctgtgtcggacagccagatggtcatcatagtcacggtggtgtcggtgttgctgtccctgttcgtgacatctgtcctgctctgcttcatcttcggccagcacttgcgccagcagcggatgggcacctacggggtgcgagcggcttggaggaggctgccccaggccttccggccatagcaaccatgagtggcatggccaccaccacggtggtcactggaactcagtgtgactcctcagggttgaggtccagccctggctgaaggactgtgacaggcagcagagacttgggacattgccttttctagcccgaatacaaacacctggactt

SEQ ID NO: 6387 - DNA, 2077 bp, Homo sapiens
  III.15 (NM_018725)
agcgcagcgtgcgggtggcctggatcccgcgcagtggcccggcgatgtcgctcgtgctgctaagcctggccgcgctgtgcaggagcgccgtaccccgagagccgaccgttcaatgtggctctgaaactgggccatctccagagtggatgctacaacatgatctaatccccggagacttgagggacctccgagtagaacctgttacaactagtgttgcaacaggggactattcaattttgatgaatgtaagctgggtactccgggcagatgccagcatccgcttgttgaaggccaccaagatttgtgtgacgggcaaaagcaacttccagtcctacagctgtgtgaggtgcaattacacagaggccttccagactcagaccagaccctctggtggtaaatggacattttcctacatcggcttccctgtagagctgaacacagtctatttcattggggcccataatattcctaatgcaaatatgaatgaagatggcccttccatgtctgtgaatttcacctcaccaggctgcctagaccacataatgaaatataaaaaaaagtgtgtcaaggccggaagcctgtgggatccgaacatcactgcttgtaagaagaatgaggagacagtagaagtgaacttcacaaccactcccctgggaaacagatacatggctcttatccaacacagcactatcatcgggttttctcaggtgtttgagccacaccagaagaaacaaacgcgagcttcagtggtgattccagtgactggggatagtgaaggtgctacggtgcagctgactccatattttcctacttgtggcagcgactgcatccgacataaaggaacagttgtgctctgcccacaaacaggcgtccctttccctctggataacaacaaaagcaagccgggaggctggctgcctctcctcctgctgtctctgctggtggccacatgggtgctggtggcagggatctatctaatgtggaggcacgaaaggatcaagaagacttccttttctaccaccacactactgccccccattaaggttcttgtggtttacccatctgaaatatgtttccatcacacaatttgttacttcactgaatttcttcaaaaccattgcagaagtgaggtcatccttgaaaagtggcagaaaaagaaaatagcagagatgggtccagtgcagtggcttgccactcaaaagaaggcagcagacaaagtcgtcttccttctttccaatgacgtcaacagtgtgtgcgatggtacctgtggcaagagcgagggcagtcccagtgagaactctcaagacctcttcccccttgcctttaaccttttctgcagtgatctaagaagccagattcatctgcacaaatacgtggtggtctactttagagagattgatacaaaagacgattacaatgctctcagtgtctgccccaagtaccacctcatgaaggatgccactgctttctgtgcagaacttctccatgtcaagcagcaggtgtcagcaggaaaaagatcacaagcctgccacgatggctgctgctccttgtagcccacccatgagaagcaagagaccttaaaggcttcctatcccaccaattacagggaaaaaacgtgtgatgatcctgaagcttactatgcagcctacaaacagccttagtaattaaaacattttataccaataaaattttcaaatattgctaactaatgtagcattaactaacgattggaaactacatttacaacttcaaagctgttttatacatagaaatcaattacagttttaattgaaaactataaccattttgataatgcaacaataaagcatcttcagccaaacatctagtcttccatagaccatgcattgcagtgtacccagaactgtttagctaatattctatgtttaattaatgaatactaactctaagaacccctcactgattcactcaatagcatcttaagtgaaaaaccttctattacatgcaaaaaatcattgtttttaagataacaaaagtagggaataaacaagctgaacccacttttaaaaaaaaaaaaaaaaaaaaaaaaaaaaaaaaa

SEQ ID NO: 6388 - DNA, 2116 bp, Homo sapiens
  III.16 (NM_000880)
acatccgcggcaacgcctccttggtgtcgtccgcttccaataacccagcttgcgtcctgcacacttgtggcttccgtgcacacattaacaactcatggttctagctcccagtcgccaagcgttgccaaggcgttgagagatcatctgggaagtcttttacccagaattgctttgattcaggccagctggtttttcctgcggtgattcggaaattcgcgaattcctctggtcctcatccaggtgcgcgggaagcaggtgcccaggagagaggggataatgaagattccatgctgatgatcccaaagattgaacctgcagaccaagcgcaaagtagaaactgaaagtacactgctggcggatcctacggaagttatggaaaaggcaaagcgcagagccacgccgtagtgtgtgccgccccccttgggatggatgaaactgcagtcgcggcgtgggtaagaggaaccagctgcagagatcaccctgcccaacacagactcggcaactccgcggaagaccagggtcctgggagtgactatgggcggtgagagcttgctcctgctccagttgcggtcatcatgactacgcccgcctcccgcagaccatgttccatgtttcttttaggtatatctttggacttcctcccctgatccttgttctgttgccagtagcatcatctgattgtgatattgaaggtaaagatggcaaacaatatgagagtgttctaatggtcagcatcgatcaattattggacagcatgaaagaaattggtagcaattgcctgaataatgaatttaacttttttaaaagacatatctgtgatgctaataaggaaggtatgtttttattccgtgctgctcgcaagttgaggcaatttcttaaaatgaatagcactggtgattttgatctccacttattaaaagtttcagaaggcacaacaatactgttgaactgcactggccaggttaaaggaagaaaaccagctgccctgggtgaagcccaaccaacaaagagtttggaagaaaataaatctttaaaggaacagaaaaaactgaatgacttgtgtttcctaaagagactattacaagagataaaaacttgttggaataaaattttgatgggcactaaagaacactgaaaaatatggagtggcaatatagaaacacgaactttagctgcatcctccaagaatctatctgcttatgcagtttttcagagtggaatgcttcctagaagttactgaatgcaccatggtcaaaacggattagggcatttgagaaatgcatattgtattactagaagatgaatacaaacaatggaaactgaatgctccagtcaacaaactatttcttatatatgtgaacatttatcaatcagtataattctgtactgatttttgtaagacaatccatgtaaggtatcagttgcaataatacttctcaaacctgtttaaatatttcaagacattaaatctatgaagtatataatggtttcaaagattcaaaattgacattgctttactgtcaaaataattttatggctcactatgaatctattatactgtattaagagtgaaaattgtcttcttctgtgctggagatgttttagagttaacaatgatatatggataatgccggtgagaataagagagtcataaaccttaagtaagcaacagcataacaaggtccaagatacctaaaagagatttcaagagatttaattaatcatgaatgtgtaacacagtgccttcaataaatggtatagcaaatgttttgacatgaaaaaaggacaatttcaaaaaaataaaataaaataaaaataaattcacctagtctaaggatgctaaaccttagtactgagttacattgtcatttatatagattataacttgtctaaataagtttgcaatttgggagatatatttttaagataataatatatgtttaccttttaattaatgaaatatctgtatttaattttgacactatatctgtatataaaatattttcatacagcattacaaattgcttactttggaatacatttctcctttgataaaataaatgagctatgtattaacaaaaaaaaaaaaaaaaaaaaaaaaaaaaaaaaaaaaaaa

SEQ ID NO: 6389 - DNA, 5575 bp, Homo sapiens
  III.17 (XM_002335)
gcgcgacccgtcccgggggtggggccgggcgcagcggcgagaggaggcgaaggtggctgcggtagcagcagcgcggcagcctcggacccagcccggagcgcagggcggccgctgcaggtccccgctcccctccccgtgcgtccgcccatggccgccgccgggcagctgtgcttgctctacctgtcggcggggctcctgtcccggctcggcgcagccttcaacttggacactcgggaggacaacgtgatccggaaatatggagaccccgggagcctcttcggcttctcgctggccatgcactggcaactgcagcccgaggacaagcggctgttgctcgtgggggccccgcgggcagaagcgcttccactgcagagagccaacagaacgggagggctgtacagctgcgacatcaccgcccgggggccatgcacgcggatcgagtttgataacgatgctgaccccacgtcagaaagcaaggaagatcagtggatgggggtcaccgtccagagccaaggtccagggggcaaggtcgtgacatgtgctcaccgatatgaaaaaaggcagcatgttaatacgaagcaggaatcccgagacatctttgggcggtgttatgtcctgagtcagaatctcaggattgaagacgatatggatgggggagattggagcttttgtgatgggcgattgagaggccatgagaaatttggctcttgccagcaaggtgtagcagctacttttactaaagactttcattacattgtatttggagccccgggtacttataactggaaagggattgttcgtgtagagcaaaagaataacactttttttgacatgaacatctttgaagatgggccttatgaagttggtggagagactgagcatgatgaaagtctcgttcctgttcctgctaacagttacttaggtttttctttggactcagggaaaggtattgtttctaaagatgagatcacttttgtatctggtgctcccagagccaatcacagtggagccgtggttttgctgaagagagacatgaagtctgcacatctcctccctgagcacatattcgatggagaaggtctggcctcttcatttggctatgatgtggcggtggtggacctcaacaaggatgggtggcaagatatagttattggagccccacagtattttgatagagatggagaagttggaggtgcagtgtatgtctacatgaaccagcaaggcagatggaataatgtgaagccaattcgtcttaatggaaccaaagattctatgtttggcattgcagtaaaaaatattggagatattaatcaagatggctacccagatattgcagttggagctccgtatgatgacttgggaaaggtttttatctatcatggatctgcaaatggaataaataccaaaccaacacaggttctcaagggtatatcaccttattttggatattcaattgctggaaacatggaccttgatcgaaattcctaccctgatgttgctgttggttccctctcagattcagtaactattttcagatcccggcctgtgattaatattcagaaaaccatcacagtaactcctaacagaattgacctccgccagaaaacagcgtgtggggcgcctagtgggatatgcctccaggttaaatcctgttttgaatatactgctaaccccgctggttataatccttcaatatcaattgtgggcacacttgaagctgaaaaagaaagaagaaaatctgggctatcctcaagagttcagtttcgaaaccaaggttctgagcccaaatatactcaagaactaactctgaagaggcagaaacagaaagtgtgcatggaggaaaccctgtggctacaggataatatcagagataaactgcgtcccattcccataactgcctcagtggagatccaagagccaagctctcgtaggcgagtgaattcacttccagaagttcttccaattctgaattcagatgaacccaagacagctcatattgatgttcacttcttaaaagagggatgtggagacgacaatgtatgtaacagcaaccttaaactagaatataaattttgcacccgagaaggaaatcaagacaaattttcttatttaccaattcaaaaaggtgtaccagaactagttctaaaagatcagaaggatattgctttagaaataacagtgacaaacagcccttccaacccaaggaatcccacaaaagatggcgatgacgcccatgaggctaaactgattgcaacgtttccagacactttaacctattctgcatatagagaactgagggctttccctgagaaacagttgagttgtgttgccaaccagaatggctcgcaagctgactgtgagctcggaaatccttttaaaagaaattcaaatgtcactttttatttggttttaagtacaactgaagtcacctttgacaccccagatctggatattaatctgaagttagaaacaacaagcaatcaagataatttggctccaattacagctaaagcaaaagtggttattgaactgcttttatcggtctcgggagttgctaaaccttcccaggtgtattttggaggtacagttgttggcgagcaagctatgaaatctgaagatgaagtgggaagtttaatagagtatgaattcagggtaataaacttaggtaaacctcttacaaacctcggcacagcaaccttgaacattcagtggccaaaagaaattagcaatgggaaatggttgctttatttggtgaaagtagaatccaaaggattggaaaaggtaacttgtgagccacaaaaggagataaactccctgaacctaacggagtctcacaactcaagaaagaaacgggaaattactgaaaaacagatagatgataacagaaaattttctttatttgctgaaagaaaataccagactcttaactgtagcgtgaacgtgaactgtgtgaacatcagatgcccgctgcgggggctggacagcaaggcgtctcttattttgcgctcgaggttatggaacagcacatttctagaggaatattccaaactgaactacttggacattctcatgcgagccttcattgatgtgactgctgctgccgaaaatatcaggctgccaaatgcaggcactcaggttcgagtgactgtgtttccctcaaagactgtagctcagtattcgggagtaccttggtggatcatcctagtggctattctcgctgggatcttgatgcttgctttattagtgtttatactatggaagtgtggtttcttcaagagaaataagaaagatcattatgatgccacatatcacaaggctgagatccatgctcagccatctgataaagagaggcttacttctgatgcatagtattgatctacttctgtaattgtgtggattctttaaacgctctaggtacgatgacagtgttccccgataccatgctgtaaggatccggaaagaagagcgagagatcaaagatgaaaagtatattgataaccttgaaaaaaaacagtggatcacaaagtggaacgaaaatgaaagctactcatagcgggggcctaaaaaaaaaaagcttcacagtacccaaactgctttttccaactcagaaattcaatttggatttaaaagcctgctcaatccctgaggactgatttcagagtgactacacacagtacgaacctacagttttaactgtggatattgttacgtagcctaaggctcctgttttgcacagccaaatttaaaactgttggaatggatttttctttaactgccgtaatttaactttctgggttgcctttatttttggcgtggctgacttacatcatgtgttggggaagggcctgcccagttgcactcaggtgacatcctccagatagtgtagctgaggaggcacctacactcacctgcactaacagagtggccgtcctaacctcgggcctgctgcgcagacgtccatcacgttagctgtcccacatcacaagactatgccattggggtagttgtgtttcaacggaaagtgctgtcttaaactaaatgtgcaatagaaggtgatgttgccatcctaccgtcttttcctgtttcctagctgtgtgaatacctgctcacgtcaaatgcatacaagtttcattctccctttcactaaaacacacaggtgcaacagacttgaatgctagttatacttatttgtatatggtatttattttttcttttctttacaaaccattttgttattgactaacaggccaaagagtctccagtttacccttcaggttggtttaatcaatcagaattagagcatgggaggtcatcactttgacctaaattatttactgcaaaaagaaaatctttataaatgtaccagagagagttgttttaataacttatctataaactataacctctccttcatgacagcctccaccccacaacccaaaaggtttaagaaatagaattataactgtaaagatgtttatttcaggcattggatattttttactttagaagcctgcataatgtttctggatttcatactgtaacattcaggaattcttggagaaaatgggtttattcactgaactctagtgcggtttactcactgctgcaaatactgtatattcaggacttgaaagaaatggtgaatgcctatggtggatccaaactgatccagtataagactactgaatctgctaccaaaacagttaatcagtgagtcgatgttctattttttgttttgtttcctcccctatctgtattcccaaaaattactttggggctaatttaacaagaactttaaattgtgttttaattgtaaaaatggcagggggtggaattattactctatacattcaacagagactgaatagatatgaaagctgattttttttaattaccatgcttcacaatgttaagttatatggggagcaacagcaaacaggtgctaatttgttttggatatagtataagcagtgtctgtgttttgaaagaatagaacacagtttgtagtgccactgttgttttgggggggcttttttcttttcggaaatcttaaaccttaagatactaaggacgttgttttggttgtactttggaattcttagtcacaaaatatattttgtttacaaaaatttctgtaaaacaggttataacagtgtttaaagtctcagtttcttgcttggggaacttgtgtccctaatgtgtttagattgctagattgctaaggagctgatactttgacagtgtttttagacctgtgttactaaaaaaaagatgaatgtcctgaaaagggtgttgggagggtggttcaacaaagaaacaaagatgttatggtgtttagatttatggttgttaaaaatgtcatctcaagtcaagtcactggtctgtttgcatttgatacatttttgtactaactagcattgtaaaattatttcatgattagaaattacctgtggatatttgtataaaagtgtgaaataaattttttataaaagtgttcattgtttcgtaacacagcattgtatatgtgaagcaaactctaaaattataaatgacaacctgaattatctatttcatc

SEQ ID NO: 6390 - DNA, 5120 bp, Homo sapiens
  III.18 (XM_046035)
cctctttcaccctgtctaggttgccagcaaatcccacgggcctcctgacgctgcccctggggccacaggtccctcgagtgctggaaggatgaaggattcctgcatcactgtgatggccatggcgctgctgtctgggttctttttcttcgcgccggcctcgagctacaacctggacgtgcggggcgcgcggagcttctccccaccgcgcgccgggaggcactttggataccgcgtcctgcaggtcggaaacggggtcatcgtgggagctccaggggaggggaacagcacaggaagcctctatcagtgccagtcgggcacaggacactgcctgccagtcaccctgagaggttccaactatacctccaagtacttgggaatgaccttggcaacagaccccacagatggaagcattttggcctgtgaccctgggctgtctcgaacgtgtgaccagaacacctatctgagtggcctgtgttacctcttccgccagaatctgcagggtcccatgctgcaggggcgccctggttttcaggaatgtatcaagggcaacgtagacctggtatttctgtttgatggttcgatgagcttgcagccagatgaatttcagaaaattctggacttcatgaaggatgtgatgaagaaactcagcaacacttcgtaccagtttgctgctgttcagttttccacaagctacaaaacagaatttgatttctcagattatgttaaatggaaggaccctgatgctctgctgaagcatgtaaagcacatgttgctgttgaccaatacctttggtgccatcaattatgtcgcgacagaggtgttccgggaggagctgggggcccggccagatgccaccaaagtgcttatcatcatcacggatggggaggccactgacagtggcaacatcgatgcggccaaagacatcatccgctacatcatcgggattggaaagcattttcagaccaaggagagtcaggagaccctccacaaatttgcatcaaaacccgcgagcgagtttgtgaaaattctggacacatttgagaagctgaaagatctattcactgagctgcagaagaagatctatgtcattgagggcacaagcaaacaggacctgacttccttcaacatggagctgtcctccagcggcatcagtgctgacctcagcaggggccatgcagtcgtgggggcagtaggagccaaggactgggctgggggctttcttgacctgaaggcagacctgcaggatgacacatttattgggaatgaaccattgacaccagaagtgagagcaggctatttgggttacaccgtgacctggctgccctcccggcaaaagacttcgttgctggcctcgggagcccctcgataccagcacatgggccgagtgctgctgttccaagagccacagggcggaggacactggagccaggtccagacaatccatgggacccagattggctcttatttcggtggggagctgtgtggcgtcgacgtggaccaagatggggagacagagctgctgctgattggtgccccactgttctatggggagcagagaggaggccgggtgtttatctaccagagaagacagttggggtttgaagaagtctcagagctgcagggggaccccggctacccactcgggcggtttggagaagccatcactgctctgacagacatcaacggcgatgggctggtagacgtggctgtgggggcccctctggaggagcagggggctgtgtacatcttcaatgggaggcacggggggcttagtccccagccaagtcagcggatagaagggacccaagtgctctcaggaattcagtggtttggacgctccatccatggggtgaaggaccttgaaggggatggcttggcagatgtggctgtgggggctgagagccagatgatcgtgctgagctcccggcccgtggtggatatggtcaccctgatgtccttctctccagctgagatcccagtgcatgaagtggagtgctcctattcaaccagtaacaagatgaaagaaggagttaatatcacaatctgtttccagatcaagtctctcatcccccagttccaaggccgcctggttgccaatctcacttacactctgcagctggatggccaccggaccagaagacgggggttgttcccaggagggagacatgaactcagaaggaatatagctgtcaccaccagcatgtcatgcactgacttctcatttcatttcccggtatgtgttcaagacctcatctcccccatcaatgtttccctgaatttctctctttgggaggaggaagggacaccgagggaccaaagggcgcagggcaaggacataccgcccatcctgagaccctccctgcactcggaaacctgggagatcccttttgagaagaactgtggggaggacaagaagtgtgaggcaaacttgagagtgtccttctctcctgcaagatccagagccctgcgtctaactgcttttgccagcctctctgtggagctgagcctgagtaacttggaagaagatgcttactgggtccagctggacctgcacttccccccgggactctccttccgcaaggtggagatgctgaagccccatagccagatacctgtgagctgcgaggagcttcctgaagagtccaggcttctgtccagggcattatcttgcaatgtgagctctcccatcttcaaagcaggccactcggttgctctgcagatgatgtttaatacactggtaaacagctcctggggggactcggttgaattgcacgccaatgtgacctgtaacaatgaggactcagacctcctggaggacaactcagccactaccatcatccccatcctgtaccccatcaacatcctcatccaggaccaagaagactccacactctatgtcagtttcacccccaaaggccccaagatccaccaagtcaagcacatgtaccaggtgaggatccagccttccatccacgaccacaacatacccaccctggaggctgtggttggggtgccacagcctcccagcgaggggcccatcacacaccagtggagcgtgcagatggagcctcccgtgccctgccactatgaggatctggagaggctcccggatgcagctgagccttgtctccccggagccctgttccgctgccctgttgtcttcaggcaggagatcctcgtccaagtgatcgggactctggagctggtgggagagatcgaggcctcttccatgttcagcctctgcagctccctctccatctccttcaacagcagcaagcatttccacctctatggcagcaacgcctccctggcccaggttgtcatgaaggttgacgtggtgtatgagaagcagatgctctacctctacgtgctgagcggcatcggggggctgctgctgctgctgctcattttcatagtgctgtacaaggttggtttcttcaaacggaacctgaaggagaagatggaggctggcagaggtgtcccgaatggaatccctgcagaagactctgagcagctggcatctgggcaagaggctggggatcccggctgcctgaagcccctccatgagaaggactctgagagtggtggtggcaaggactgagtccaggcctgtgaggtgcagagtgcccagaactggactcaggatgcccagggccactctgcctctgcctgcattctgccgtgtgccctcgggcgagtcactgcctctccctggccctcagtttccctatctcgaacatggaactcattcctgcctgtctcctttgcaggctcatagggaagacctgctgagggaccagccaagagggctgcaaaagtgagggcttgtcattaccagacggttcaccagcctctcttggtttccttccttggaagagaatgtctgatctaaatgtggagaaactgtagtctcaggacctagggatgttctggccctcacccctgccctgggatgtccacagatgcctccaccccccagaacctgtccttgcacactcccctgcactggagtccagtctcttctgctggcagaaagcaaatgtgacctgtgtcactacgtgactgtggcacacgccttgttcttggccaaagaccaaattccttggcatgccttccagcaccctgcaaaatgagaccctcgtggccttccccagcctcttctagagccgtgatgcctccctgttgaagctctggtgacaccagcctttctcccaggccaggctccttcctgtcttcctgcattcacccagacagctccctctgcctgaaccttccatctcgccacccctccttccttgaccagcagatcccagctcacgtcacacttggttgggtcctcacatctttcacacttccaccagcctgcactactccctcaaagcacacgtcatgtttcttcatccggcagcctggatgttttttccctgtttaatgattgacgtacttagcagctatctctcagtgaactgtgagggtaaaggctatacttgtcttgttcaccttgggatgatgcctcatgatatgtcagggcgtgggacatctagtaggtgcttgacataatttcactgaattaatgacagagccagtgggaagatacagaaaaagaggggctgggctgggcgcggtggttcacgcctgtaatcccagcactttgggaggccaaggagggtggatcacctgaggtcaggagttagaggccagcctggcgaaaccccatctctactaaaaatacaaaatccaggcgtggtggcacacacctgtagtcccagctactcaggaggttgaggtaggagaattgcttgaacctgggaggtggaggttgcagtgagccaagattgcgccattgcactccagcctgggcaacacagcgagactccgtctcaaggaaaaaataaaaataaaaagcgggcacgggcccgtgacatccccacccttggaggctgtcttctcaggctctgccctgccctagctccacaccctctcccaggacccatcacgcctgtgcagtggcccccacagaaagactgagctcaaggtgggaaccacgtctgctaacttggagccccagtgccaagcacagtgcctgcatgtatttatccaataaatgtgaaattctgtcc

SEQ ID NO: 6391 - DNA, 4064 bp, Homo sapiens
  III.19 (NM_021070)
atgcccgggccccgaggggctgctggcggcctggcccctgagatgcgcggggcgggggcggcggggctgctggcgctgctgctgctgctgctgctgctgctgctgggcctgggcggcagggtcgagggggggccggccggcgagcggggcgcaggcgggggcggggcgctggcccgcgagcgcttcaaggtggtctttgcgccggtgatctgcaagcggacctgtctcaagggccagtgtcgggacagttgtcagcagggctccaacatgacgctcatcggagagaacggccacagcacagacacgctcacgggctccggcttccgcgtggtggtgtgccctctcccctgcatgaatggcggccagtgctcctcgcgaaaccagtgcctgtgtcccccggacttcactgggcgcttctgccaggtgcccgcaggaggagccggtgggggtaccggcggctcaggccccggcctgagcaggacaggggccctgtccacaggggcgctgccgcccctggctccggagggcgactctgtggccagcaagcacgccatctacgccgtccaggtgatcgctgaccctcctgggcccggggaggggcctcctgcccagcacgcagccttcctggtgcccctaggcccgggacagatctcagcagaagtgcaggccccgccccccgtggtgaatgtgcgcgtccatcacccgcccgaggcctcagtccaggtgcaccgcattgagagctcgaacgccgagagcgcagccccctcccagcacctgctgccgcaccccaagccctcgcacccccggccgcccacccagaagcccctgggccgctgctttcaggacactctgcccaagcagccgtgtggcagcaaccccctccccggcctcaccaagcaggaagactgctgcggtagcatcggcactgcctggggccagagcaagtgccacaagtgtccccagctgcagtacacaggagtgcagaagccagggcctgtacgtggggaagtgggcgctgactgtccccagggctacaagaggcttaacagcacccactgccaggacatcaacgagtgcgcaatgccgggcgtgtgtcgccatggtgactgcctcaacaaccctggctcctatcgctgtgtctgcccacctggccatagtttaggcccctcccgtacacagtgcattgcagacaaaccggaggagaagagcctgtgtttccgcctggtgagccctgagcaccagtgccagcacccactgaccacccgcctgacccgccagctctgctgctgcagtgtcggcaaggcctggggcgcgcggtgtcagcgctgcccaacagatggcaccgctgcgttcaaggagatctgcccagctgggaagggataccacattctcacctcccaccagacgctcaccattcagggcgagagtgacttttcccttttcctgcaccctgacgggccacccaagccccagcagcttccggagagccctagccaggctccaccacctgaggacacagaggaagagagaggggtgaccacggactcaccggtgagtgaggagaggtcagtgcagcagagccacccaactgccaccacgactcctgcccggccctaccccgagctgatctcccgtccctcgcccccgaccatgcgctggttcctgccggacttgcctccttcccgcagcgccgtagagatcgctcccactcaggtcacagagactgatgagtgccgactgaaccagaacatctgtggccacggagagtgcgtgccgggcccccctgactactcctgccactgcaaccccggctaccggtcacatccccagcaccgctactgcgtggatgtgaacgagtgcgaggcagagccctgtggcccggggaggggcatctgcatgaacaccggcggctcctacaattgccactgcaaccgcggctaccgcctgcacgtgggcgccggggggcgctcgtgcgtggacctgaacgaatgcgccaagccccacctgtgcggcgacggcggcttctgcatcaactttcccggtcactacaagtgcaactgctaccccggctaccggctcaaagcctcccggcctcctgtgtgcgaagacatcgacgagtgccgggacccaagctcttgcccggatggcaaatgcgagaacaagcccgggagcttcaagtgcatcgcctgtcagcctggctaccgcagccaggggggcggggcctgtcgcgacgtgaacgagtgcgccgagggcagcccctgctcgcctggctggtgcgagaacctcccgggctccttccgctgcacctgtgcccagggctacgcgcccgcgcccgacggccgcagttgcttggatgtggacgagtgtgaggctggggacgtgtgtgacaatggcatctgcagcaacacgccaggatctttccagtgtcagtgcctctctggctaccatctgtccagggaccggagccactgcgaggacattgatgagtgtgacttccctgcagcctgcattgggggtgactgcatcaataccaatggctcctacagatgtctttgcccccaggggcatcggctggtgggtggcaggaaatgccaagacatagatgagtgcagccaggacccgagcctgtgccttccccatggggcctgcaagaaccttcagggctcctatgtgtgtgtctgcgatgagggcttcactcccacccaggaccagcacggttgtgaggaggtggagcagccccaccacaagaaggagtgctacctgaacttcgatgacacagtgttctgcgacagcgtattggccaccaacgtgacccagcaggagtgctgctgctctctgggggccggctggggcgaccactgcgaaatctacccctgcccagtctacagctcagccgagttccacagcctctgcccagacggaaagggctacacccaggacaacaacatcgtcaactacggcatcccagcccaccgtgacatcgacgagtgcatgttgttcgggtcggagatttgcaaggagggcaagtgcgtgaacacgcagcctggctacgagtgctactgcaagcagggcttctactacgacgggaacctgctggaatgcgtggacgtggacgagtgcctggacgagtccaactgccggaacggagtgtgtgagaacacgcgcggcggctaccgctgtgcctgcacgccccctgccgagtacagtcccgcgcagcgccagtgcctgagcccggaagagatggagcgtgccccggagcggcgcgacgtgtgctggagccagcgcggagaggacggcatgtgcgctggccccctggccgggcctgccctcaccttcgacgactgctgctgccgccagggccgcggctggggcgcccaatgccgaccgtgcccgccgcgcggcgcggggtcccattgcccgacatcgcagagcgagagcaattccttctgggacacaagccccctgctgttggggaagcccccaagagatgaggacagttcagaggaggattcagacgagtgtcgctgcgtgagtggccgctgcgtgccgcggccgggcggcgccgtgtgcgagtgtcccggcggcttccagctcgacgcctcccgcgcccgctgcgtggatatcgacgagtgccgagagctgaaccagcgcgggctgctgtgcaagagcgagcgctgcgtgaacaccagcggctccttccgctgcgtctgcaaagccggcttcgcgcgcagccgcccgcacggggcctgcgttccccagcgccgccgctgacgccgccgacgccgccctcggcccagacctcggtgatcactgagggatttccgcgagctcggcctcacttctgccccgacttgtggctcggacccagggaccttcagggcccgcagaccctcccggcgccttgagacccgaggcgcccctaccggcccccctccccggttagcgggcggttgtaaggtctccggcgggcgctgcctgccttcctcccagagggtgtttcctagaaactgataaatcagatcgtgcctctttacccttggctttcgaaaaaaaaaaaaaaaaaa

SEQ ID NO: 6392 - DNA, 2213 bp, Homo sapiens
  III.20 (AK055901)
ttttagacagctgatctctcacgttagaagatactgcataaacagctttattcccaaataaaagtgctgagtgaagccattgctcaattcattgttttgctgaggacttatatgtgtagaattctctcataaattgatttttaattaaattaattataaacatagaagtttctaaagcagaattaacacaatagcccatttcaacaagctgtatatttgagaacagagtgacagttattaacatccagtaggaaattaagagttgttgttcacaaataataaattactagattctgacaaagactaatggggattaagtaagcgtgactcaatataacaaatttaagcctaagcatcttctaggccctgaaatgaacaaggtattgctgccagttaaagtcagttgtgtcttacaacctgctagctgtcttgctgtaaaaactgtaacgtaaggcccttgaaatagatgccgtcatcagccccagcccccaagcattcatctatttaaacacatgacagaagatggtggaagagagttcagcagctattcatgtggtagaagtggttattgtattaggacatactctgttgtaggccagcaacttttgagttaaaacaccgcagctgtttctcttcctttctttacatctttctcttctttttttttttcttagcaataaactcacttttttttccccacaaacattttgtgtagatccaaggagcaacaaattccaactttctgctgtagcaattacacgctttttgtctgtttgactagattttagtattttactttttttcttctttttaaaggcaacggacagccaagacgtagatccatccaagacttgactgtaactggaacagaacctggtcaggtgagcagtaggtcatccagtcccagtgtcagaatgattactacctcaggaccaacctcagaaaagccaactcgaagtcatccatggacccctgatgattccacagataccaatggatcagataactccatcccaatggcttatcttacactggatcaccaactacagcctctagcaccgtgcccaaactccaaagaatctatggcagtgtttgaacagcattgtaaaatggcacaagagtatatgaaagttcaaacagaaattgcattgttattacagagaaagcaagaactagttgcagaactggaccaggatgaaaaggaccagcaaaatacatctcgcctggtacaggaacataaaaagcttttagatgaaaacaaaagcctttctacttactaccagcaatgcaaaaaacaactagaggtcatcagaagtcagcagcagaaacgacaaggcacttcatgattctctgggaccgttacattttgaaatatgcaaagaaagactttttttttaaggaaaggaaaaccttataatgacgattcatgagtgttagctttttggcgtgttctgaatgccaactgcctatatttgctgcatttttttcattgtttattttccttttctcatggtggacatacaattttactgtttcattgcataacatggtagcatctgtgacttgaatgagcagcactttgcaacttcaaaacagatgcagtgaactgtggctgtatatgcatgctcattgtgtgaaggctagcctaacagaacaggaggtatcaaactagctgctatgtgcaaacagcgtccattttttcatattagaggtggaacctcaagaatgactttattcttgtatctcatctcaaaatattaataatttttttcccaaaagatggtatataccaagttaaagacagggtattataaatttagagtgattggtggtatattacggaaatacggaacctttagggatagttccgtgtaagggctttgatgccagcatccttggatcagtactgaactcagttccatccgtaaaatatgtaaaggtaagtggcagctgctctatttaatgaaagcagttttaccggattttgttagactaaaatttgattgtgatacattgaacaaaatggaactcatttttttttaaggagtaaagatttttaattctgtgattgtgtgtatgtgtgttgaaactgtaaagcttttatgactctaatattaatctcttaaatgaaattaaaaggcaaaagaacatgattgagcttaaatgatcatttcttcctgcagtgattcttggattgttttctcatgtatttg

SEQ ID NO: 6393 - DNA, 3227 bp, Homo sapiens
  III.21 (XM_054976)
ggtgtgcccggagaggctgagcagcctgcgcctgagctggtggaggtggaagtgggcagcacagcccttctgaagtgcggcctctcccagtcccaaggcaacctcagccatgtcgactggttttctgtccacaaggagaagcggacgctcatcttccgtgtgcgccagggccagggccagagcgaacctggggagtacgagcagcggctcagcctccaggacagaggggctactctggccctgactcaagtcaccccccaagacgagcgcatcttcttgtgccagggcaagcgccctcggtcccaggagtaccgcatccagctccgcgtctacaaagctccggaggagccaaacatccaggtcaaccccctgggcatccctgtgaacagtaaggagcctgaggaggtcgctacctgtgtagggaggaacgggtaccccattcctcaagtcatctggtacaagaatggccggcctctgaaggaggagaagaaccgggtccacattcagtcgtcccagactgtggagtcgagtggtttgtacaccttgcagagtattctgaaggcacagctggttaaagaagacaaagatgcccagttttactgtgagctcaactaccggctgcccagtgggaaccacatgaaggagtccagggaagtcaccgtccctgttttctacccgacagaaaaagtgtggctggaagtggagcccgtgggaatgctgaaggaaggggaccgcgtggaaatcaggtgtttggctgatggcaaccctccaccacacttcagcatcagcaagcagaaccccagcaccagggaggcagaggaagagacaaccaacgacaacggggtcctggtgctggagcctgcccggaaggaacacagtgggcgctatgaatgtcagggcctggacttggacaccatgatatcgctgctgagtgaaccacaggaactactggtgaactatgtgtctgacgtccgagtgagtcccgcagcacactgagagacaggaaggcagcagcctcaccctgacctgtgaggcagagagtagccaggacctcgagttccagtggctgagagaagagacaggccaggtgctggaaagggggcctgtgcttcagttgcatgacctgaaacgggaggcaggaggcggctatcgctgcgtggcgtctgtgcccagcatacccggcctgaaccgcacacagctggtcaacgtggccatttttggccccccttggatggcattcaaggagaggaaggtgtgggtgaaagagaatatggtgttgaatctgtcttgtgaagcgtcagggcacccccggcccaccatctcctggaacgtcaacggcacggcaagtgaacaagaccaagatccacagcgagtcctgagcaccctgaatgtcctcgtgaccccggagctgttggagacaggtgttgaatgcacggcctccaacgacctgggcaaaaacaccagcatcctcttcctggagctggtcaatttaaccaccctcacaccagactccaacacaaccactggcctcagcacttccactgccagtcctcataccagagccaacagcacctccacagagagaaagctgccggagccggagagccggggcgtggtcatcgtggctgtgattgtgtgcatcctggtcctggcggtgctgggcgctgtcctctatttcctctataagaagggcaagctgccgtgcaggcgctcagggaagcaggagatcacgctgcccccgtctcgtaagagcgaacttgtagttgaagttaagtcagataagctcccagaagagatgggcctcctgcagggcagcagcggtgacaagagggctccgggagaccagggagagaaatacatcgatctgaggcattagccccgaatcacttcagctcccttccctgcctggaccattcccagctccctgctcactcttctctcagccaaagcctccaaagggactagagagaagcctcctgctcccctcgcctgcacaccccctttcagagggccactgggttaggacctgaggacctcacttggccctgcaaggcccgcttttcagggaccagtccaccaccatctccacgttgagtgaagctcatcccaagcaaggagccccagtctcccgagcgggtaggagagtttcttgtagaacgtgttttttctttacacacattatggctgtaaatacctggctcctgccagcagctgagctgggtagcctctctgagctggtttcctgccccaaaggctggcttccaccatccaggtgcaccactgaagtgaggacacaccggagccaggcgcctgctcatgttgaagtgcgctgttcacacccgctccggagagcaccccagcagcatccagaagcagctgcagtgttgctgccaccaccctcctgtctgcctcttcaaagtctcctgtgacattttttctttggtcagaagccaggaactggtgtcattccttaaaagatacgtgccggggccaggtgtggtggctcacgcctgtaatcccagcactttgggaggccgaggcgggcggatcacaaagtcaggacgagaccatcctggctaacacggtgaaaccctgtctctactaaaaatacaaaaaaaaattagctaggcgtagtggttggcacctatagtcccagctactcggaaggctgaagcaggagaatggtatgaatccaggaggtggagcttgcagtgagccgagaccgtgccactgcactccagcctgggcaacacagcgagactccgtctcgaggaaaaaaaaagaaaagatgcgtgcctgcggtgaggaagctgggcactgtttttgagttcaggtgaattagcctcaatccgccgtgttcacttggctcccatagccctcttgatggatcacgtaaaactgaaaggcagcggggagcagacaaagatgaggtctacactgtccttcatggggattaaagctatggttatattagcaccaaacttctacaaaccaagctcagggccccaaccctagaagggcccaaatgagagaatggtacttagggatggaaaacgggcctggctagagcttcgggtgtgtgtgtctgtctgtgtgtatgcatacatatgtgtgtatatatggttttgtcaggtgtgtaaatttgcaaattgtttcctttatatatgtatgtatatatatatatgaaaatatatatatatatgaaaaataaagcttaattgtcccag

SEQ ID NO: 6394 - DNA, 3204 bp, Homo sapiens
  III.22 (XM_004256)
gccggggagggacgcaggcaggcggcgggcagcgggaggcggcagcccggtgcggtccccgcggctctcggcggagccccgcgcccgccgcgccatggcccgaagaccccggcacagcatatatagcagtgacgaggatgatgaggactttgagatgtgtgaccatgactatgatgggctgcttcccaagtctggaaagcgtcacttggggaaaacaaggtggacccgggaagaggatgaaaaactgaagaagctggtggaacagaatggaacagatgactggaaagttattgccaattatctcccgaatcgaacagatgtgcagtgccagcaccgatggcagaaagtactaaaccctgagctcatcaagggtccttggaccaaagaagaagatcagagagtgatagagcttgtacagaaatacggtccgaaacgttggtctgttattgccaagcacttaaaggggagaattggaaaacaatgtagggagaggtggcataaccacttgaatccagaagttaagaaaacctcctggacagaagaggaagacagaattatttaccaggcacacaagagactggggaacagatgggcagaaatcgcaaagctactgcctggacgaactgataatgctatcaagaaccactggaattctacaatgcgtcggaaggtcgaacaggaaggttatctgcaggagtcttcaaaagccagccagccagcagtggccacaagcttccagaagaacagtcatttgatgggttttgctcaggctccgcctacagctcaactccctgccactggccagcccactgttaacaacgactattcctattaccacatttctgaagcacaaaatgtctccagtcatgttccataccctgtagcgttacatgtaaatatagtcaatgtccctcagccagctgccgcagccattcagagacactataatgatgaagaccctgagaaggaaaagcgaataaaggaattagaattgctcctaatgtcaaccgagaatgagctaaaaggacagcaggtgctaccaacacagaaccacacatgcagctaccccgggtggcacagcaccaccattgccgaccacaccagacctcatggagacagtgcacctgtttcctgtttgggagaacaccactccactccatctctgccagcggatcctggctccctacctgaagaaagcgcctcgccagcaaggtgcatgatcgtccaccagggcaccattctggataatgttaagaacctcttagaatttgcagaaacactccaatttatagattctttcttaaacacttccagtaaccatgaaaactcagacttggaaatgccttctttaacttccacccccctcattggtcacaaattgactgttacaacaccatttcatagagaccagactgtgaaaactcaaaaggaaaatactgtttttagaaccccagctatcaaaaggtcaatcttagaaagctctccaagaactcctacaccattcaaacatgcacttgcagctcaagaaattaaatacggtcccctgaagatgctacctcagacaccctctcatctagtagaagatctgcaggatgtgatcaaacaggaatctgatgaatctggaattgttgctgagtttcaagaaaatggaccacccttactgaagaaaatcaaacaagaggtggaatctccaactgataaatcaggaaacttcttctgctcacaccactgggaaggggacagtctgaatacccaactgttcacgcagacctcgcctgtggcagatgcaccgaatattcttacaagctccgttttaatggcaccagcatcagaagatgaagacaatgttctcaaagcatttacagtacctaaaaacaggtccctggcgagccccttgcagccttgtagcagtacctgggaacctgcatcctgtggaaagatggaggagcagatgacatcttccagtcaagctcgtaaatacgtgaatgcattctcagcccggacgctggtcatgtgagacatttccagaaaagcattatggttttcagaacacttcaagttgacttgggatatatcattcctcaacatgaaacttttcatgaatgggagaagaacctatttttgttgtggtacaacagttgagagcagcaccaagtgcatttagttgaatgaagtcttcttggatttcacccaactaaaaggatttttaaaaataaataacagtcttacctaaattattaggtaatgaattgtagccagttgttaatatcttaatgcagatttttttaaaaaaaacataaaatgatttatctgtattttaaaggatccaacagatcagtattttttcctgtgatgggttttttgaaatttgacacattaaaaggtactccagtatttcacttttctcgatcactaaacatatgcatatatttttaaaaatcagtaaaagcattactctaagtgtagacttaataccatgtgacatttaatccagattgtaaatgctcatttatggttaatgacattgaaggtacatttattgtaccaaaccattttatgagttttctgttagcttgctttaaaaattattactgtaagaaatagttttataaaaaattatatttttattcagtaatttaattttgtaaatgccaaatgaaaaacgttttttgctgctatggtcttagcctgtagacatgctgctagtatcagaggggcagtagagcttggacagaaagaaaagaaacttggtgttaggtaattgactatgcactagtatttcagactttttaattttatatatatatacattttttttccttctgcaatacatttgaaaacttgtttgggagactctgcattttttattgtggtttttttgttattgttggtttatacaagcatgcgttgcacttcttttttgggagatgtgtgttgttgatgttctatgttttgttttgagtgtagcctgactgttttataatttgggagttctgcatttgatccgcatcccctgtggtttctaagtgtatggtctcagaactgttgcatggatcctgtgtttgcaactggggagacagaaactgtggttgatagccagtcactgccttaagaacatttgatgcaagatggccagcactgaacttttgagatatgacggtgtacttactgccttgtagcaaaataaagatgtgcccttatttt

SEQ ID NO: 6395 - DNA, 5431 bp, Homo sapiens
  III.23 (XM_015815)
tgttctcctgagccttcaggagcctgcaccagtcctgcctgtccttctactcagctgttacccactctgggaccagcagtctttctgataactgggagagggcagtaaggaggacttcctggagggggtgactgtccagagcctggaactgtgcccacaccagaagccatcagcagcaaggacaccatgcggcttccgggtgcgatgccagctctggccctcaaaggcgagctgctgttgctgtctctcctgttacttctggaaccacagatctctcagggcctggtcgtcacacccccggggccagagcttgtcctcaatgtctccagcaccttcgttctgacctgctcgggttcagctccggtggtgtgggaacggatgtcccaggagcccccacaggaaatggccaaggcccaggatggcaccttctccagcgtgctcacactgaccaacctcactgggctagacacgggagaatacttttgcacccacaatgactcccgtggactggagaccgatgagcggaaacggctctacatctttgtgccagatcccaccgtgggcttcctccctaatgatgccgaggaactattcatctttctcacggaaataactgagatcaccattccatgccgagtaacagacccacagctggtggtgacactgcacgagaagaaaggggacgttgcactgcctgtcccctatgatcaccaacgtggcttttctggtatctttgaggacagaagctacatctgcaaaaccaccattggggacagggaggtggattctgatgcctactatgtctacagactccaggtgtcatccatcaacgtctctgtgaacgcagtgcagactgtggtccgccagggtgagaacatcaccctcatgtgcattgtgatcgggaatgaggtggtcaacttcgagtggacatacccccgcaaagaaagtgggcggctggtggagccggtgactgacttcctcttggatatgccttaccacatccgctccatcctgcacatccccagtgccgagttagaagactcggggacctacacctgcaatgtgacggagagtgtgaatgaccatcaggatgaaaaggccatcaacatcaccgtggttgagagcggctacgtgcggctcctgggagaggtgggcacactacaatttgctgagctgcatcggagccggacactgcaggtagtgttcgaggcctacccaccgcccactgtcctgtggttcaaagacaaccgcaccctgggcgactccagcgctggcgaaatcgccctgtccacgcgcaacgtgtcggagacccggtatgtgtcagagctgacactggttcgcgtgaaggtggcagaggctggccactacaccatgcgggccttccatgaggatgctgaggtccagctctccttccagctacagatcaatgtccctgtccgagtgctggagctaagtgagagccaccctgacagtggggaacagacagtccgctgtcgtggccggggcatgccccagccgaacatcatctggtctgcctgcagagacctcaaaaggtgtccacgtgagctgccgcccacgctgctggggaacagttccgaagaggagagccagctggagactaacgtgacgtactgggaggaggagcaggagtttgaggtggtgagcacactgcgtctgcagcacgtggatcggccactgtcggtgcgctgcacgctgcgcaacgctgtgggccaggacacgcaggaggtcatcgtggtgccacactccttgccctttaaggtggtggtgatctcagccatcctggccctggtggtgctcaccatcatctcccttatcatcctcatcatgctttggcagaagaagccacgttacgagatccgatggaaggtgattgagtctgtgagctctgacggccatgagtacatctacgtggaccccatgcagctgccctatgactccacgtgggagctgccgcgggaccagcttgtgctgggacgcaccctcggctctggggcctttgggcaggtggtggaggccacggctcatggcctgagccattctcaggccacgatgaaagtggccgtcaagatgcttaaatccacagcccgcagcagtgagaagcaagcccttatgtcggagctgaagatcatgagtcaccttgggccccacctgaacgtggtcaacctgttgggggcctgcaccaaaggaggacccatctatatcatcactgagtactgccgctacggagacctggtggactacctgcaccgcaacaaacacaccttcctgcagcaccactccgacaagcgccgcccgcccagcgcggagctctacagcaatgctctgcccgttgggctccccctgcccagccatgtgtccttgaccggggagagcgacggtggctacatggacatgagcaaggacgagtcggtggactatgtgcccatgctggacatgaaaggagacgtcaaatatgcagacatcgagtcctccaactacatggccccttacgataactacgttccctctggcccctgagaggacctgccgagcaactttgatcaacgagtctccagtgctaagctacatggacctcgtgggcttcagctaccaggtggccaatggcatggagtttctggcctccaagaactgcgtccacagagacctggcggctaggaacgtgctcatctgtgaaggcaagctggtcaagatctgtgactttggcctggctcgagacatcatgcgggactcgaattacatctccaaaggcagcacctttttgcctttaaagtggatggctccggagagcatcttcaacagcctctacaccaccctgagcgacgtgtggtccttcgggatcctgctctgggagatcttcaccttgggtggcaccccttacccagagctgcccatgaacgagcagttctacaatgccatcaaacggggttaccgcatggcccagcctgcccatgcctccgacgagatctatgagatcatgcagaagtgctgggaagagaagtttgagattcggccccccttctcccagctggtgctgcttctcgagagactgttgggcgaaggttacaaaaagaagtaccagcaggtggatgaggagtttctgaggagtgaccacccagccatccttcggtcccaggcccgcttgcctgggttccatggcctccgatctcccctggacaccagctccgtcctctatactgccgtgcagcccaatgagggtgacaacgactatatcatccccctgcctgaccccaaacccgaggttgctgacgagggcccactggagggttcccccagcctagccagctccaccctgaatgaagtcaacacctcctcaaccatctcctgtgacagccccctggagccccaggacgaaccagagccagagccccagcttgagctccaggtggagccggagccagagctggaacagttgccggattcggggtgccctgcgcctcgggcggaagcagaggatagcttcctgtagggggctggcccctaccctgccctgcctgaagctccccccctgccagcacccagcatctcctggcctggcctgaccgggcttcctgtcagccaggctgcccttatcagctgtccccttctggaagctttctgctcctgacgtgttgtgccccaaaccctggggctggcttaggaggcaagaaaactgcaggggccgtgaccagccctctgcctccagggaggccaactgactctgagccagggttcccccagggaactcagttttcccatatgtaaaatgggaaagttaggcttgatgacccagaatctaggattctctccctggctgacaggtggggagaccgaatccctccctgggaagattcttggagttactgaggtggtaaattaacttttttctgttcagccagctacccctcaaggaatcatagctctctcctcgcacttttatccacccaggagctagggaagagaccctagcctccctggctgctggctgagctagggcctagccttgagcagtgttgcctcatccagaagaaagccagtctcctccctatgatgccagtccctgcgttccctggcccgagctggtctggggccattaggcagcctaattaatgctggaggctgagccaagtacaggacacccccagcctgcagcccttgcccagggcacttggagcacacgcagccatagcaagtgcctgtgtccctgtccttcaggcccatcagtcctggggctttttctttatcaccctcagtcttaatccatccaccagagtctagaaggccagacgggccccgcatctgtgatgagaatgtaaatgtgccagtgtggagtggccacgtgtgtgtgccagtatatggccctggctctgcattggacctgctatgaggctttggaggaatccctcaccctctctgggcctcagtttccccttcaaaaaatgaataagtcggacttattaactctgagtgccttgccagcactaacattctagagtattccaggtggttgcacatttgtccagatgaagcaaggccatataccctaaacttccatcctgggggtcagctgggctcctgggagattccagatcacacatcacactctggggactcaggaaccatgccccttccccaggcccccagcaagtctcaagaacacagctgcacaggccttgacttagagtgacagccggtgtcctggaaagcccccagcagctgccccagggacatgggaagaccacgggacctctttcactacccacgatgacctccgggggtatcctgggcaaaagggacaaagagggcaaatgagatcacctcctgcagcccaccactccagcacctgtgccgaggtctgcgtcgaagacagaatggacagtgaggacagttatgtcttgtaaaagacaagaagcttcagatgggtaccccaagaaggatgtgagaggtgggcgctttggaggtttgcccctcacccaccagctgccccatccctgaggcagcgctccatgggggtatggttttgtcactgcccagacctagcagtgacatctcattgtccccagcccagtgggcattggaggtgccaggggagtcagggttgtagccaagacgcccccgcacggggagggttgggaagggggtgcaggaagctcaacccctctgggcaccaaccctgcattgcaggttggcaccttacttccctgggatccccagagttggtccaaggagggagagtgggttctcaatacggtaccaaagatataatcacctaggtttacaaatatttttaggactcacgttaactcacatttatacagcagaaatgctattttgtatgctgttgagtttttctatctgtgtacttttttttaagggaaagattttaatattaaacctggtgcttctcactcac

SEQ ID NO: 6396 - DNA, 2069 bp, Homo sapiens
  III.24 (L34657)
ctatcaatctccagagctttttctttttaagtgtgagcgagtttattagagaagtaaagagacccaagagtgcctactccatagacagagcagccactgtgacactgtacccattaaacactaactctccattgcccctccagcaacccctagcacccactgtctactttctgtctctatgtggttgtctatttgagggacatcacataagtggagtcatatatttgtcctttcatgtctcccttatttcatttagcataacgttttcaagggtttcctgtgttgtgaatatatcagaatttcattctctttttaaggtagaatcatatcattttaaaacatttcagttggaccatctaagttcagtccttcattttcaacaattaaaaaacagccctcaaccgggtgcatctcacgttagctagagacagaactggagctagaagtcagatctcttaccaaagttgcctttcttcttctgtgggtaagtggggcacccttgggacgctgtgctgggcgtacatgggtgcttgatgaagttacttggtggactgatgtgattgatgtccaacatgtatgcagggacagaggctatggtccctacagagcaggcatggagagaaggagaaatacatacgggcaggagccaggagagggagggtgtagtgagcagagaccgcgccactgcactccagcctgagtgacagagtgagaatccatctaaaaaattgcttactaaagaagtggtctcctgaggtcttaagacgttcctggcaatgtcttgagtgggtgggagagagcctccagtcattgagctgtggaatttcagaggtgagaaccacacctaacccccaattactttcccctgtttgcctcagtgacacagctgcaggaaccctggtgggtgttgtattaagtaaatttgacctttattctttgcagatctgtgaaatgttgtcttctgaggggccacgtgtatctgtagtgctgaggactccttggggcctctgaagtcacagagagaacctgcagggtgggggaccagtgtgtgacagccctgctttgcattttctttgagaagtgctgtcattttgcatttctctccaccaggggaatcttcaatcttgagaggtgtgatcataacttgccttgtttcttgtcgctacagagaacggaaggctcccttgatggaacttagacagcaaggccagatgcacatccctggaaggacatccatgttccgagaagaacagatgatccctgtatttcaagacctctgtgcacttatttatgaacctgccctgctcccacagaacacagcaattcctcaggctaagctgccggttcttaaatccatcctgctaagttaatgttgggtagaaagagatacagaggggctgttgaatttcccacataccctccttccaccaagttggaacatccttggaaattgggaagagcacaagaggagatccagggcaaggccattgggatattctgaaacttgaatattttgttttgtgcagagataaagaccttttccatgcaccctcatacacagaaaccaattttcttttttatactcaatcatttctagcgcatggcctggttagaggctggttttttctcttttcctttggtccttcaaaggcttgtagttttgggtagtccttgttctttggaaatacacagtgctgaccagacagcctccccctgtcccctctatgacctcgccctccacaaatgggaaaaccagactacttgggagcaccgcctgtgaaataccaacctgaagacacggttcattcaggcaacgcacaaaacagaaaatgaaggtggaacaagcacatatgttcttcaactgtttttgtctacactctttctcttttcctctacatgctgaaggctgaaagacaggaaagatggtgccatcagcaaatattattcttaattgaaaacttgaaatgtgtatgtttcttactaatttttaaaaatgtattccttgccagggcaggcaaggtcgtcacgcctgtaatcccagcacttcaggaggctgaggtgggcggatc

SEQ ID NO: 6397 - DNA, 2539 bp, Homo sapiens
  III.25 (XM_044882)
ggagtctcttgctctggttcttgctgttcctgctcctgctcccgccgctccccgtcctgctcgcggacccaggggcgcccacgccagtgaatccctgttgttactatccatgccagcaccagggcatctgtgtccgcttcggccttgaccgctaccagtgtgactgcacccgcacgggctattccggccccaactgcaccatccctggcctgtggacctggctccggaattcactgcggcccagcccctctttcacccacttcctgctcactcacgggcgctggttctgggagtttgtcaatgccaccttcatccgagagatgctcatgcgcctggtactcacagtgcgctccaaccttatccccagtccccccacctacaactcagcacatgactacatcagctgggagtctttctccaacgtgagctattacactcgtattctgccctctgtgcctaaagattgccccacacccatgggaaccaaagggaagaagcagttgccagatgcccagctcctggcccgccgcttcctgctcaggaggaagttcatacctgacccccaaggcaccaacctcatgtttgccttctttgcacaacacttcacccaccagttcttcaaaacttctggcaagatgggtcctggcttcaccaaggccttgggccatggggtagacctcggccacatttatggagacaatctggagcgtcagtatcaactgcggctctttaaggatgggaaactcaagtaccaggtgctggatggagaaatgtacccgccctcggtagaagaggcgcctgtgttgatgcactacccccgaggcatcccgccccagagccagatggctgtgggccaggaggtgtttgggctgcttcctgggctcatgctgtatgccacgctctggctacgtgagcacaaccgtgtgtgtgacctgctgaaggctgagcaccccacctggggcgatgagcagcttttccagacgacccgcctcatcctcataggggagaccatcaagattgtcatcgaggagtacgtgcagcagctgagtggctatttcctgcagctgaaatttgacccagagctgctgttcggtgtccagttccaataccgcaaccgcattgccatggagttcaaccatctctaccactggcaccccctcatgcctgactccttcaaggtgggctcccaggagtacagctacgagcagttcttgttcaacacctccatgttggtggactatggggttgaggccctggtggatgccttctctcgccagattgctggccggatcggtgggggcaggaacatggaccaccacatcctgcatgtggctgtggatgtcatcagggagtctcgggagatgcggctgcagcccttcaatgagtaccgcaagaggtttggcatgaaaccctacacctccttccaggagctcgtaggagagaaggagatggcagcagagttggaggaattgtatggagacattgatgcgttggagttctaccctggactgcttcttgaaaagtgccatccaaactctatctttggggagagtatgatagagattggggctcccttttccctcaagggtctcctagggaatcccatctgttctccggagtactggaagccgagcacatttggcggcgaggtgggctttaacattgtcaagacggccacactgaagaagctggtctgcctcaacaccaagacctgtccctacgtttccttccgtgtgccggatgccagtcaggatgatgggcctgctgtggagcgaccatccacagagctctgaggggcaggaaagcagcattctggaggggagagctttgtgcttgtcattccagagtgctgaggccagggctgatggtcttaaatgctcattttctggtttggcatggtgagtgttggggttgacatttagaactttaagtctcacccattatctggaatattgtgattctgtttattcttccagaatgctgaactccttgttagcccttcagattgttaggagtggttctcatttggtctgccagaatactgggttcttagttgacaacctagaatgtcagatttctggttgatttgtaacacagtcattctaggatgtggagctactgatgaaatctgctagaaagttagggggttcttattttgcattccagaatcttgactttctgattggtgattcaaagtgttgtgttcctggctgatgatccagaacagtggctcgtatcccaaatctgtcagcatctggctgtctagaatgtggatttgattcattttcctgttcagtgagatatcatagagacggagatcctaaggtccaacaagaatgcattccctgaatctgtgcctgcactgagagggcaaggaagtggggtgttcttcttgggacccccactaagaccctggtctgaggatgtagagagaacaggtgggctgtattcacgccattggttggaagctaccagagctctatccccatccaggtcttgactcatggcagctgtttctcatgaagctaataaaattcgc

SEQ ID NO: 6398 - DNA, 4982 bp, Homo sapiens
  III.26 (NM_080591)
aggtgacagctggagggaggagcgggggtggagccgggggaagggtggggaggggatgggctggagctccgggcagtgtgcgaggcgcacgcacaggagcctgcactctgcgtcccgcaccccagcagccgcgccatgagccggagtctcttgctctggttcttgctgttcctgctcctgctcccgccgctccccgtcctgctcgcggacccaggggcgcccacgccagtgaatccctgttgttactatccatgccagcaccagggcatctgtgtccgcttcggccttgaccgctaccagtgtgactgcacccgcacgggctattccggccccaactgcaccatccctggcctgtggacctggctccggaattcactgcggcccagcccctctttcacccacttcctgctcactcacgggcgctggttctgggagtttgtcaatgccaccttcatccgagagatgctcatgcgcctggtactcacagtgcgctccaaccttatccccagtccccccacctacaactcagcacatgactacatcagctgggagtctttctccaacgtgagctattacactcgtattctgccctctgtgcctaaagattgccccacacccatgggaaccaaagggaagaagcagttgccagatgcccagctcctggcccgccgcttcctgctcaggaggaagttcatacctgacccccaaggcaccaacctcatgtttgccttctttgcacaacacttcacccaccagttcttcaaaacttctggcaagatgggtcctggcttcaccaaggccttgggccatggggtagacctcggccacatttatggagacaatctggagcgtcagtatcaactgcggctctttaaggatgggaaactcaagtaccaggtgctggatggagaaatgtacccgccctcggtagaagaggcgcctgtgttgatgcactacccccgaggcatcccgccccagagccagatggctgtgggccaggaggtgtttgggctgcttcctgggctcatgctgtatgccacgctctggctacgtgagcacaaccgtgtgtgtgacctgctgaaggctgagcaccccacctggggcgatgagcagcttttccagacgacccgcctcatcctcataggggagaccatcaagattgtcatcgaggagtacgtgcagcagctgagtggctatttcctgcagctgaaatttgacccagagctgctgttcggtgtccagttccaataccgcaaccgcattgccatggagttcaaccatctctaccactggcaccccctcatgcctgactccttcaagatcggtgggggcaggaacatggaccaccacatcctgcatgtggctgtggatgtcatcagggagtctcgggagatgcggctgcagcccttcaatgagtaccgcaagaggtttggcatgaaaccctacacctccttccaggagctcgtaggagagaaggagatggcagcagagttggaggaattgtatggagacattgatgcgttggagttctaccctggactgcttcttgaaaagtgccatccaaactctatctttggggagagtatgatagagattggggctcccttttccctcaagggtctcctagggaatcccatctgttctccggagtactggaagccgagcacatttggcggcgaggtgggctttaacattgtcaagacggccacactgaagaagctggtctgcctcaacaccaagacctgtccctacgtttccttccgtgtgccggatgccagtcaggatgatgggcctgctgtggagcgaccatccacagagctctgaggggcaggaaagcagcattctggaggggagagctttgtgcttgtcattccagagtgctgaggccagggctgatggtcttaaatgctcattttctggtttggcatggtgagtgttggggttgacatttagaactttaagtctcacccattatctggaatattgtgattctgtttattcttccagaatgctgaactccttgttagcccttcagattgttaggagtggttctcatttggtctgccagaatactgggttcttagttgacaacctagaatgtcagatttctggttgatttgtaacacagtcattctaggatgtggagctactgatgaaatctgctagaaagttagggggttcttattttgcattccagaatcttgactttctgattggtgattcaaagtgttgtgttcctggctgatgatccagaacagtggctcgtatcccaaatctgtcagcatctggctgtctagaatgtggatttgattcattttcctgttcagtgagatatcatagagacggagatcctaaggtccaacaagaatgcattccctgaatctgtgcctgcactgagagggcaaggaagtggggtgttcttcttgggacccccactaagaccctggtctgaggatgtagagagaacaggtgggctgtattcacgccattggttggaagctaccagagctctatccccatccaggtcttgactcatggcagctgtttctcatgaagctaataaaattcgctttctaaagttacctgttatatatctcttttggtcccatcctctaaagcagaggcaacactggaacatggctagcctttcttgtagccatggctgggcgtgctagaggttgcagcatgagactttctgctgggatccttgggcccatcactgtatagacatgctaccactggtacttcctttctccctgcgggccaggcactgcccttttcaggaagctctcttaaaatacccattgccccagacctggaagatataacattcagttcccaccatctgattaaaacaacttcctcccttacagagcatacaacagagggggcacccggggaggagagcacatactgtgttccaatttcacgcttttaattctcatttgttctcacaccaacagtgtgaagtgcgtggtataatctccatttcaaaaccaaggaagcagcctcagagtggtcgagtgacacacctcacgcaggctgagtccagagcttgtgctcctcttgattcctggtttgactcagttccaggcctgatcttgcctgtctggctcagggtcaaagacagaatggtggagtgtagcctccacctgatattcaggctactcattcagtcccaaatatgtattttcctaagtgtttactatgtgccagttcctgtaacaggtgtggggacacagcagtgagtaatcaatacagacaaggttctgcccttatggagctcacactccagtggcagacaaacagaccataaataaggaaacgatgaaataagatatatacaaggtgagtgtgacttcccttctaaccccctctgctctgtcctcccctattgcgctctcaagaccagagacccaacagcagtgatctcagggcagacagccctccactccagctctgagacccttttctcaggacctctgtaggcagcagagagagaggacagaggggtaagatgaggggttgagggaaggttcttcatgatccacactttgggcttagtatttctcaggaagagctatggcccagaaacaacaggggaaactagagttcggtctgacagtccttggggttaagtctcctgtcttatggtccagaaactcctgtttctccttagttggctggaaactgctcccatcattccttctggcctctgctgaatgcagggaatgcaatccttccctgctcttgcagttgctctgacgtagaaagatccttcgggtgctggaagtctccatgaagagcttgtgtcctgtcctttcttgcagattctatttcccctcttctgctaatacctcttactttgcttgagaatcctctcctttcttattaatttcagtcttggtggttctatcaggggtgcattctggccaaggggtgggcctgtgaatcaatcctgggcaatcagacaccctctccttaaaaactggcccgtggagactgagatcactgactctgactcatccccacagctggctctgacaagatggtccatttgttcctgcttccgagatccccagggcagcctggatccctgcccttctcaagactttagcttttccttccatccggtggcctattccaggaattcctcttttgcttaaatcagttggagtttgtgtctgttgcttgtaatcaagcctttatggctgctgggctgagtgacacaagcactttaatggcctggagggacttttaatcagtgaagatgcaatcagacaagtgttttggaaagagcaccctcgagaagggtggatgacagggcagagcaggaaggacaggaagctggcagaacggaggaggctgcagccgtggtccaaccaggagctgatggcagctggggctaggggaagggctttgagggtggaaggatgggatgggttccagaggtattcctctcttaaatgcaagtgcctagattaggtagactttgcttagtattgacaactgcacatgaaagttttgcaaagggaaacaggctaaatgcaccaagaaagcttcttcagagtgaagaatcttaatgcttgtaatttaaacatttgttcctggagttttgatttggtggatgtgatggttggttttatttgtcagtttggttgggctatagcacacagttatttaatcaaacagtaatctaggtgtggctgtgaaggtattttgtagatgtgattaacatctacaatcagttgactttaagtgaaagagattacttaaataatttgggtgagctgcacctgattagttgaaaggcctcaagaacaaacactgcagtttcctggaaaagaagaaactttgcctcaagactatagccatcgactcctgcctgagtttccagcctgctagtctgccctatggatttgaagtttgccaaccccaacaattgtgtgaattaatttctaaaaataaagctatatacagcc

SEQ ID NO: 6399 - DNA, 955 bp, Homo sapiens
  III.27 (NM_032965)
tgcagactgatatggattcaccactgctaacacctcctggttggaactacaggaatagaactggaaagggaaaaaaggcagcattcaccacatcccaatcctgaatccaagagtctaagatagtcccccactcctatctcaggcttagaggattagattaatctcctggagggaagactcttccttgaaacatttttttttatctgcctgtagctattgggataattcgggaaatccacagggacagttcaagtcatctttgtcctctactttctgttgcactctcagccttgttctctttttagaaactgcatggtaactattatatagctaaagaagagcattctgacctctgccctgggacttcctggatcctcctcttcttataaatacaagggcagagctggtatcccggggagccaggaagcagtgagcccaggagtcctcggccagccctgcctgcccaccaggaggatgaaggtctccgtggctgccctctcctgcctcatgcttgttgctgtccttggatcccaggcccagttcataaatgatgcagagacagagttaatgatgtcaaagcttccactggaaaatccagtagttctgaacagctttcactttgctgctgactgctgcacctcctacatctcacaaagcatcccgtgttcactcatgaaaagttattttgaaacgagcagcgagtgctccaagccaggtgtcatattcctcaccaagaaggggaggcaagtctgtgccaaacccagtggtccgggagttcaggattgcatgaaaaagctgaagccctactcaatataataataaagagacaaaagagggcagccacccacctccaacacctcctgtgagtttcttggtctgaaatacttaaaaaatatatatattgttgtgtctggtaatgaaagtaatgcatctaataaagagtattcaatttttt

SEQ ID NO: 6400 - DNA, 1497 bp, Homo sapiens; identical to SEQ ID NO: 6354
  III.28 (NM_004590)

SEQ ID NO: 6401 - DNA, 1151 bp, Homo sapiens
  III.29 (XM_035842)
acagcctctcccacaggtaccatgaaggtctccgcggcagccctcgctgtcatcctcattgctactgccctctgcgctcctgcatctgcctccccatattcctcggacaccacaccctgctgctttgcctacattgcccgcccactgccccgtgcccacatcaaggagtatttctacaccagtggcaagtgctccaacccagcagtcgtctttgtcacccgaaagaaccgccaagtgtgtgccaacccagagaagaaatgggttcgggagtacatcaactctttggagatgagctaggatggagagtccttgaacctgaacttacacaaatttgcctgtttctgcttgctcttgtcctagcttgggaggcttcccctcactatcctaccccacccgctccttgaagggcccagattctaccacacagcagcagttacaaaaaccttccccaggctggacgtggtggctcacgcctgtaatcccagcactttgggaggccaaggtgggtggatcacttgaggtcaggagttcgagaccagcctggccaacatgatgaaaccccatctctactaaaaatacaaaaaattagccgggcgtggtagcgggcgcctgtagtcccagctactcgggaggctgaggcaggagaatggcgtgaacccgggaggcggagcttgcagtgagccgagatcgcgccactgcactccagcctgggcgacagagcgagactccgtctcaaaaaaaaaaaaaaaaaaaaaaatacaaaaattagccgggcgtggtggcccacgcctgtaatcccagctactcgggaggctaaggcaggaaaattgtttgaacccaggaggtggaggctgcagtgagctgagattgtgccacttcactccagcctgggtgacaaagtgagactccgtcacaacaacaacaacaaaaagcttccccaactaaagcctagaagagcttctgaggcgctgctttgtcaaaaggaagtctctaggttctgagctctggctttgccttggctttgccagggctctgtgaccaggaaggaagtcagcatgcctctagaggcaaggaggggaggaacactgcactcttaagcttccgccgtctcaacccctcacaggagcttactggcaaacatgaaaaatcgg

SEQ ID NO: 6402 - DNA, 1695 bp, Homo sapiens; identical to SEQ ID NO: 6278
  III.30 (NM_021805)

SEQ ID NO: 6403 - DNA, 1833 bp, Homo sapiens; identical to SEQ ID NO: 6333
  III.31 (BC001830)

SEQ ID NO: 6404 - DNA, 1818 bp, Homo sapiens
  III.32 (AF261093)
caaccggaggcggcggcgcgtctggaggaggctgcagcagcggaagaccccagtccagatccaggactgagatcccagaaccatgaacctggccatcagcatcgctctcctgctaacagtcttgcaggtctcccgagggcagaaggtgaccagcctaacggcctgcctagtggaccagagccttcgtctggactgccgccatgagaataccagcagttcacccatccagtacgagttcagcctgacccgtgagacaaagaagcacgtgctctttggcactgtgggggtgcctgagcacacataccgctcccgaaccaacttcaccagcaaatacaacatgaaggtcctctacttatccgccttcactagcaaggacgagggcacctacacgtgtgcactccaccactctggccattccccacccatctcctcccagaacgtcacagtgctcagagacaaactggtcaagtgtgagggcatcagcctgctggctcagaacacctcgtggctgctgctgctcctgctctccctctccctcctccaggccacggatttcatgtccctgtgactggtggggcccatggaggagacaggaagcctcaagttccagtgcagagatcctacttctctgagtcagctgaccccctccccgcaatccctcaaaccttgaggagaagtggggaccccacccctcatcaggagttccagtgctgcatgcgattatctacccacgtccacgcggccacctcaccctctccgcacacctctggctgtctttttgtactttttgttccagagctgcttctgtctggtttatttaggttttatccttccttttctttgagagttcgtgaagagggaagccaggattggggacctgatggagagtgagagcatgtgaggggtagtgggatggtggggtaccagccactggaggggtcatccttgcccatcgggaccagaaacctgggagagacttggatgaggagtggttgggctgtgcctgggcctagcacggacatggtctgtcctgacagcactcctcggcaggcatggctggtgcctgaagaccccagatgtgagggcaccaccaagaatttgtggcctaccttgtgagggagagaactgagcatctccagcattctcagccacaaccaaaaaaaaataaaaagggcagccctccttaccactgtggaagtccctcagaggccttggggcatgacccagtgaagatgcaggtttgaccaggaaagcagcgctagtggagggttggagaaggaggtaaaggatgagggttcatcatccctccctgcctaaggaagctaaaagcatggccctgctgcccctccctgcctccacccacagtggagagggctacaaaggaggacaagaccctctcaggctgtcccaagctcccaagagcttccagagctctgacccacagcctccaagtcaggtggggtggagtcccagagctgcacagggtttggcccaagtttctaagggaggcacttcctcccctcgcccatcagtgccagcccctgctggctggtgcctgagcccctcagacagccccctgccccgcaggcctgccttctcagggacttctgcggggcctgaggcaagccatggagtgagacccaggagccggacacttctcaggaaatggcttttcccaacccccagcccccacccggtggttcttcctgttctgtgactgtgtatagtgccaccacaagcttatggcatctcattgaggacaaagaaaactgcacaataaaaccaaagcctctggaatccgaaaaaaaaaaaaaaaaa

SEQ ID NO: 6405 - DNA, 3713 bp, Homo sapiens
  III.33 (XM_027651)
ggtctcagctgagtctgctctgatcacccaacaagacctagctccccagcagagagcggccccacaacaaaagaggtccagcccctcagagggattgtgtccacctggacaccatatctcagaagacggtagagattgcatctcctgcaaatatggacaggactatagcactcactggaatgacctccttttctgcttgcgctgcaccaggtgtgattcaggtgaagtggagctaagtccctgcaccacgaccagaaacacagtgtgtcagtgcgaagaaggcaccttccgggaagaagattctcctgagatgtgccggaagtgccgcacagggtgtcccagagggatggtcaaggtcggtgattgtacaccctggagtgacatcgaatgtgtccacaaagaatcaggtacaaagcacagtggggaagccccagctgtggaggagacggtgacctccagcccagggactcctgcctctccctgttctctctcaggcatcatcataggagtcacagttgcagccgtagtcttgattgtggctgtgtttgtttgcaagtctttactgtggaagaaagtccttccttacctgaaaggcatctgctcaggtggtggtggggaccctgagcgtgtggacagaagctcacaacgacctggggctgaggacaatgtcctcaatgagatcgtgagtatcttgcagcccacccaggtccctgagcaggaaatggaagtccaggagccagcagagccaacaggtgtcaacatgttgtcccccggggagtcagagcatctgctggaaccggcagaagctgaaaggtctcagaggaggaggctgctggttccagcaaatgaaggtgatcccactgagactctgagacagtgcttcgatgactttgcagacttggtgccctttgactcctgggagccgctcatgaggaagttgggcctcatggacaatgagataaaggtggctaaagctgaggcagcgggccacagggacaccttgtacacgatgctgataaagtgggtcaacaaaaccgggcgagatgcctctgtccacaccctgctggatgccttggagacgctgggagagagacttgccaagcagaagattgaggaccacttgttgagctctggaaagttcatgtatctagaaggtaatgcagactctgccatgtcctaagtgtgattctcttcaggaagtcagaccttccctggtttaccttttttctggaaaaagcccaactggactccagtcagtaggaaagtgccacaattgtcacatgaccggtactggaagaaactctcccatccaacatcacccagtggatggaacatcctgtaacttttcactgcacttggcattatttttataagctgaatgtgataataaggacactatggaaatgtctggatcattccgtttgtgcgtactttgagatttggtttgggatgtcattgttttcacagcacttttttatcctaatgtaaatgctttatttatttatttgggctacattgtaagatccatctacacagtcgttgtccgacttcacttgatactatatgatatgaaccttttttgggtggggggtgcggggcagttcactctgtctcccaggctggagtgcaatggtgcaatcttggctcactatagccttgacctctcaggctcaagcgattctcccacctcagccatccaaatagctgggaccacaggtgtgcaccaccacgcccggctaattttttgtattttgtctagatataggggctctctatgttgctcagggtggtctcgaattcctggactcaagcagtctgcccacctcagactcccaaagcggtggaattagaggcgtgagcccccatgcttggccttacctttctacttttataattctgtatgttattattttatgaacatgaagaaactttagtaaatgtacttgtttacatagttatgtgaatagattagataaacataaaaggaggagacatacaatgggggaagaagaagaagtcccctgtaagatgtcactgtctgggttccagccctccctcagatgtactttggcttcaatgattggcaacttctacaggggccagtcttttgaactggacaaccttacaagtatatgagtattatttataggtagttgtttacatatgagtcgggaccaaagagaactggatccacgtgaagtcctgtgtgtggctggtccctacctgggcagtctcatttgcacccatagcccccatctatggacaggctgggacagaggcagatgggttagatcacacataacaatagggtctatgtcatatcccaagtgaacttgagccctgtttgggctcaggagatagaagacaaaatctgtctcccacgtctgccatggcatcaagggggaagagtagatggtgcttgagaatggtgtgaaatggttgccatctcaggagtagatggcccggctcacttctggttatctgtcaccctgagcccatgagctgccttttagggtacagattgcctacttgaggaccttggccgctctgtaagcatctgactcatctcagaaatgtcaattcttaaacactgtggcaacaggacctagaatggctgacgcattaaggttttcttcttgtgtcctgttctattattgttttaagacctcagtaaccatttcagcctctttccagcaaacccttctccatagtatttcagtcatggaaggatcatttatgcaggtagtcattccaggagtttttggtcttttctgtctcaaggcattgtgtgttttgttccgggactggtttgggtgggacaaagttagaattgcctgaagatcacacattcagactgttgtgtctgtggagttttaggagtggggggtgacctttctggtctttgcacttccatcctctcccacttccatctggcatcccacgcgttgtcccctgcacttctggaaggcacagggtgctgctgcctcctggtctttgcctttgctgggccttctgtgcaggacgctcagcctcagggctcagaaggtgccagtccggtcccaggtcccttgtcccttccacagaggccttcctagaagatgcatctagagtgtcagccttatcagtgtttaagatttttcttttatttttaatttttttgagacagaatctcactctctcgcccaggctggagtgcaacggtacgatcttggctcagtgcaacctccgcctcctgggttcaagcgattctcgtgcctcagcctccggagtagctgggattgcaggcacccgccaccacgcctggctaatttttgtatttttagtagagacggggtttcaccatgttggtcaggctggtctcgaactcctgacctcaggtgatccaccttggcctccgaaagtgctgggattacaggcgtgagccaccagccaggccaagctattcttttaaagtaagcttcctgacgacatgaaataattgggggttttgttgtttagttacattaggctttgctatatccccaggccaaatagcatgtgacacaggacagccatagtatagtgtgtcactcgtggttggtgtcctttcatgcttctgccctgtcaaaggtccctatttgaaatgtgttataatacaaacaaggaagcacattgtgtacaaaatacttatgtatttatgaatccatgaccaaattaaatatgaaaccttatat

SEQ ID NO: 6406 - DNA, 1142 bp, Homo sapiens
  III.34 (XM_057372)
gtcagcagaggcctcgctcgggcgcccagtggtcctgccgcctggtctcacctcgctatggttcgtctgcctctgcagtgcgtcctctggggctgcttgctgaccgctgtccatccagaaccacccactgcatgcagagaaaaacagtacctaataaacagtcagtgctgttctttgtgccagccaggacagaaactggtgagtgactgcacagagttcactgaaacggaatgccttccttgcggtgaaagcgaattcctagacacctggaacagagagacacactgccaccagcacaaatactgcgaccccaacctagggcttcgggtccagcagaagggcacctcagaaacagacaccatctgcacctgtgaagaaggctggcactgtacgagtgaggcctgtgagagctgtgtcctgcaccgctcatgctcgcccggctttggggtcaagcagattgctacaggggtttctgataccatctgcgagccctgcccagtcggcttcttctccaatgtgtcatctgctttcgaaaaatgtcacccttggacaagctgtgagaccaaagacctggttgtgcaacaggcaggcacaaacaagactgatgttgtctgtggtccccaggatcggctgagagccctggtggtgatccccatcatcttcgggatcctgtttgccatcctcttggtgctggtctttatcaaaaaggtggccaagaagccaaccaataaggccccccaccccaagcaggaaccccaggagatcaattttcccgacgatcttcctggctccaacactgctgctccagtgcaggagactttacatggatgccaaccggtcacccaggaggatggcaaagagagtcgcatctcagtgcaggagagacagtgaggctgcacccacccaggagtgtggccacgtgggcaaacaggcagttggccagagagcctggtgctgctgctgctgtggcgtgagggtgaggggctggcactgactgggcatagctccccgcttctgcctgcacccctgcagtttgagacaggagacctggcactggatgcagaaacagttcaccttgaagaacctctcacttcaccctggagcccatccagtctcccaacttgtattaaagacagaggcag

SEQ ID NO: 6407 - DNA, 1407 bp, Homo sapiens
  III.35 (NM_003809)
ctctccccggcccgatccgcccgccggctccccctcccccgatccctcgggtcccgggatgggggggcggtgaggcaggcacagccccccgcccccatggccgcccgtcggagccagaggcggagggggcgccggggggagccgggcaccgccctgctggtcccgctcgcgctgggcctgggcctggcgctggcctgcctcggcctcctgctggccgtggtcagtttggggagccgggcatcgctgtccgcccaggagcctgcccaggaggagctggtggcagaggaggaccaggacccgtcggaactgaatccccagacagaagaaagccaggatcctgcgcctttcctgaaccgactagttcggcctcgcagaagtgcacctaaaggccggaaaacacgggctcgaagagcgatcgcagcccattatgaagttcatccacgacctggacaggacggagcgcaggcaggtgtggacgggacagtgagtggctgggaggaagccagaatcaacagctccagccctctgcgctacaaccgccagatcggggagtttatagtcacccgggctgggctctactacctgtactgtcaggtgcactttgatgaggggaaggctgtctacctgaagctggacttgctggtggatggtgtgctggccctgcgctgcctggaggaattctcagccactgcggcgagttccctcgggccccagctccgcctctgccaggtgtctgggctgttggccctgcggccagggtcctccctgcggatccgcaccctcccctgggcccatctcaaggctgcccccttcctcacctacttcggactcttccaggttcactgaggggccctggtctccccgcagtcgtcccaggctgccggctcccctcgacagctctctgggcacccggtcccctctgccccaccctcagccgctctttgctccagacctgcccctccctctagaggctgcctgggcctgttcacgtgttttccatcccacataaatacagtattcccactcttatcttacaactcccccaccgcccactctccacctcactagctccccaatccctgaccctttgaggcccccagtgatctcgactcccccctggccacagacccccagggcattgtgttcactgtactctgtgggcaaggatgggtccagaagaccccacttcaggcactaagaggggctggacctggcggcaggaagccaaagagactgggcctaggccaggagttcccaaatgtgaggggcgagaaacaagacaagctcctcccttgagaattccctgtggatttttaaaacagatattatttttattattattgtgacaaaatgttgataaatggatattaaatagaataagtcataaaaaaaaaaaaaaaaaaaaaa

SEQ ID NO: 6408 - DNA, 2481 bp, Homo sapiens; identical to SEQ ID NO: 6277
  III.36 (XM_051958)

SEQ ID NO: 6409 - DNA, 873 bp, Homo sapiens; identical to SEQ ID NO: 6256
  III.37 (XM_015396)

SEQ ID NO: 6410 - DNA, 6030 bp, Homo sapiens
  III.38 (XM_008738)
gttggcccccgttgcttttcctctgggaaggatggcgcacgctgggagaacagggtacgataaccgggagatagtgatgaagtacatccattataagctgtcgcagaggggctacgagtgggatgcgggagatgtgggcgccgcgcccccgggggccgcccccgcaccgggcatcttctcctcccagcccgggcacacgccccatccagccgcatcccgggacccggtcgccaggacctcgccgctgcagaccccggctgcccccggcgccgccgcggggcctgcgctcagcccggtgccacctgtggtccacctgaccctccgccaggccggcgacgacttctcccgccgctaccgccgcgacttcgccgagatgtccagccagctgcacctgacgcccttcaccgcgcggggacgctttgccacggtggtggaggagctcttcagggacggggtgaactgggggaggattgtggccttctttgagttcggtggggtcatgtgtgtggagagcgtcaaccgggagatgtcgcccctggtggacaacatcgccctgtggatgactgagtacctgaaccggcacctgcacacctggatccaggataacggaggctgggatgcctttgtggaactgtacggccccagcatgcggcctctgtttgatttctcctggctgtctctgaagactctgctcagtttggccctggtgggagcttgcatcaccctgggtgcctatctgggccacaagtgaagtcaacatgcctgccccaaacaaatatgcaaaaggttcactaaagcagtagaaataatatgcattgtcagtgatgtaccatgaaacaaagctgcaggctgtttaagaaaaaataacacacatataaacatcacacacacagacagacacacacacacacaacaattaacagtcttcaggcaaaacgtcgaatcagctatttactgccaaagggaaatatcatttattttttacattattaagaaaaaaagatttatttatttaagacagtcccatcaaaactcctgtctttggaaatccgaccactaattgccaagcaccgcttcgtgtggctccacctggatgttctgtgcctgtaaacatagattcgctttccatgttgttggccggatcaccatctgaagagcagacggatggaaaaaggacctgatcattggggaagctggctttctggctgctggaggctggggagaaggtgttcattcacttgcatttctttgccctgggggctgtgatattaacagagggagggttcctgtggggggaagtccatgcctccctggcctgaagaagagactctttgcatatgactcacatgatgcatacctggtgggaggaaaagagttgggaacttcagatggacctagtacccactgagatttccacgccgaaggacagcgatgggaaaaatgcccttaaatcataggaaagtatttttttaagctaccaattgtgccgagaaaagcattttagcaatttatacaatatcatccagtaccttaagccctgattgtgtatattcatatattttggatacgcaccccccaactcccaatactggctctgtctgagtaagaaacagaatcctctggaacttgaggaagtgaacatttcggtgacttccgcatcaggaaggctagagttacccagagcatcaggccgccacaagtgcctgcttttaggagaccgaagtccgcagaacctgcctgtgtcccagcttggaggcctggtcctggaactgagccggggccctcactggcctcctccagggatgatcaacagggcagtgtggtctccgaatgtctggaagctgatggagctcagaattccactgtcaagaaagagcagtagaggggtgtggctgggcctgtcaccctggggccctccaggtaggcccgttttcacgtggagcatgggagccacgacccttcttaagacatgtatcactgtagagggaaggaacagaggccctgggcccttcctatcagaaggacatggtgaaggctgggaacgtgaggagaggcaatggccacggcccattttggctgtagcacatggcacgttggctgtgtggccttggcccacctgtgagtttaaagcaaggctttaaatgactttggagagggtcacaaatcctaaaagaagcattgaagtgaggtgtcatggattaattgacccctgtctatggaattacatgtaaaacattatcttgtcactgtagtttggttttatttgaaaacctgacaaaaaaaaagttccaggtgtggaatatgggggttatctgtacatcctggggcattaaaaaaaaaatcaatggtggggaactataaagaagtaacaaaagaagtgacatcttcagcaaataaactaggaaatttttttttcttccagtttagaatcagccttgaaacattgatggaataactctgtggcattattgcattatataccatttatctgtattaactttggaatgtactctgttcaatgtttaatgctgtggttgatatttcgaaagctgctttaaaaaaatacatgcatctcagcgtttttttgtttttaattgtatttagttatggcctatacactatttgtgagcaaaggtgatcgttttctgtttgagatttttatctcttgattcttcaaaagcattctgagaaggtgagataagccctgagtctcagctacctaagaaaaacctggatgtcactggccactgaggagctttgtttcaaccaagtcatgtgcatttccacgtcaacagaattgtttattgtgacagttatatctgttgtccctttgaccttgtttcttgaaggtttcctcgtccctgggcaattccgcatttaattcatggtattcaggattacatgcatgtttggttaaacccatgagattcattcagttaaaaatccagatggcaaatgaccagcagattcaaatctatggtggtttgacctttagagagttgctttacgtggcctgtttcaacacagacccacccagagccctcctgccctccttccgcgggggctttctcatggctgtccttcagggtcttcctgaaatgcagtggtgcttacgctccaccaagaaagcaggaaacctgtggtatgaagccagacctccccggcgggcctcagggaacagaatgatcagacctttgaatgattctaatttttaagcaaaatattattttatgaaaggtttacattgtcaaagtgatgaatatggaatatccaatcctgtgctgctatcctgccaaaatcattttaatggagtcagtttgcagtatgctccacgtggtaagatcctccaagctgctttagaagtaacaatgaagaacgtggacgtttttaatataaagcctgttttgtcttttgttgttgttcaaacgggattcacagagtatttgaaaaatgtatatatattaagaggtcacgggggctaattgctggctggctgccttttgctgtggggttttgttacctggttttaataacagtaaatgtgcccagcctcttggccccagaactgtacagtattgtggctgcacttgctctaagagtagttgatgttgcattttccttattgttaaaaacatgttagaagcaatgaatgtatataaaagcctcaactagtcatttttttctcctcttcttttttttcattatatctaattattttgcagttgggcaacagagaaccatccctattttgtattgaagagggattcacatctgcatcttaactgctctttatgaatgaaaaaacagtcctctgtatgtactcctctttacactggccagggtcagagttaaatagagtatatgcactttccaaattggggacaagggctctaaaaaaagccccaaaaggagaagaacatctgagaacctcctcggccctcccagtccctcgctgcacaaatactccgcaagagaggccagaatgacagctgacagggtctatggccatcgggtcgtctccgaagatttggcaggggcagaaaactctggcaggcttaagatttggaataaagtcacagaattaaggaagcacctcaatttagttcaaacaagacgccaacattctctccacagctcacttacctctctgtgttcagatgtggccttccatttatatgtgatctttgttttattagtaaatgcttatcatctaaagatgtagctctggcccagtgggaaaaattaggaagtgattataaatcgagaggagttataataatcaagattaaatgtaaataatcagggcaatcccaacacatgtctagctttcacctccaggatctattgagtgaacagaattgcaaatagtctctatttgtaattgaacttatcctaaaacaaatagtttataaatgtgaacttaaactctaattaattccaactgtacttttaaggcagtggctgtttttagactttcttatcacttatagttagtaatgtacacctactctatcagagaaaaacaggaaaggctcgaaatacaagccattctaaggaaattagggagtcagttgaaattctattctgatcttattctgtggtgtcttttgcagcccagacaaatgtggttacacactttttaagaaatacaattctacattgtcaagcttatgaaggttccaatcagatctttattgttattcaatttggatctttcagggattttttttttaaattattatgggacaaaggacatttgttggaggggtgggagggaggaagaatttttaaatgtaaaacattcccaagtttggatcagggagttggaagttttcagaataaccagaactaagggtatgaaggacctgtattggggtcgatgtgatgcctctgcgaagaaccttgtgtgacaaatgagaaacattttgaagtttgtggtacgacctttagattccagagacatcagcatggctcaaagtgcagctccgtttggcagtgcaatggtataaatttcaagctggatatgtctaatgggtatttaaacaataaatgtgcagttttaactaacaggatatttaatgacaaccttctggttggtagggacatctgtttctaaatgtttattatgtacaatacagaaaaaaattttataaaattaagcaatgtgaaactgaattggagagtgataatacaagtcctttagtcttacccagtgaatcattctgttccatgtctttggacaaccatgaccttggacaatcatgaaatatgcatctcactggatgcaaagaaaatcagatggagcatgaatggtactgtaccggttcatctggactgccccagaaaaataacttcaagcaaacatcctatcaacaacaaggttgttctgcataccaagctgagcacagaagatgggaacactggtggaggatggaaaggctcgctcaatcaagaaaattctgagactattaataaataagactgtagtgtagatactgagtaaatccatgcacctaaaccttttggaaaatctgccgtgggccctccagatagctcatttcattaagtttttccctccaaggtagaatttgcaagagtgacagtggattgcatttcttttggggaagctttcttttggtggttttgtttattataccttcttaagttttcaaccaaggtttgcttttgttttgagttactggggttatttttgttttaaataaaaataagtgtacaataagtgtttttgtattgaaagcttttgttatcaagattttcatacttttaccttccatggctctttttaagattgatacttttaagaggtggctgatattctgcaacactgtacacataaaaaatacggtaaggatactttacatggttaaggtaaagtaagtctccagttggccaccattagctataatggcactttgtttgtgttgttggaaaaagtcacattgccattaaactttccttgtctgtctagttaatattgtgaagaaaaataaagtacagtgtgagatactg

SEQ ID NO: 6411 - DNA, 2207 bp, Homo sapiens; identical to SEQ ID NO: 6286
  III.39 (NM_021073)

SEQ ID NO: 6412 - DNA, 1645 bp, Homo sapiens
  III.40 (XM_002101)
accgcaccaagcgggtggctgcaggagctcgcccatcgcccctgcgctgctcggaccgcggccacagccggactggcgggtacggcggcgacagacggattggccgagagtcccagtccgcagagtagccccggcctcgaggcggtggcgtccgcgtcctctcgtccaggagccaggacaggtgtcgcgcggcgggcgctccagggaccgcgctgaggccgcggtcgccgcccgtcccgccccgccccgccgcccgccgcccgccgagcccagcctccttgccgtcggggcgtccccaggccctgggtcggccgcggagccgatgcgcgcccgctgagcgccccagctgagcgcccccggcctgccatgaccgcgctccccggcccgctctggctcctgggcctggcgctatgcgcgctgggcgggggcggccccggcctgcgacccccgcccggctgtccccagcgacgtctgggcgcgcgcgagcgccgggacgtgcagcgcgagatcctggcggtgctcgggctgcctgggcggccccggccccgcgcgccacccgccgcctcccggctgcccgcgtccgcgccgctcttcatgctggacctgtaccacgccatggccggcgacgacgacgaggacggcgcgcccgcggagcggcgcctgggccgcgccgacctggtcatgagcttcgttaacatggtggagcgagaccgtgccctgggccaccaggagccccattggaaggagttccgctttgacctgacccagatcccggctggggaggcggtcacagctgcggagttccggatttacaaggtgcccagcatccacctgctcaacaggaccctccacgtcagcatgttccaggtggtccaggagcagtccaacagggagtctgacttgttctttttggatcttcagacgctccgagctggagacgagggctggctggtgctggatgtcacagcagccagtgactgctggttgctgaagcgtcacaaggacctgggactccgcctctatgtggagactgaggacgggcacagcgtggatcctggcctggccggcctgctgggtcaacgggccccacgctcccaacagcctttcgtggtcactttcttcagggccagtccgagtcccatccgcacccctcgggcagtgaggccactgaggaggaggcagccgaagaaaagcaacgagctgccgcaggccaaccgactcccagggatctttgatgacgtccacggctcccacggccggcaggtctgccgtcggcacgagctctacgtcagcttccaggacctcggctggctggactgggtcatcgctccccaaggctactcggcctattactgtgagggggagtgctccttcccactggactcctgcatgaatgccaccaaccacgccatcctgcagtccctggtgcacctgatgatgccagacgcagtccccaaggcgtgctgtgcacccaccaagctgagcgccacctctgtgctctactatgacagcagcaacaatgtcatcctgcgcaagcaccgcaacatggtggtcaaggcctgcggctgccactgagtccacccgcccggcccagctgcagccacccttctcatctggatcgggcccctcagaagcaggaaaccct

SEQ ID NO: 6413 - DNA, 1126 bp, Homo sapiens; identical to SEQ ID NO: 6368
  III.41 (XM_045933)

SEQ ID NO: 6414 - DNA, 1290 bp, Homo sapiens
  III.42 (XM_055386)
gggaggagagaaaagccatggccgacaaggtcctgaaggagaagagaaagctgtttatccgttccatgggtgaaggtacaataaatggcttactggatgaattattacagacaagggtgctgaacaaggaagagatggagaaagtaaaacgtgaaaatgctacagttatggataagacccgagctttgattgactccgttattccgaaaggggcacaggcatgccaaatttgcatcacatacatttgtgaagaagacagttacctggcagggacgctgggactctcagcagctcctcaggcagtgcaggacaacccagctatgcccacatcctcaggctcagaagggaatgtcaagctttgctccctagaagaagctcaaaggatatggaaacaaaagtcggcagagatttatccaataatggacaagtcaagccgcacacgtcttgctctcattatctgcaatgaagaatttgacagtattcctagaagaactggagctgaggttgacatcacaggcatgacaatgctgctacaaaatctggggtacagcgtagatgtgaaaaaaaatctcactgcttcggacatgactacagagctggaggcatttgcacaccgcccagagcacaagacctctgacagcacgttcctggtgttcatgtctcatggtattcgggaaggcatttgtgggaagaaacactctgagcaagtcccagatatactacaactcaatgcaatctttaacatgttgaataccaagaactgcccaagtttgaaggacaaaccgaaggtgatcatcatccaggcctgccgtggtgacagccctggtgtggtgtggtttaaagattcagtaggagtttctggaaacctatctttaccaactacagaagagtttgaggatgatgctattaagaaagcccacatagagaaggattttatcgctttctgctcttccacaccagataatgtttcttggagacatcccacaatgggctctgtttttattggaagactcattgaacatatgcaagaatatgcctgttcctgtgatgtggaggaaattttccgcaaggttcgattttcatttgagcagccagatggtagagcgcagatgcccaccactgaaagagtgactttgacaagatgtttctacctcttcccaggacattaaaataaggaaactgtatgaatgtctgtgggcaggaagtgaagagatccttctgtaaaggtttttggaattatgtctgctgaataataaacttttttgaaataataaatctggtagaaaaatg

SEQ ID NO: 6415 - DNA, 1400 bp, Homo sapiens
  III.43 (NM_004347)
cggcaaaaaaaaaaggcgtaagaattttgaagctatgttcaaaggtatccttcagagtggattggataacttcgtgataaaccacatgctaaagaacaacgtggctggacaaacatctatccagaccctagtacctaatacggatcaaaagtcgaccagtgtaaaaaaagacaaccacaaaaaaaaaacagttaagatgttggaatacctgggcaaagatgttcttcatggtgtttttaattatttggcaaaacacgatgttctgacattgaaggaagaggaaaagaaaaaatattatgatgccaaaattgaagacaaggccctgatcttggtagactctttgcgaaagaatcgcgtggctcatcaaatgtttacccaaacacttctcaatatggaccaaaagatcaccagtgtaaaacctcttctgcaaatcgaggctggaccacctgagtcagcagaatctacaaatatactcaaactttgtcctcgtgaagaattcctgagactgtgtaaaaaaaatcatgatgagatctatccaataaaaaagagagaggaccgcagacgcctggctctcatcatatgcaatacaaagtttgatcacctgcctgcaaggaatggggctcactatgacatcgtggggatgaaaaggctgcttcaaggcctgggctacactgtggttgacgaaaagaatctcacagccagggatatggagtcagtgctgagggcatttgctgccagaccagagcacaagtcctctgacagcacgttcttggtactcatgtctcatggcatcctagagggaatctgcggaactgcgcataaaaagaaaaaaccggatgtgctgctttatgacaccatcttccagatattcaacaaccgcaactgcctcagtctaaaggacaaacccaaggtcatcattgtccaggcctgcagaggtgaaaaacatggggaactctgggtcagagactctccagcatccttggcagtcatctcttcacagtcatctgagaacctggaggcagattctgtttgcaagatccacgaggagaaggacttcattgctttctgttcttcaacaccacataacgtgtcctggagagaccgcacaaggggctccatcttcattacggaactcatcacatgcttccagaaatattcttgctgctgccacctaatggaaatatttcggaaggtacagaaatcatttgaagttccacaggctaaagcccagatgcccaccatagaacgagcaaccttgacaagagatttctacctctttcctggcaattgaaaatgaaaccacaggcagcccagccctcctctgtcaacatcaaagagcacatttaccagtatagcttgcatagtcaatatttggtatttcaataaaagtaaagactgta

SEQ ID NO: 6416 - DNA, 2095 bp, Homo sapiens; identical to SEQ ID NO: 6252
  III.44 (NM_001760)

SEQ ID NO: 6417 - DNA, 1367 bp, Homo sapiens
  III.45 (NM_000591)
ccggccggccgaagagttcacaagtgtgaagcctgaagccgccgggtgccgctgtgtagaaagaagctaaagcacttccagagcctgctgagctcagaggttcggaagacttatcgaccatggagcgcgcgtcctgcttgttgctgctgctgctgccgctggtgcacgtctctgcgaccacgccagaaccttgtgagctggacgatgaagatttccgctgcgtctgcaacttctccgaacctcagcccgactggtccgaagccttccagtgtgtgtctgcagtagaggtggagatccatgccggcggtctcaacctagagccgtttctaaagcgcgtcgatgcggacgccgacccgcggcagtatgctgacacggtcaaggctctccgcgtgcggcggctcacagtgggagccgcacaggttcctgctcagctactggtaggcgccctgcgtgtgctagcgtactcccgcctcaaggaactgacgctcgaggacctaaagataaccggcaccatgcctccgctgcctctggaagccacaggacttgcactttccagcttgcgcctacgcaacgtgtcgtgggcgacagggcgttcttggctcgccgagctgcagcagtggctcaagccaggcctcaaggtactgagcattgcccaagcacactcgcctgccttttcctgcgaacaggttcgcgccttcccggcccttaccagcctagacctgtctgacaatcctggactgggcgaacgcggactgatggcggctctctgtccccacaagttcccggccatccagaatctagcgctgcgcaacacaggaatggagacgcccacaggcgtgtgcgccgcactggcggcggcaggtgtgcagccccacagcctagacctcagccacaactcgctgcgcgccaccgtaaaccctagcgctccgagatgcatgtggtccagcgccctgaactccctcaatctgtcgttcgctgggctggaacaggtgcctaaaggactgccagccaagctcagagtgctcgatctcagctgcaacagactgaacagggcgccgcagcctgacgagctgcccgaggtggataacctgacactggacgggaatcccttcctggtccctggaactgccctcccccacgagggctcaatgaactccggcgtggtcccagcctgtgcacgttcgaccctgtcggtgggggtgtcgggaaccctggtgctgctccaaggggcccggggctttgcctaagatccaagacagaataatgaatggactcaaactgccttggcttcaggggagtcccgtcaggacgttgaggacttttcgaccaattcaaccctttgccccacctttattaaaatcttaaac

SEQ ID NO: 6418 - DNA, 2957 bp, Homo sapiens
  III.46 (XM_038773)
agtctcggaggcggcgccgcaggggattgaggggttgactgagcgttgcgagccttagctttctcccgaacgccagcgctgaggacacgatgtcgcggctctcccgctcactgctttgggccgccacctgcctgggcgtgctctgcgtgctgtccgcggacaagaacacgacccagcacccgaacgtgacgactttagcgcccatctccaacgtaacctcggcgccggtgacgtccctcccgctggtcaccactccggcaccagaaacctgtgaaggtcgaaacagctgcgtttcctgttttaatgttagcgttgttaatactacctgcttttggatagaatgtaaagatgagagctattgttcacataactcaacagttagtgattgtcaagtggggaacacgacagacttctgttccgtttccacggccactccagtgccaacagccaattctacaggtacaacaaataacactgtgactccaacctcacaacctgtgcgaaagtctacctttgatgcagccagtttcattggaggaattgtcctggtcttgggtgtgcaggctgtaattttctttctttataaattctgcaaatctaaagaacgaaattaccacactctgtaaacagacccattgaattaataaggactggtgattcatttgtgtaactcactgaagccaaaatactatcttttaagatgtcccacatggaagacgctattccaggatctttaaatttccatggatgcatataggatgtttgggagcatcatccgtgaagaaaaaatcaattaaatcattgtgttcaacaggaatatttaaaatattctgcatgaatcctgtggctgtcttattttaaatagctgctgctgtgggattatattttttttccttaacatgccaaatataactttctgaaagtgatggaaaatgttgtcttgtgcagacaacatcatggctcttggcagtttaaatttagtaattttaatttagtgaacagaattgagaagaacgtgccaaatgagaatcaattaggtggatttttggctgtcatttcaaaagtggaataaatttattaatttagtagtactaaatggtatccttagattaaaattttgtgcttgataacagctgttttttctacattagaaataagatgccacacaaggaactacattccagatttaaagaaatgaaaggataccattagtgtgtataacagattattgttcatacttgtaaagcatcttatgtcattgagaatataaagaacagtgccttagaagacagtgaaaggtaagctctagcttaatgtctatgatttgttctttgacattaaggaaggtaaggattggtcagaggatgtaacttgatgtgagcagtagtaaacctgttttagatatcatactgttaatattttattgaaaatttatttcagagcggagaaacttaagctaaagtctgttatacagaattgaaagccttcgtatcttgaacctcccaacatttttcttatggctgttgaaaagtatagagctaaattgatttaattacactttcctttgtactttaaaaaaaagtatgctagcactattgtaccttgaaaggatttccaccagactgtcttgagtagtgacttctttggtgaggcaagaaggatatacattattttagaatcatttactatttaaatgagacaatcatattattttagaatcatttattttaaatgagacaatcattttaagttttaagataacagaagtgaccaatgtaatttcacaacacctaaggattttttggttgatcaggttactgtagatttttactgattgtcctggatgaatagactgtgctttttctttttctctcccttccttcttggtttcccatagtataataagcatgcatactttaacttctatagttttctcctttagagggtcgtcttcagttttagaggtttacttctcccttgcctttgactcattggactagtgcagaggctttaagtagtttaaaatgggcttttgcttttctaggtcattaacgttttttatttagtttctttagccaatagtggctgagtttcgcacttgattttcaatattttatagtaagaaatgacaaactgctttgtttcatttcataaacaaactctgcatttagataactattaaaggttgttaagatgaagatttactgtttctttgttactcgttggtacagctgtttgttttacttgcacatttgtacatatacttaatgttttcaagtgccttaattgtttaaaatctctggcttcaaagtttcttggggaaaggtcggtttacctcacattttttgtttccattagtaatattctaggtacctcacaaaatgtattatggtgccatggctgttagtttttagtgagtgctgtaggattaattcgaaaataggcagaattccattcctcccaaggtggcaaaaattagctatactgatgtaattgtcatttacctgggtatgaattccctgacacacattcatgtcaacatatgtagcaaattttgtgaaaacataacaatttgaagcttctgtaattttgagcactgctctaacaacaagcataatataaaattagttagattttgcaagtctacaaatgagctcttgcaacagaactcacagcctttttacttttttcccctaactttagcaatgtagtatcttgagccattaatttttgggtttttttaaaatccagaaggtatatagaaaccttttcagatttttcatctgatttgttcttgcagatgttcttctatcaaataccttattttaccttacagatatttgttgcacaggcagatactgctgtatttagacatttctatttcagttcattaaaaactgcaaaaccaatctgtatcatgtaccaaactgacttaaaataaatctacatgtttattg

SEQ ID NO: 6419 - DNA, 2088 bp, Homo sapiens
  III.47 (XM_048792)
gggcagtcgtaggagactctgaaaaagcaaataaatcaatgttaaatcagaaatgtgaatgtagtaaggggctgaagagacaggggaagagaatacatgggaaaatattgaaaaggacagagtgatcaaaaagagcagggacatgggagcattgggcagcacactgggagccatttcactttatgctcttattgtatgattgagaaaaaaatgtccttagtggttaagtggcttttcaatgccacatcagacttgttccatagcagttgaattaggggaaggtgaataagttggaggttggtgacaaggagagaagctggaacagagaggagagtcagaaccagagggaaatgagggactgagtaggcatctcagggtttttgaaggagtggattttctttgttgcagtcaggggaggtttgtctgttggctgcagaaagaagtcagaatagagatatcgtggggtaggtttgtttggaacagaaatcaaagaccaatttttctgagagaaggaaataacatctgcaaatgatatgctgtttttgctacttccattgttagctgttctcccaggtgatggcaatgcagacgggctcaaggagcctctctccttccatgtcacctggatcgcatccttttacaaccattcctggaaacaaaatctggtctcaggttggctgagtgatttgcagactcatacctgggacagcaattccagcaccatcgttttcctgtgcccctggtccaggggaaacttcagcaatgaggagtggaaggaactggaaacattattccgtatacgcaccattcggtcatttgagggaattcgtagatacgcccatgaattgcagtttgaatatccttttgagatacaggtgacaggaggctgtgagctgcactctggaaaggtctcaggaagcttcttgcagttagcttatcaaggatcagactttgtgagcttccagaacaattcatggttgccatatccagtggctgggaatatggccaagcatttctgcaaagtgctcaatcagaatcagcatgaaaatgacataacacacaatcttctcagtgacacctgcccacgtttcatcttgggtcttcttgatgcaggaaaggcacatctccagcggcaagtgaagcccgaggcctggctgtcccatggccccagtcctggccctggccatctgcagcttgtgtgccatgtctcaggattctacccaaagcccgtgtgggtgatgtggatgcggggtgagcaggagcagcagggcactcagcgaggggacatcttgcccagtgctgatgggacatggtatctccgcgcaaccctggaggtggccgctggggaggcagctgacctgtcctgtcgggtgaagcacagcagtctagagggccaggacatcgtcctctactgggagcatcacagttccgtgggcttcatcatcttggcggtgatagtgcctttacttcttctgataggtcttgcgctttggttcaggaaacgctgtttctgttaagacacaccatgagcctcctcgtcacccttctccttttggggtgagagaccagcagcccaagggctccagacacacctgaacacatcgtgatgatgacgtcctctcaactctctttgtaaaaattttgttatttttgcttgtttctgattaatgattgtttgtcaatataagctcaatttaattttgcaggatttgttgttctgacctgggttctgggacttttaaattcaaattttatctccagatggaatggggtcctagcaacctccacatgttcaactattaatggatcatcaggcctgttttagatatcccttactccagagggccttccctgacttacaagtgggaagcagtctcttcctggtctgaactcccgccacattttagccgtactttgctaactgtgctcctcacttcctcttcttcattgcagttatttagatcccccctttccttctaatttttcagctccttcaatgcaaagtacatgtatttttaatatatgcatccctggtgaaggatcttgcctgcatgaaacatgttctcaataaaactctgtgttgaattt

SEQ ID NO: 6420 - DNA, 1040 bp, Homo sapiens
  III.48 (NM_001779)
cgacgagccatggttgctgggagcgacgcggggcgggccctgggggtcctcagcgtggtctgcctgctgcactgctttggtttcatcagctgtttttcccaacaaatatatggtgttgtgtatgggaatgtaactttccatgtaccaagcaatgtgcctttaaaagaggtcctatggaaaaaacaaaaggataaagttgcagaactggaaaattctgaattcagagctttctcatcttttaaaaatagggtttatttagacactgtgtcaggtagcctcactatctacaacttaacatcatcagatgaagatgagtatgaaatggaatcgccaaatattactgataccatgaagttctttctttatgtgcttgagtctcttccatctcccacactaacttgtgcattgactaatggaagcattgaagtccaatgcatgataccagagcattacaacagccatcgaggacttataatgtactcatgggattgtcctatggagcaatgtaaacgtaactcaaccagtatatattttaagatggaaaatgatcttccacaaaaaatacagtgtactcttagcaatccattatttaatacaacatcatcaatcattttgacaacctgtatcccaagcagcggtcattcaagacacagatatgcacttatacccataccattagcagtaattacaacatgtattgtgctgtatatgaatggtattctgaaatgtgacagaaaaccagacagaaccaactccaattgattggtaacagaagatgaagacaacagcataactaaattattttaaaaactaaaaagccatctgatttctcatttgagtattacaatttttgaacaactgttggaaatgtaacttgaagcagctgctttaagaagaaatacccactaacaaagaacaagcattagttttggctgtcatcaacttattatatgactaggtgcttgctttttttgtcagtaaattgtttttactgatgatgtagatacttttgtaaataaatgtaaatatgtacacaagtg

SEQ ID NO: 6421 - DNA, 1946 bp, Homo sapiens; identical to SEQ ID NO: 6263
  III.49 (BC001506)

SEQ ID NO: 6422 - DNA, 1269 bp, Homo sapiens
  III.50 (XM_012608)
aggggacaggctgcagccggtgcagttacacgttttcctccaaggagcctcggacgttgtcacgggtttggggtcggggacagagcggtgaccatggccaggctggcgttgtctcctgtgcccagccactggatggtggcgttgctgctgctgctctcagctgagccagtaccagcagccagatcggaggaccggtaccggaatcccaaaggtagtgcttgttcgcggatctggcagagcccacgtttcatagccaggaaacggggcttcacggtgaaaatgcactgctacatgaacagcgcctccggcaatgtgagctggctctggaagcaggagatggacgagaatccccagcagctgaagctggaaaagggccgcatggaagagtcccagaacgaatctctcgccaccctcaccatccaaggcatccggtttgaggacaatggcatctacttctgtcagcagaagtgcaacaacacctcggaggtctaccagggctgcggcacagagctgcgagtcatgggattcagcaccttggcacagctgaagcagaggaacacgctgaaggatggtatcatcatgatccagacgctgctgatcatcctcttcatcatcgtgcctatcttcctgctgctggacaaggatgacagcaaggctggcatggaggaagatcacacctacgagggcctggacattgaccagacagccacctatgaggacatagtgacgctgcggacaggggaagtgaagtggtctgtaggtgagcacccaggccaggagtgagagccaggtcgccccatgacctgggtgcaggctccctggcctcagtgactgcttcggagctgcctggctcatggcccaacccctttcctggaccccccagctggcctctgaagctggcccaccagagctgccatttgtctccagcccctggtccccagctcttgccaaagggcctggagtagaaggacaacagggcagcaacttggagggagttctctggggatggacgggacccagccttctgggggtgctatgaggtgatccgtccccacacatgggatgggggaggcagagactggtccagagcccgcaaatggactcggagccgagggcctcccagcagagcttgggaagggccatggacccaactgggccccagaagagccacaggaacatcattcctctcccgcaaccactcccaccccagggaggccctggcctccagtgccttcccccgtggaataaacggtgtgtcctgagaaacca

SEQ ID NO: 6423 - DNA, 1549 bp, Homo sapiens
  III.51 (XM_002948)
aaaccctctgtaaagtaacagaagttagaaggggaaatgtcgcctctctgaagattacccaaagaaaaagtgatttgtcattgctttatagactgtaagaagagaacatctcagaagtggagtcttaccctgaaatcaaaggatttaaagaaaaagtggaatttttcttcagcaagctgtgaaactaaatccacaacctttggagacccaggaacaccctccaatctctgtgtgttttgtaaacatcactggagggtcttctacgtgagcaattggattgtcatcagccctgcctgttttgcacctgggaagtgccctggtcttacttgggtccaaattgttggctttcacttttgaccctaagcatctgaagccatgggccacacacggaggcagggaacatcaccatccaagtgtccatacctcaatttctttcagctcttggtgctggctggtctttctcacttctgttcaggtgttatccacgtgaccaaggaagtgaaagaagtggcaacgctgtcctgtggtcacaatgtttctgttgaagagctggcacaaactcgcatctactggcaaaaggagaagaaaatggtgctgactatgatgtctggggacatgaatatatggcccgagtacaagaaccggaccatctttgatatcactaataacctctccattgtgatcctggctctgcgcccatctgacgagggcacatacgagtgtgttgttctgaagtatgaaaaagacgctttcaagcgggaacacctggctgaagtgacgttatcagtcaaagctgacttccctacacctagtatatctgactttgaaattccaacttctaatattagaaggataatttgctcaacctctggaggttttccagagcctcacctctcctggttggaaaatggagaagaattaaatgccatcaacacaacagtttcccaagatcctgaaactgagctctatgctgttagcagcaaactggatttcaatatgacaaccaaccacagcttcatgtgtctcatcaagtatggacatttaagagtgaatcagaccttcaactggaatacaaccaagcaagagcattttcctgataacctgctcccatcctgggccattaccttaatctcagtaaatggaatttttgtgatatgctgcctgacctactgctttgccccaagatgcagagagagaaggaggaatgagagattgagaagggaaagtgtacgccctgtataacagtgtccgcagaagcaaggggctgaaaagatctgaaggtagcctccgtcatctcttctgggatacatggatcgtggggatcatgaggcattcttcccttaacaaatttaagctgttttacccactacctcaccttcttaaaaacctctttcagattaagctgaacagttacaagatggctggcatccctctcctttctccccatatgcaatttgcttaatgtaacctcttcttttgccatgtttccattctgccatcttgaattgtcttgtcagccaattcattatctattaaacactaatttgag

SEQ ID NO: 6424 - DNA, 2056 bp, Homo sapiens; identical to SEQ ID NO: 6360
  III.52 (XM_027978)

SEQ ID NO: 6425 - DNA, 3003 bp, Homo sapiens
  III.53 (NM_000760)
tcggggagagaagctggactgcagctggtttcaggaacttctcttgacgagaagagagaccaaggaggccaagcaggggctgggccagaggtgccaacatggggaaactgaggctcggctcggaaaggtgaagtaacttgtccaagatcacaaagctggtgaacatcaagttggtgctatggcaaggctgggaaactgcagcctgacttgggctgccctgatcatcctgctgctccccggaagtctggaggagtgcgggcacatcagtgtctcagcccccatcgtccacctgggggatcccatcacagcctcctgcatcatcaagcagaactgcagccatctggacccggagccacagattctgtggagactgggagcagagcttcagcccgggggcaggcagcagcgtctgtctgatgggacccaggaatctatcatcaccctgccccacctcaaccacactcaggcctttctctcctgctgcctgaactggggcaacagcctgcagatcctggaccaggttgagctgcgcgcaggctaccctccagccataccccacaacctctcctgcctcatgaacctcacaaccagcagcctcatctgccagtgggagccaggacctgagacccacctacccaccagcttcactctgaagagtttcaagagccggggcaactgtcagacccaaggggactccatcctggactgcgtgcccaaggacgggcagagccactgctgcatcccacgcaaacacctgctgttgtaccagaatatgggcatctgggtgcaggcagagaatgcgctggggaccagcatgtccccacaactgtgtcttgatcccatggatgttgtgaaactggagccccccatgctgcggaccatggaccccagccctgaagcggcccctccccaggcaggctgcctacagctgtgctgggagccatggcagccaggcctgcacataaatcagaagtgtgagctgcgccacaagccgcagcgtggagaagccagctgggcactggtgggccccctccccttggaggcccttcagtatgagctctgcgggctcctcccagccacggcctacaccctgcagatacgctgcatccgctggcccctgcctggccactggagcgactggagccccagcctggagctgagaactaccgaacgggcccccactgtcagactggacacatggtggcggcagaggcagctggaccccaggacagtgcagctgttctggaagccagtgcccctggaggaagacagcggacggatccaaggttatgtggtttcttggagaccctcaggccaggctggggccatcctgcccctctgcaacaccacagagctcagctgcaccttccacctgccttcagaagcccaggaggtggcccttgtggcctataactcagccgggacctctcgtcccactccggtggtcttctcagaaagcagaggcccagctctgaccagactccatgccatggcccgagaccctcacagcctctgggtaggctgggagccccccaatccatggcctcagggctatgtgattgagtggggcctgggcccccccagcgcgagcaatagcaacaagacctggaggatggaacagaatgggagagccacggggtttctgctgaaggagaacatcaggccctttcagctctatgagatcatcgtgactcccttgtaccaggacaccatgggaccctcccagcatgtctatgcctactctcaagaaatggctccctcccatgccccagagctgcatctaaagcacattggcaagacctgggcacagctggagtgggtgcctgagccccctgagctggggaagagcccccttacccactacaccatcttctggaccaacgctcagaaccagtccttctccgccatcctgaatgcctcctcccgtggctttgtcctccatggcctggagcccgccagtctgtatcacatccacctcatggctgccagccaggctggggccaccaacagtacagtcctcaccctgatgaccttgaccccagaggggtcggagctacacatcatcctgggcctgttcggcctcctgctgttgctcacctgcctctgtggaactgcctggctctgttgcagccccaacaggaagaatcccctctggccaagtgtcccagacccagctcacagcagcctgggctcctgggtgcccacaatcatggaggaggatgccttccagctgcccggccttggcacgccacccatcaccaagctcacagtgctggaggaggatgaaaagaagccggtgccctgggagtcccataacagctcagagacctgtggcctccccactctggtccagacctatgtgctccagggggacccaagagcagtttccacccagccccaatcccagtctggcaccagcgatcaggtcctttatgggcagctgctgggcagccccacaagcccagggccagggcactatctccgctgtgactccactcagcccctcttggcgggcctcacccccagccccaagtcctatgagaacctctggttccaggccagccccttggggaccctggtaaccccagccccaagccaggaggacgactgtgtctttgggccactgctcaacttccccctcctgcaggggatccgggtccatgggatggaggcgctggggagcttctagggcttcctggggttcccttcttgggcctgcctcttaaaggcctgagctagctggagaagaggggagggtccataagcccatgactaaaaactaccccagcccaggctctcaccatctccagtcaccagcatctccctctcctcccaatctccataggctgggcctcccaggcgatctgcatactttaaggaccagatcatgctccatccagccccacccaatggccttttgtgcttgtttcctataacttcagtattgtaaactagtttttggtttgcagtttttgttgttgtttatagacactcttgggtgta

SEQ ID NO: 6426 - DNA, 1973 bp, Homo sapiens; identical to SEQ ID NO: 6355
  III.54 (XM_012717)

SEQ ID NO: 6427 - DNA, 1894 bp, Homo sapiens
  III.55 (XM_051229)
ttttttttcttccctctagtgggcggggcagaggagttagccaagatgtgactttgaaaccctcagcgtctcagtgcccttttgttctaaacaaagaattttgtaattggttctaccaaagaaggatataatgaagtcactatgggaaaagatggggaggagagttgtaggattctacattaattctcttgtgcccttagcccactacttcagaatttcctgaagaaagcaagcctgaattggttttttaaattgctttaaaaattttttttaactgggttaatgcttgctgaattggaagtgaatgtccattcctttgcctcttttgcagatatacacttcagataactacaccgaggaaatgggctcaggggactatgactccatgaaggaaccctgtttccgtgaagaaaatgctaatttcaataaaatcttcctgcccaccatctactccatcatcttcttaactggcattgtgggcaatggattggtcatcctggtcatgggttaccagaagaaactgagaagcatgacggacaagtacaggctgcacctgtcagtggccgacctcctctttgtcatcacgcttcccttctgggcagttgatgccgtggcaaactggtactttgggaacttcctatgcaaggcagtccatgtcatctacacagtcaacctctacagcagtgtcctcatcctggccttcatcagtctggaccgctacctggccatcgtccacgccaccaacagtcagaggccaaggaagctgttggctgaaaaggtggtctatgttggcgtctggatccctgccctcctgctgactattcccgacttcatctttgccaacgtcagtgaggcagatgacagatatatctgtgaccgcttctaccccaatgacttgtgggtggttgtgttccagtttcagcacatcatggttggccttatcctgcctggtattgtcatcctgtcctgctattgcattatcatctccaagctgtcacactccaagggccaccagaagcgcaaggccctcaagaccacagtcatcctcatcctggctttcttcgcctgttggctgccttactacattgggatcagcatcgactccttcatcctcctggaaatcatcaagcaagggtgtgagtttgagaacactgtgcacaagtggatttccatcaccgaggccctagctttcttccactgttgtctgaaccccatcctctatgctttccttggagccaaatttaaaacctctgcccagcacgcactcacctctgtgagcagagggtccagcctcaagatcctctccaaaggaaagcgaggtggacattcatctgtttccactgagtctgagtcttcaagttttcactccagctaacacagatgtaaaagacttttttttatacgataaataacttttttttaagttacacatttttcagatataaaagactgaccaatattgtacagtttttattgcttgttggatttttgtcttgtgtttctttagtttttgtgaagtttaattgacttatttatataaattttttttgtttcatattgatgtgtgtctaggcaggacctgtggccaagttcttagttgctgtatgtctcgtggtaggactgtagaaaagggaactgaacattccagagcgtgtagtgaatcacgtaaagctagaaatgatccccagctgtttatgcatagataatctctccattcccgtggaacgtttttcctgttcttaagacgtgattttgctgtagaagatggcacttataaccaaagcccaaagtggtatagaaatgctggtttttcagttttcaggagtgggttgatttcagcacctacagtgtacagtcttgtattaagttgttaataaaagtacatgttaaactt

SEQ ID NO: 6428 - DNA, 2644 bp, Homo sapiens; identical to SEQ ID NO: 6304
  III.56 (NM_014326)

SEQ ID NO: 6429 - DNA, 2617 bp, Homo sapiens; identical to SEQ ID NO: 6254
  III.57 (XM_039625)

SEQ ID NO: 6430 - DNA, 2285 bp, Homo sapiens; identical to SEQ ID NO: 6265
  III.58 (XM_010177)

SEQ ID NO: 6431 - DNA, 1842 bp, Homo sapiens; identical to SEQ ID NO: 6364
  III.59 (XM_055699)

SEQ ID NO: 6432 - DNA, 5722 bp, Homo sapiens; identical to SEQ ID NO: 6349
  III.60 (XM_007189)

SEQ ID NO: 6433 - DNA, 2857 bp, Homo sapiens; identical to SEQ ID NO: 6344
  III.61 (XM_012039)

SEQ ID NO: 6434 - DNA, 1285 bp, Homo sapiens
  III.62 (XM_040683)
cctcctgagcagtcagcccgcgcgccggccggctccgttatggcgacccgcagccctggcgtcgtgattagtgatgatgaaccaggttatgaccttgatttattttgcatacctaatcattatgctgaggatttggaaagggtgtttattcctcatggactaattatggacaggactgaacgtcttgctcgagatgtgatgaaggagatgggaggccatcacattgtagccctctgtgtgctcaaggggggctataaattctttgctgacctgctggattacatcaaagcactgaatagaaatagtgatagatccattcctatgactgtagattttatcagactgaagagctattgtaatgaccagtcaacaggggacataaaagtaattggtggagatgatctctcaactttaactggaaagaatgtcttgattgtggaagatataattgacactggcaaaacaatgcagactttgctttccttggtcaggcagtataatccaaagatggtcaaggtcgcaagcttgctggtgaaaaggaccccacgaagtgttggatataagccagactttgttggatttgaaattccagacaagtttgttgtaggatatgcccttgactataatgaatacttcagggatttgaatcatgtttgtgtcattagtgaaactggaaaagcaaaatacaaagcctaagatgagagttcaagttgagtttggaaacatctggagtcctattgacatcgccagtaaaattatcaatgttctagttctgtggccatctgcttagtagagctttttgcatgtatcttctaagaattttatctgttttgtactttagaaatgtcagttgctgcattcctaaactgtttatttgcactatgagcctatagactatcagttccctttgggcggattgttgtttaacttgtaaatgaaaaaattctcttaaaccacagcactattgagtgaaacattgaactcatatctgtaagaaataaagagaagatatattagttttttaattggtattttaatttttatatatgcaggaaagaatagaagtgattgaatattgttaattataccaccgtgtgttagaaaagtaagaagcagtcaattttcacatcaaagacagcatctaagaagttttgttctgtcctggaattattttagtagtgtttcagtaatgttgactgtattttccaacttgttcaaattattaccagtgaatctttgtcagcagttcccttttaaatgcaaatcaataaattcccaaaaattt

SEQ ID NO: 6435 - DNA, 1114 bp, Homo sapiens; identical to SEQ ID NO: 6279
  III.63 (NM_017526)

SEQ ID NO: 6436 - DNA, 2530 bp, Homo sapiens
  III.64 (XM_049516)
aagaagatagccaaccaatgtgctattcaaactgccctgatgggcagtcaacagctaaaaccttcctcaccgtgtactggactccagaacgggtggaactggcacccctcccctcttggcagccagtgggcaagaaccttaccctacgctgccaggtggagggtggggcaccccgggccaacctcaccgtggtgctgctccgtggggagaaggagctgaaacgggagccagctgtgggggagcccgctgaggtcacgaccacggtgctggtgaggagagatcaccatggagccaatttctcgtgccgcactgaactggacctgcggccccaagggctggagctgtttgagaacacctcggccccctaccagctccagacctttgtcctgccagcgactcccccacaacttgtcagcccccgggtcctagaggtggacacgcaggggaccgtggtccagaggttgaaccccacagtcacctatggcaacgactccttctcggccaaggcctcagtcagtgtgaccgcagaggacgagggcacccagcggctgacgtgtgcagtaatactggggaaccagagccaggagacactgcagacagtgaccatctacagctttccggcgcccaacgtgattctgacgaagccagaggtctcagaagggaccgaggtgacagtgaagtgtgaggcccaccctagagccaaggtgacgctgaatggggttccagcccagccactgggcccgagggcccagctcctgctgaaggccaccccagaggacaacgggcgcagcttctcctgctctgcaaccctggaggtggccggccagcttatacacaagaaccagacccgggagcttcgtgtcctgtatggcccccgactggacgagagggattgtccgggaaactggacgtggccagaaaattcccagcagactccaatgtgccaggcttgggggaacccattgcccgagctcaagtgtctaaaggatggcactttcccactgcccatcggggaatcagtgactgtcactcgagatcttgagggcacctacctctgtcgggccaggagcactcaaggggaggtcacccgcaaggtgaccgtgaatgtgctctccccccggtatgagattgtcatcatcactgtggtagcagccgcagtcataatgggcactgcaggcctcagcacgtacctctataaccgccagcggaagatcaagaaatacagactacaacaggcccaaaaagggacccccatgaaaccgaacacacaagccacgcctccctgaacctatcccgggacagggcctcttcctcggccttcccatattggtggcagtggtgccacactgaacagagtggaagacatatgccatgcagctacacctaccggccctgggacgccggaggacagggcattgtcctcagtcagatacaacagcatttggggcccatctgatctgtagtcacatgactaagccaagaggaaggagcaagactcaagacatgattgatggatgttaaagtctagcctgatgagaggggaagtggtgggggagacatagccccaccatgaggacatacaactgggaaatactgaaacttgctgcctattgggtatgctgaggccccacagacttacagaagaagtggccctccatagacatggcactgctgtctactgaccccaacccttgatgatatgtatttattcatttgttattttaccagctatttattgagtgtcttttatgtaggctaaatgaacataggtctctggcctcacggagctcccagtcctaatcacattcaaggtcaccaggtacagttgtacaggttgtacactgcaggagagtgcctggcaaaaagatcaaatggggctgggacttctcattggccaacctgcctttccccagaaggagtgatttttctatcggcacaaaagcactatatggactggtaatggttacaggttcagagattacccagtgaggccttattcctcccttccccccaaaactgacacctttgttagccacctccccacccacatacatttctgccagtgttcacaatgacactcagcggtcatgtctggacatgagtgcccagggaatatgcccaagctatgccttgtcctcttgtcctgtttgcatttcactgggagcttgcactatgcagctccagtttcctgcagtgatcagggtcctgcaagcagtggggaagggggccaaggtattggaggactccctcccagctttggaagcctcatccgcgtgtgtgtgtgtgtgtatgtgtagacaagctctcgctctgtcacccaggctggagtgcagtggtgcaatcatggttcactgcagtcttgaccttttgggctcaagtgatcctcccacctcagcctcctgagtagctgggaccataggctcacaacaccacacctggcaaatttgattttttttttttttccagagacggggtctcgcaacattgcccagacttcctttgtgttagttaataaagctttctcaactgc

SEQ ID NO: 6437 - DNA, 1734 bp, Homo sapiens
  III.65 (XM_049531)
ctctgtcagaatggccaccatggtaccatccgtgttgtggcccagggcctgctggactctgctggtctgctgtctgctgaccccaggtgtccaggggcaggagttccttttgcgggtggagccccagaaccctgtgctctctgctggagggtccctgtttgtgaactgcagtactgattgtcccagctctgagaaaatcgccttggagacgtccctatcaaaggagctggtggccagtggcatgggctgggcagccttcaatctcagcaacgtgactggcaacagtcggatcctctgctcagtgtactgcaatggctcccagataacaggctcctctaacatcaccgtgtacgggctcccggagcgtgtggagctggcacccctgcctccttggcagccggtgggccagaacttcaccctgcgctgccaagtggaggatgggtcgccccggaccagcctcacggtggtgctgcttcgctgggaggaggagctgagccggcagcccgcagtggaggagccagcggaggtcactgccactgtgctggccagcagagacgaccacggagcccctttctcatgccgcacagaactggacatgcagccccaggggctgggactgttcgtgaacacctcagccccccgccagctccgaacctttgtcctgcccgtgacccccccgcgcctcgtggccccccggttcttggaggtggaaacgtcgtggccggtggactgcaccctagacgggctttttccagcctcagaggcccaggtctacctggcgctgggggaccagatgctgaatgcgacagtcatgaaccacggggacacgctaacggccacagccacagccacggcgcgcgcggatcaggagggtgcccgggagatcgtctgcaacgtgaccctagggggcgagagacgggaggcccgggagaacttgacggtctttaggcttcctaggacccattgtgaacctcagcgagcccaccgcccatgaggggtccacagtgaccgtgagttgcatggctggggctcgagtccaggtcacgctggacggagttccggccgcggccccggggcagccagctcaacttcagctaaatgctaccgagagtgacgacggacgcagcttcttctgcagtgccactctcgaggtggacggcgagttcttgcacaggaacagtagcgtccagctgcgagtcctgtatggtcccaaaattgaccgagccacatgcccccagcacttgaaatggaaagataaaacgagacacgtcctgcagtgccaagccaggggcaacccgtaccccgagctgcggtgtttgaaggaaggctccagccgggaggtgccggtggggatcccgttcttcgtcaacgtaacacataatggtacttatcagtgccaagcgtccagctcacgaggcaaatacaccctggtcgtggtgatggacattgaggctgggagctcccactttgtccccgtcttcgtggcggtgttactgaccctgggcgtggtgactatcgtactggccttaatgtacgtcttcagggagcaccaacggagcggcagttaccatgttagggaggagagcacctatctgcccctcacgtctatgcagccgacagaagcaatgggggaagaaccgtccagagctgagtgacgctgggatccgggatcaaagttggcgggggcttggctgtgccctcagattccgcaccaataaagccttcaaactccct

SEQ ID NO: 6438 - DNA, 1218 bp, Homo sapiens
  III.66 (XM_041744)
ctcggctcaccatgtgtcactctcgcagctgccacccgaccatgaccatcctgcaggccccgaccccggccccctccaccatcccgggaccccggcggggctccggtcctgagatcttcaccttcgaccctctcccggagcccgcagcggcccctgccgggcgccccagcgcctctcgcgggcaccgaaagcgcagccgcagggttctctaccctcgagtggtccggcgccagctgccagtcgaggaaccgaacccagccaaaaggcttctctttctgctgctcaccatcgtcttctgccagatcctgatggctgaagagggtgtgccggcgcccctgcctccagaggacgcccctaacgccgcatccctggcgcccacccctgtgtcccccgtcctcgagccctttaatctgacttcggagccctcggactacgctctggacctcagcactttcctccagcaacacccggccgccttctaactgtgactccccgcactccccaaaaagaatccgaaaaaccacaaagaaacaccaggcgtacctggtgcgcgagagcgtatccccaactgggacttccgaggcaacttgaactcagaacactacagcggagacgccacccggtgcttgaggcgggaccgaggcgcacagagaccgaggcgcatagagaccgaggcacagcccagctggggctaggcccggtgggaaggagagcgtcgttaatttatttcttattgctcctaattaatatttatatgtatttatgtacgtcctcctaggtgatggagatgtgtacgtaatatttattttaacttatgcaagggtgtgagatgttccccctgctgtaaatgcaggtctcttggtatttattgagctttgtgggactggtggaagcaggacacctggaactgcggcaaagtaggagaagaaatggggaggactcgggtgggggaggacgtcccggctgggatgaagtctggtggtgggtcgtaagtttaggaggtgactgcatcctccagcatctcaactccgtctgtctactgtgtgagacttcggcggaccattaggaatgagatccgtgagatccttccatcttcttgaagtcgcctttagggtggctgcgaggtagagggttgggggttggtgggctgtcacggagcgactgtcgagatcgcctagtatgttctgtgaacacaaataaaattgatttactgtctgc

SEQ ID NO: 6439 - DNA, 2827 bp, Homo sapiens
  III.67 (XM_048562)
agaagaggcggcgcgtgcgtagaggggcggtgagagctaagaggggcagcgcgtgtgcagaggggcggtgtgacttaggacggggcgatggcggctgagaggagctgcgcgtgcgcgaacatgtaactggtgggatctgcggcggctcccagatgatggtcgtcctcctgggcgcgacgaccctagtgctcgtcgccgtggcgccatgggtgttgtccgcagccgcaggtggaaaaaatctaaaatctcctcaaaaagtagaggtcgacatcatagatgacaactttatcctgaggtggaacaggagcgatgagtctgtcgggaatgtgactttttcattcgattatcaaaaaactgggatggataattggataaaattgtctgggtgtcagaatattactagtaccaaatgcaacttttcttcactcaagctgaatgtttatgaagaaattaaattgcgtataagagcagaaaaagaaaacacttcttcatggtatgaggttgactcatttacaccatttcgcaaagctcagattggtcctccagaagtacatttagaagctgaagataaggcaatagtgatacacatctctcctggaacaaaagatagtgttatgtgggctttggatggtttaagctttacatatagcttagttatctggaaaaactcttcaggtgtagaagaaaggattgaaaatatttattccagacataaaatttataaactctcaccagagactacttattgtctaaaagttaaagcagcactacttacgtcatggaaaattggtgtctatagtccagtacattgtataaagaccacagttgaaaatgaactacctccaccagaaaatatagaagtcagtgtccaaaatcagaactatgttcttaaatgggattatacatatgcaaacatgacctttcaagttcagtggctccacgcctttttaaaaaggaatcctggaaaccatttgtataaatggaaacaaatacctgactgtgaaaatgtcaaaactacccagtgtgtctttcctcaaaacgttttccaaaaaggaatttaccttctccgcgtacaagcatctgatggaaataacacatctttttggtctgaagagataaagtttgatactgaaatacaagctttcctacttcctccagtctttaacattagatcccttagtgattcattccatatctatatcggtgctccaaaacagtctggaaacacgcctgtgatccaggattatccactgatttatgaaattattttttgggaaaacacttcaaatgctgagagaaaaattatcgagaaaaaaactgatgttacagttcctaatttgaaaccactgactgtatattgtgtgaaagccagagcacacaccatggatgaaaagctgaataaaagcagtgtttttagtgacgctgtatgtgagaaaacaaaaccaggaaatacctctaaaatttggcttatagttggaatttgtattgcattatttgctctcccgtttgtcatttatgctgcgaaagtcttcttgagatgcatcaattatgtcttctttccatcacttaaaccttcttccagtatagatgagtatttctctgaacagccattgaagaatcttctgctttcaacttctgaggaacaaatcgaaaaatgtttcataattgaaaatataagcacaattgctacagtagaagaaactaatcaaactgatgaagatcataaaaaatacagttcccaaactagccaagattcaggaaattattctaatgaagatgaaagcgaaagtaaaacaagtgaagaactacagcaggactttgtatgaccagaaatgaactgtgtcaagtataaggtttttcagcaggagttacactgggagcctgaggtcctcaccttcctctcagtaactacagagaggacgtttccctgtttagggaaagaaaaaacatcttcagatcataggtcctaaaaatacgggcaagctcttaactatttaaaaatgaaattacaggcccgggcacggtggctcacacctgtaatcccagcactttgggaggctgaggcaggcagatcatgaggtcaagagatcgagaccagcctggccaacgtggtgaaaccccatctctactaaaaatacaaaaattagccgggtgtggtggcgcgcgcctgttgtcttagctactcaggaggctgaggcaggagaatcgcttgaaaacaggaggtggaggttgcagtgagccgagatcacgccactgcactccagcctggtgacagcgtgagactctttaaaaaaagaaattaaaagagttgagacaaacgtttcctacattcttttccatgtgtaaaatcatgaaaaagcctgtcaccggacttgcattggatgagatgagtcagaccaaaacagtggccacccgtcttcctcctgtgagcctaagtgcagccgtgctagctgcgcaccgtggctaaggatgacgtctgtgttcctgtccatcactgatgctgctggctactgcatgtgccacacctgtctgttcgccattcctaacattctgtttcattcttcctcgggagatatttcaaacatttggtcttttcttttaacactgagggtaggcccttaggaaatttatttaggaaagtctgaacacgttatcacttggttttctggaaagtagcttaccctagaaaacagctgcaaatgccagaaagatgatccctaaaaatgttgagggacttctgttcattcatcccgagaacattggcttccacatcacagtatctacccttacatggtttaggattaaagccaggcaatcttttactatg

SEQ ID NO: 6440 - DNA, 3632 bp, Homo sapiens
  III.68 (XM_006447)
agctggaggcgcgcaggccggctccgctccggccccggacgatgcggcgcgcccaggatgctgccgtgcctcgtagtgctgctggcggcgctcctcagcctccgtcttggctcagacgctcatgggacagagctgcccagccctccgtctgtgtggtttgaagcagaatttttccaccacatcctccactggacacccatcccaaatcagtctgaaagtacctgctatgaagtggcgctcctgaggtatggaatagagtcctggaactccatctccaactgtagccagaccctgtcctatgaccttaccgcagtgaccttggacctgtaccacagcaatggctaccgggccagagtgcgggctgtggacggcagccggcactccaactggaccgtcaccaacacccgcttctctgtggatgaagtgactctgacagttggcagtgtgaacctagagatccacaatggcttcatcctcgggaagattcagctacccaggcccaagatggcccccgcaaatgacacatatgaaagcatcttcagtcacttccgagagtatgagattgccattcgcaaggtgccgggaaacttcacgttcacacacaagaaagtaaaacatgaaaacttcagcctcctaacctctggagaagtgggagagttctgtgtccaggtgaaaccatctgtcgcttcccgaagtaacaaggggatgtggtctaaagaggagtgcatctccctcaccaggcagtatttcaccgtgaccaacgtcatcatcttctttgcctttgtcctgctgctctccggagccctcgcctactgcctggccctccagctgtatgtgcggcgccgaaagaagctacccagtgtcctgctcttcaagaagcccagccccttcatcttcatcagccagcgtccctccccagagacccaagacaccatccacccgcttgatgaggaggcctttttgaaggtgtccccagagctgaagaacttggacctgcacggcagcacagacagtggctttggcagcaccaagccatccctgcagactgaagagccccagttcctcctccctgaccctcacccccaggctgacagaacgctgggaaacagggagccccctgtgctgggggacagctgcagtagtggcagcagcaatagcacagacagcgggatctgcctgcaggagcccagcctgagccccagcacagggcccacctgggagcaacaggtggggagcaacagcaggggccaggatgacagtggcattgacttagttcaaaactctgagggccgggctggggacacacagggtggctcggccttgggccaccacagtcccccggagcctgaggtgcctggggaagaagacccagctgctgtggcattccagggttacctgaggcagaccagatgtgctgaagagaaggcaaccaagacaggctgcctggaggaagaatcgcccttgacagatggccttggccccaaattcgggagatgcctggttgatgaggcaggcttgcatccaccagccctggccaagggctatttgaaacaggatcctctagaaatgactctggcttcctcaggggccccaacgggacagtggaaccagcccactgaggaatggtcactcctggccttgagcagctgcagtgacctgggaatatctgactggagctttgcccatgaccttgcccctctaggctgtgtggcagccccaggtggtctcctgggcagctttaactcagacctggtcaccctgcccctcatctctagcctgcagtcaagtgagtgactcgggctgagaggctgcttttgattttagccatgcctgctcctctgcctggaccaggaggagggcccctggggcagaagttaggcacgaggcagtctgggcacttttctgcaagtccactggggctggccccagccaggccctgcagggctggtcagggtgtctggggcaggaggaggccaactcactgaactagtgcagggtatgtgggtggcactgacctgttctgttgactggggccctgcagactctggcagagctgagaagggcagggaccttctccctcctaggaactctttcctgtatcataaaggattatttgctcaggggaaccatggggctttctggagttgtggtgaggccaccaggctgaagtcagctcagacccagacctccctgcttaggccactcgagcatcagagcttccagcaggaggaagggctgtaggaatggaagcttcagggccttgctgctggggtcatttttaggggaaaaaggaggatatgatggtcacatggggaacctcccctcatcgggcctctggggcaggaagcttgtcactggaagatcttaaggtatatattttctggacactcaaacacatcataatggattcactgaggggagacaaagggagccgagaccctggatggggcttccagctcagaacccatccctctggtgggtacctctggcacccatctgcaaatatctccctctctccaacaaatggagtagcatccccctggggcacttgctgaggccaagccactcacatcctcactttgctgccccaccatcttgctgacaacttccagagaagccatggttttttgtattggtcataactcagccctttgggcggcctctgggcttgggcaccagctcatgccagccccagagggtcagggttggaggcctgtgcttgtgtttgctgctaatgtccagctacagacccagaggataagccactgggcactgggctggggtccctgccttgttggtgttcagctgtgtgattttggactagccacttgtcagagggcctcaatctcccatctgtgaaataaggactccacctttaggggaccctccatgtttgctgggtattagccaagctggtcctgggagaatgcagatactgtccgtggactaccaagctggcttgtttcttatgccagaggctaacagatccaatgggagtccatggtgtcatgccaagacagtatcagacacagccccagaagggggcattatgggccctgcctccccataggccatttggactctgccttcaaacaaaggcagttcagtccacaggcatggaagctgtgaggggacaggcctgtgcgtgccatccagagtcatctcagccctgcctttctctggagcattctgaaaacagatattctggcccagggaatccagccatgacccccacccctctgccaaagtactcttaggtgccagtctggtaactgaactccctctggaggcaggcttgagggaggattcctcagggttcccttgaaagctttatttatttattttgttcatttatttattggagaggcagcattgcacagtgaaagaattctggatatctcaggagccccgaaattctagctctgactttgctgtttccagtggtatgaccttggagaagtcacttatcctcttggagcctcagtttcctcatctgcagaataatgactgacttgtctaattcgtagggatgtgaggttctgctgaggaaatgggtatgaatgtgccttgaacacaaagctctgtcaataagtgatacatgttttttattccaataaattgtcaagaccaca

SEQ ID NO: 6441 - DNA, 3175 bp, Homo sapiens
  III.69 (M90391)
tgcttaaaaaaacacaacaggattttcgaagaatcctttcttagaaaacaaacaaaaaaaccaaacaaaaacgtactttctccccactagtttacaccacaggaagcgagagagctgctgccactgctgctaccacaggaagacacagcagggagaagccctagtgcctctgccggctgcccaggacctggtatcggcccacagaccaagtcctccacagagggcgagccagggtggagaagagccagcccagtgacccaaacatccccgataaaacacccactgcttaagaggcaggctcggatggactatagctttgataccacagccgaagacccttgggttaggatttctgactgcatcaaaaacttatttagccccatcatgagtgagaaccatggccacatgcctctacagcccaatgccagcctgaatgaagaagaagggacacagggccacccagatgggaccccaccaaagctggacaccgccaatggcactcccaaagtttacaagtcagcagacagcagcactgtgaagaaaggtcctcctgtggctcccaagccagcctggtttcgccaaagcttgaaaggtttgaggaatcgtgcttcagagccaagagggctccctgatcctgccttgtccacccagccagcacctgcttccagggagcacctaggatcacacatccgggcctcctcctcctcctcctccatcaggcagagaatcagctcctttgaaacctttggctcctctcaactgcctgacaaaggagcccagagactgagcctccagccctcctctggggaggcagcaaaacctcttgggaagcatgaggaaggacggttttctggactcttggggcgaggggctgcacccactcttgtgccccagcagcctgagcaagtactgtcctcggggtcccctgcagcctccgaggccagagacccaggtgtgtctgagtcccctcccccagggcggcagcccaatcagaaaactttcccccctggcccggacccgctcctaaggctgctgtcaacacaggctgaggaatctcaaggcccagtgctcaagatgcctagccagcgagcacggagcttccccctgaccaggtcccagtcctgtgagacgaagctacttgacgaaaagaccagcaaactctattctatcagcagccaagtgtcatcggctgtcatgaaatccttgctgtgccttccatcttctatctcctgtgcccagactccctgcatccccaaggcaggggcatctccaacatcatcatccaacgaagactcagctgcaaatggttctgctgaaacatctgccttggacacggggttctcgctcaacctttcagagctgagagaatatacagagggtctcacggaagccaaggaagacgatgatggggaccacagttcccttcagtctggtcagtccgttatctccctgctgagctcagaagaattaaaaaaactcatcgaggaggtgaaggttctggatgaagcaacattaaagcaattagacggcatccatgtcaccatcttacacaaggaggaaggtgctggtcttgggttcagcttggcaggaggagcagatctagaaaacaaggtgattacggttcacagagtgtttccaaatgggctggcctcccaggaagggactattcagaagggcaatgaggttctttccatcaacggcaagtctctcaaggggaccacgcaccatgatgccttggccatcctccgccaagctcgagagcccaggcaagctgtgattgtcacaaggaagctgactccagaggccatgcccgacctcaactcctccactgactctgcagcctcagcctctgcagccagtgatgtttctgtagaatctacagcagaggccacagtctgcacggtgacactggagaagatgtcggcagggctgggcttcagcctggaaggagggaagggctccctacacggagacaagcctctcaccattaacaggattttcaaaggagcagcctcagaacaaagtgagacagtccagcctggagatgaaatcttgcagctgggtggcactgccatgcagggcctcacacggtttgaagcctggaacatcatcaaggcactgcctgatggacctgtcacgattgtcatcaggagaaaaagcctccagtccaaggaaaccacagctgctggagactcctaggcaggacatgctgaagccaaagccaataacacacagctaacacacagctcccataaccgctgattctcagggtctctgctgccgccccacccagatgggggaaagcacaggtgggcttcccagtggctgctgcccaggcccagaccttctaggacgccacccagcaaaaggttgttcctaaaataagggcagagtcacactggggcagctgatacaaattgcagactgtgtaaaaagagagcttaatgataatattgtggtgccacaaataaaatggatttattagaattccatatgacattcatgcctggcttcgcaaaatgtttcaagtactgtaactgtgtcatgattcacccccaaacagtgacatttatttttctcatgaatctgcaatgtgggcagagattggaatgggcagctcatctctgtcccacttggcatcagctggcgtcatgcaaagtcatgcaaaggctgggaccacctgagatcattcactcatacatctggccgttgatgttggctgggaactcacctggggctgctggcctgaatgcttataggtggcctctccttgtggcctgggctcctcacaacatggtgtctggattcccaggatgagcatcccaggatcgcaagagccacgtagaagctgcatcttgtttatacctttgccttggaagttgcatggcatcacctccaccatactccatcagttagagctgacacaaacctgcctgggtttaaggggagaggaaatattgctggggtcatttatgaaaaatacagtttgtcacatgaaacatttgcaaaattgtttttggttggattggagaagtaatcctagggaagggtggtggagccagtaaatagaggagtacaggtgaagcaccaagctcaaagcgtggacaggtgtgccgacagaaggaaccagcgtgtatatgagggtatcaaataaaattgctactacttacctacc

SEQ ID NO: 6442 - DNA, 1036 bp, Homo sapiens
  III.70 (XM_002765)
gccacgtgctgctgggtctcagtcctccacttcccgtgtcctctggaagttgtcaggagcaatgttgcgcttgtacgtgttggtaatgggagtttctgccttcacccttcagcctgcggcacacacaggggctgccagaagctgccggtttcgtgggaggcattacaagcgggagttcaggctggaaggggagcctgtagccctgaggtgcccccaggtgccctactggttgtgggcctctgtcagcccccgcatcaacctgacatggcataaaaatgactctgctaggacggtcccaggagaagaagagacacggatgtgggcccaggacggtgctctgtggcttctgccagccttgcaggaggactctggcacctacgtctgcactactagaaatgcttcttactgtgacaaaatgtccattgagctcagagtttttgagaatacagatgctttcctgccgttcatctcatacccgcaaattttaaccttgtcaacctctggggtattagtatgccctgacctgagtgaattcacccgtgacaaaactgacgtgaagattcaatggtacaaggattctcttcttttggataaagacaatgagaaatttctaagtgtgagggggaccactcacttactcgtacacgatgtggccctggaagatgctggctattaccgctgtgtcctgacatttgcccatgaaggccagcaatacaacatcactaggagtattgagctacgcatcaagaaaaaaaaagaagagaccattcctgtgatcatttcccccctcaagaccatatcagcttctctggggtcaagactgacaatcccgtgtaaggtgtttctgggaaccggcacacccttaaccaccatgctgtggtggacggccaatgacacccacatagagagcgcctacccgggaggccgcgtgaccgaggggccacgccagtaagtgggccagggtcttctgttgagaactctgtgggtttcgctcttccttttggagacagttatcactatgacccacataccacat

SEQ ID NO: 6443 - DNA, 3597 bp, Homo sapiens
  III.71 (NM_000418)
ggcgaatggagcaggggcgcgcagataattaaagatttacacacagctggaagaaatcatagagaagccgggcgtggtggctcatgcctataatcccagcacttttggaggctgaggcgggcagatcacttgagatcaggagttcgagaccagcctggtgccttggcatctcccaatggggtggctttgctctgggctcctgttccctgtgagctgcctggtcctgctgcaggtggcaagctctgggaacatgaaggtcttgcaggagcccacctgcgtctccgactacatgagcatctctacttgcgagtggaagatgaatggtcccaccaattgcagcaccgagctccgcctgttgtaccagctggtttttctgctctccgaagcccacacgtgtatccctgagaacaacggaggcgcggggtgcgtgtgccacctgctcatggatgacgtggtcagtgcggataactatacactggacctgtgggctgggcagcagctgctgtggaagggctccttcaagcccagcgagcatgtgaaacccagggccccaggaaacctgacagttcacaccaatgtctccgacactctgctgctgacctggagcaacccgtatccccctgacaattacctgtataatcatctcacctatgcagtcaacatttggagtgaaaacgacccggcagatttcagaatctataacgtgacctacctagaaccctccctccgcatcgcagccagcaccctgaagtctgggatttcctacagggcacgggtgagggcctgggctcagtgctataacaccacctggagtgagtggagccccagcaccaagtggcacaactcctacagggagcccttcgagcagcacctcctgctgggcgtcagcgtttcctgcattgtcatcctggccgtctgcctgttgtgctatgtcagcatcaccaagattaagaaagaatggtgggatcagattcccaacccagcccgcagccgcctcgtggctataataatccaggatgctcaggggtcacagtgggagaagcggtcccgaggccaggaaccagccaagtgcccacactggaagaattgtcttaccaagctcttgccctgttttctggagcacaacatgaaaagggatgaagatcctcacaaggctgccaaagagatgcctttccagggctctggaaaatcagcatggtgcccagtggagatcagcaagacagtcctctggccagagagcatcagcgtggtgcgatgtgtggagttgtttgaggccccggtggagtgtgaggaggaggaggaggtagaggaagaaaaagggagcttctgtgcatcgcctgagagcagcagggatgacttccaggagggaagggagggcattgtggcccggctaacagagagcctgttcctggacctgctcggagaggagaatgggggcttttgccagcaggacatgggggagtcatgccttcttccaccttcgggaagtacgagtgctcacatgccctgggatgagttcccaagtgcagggcccaaggaggcacctccctggggcaaggagcagcctctccacctggagccaagtcctcctgccagcccgacccagagtccagacaacctgacttgcacagagacgcccctcgtcatcgcaggcaaccctgcttaccgcagcttcagcaactccctgagccagtcaccgtgtcccagagagctgggtccagacccactgctggccagacacctggaggaagtagaacccgagatgccctgtgtcccccagctctctgagccaaccactgtgccccaacctgagccagaaacctgggagcagatcctccgccgaaatgtcctccagcatggggcagctgcagcccccgtctcggcccccaccagtggctatcaggagtttgtacatgcggtggagcagggtggcacccaggccagtgcggtggtgggcttgggtcccccaggagaggctggttacaaggccttctcaagcctgcttgccagcagtgctgtgtccccagagaaatgtgggtttggggctagcagtggggaagaggggtataagcctttccaagacctcattcctggctgccctggggaccctgccccagtccctgtccccttgttcacctttggactggacagggagccacctcgcagtccgcagagctcacatctcccaagcagctccccagagcacctgggtctggagccgggggaaaaggtagaggacatgccaaagcccccacttccccaggagcaggccacagacccccttgtggacagcctgggcagtggcattgtctactcagcccttacctgccacctgtgcggccacctgaaacagtgtcatggccaggaggatggtggccagacccctgtcatggccagtccttgctgtggctgctgctgtggagacaggtcctcgccccctacaacccccctgagggccccagacccctctccaggtggggttccactggaggccagtctgtgtccggcctccctggcaccctcgggcatctcagagaagagtaaatcctcatcatccttccatcctgcccctggcaatgctcagagctcaagccagacccccaaaatcgtgaactttgtctccgtgggacccacatacatgagggtctcttaggtgcatgtcctcttgttgctgagtctgcagatgaggactagggcttatccatgcctgggaaatgccacctcctggaaggcagccaggctggcagatttccaaaagacttgaagaaccatggtatgaaggtgattggccccactgacgttggcctaacactgggctgcagagactggaccccgcccagcattgggctgggctcgccacatcccatgagagtagagggcactgggtcgccgtgccccacggcaggcccctgcaggaaaactgaggcccttgggcacctcgacttgtgaacgagttgttggctgctccctccacagcttctgcagcagactgtccctgttgtaactgcccaaggcatgttttgcccaccagatcatggcccacgtggaggcccacctgcctctgtctcactgaactagaagccgagcctagaaactaacacagccatcaagggaatgacttgggcggccttgggaaatcgatgagaaattgaacttcagggagggtggtcattgcctagaggtgctcattcatttaacagagcttccttaggttgatgctggaggcagaatcccggctgtcaaggggtgttcagttaaggggagcaacagaggacatgaaaaattgctatgactaaagcagggacaatttgctgccaaacacccatgcccagctgtatggctgggggctcctcgtatgcatggaacccccagaataaatatgctcagccaccctgtgggccgggcaatccagacagcaggcataaggcaccagttaccctgcatgttggcccagacctcaggtgctagggaaggcgggaaccttgggttgagtaatgctcgtctgtgtgttttagtttcatcacctgttatctgtgtttgctgaggagagtggaacagaaggggtggagttttgtataaataaagtttctttgtctc

SEQ ID NO: 6444 - DNA, 1108 bp, Homo sapiens
  III.72 (XM_057491)
ccgggaacgaaagagaagctctatctcccctccaggagcccagctatgaactccttctccacaagcgccttcggtccagttgccttctccctggggctgctcctggtgttgcctgctgccttccctgccccagtacccccaggagaagattccaaagatgtagccgccccacacagacagccactcacctcttcagaacgaattgacaaacaaattcggtacatcctcgacggcatctcagccctgagaaaggagacatgtaacaagagtaacatgtgtgaaagcagcaaagaggcactggcagaaaacaacctgaaccttccaaagatggctgaaaaagatggatgcttccaatctggattcaatgaggagacttgcctggtgaaaatcatcactggtcttttggagtttgaggtatacctagagtacctccagaacagatttgagagtagtgaggaacaagccagagctgtgcagatgagtacaaaagtcctgatccagttcctgcagaaaaaggcaaagaatctagatgcaataaccacccctgacccaaccacaaatgccagcctgctgacgaagctgcaggcacagaaccagtggctgcaggacatgacaactcatctcattctgcgcagctttaaggagttcctgcagtccagcctgagggctcttcggcaaatgtagcatgggcacctcagattgttgttgttaatgggcattccttcttctggtcagaaacctgtccactgggcacagaacttatgttgttctctatggagaactaaaagtatgagcgttaggacactattttaattatttttaatttattaatatttaaatatgtgaagctgagttaatttatgtaagtcatatttatatttttaagaagtaccacttgaaacattttatgtattagttttgaaataataatggaaagtggctatgcagtttgaatatcctttgtttcagagccagatcatttcttggaaagtgtaggcttacctcaaataaatggctaacttatacatatttttaaagaaatatttatattgtatttatataatgtataaatggtttttataccaataaatggcattttaaaaaattc

SEQ ID NO: 6445 - DNA, 3242 bp, Homo sapiens; identical to SEQ ID NO: 6335
  III.73 (NM_002184)

SEQ ID NO: 6446 - DNA, 2502 bp, Homo sapiens; identical to SEQ ID NO: 6353
  III.74 (NM_000634)

SEQ ID NO: 6447 - DNA, 1584 bp, Homo sapiens
  III.75 (NM_006084)
gatcagagggcgatcagctggacagcaactcaggatggcatcaggcagggcacgctgcacccgaaaactccggaactgggtggtggagcaagtggagagtgggcagtttcccggagtgtgctgggatgatacagctaagaccatgttccggattccctggaaacatgcaggcaagcaggacttccgggaggaccaggatgctgccttcttcaaggcctgggcaatatttaagggaaagtataaggagggggacacaggaggtccagctgtctggaagactcgcctgcgctgtgcactcaacaagagttctgaatttaaggaggttcctgagaggggccgcatggatgttgctgagccctacaaggtgtatcagttgctgccaccaggaatcgtctctggccagccagggactcagaaagtaccatcaaagcgacagcacagttctgtgtcctctgagaggaaggaggaagaggatgccatgcagaactgcacactcagtccctctgtgctccaggactccctcaataatgaggaggagggggccagtgggggagcagtccattcagacattgggagcagcagcagcagcagcagccctgagccacaggaagttacagacacaactgaggccccctttcaaggggatcagaggtccctggagtttctgcttcctccagagccagactactcactgctgctcaccttcatctacaacgggcgcgtggtgggcgaggcccaggtgcaaagcctggattgccgccttgtggctgagccctcaggctctgagagcagcatggagcaggtgctgttccccaagcctggcccactggagcccacgcagcgcctgctgagccagcttgagaggggcatcctagtggccagcaacccccgaggcctcttcgtgcagcgcctttgccccatccccatctcctggaatgcaccccaggctccacctgggccaggcccgcatctgctgcccagcaacgagtgcgtggagctcttcagaaccgcctacttctgcagagacttggtcaggtactttcagggcctgggccccccaccgaagttccaggtaacactgaatttctgggaagagagccatggctccagccatactccacagaatcttatcacagtgaagatggagcaggcctttgcccgatacttgctggagcagactccagagcagcaggcagccattctgtccctggtgtagagcctgggggacccatcttccacctcacctctttgttcttcctgtctcctttgaagtagactcattcttcacacgattgacctgtcctctttgtgataattctcagtagttgtccgtgataatcgtgtcctgaaaatcctcgcacacactggctggtggagaactcaaggctaattttttatcctttttttttttttatttttgagatatacgccctctttcatctgtaagggactaggaaattccaaatggtgtgaacccagggggcctttccctcttccctgacctcccaactctaaagccaagcactttatatttttctcttagatattcactaaggacttaaaataaaatttttttgaaagagg

SEQ ID NO: 6448 - DNA, 3334 bp, Homo sapiens; identical to SEQ ID NO: 6299
  III.76 (XM_045985)

SEQ ID NO: 6449 - DNA, 4490 bp, Homo sapiens; identical to SEQ ID NO: 6302
  III.77 (XM_008432)

SEQ ID NO: 6450 - DNA, 4201 bp, Homo sapiens
  III.78 (XM_028642)
caggacagggaagagcgggcgctatggggagccggacgccagagtcccctctccacgccgtgcagctgcgctggggcccccggcgccgacccccgctgctgccgctgctgttgctgctgctgccgccgccacccagggtcgggggcttcaacttagacgcggaggccccagcagtactctcggggcccccgggctccttcttcggattctcagtggagttttaccggccgggaacagacggggtcagtgtgctggtgggagcacccaaggctaataccagccagccaggagtgctgcagggtggtgctgtctacctctgtccttggggtgccagccccacacagtgcacccccattgaatttgacagcaaaggctctcggctcctggagtcctcactgtccagctcagagggagaggagcctgtggagtacaagtccttgcagtggttcggggcaacagttcgagcccatggctcctccatcttggcatgcgctccactgtacagctggcgcacagagaaggagccactgagcgaccccgtgggcacctgctacctctccacagataacttcacccgaattctggagtatgcaccctgccgctcagatttcagctgggcagcaggacagggttactgccaaggaggcttcagtgccgagttcaccaagactggccgtgtggttttaggtggaccaggaagctatttctggcaaggccagatcctgtctgccactcaggagcagattgcagaatcttattaccccgagtacctgatcaacctggttcaggggcagctgcagactcgccaggccagttccatctatgatgacagctacctaggatactctgtggctgttggtgaattcagtggtgatgacacagaagactttgttgctggtgtgcccaaagggaacctcacttacggctatgtcaccatccttaatggctcagacattcgatccctctacaacttctcaggggaacagatggcctcctactttggctatgcagtggccgccacagacgtcaatggggatgggctggatgacttgctggtgggggcacccctgctcatggatcggacccctgacgggcggcctcaggaggtgggcagggtctacgtctacctgcagcacccagccggcatagagcccacgcccacccttaccctcactggccatgatgagtttggccgatttggcagctccttgacccccctgggggacctggaccaggatggctacaatgatgtggccatcggggctccctttggtggggagacccagcagggagtagtgtttgtatttcctgggggcccaggagggctgggctctaagccttcccaggttctgcagcccctgtgggcagccagccacaccccagacttctttggctctgcccttcgaggaggccgagacctggatggcaatggatatcctgatctgattgtggggtcctttggtgtggacaaggctgtggtatacaggggccgccccatcgtgtccgctagtgcctccctcaccatcttccccgccatgttcaacccagaggagcggagctgcagcttagaggggaaccctgtggcctgcatcaaccttagcttctgcctcaatgcttctggaaaacacgttgctgactccattggtttcacagtggaacttcagctggactggcagaagcagaagggaggggtacggcgggcactgttcctggcctccaggcaggcaaccctgacccagaccctgctcatccagaatggggctcgagaggattgcagagagatgaagatctacctcaggaacgagtcagaatttcgagacaaactctcgccgattcacatcgctctcaacttctccttggacccccaagccccagtggacagccacggcctcaggccagccctacattatcagagcaagagccggatagaggacaaggctcagatcttgctggactgtggagaagacaacatctgtgtgcctgacctgcagctggaagtgtttggggagcagaaccatgtgtacctgggtgacaagaatgccctgaacctcactttccatgcccagaatgtgggtgagggtggcgcctatgaggctgagcttcgggtcaccgcccctccagaggctgagtactcaggactcgtcagacacccagggaacttctccagcctgagctgtgactactttgccgtgaaccagagccgcctgctggtgtgtgacctgggcaaccccatgaaggcaggagccactgtggggtggccttcggtttacagtccctcatctccgggacactaagaaaaccatccagtttgacttccagatcctcagcaagaatctcaacaactcgcaaagcgacgtggtttcctttcggctctccgtggaggctcaggcccaggtcaccctgaacggtgtctccaagcctgaggcagtgctattcccagtaagcgactggcatccccgagaccagcctcagaaggaggaggacctgggacctgctgtccaccatgtctatgagctcatcaaccaaggccccagctccattagccagggtgtgctggaactcagctgtccccaggctctggaaggtcagcagctcctatatgtgaccagagttacgggactcaactgcaccaccaatcaccccattaacccaaagggcctggagttggatcccgagggttccctgcaccaccagcaaaaacgggaagctccaagccgcagctctgcttcctcgggacctcagatcctgaaatgcccggaggctgagtgtttcaggctgcgctgtgagctcgggcccctgcaccaacaagagagccaaagtctgcagttgcatttccgagtctgggccaagactttcttgcagcgggagcaccagccatttagcctgcagtgtgaggctgtgtacaaagccctgaagatgccctaccgaatcctgcctcggcagctgccccaaaaagagcgtcaggtggccacagctgtgcaatggaccaaggcagaaggcagctatggcgtcccactgtggatcatcatcctagccatcctgtttggcctcctgctcctaggtctactcatctacatcctctacaagcttggattcttcaaacgctccctcccatatggcaccgccatggaaaaagctcagctcaagcctccagccacctctgatgcctgagtcctcccaatttcagactcccattcctgaagaaccagtccccccaccctcattctactgaaaaggaggggtctgggtacttcttgaaggtgctgacggccagggagaagctcctctccccagcccagagacatacttgaagggccagagccaggggggtgaggagctggggatccctcccccccatgcactgtgaaggacccttgtttacacataccctcttcatggatgggggaactcagatccagggacagaggccccagcctccctgaagcctttgcattttggagagtttcctgaaacaacttggaaagataactaggaaatccattcacagttctttgggccagacatgccacaaggacttcctgtccagctccaacctgcaaagatctgtcctcagccttgccagagatccaaaagaagcccccagctaagaacctggaacttggggagttaagacctggcagctctggacagccccaccctggtgggccaacaaagaacactaactatgcatggtgccccaggaccagctcaggacagatgccacacaaggatagatgctggcccagggcccagagcccagctccaaggggaatcagaactcaaatggggccagatccagcctggggtctggagttgatctggaacccagactcagacattggcacctaatccaggcagatccaggactatatttgggcctgctccagacctgatcctggaggcccagttcaccctgatttaggagaagccaggaatttcccaggaccctgaaggggccatgatggcaacagatctggaacctcagcctggccagacacaggccctccctgttccccagagaaaggggagcccactgtcctgggcctgcagaatttgggttctgcctgccagctgcactgatgctgcccctcatctctctgcccaacccttccctcaccttggcaccagacacccaggacttatttaaactctgttgcaagtgcaataaatctgacccagtgcccccactgaccagaactag

SEQ ID NO: 6451 - DNA, 2844 bp, Homo sapiens; identical to SEQ ID NO: 6271
  III.79 (XM_036107)

SEQ ID NO: 6452 - DNA, 1797 bp, Homo sapiens; identical to SEQ ID NO: 6272
  III.80 (XM_009064)

SEQ ID NO: 6453 - DNA, 1867 bp, Homo sapiens
  III.81 (XM_036154)
ccgattcctggcttttgcaaggctgtggtcggtggtcatcagtgctcttgacccaggtccagcgagccttttccctggtgttgcagctgttgttgtaccgccgccgtcgccgccgtcgccgcctgctctgcggggtcatggtgtgcttccgcctcttcccggttccgggctcagggctcgttctggtctgcctagtcctgggagctgtgcggtcttatgcattggaacttaatttgacagattcagaaaatgccacttgcctttatgcaaaatggcagatgaatttcacagtacgctatgaaactacaaataaaacttataaaactgtaaccatttcagaccatggcactgtgacatataatggaagcatttgtggggatgatcagaatggtcccaaaatagcagtgcagttcggacctggcttttcctggattgcgaattttaccaaggcagcatctacttattcaattgacagcgtctcattttcctacaacactggtgataacacaacatttcctgatgctgaagataaaggaattcttactgttgatgaacttttggccatcagaattccattgaatgacctttttagatgcaatagtttatcaactttggaaaagaatgatgttgtccaacactactgggatgttcttgtacaagcttttgtccaaaatggcacagtgagcacaaatgagttcctgtgtgataaagacaaaacttcaacagtggcacccaccatacacaccactgtgccatctcctactacaacacctactccaaaggaaaaaccagaagctggaacctattcagttaataatggcaatgatacttgtctgctggctaccatggggctgcagctgaacatcactcaggataaggttgcttcagttattaacatcaaccccaatacaactcactccacaggcagctgccgttctcacactgctctacttagactcaatagcagcaccattaagtatctagactttgtctttgctgtgaaaaatgaaaaccgattttatctgaaggaagtgaacatcagcatgtatttggttaatggctccgttttcagcattgcaaataacaatctcagctactgggatgcccccctgggaagttcttatatgtgcaacaaagagcagactgtttcagtgtctggagcatttcagataaatacctttgatctaagggttcagcctttcaatgtgacacaaggaaagtattctacagctcaagactgcagtgcagatgacgacaacttccttgtgcccatagcggtgggagctgccttggcaggagtacttattctagtgttgctggcttattttattggtctcaagcaccatcatgctggatatgagcaattttagaatctgcaacctgattgattatataaaaatacatgcaaataacaagattttcttacctctcagttgttgaaacactttgcttcttaaaattgatatgttgaaactttaattcttttatcaatcccagcattttgagatcagtctttattaataaaacctgttctctttaatcagcttaaaatccaaagtgtcatatttactggtcctggagacaaacttgttcaaaagaacatcaacgtgcaatgttttaaggtctatcttaagaagccctggccaaattttgatcctaaccttgaagtatgccttgaacttattaacatggccattataagaataaaatatgtagttgtgtcttaatggaattaataaatgtcatttcactactggtgttctgtttcaatgtataaggactatagtgatttaaactcatcaatgtgcctttgcataaagttcattaaataaatattgatgtggtataaatgcccatcagatatgct

SEQ ID NO: 6454 - DNA, 4689 bp, Homo sapiens; identical to SEQ ID NO: 6317
  III.82 (XM_042066)

SEQ ID NO: 6455 - DNA, 3757 bp, Homo sapiens; identical to SEQ ID NO: 6262
  III.83 (NM_001315)

SEQ ID NO: 6456 - DNA, 2745 bp, Homo sapiens
  III.84 (NM_003684)
ggcacgagggcgaccgctccccggcgggagccagcgaaggtttccatgtcagaggccgatggagaactgaagattgccacctacgcacaaaggccattgagacacttcgtgtagctggaagacaccaacttcctgacaggagctttatttcatttgggatttcaagtttacagatggtatcttctcaaaagttggaaaaacctatagagatgggcagtagcgaaccccttcccatcgcagatggtgacaggaggaggaagaagaagcggaggggccgggccactgactccttgccaggaaagtttgaagatatgtacaagctgacctctgaattgcttggagagggagcctatgccaaagttcaaggtgccgtgagcctacagaatggcaaagagtatgccgtcaaaatcatcgagaaacaagcagggcacagtcggagtagggtgtttcgagaggtggagacgctgtatcagtgtcagggaaacaagaacattttggagctgattgagttctttgaagatgacacaaggttttacttggtctttgagaaattgcaaggaggttccatcttagcccacatccagaagcaaaagcacttcaatgagcgagaagccagccgagtggtgcgggacgttgctgctgcccttgacttcctgcataccaaagacaaagtctctctctgtcacctaggctggagtgctatggcgccatcagggctcactgcagccccaacctccctgggctccagtgatcctcccacctcagcctcccaagtagctgggactacaggcattgctcatcgtgatctgaaaccagaaaatatattgtgtgaatctccagaaaaggtgtctccagtgaaaatctgtgactttgacttgggcagtgggatgaaactgaacaactcctgtacccccataaccacaccagagctgaccaccccatgtggctctgcagaatacatggcccctgaggtagtggaggtcttcacggaccaggccacattctacgacaagcgctgtgacctgtggagcctgggcgtggtcctctacatcatgctgagtggctacccacccttcgtgggtcactgcggggccgactgtggctgggaccggggcgaggtctgcagggtgtgccagaacaagctgtttgaaagcatccaggaaggcaagtatgagtttcctgacaaggactgggcacacatctccagtgaagccaaagacctcatctccaagctcctggtgcgagatgcaaagcagagacttagcgccgcccaagttctgcagcacccatgggtgcaggggcaagctccagaaaagggactccccacgccgcaagtcctccagaggaacagcagcacaatggacctgacgctcttcgcagctgaggccatcgcccttaaccgccagctatctcagcacgaagagaacgaactagcagaggagccagaggcactagctgatggcctctgctccatgaagctttcccctccctgcaagtcacgcctggcccggagacgggccctggcccaggcaggccgtggtgaagacaggagcccgcccacagcactctgaaatgctccagtcacaccttataggccctaggcctggccaggcattgtcccctggaaacctgtgtggctaaagtctgctgagcaggcagcagcctctgctctgtggctccattcaggctttttcatctacgaaggccctgaggttcccatcaacccccatttccctagggtcctggaggaaaaagctttttccaaaggggttgtctttgaaaaggaaagcaatcacttctcactttgcataattgcctgcagcaggaacatctcttcactgggctccacctgctcacccgcctgcagatctgggatccagcctgctctcaccgctgtagctgtggcggctggggctgcagcctgcagggagaagcaagaagcatcagttgacagaggctgccgacacgtgcctcttccctctcttctctgtcaccctcctctggcggtccttccaccttcctctgtcctccggatgtcctctttgcccgtcttctcccttggctgagcaaagccatcccctcaattcagggaagggcaaggagccttcctcattcaggaaatcaaatcagtcttccggtctgcagcacggaaaagcacataatctttctttgctgtgactgaaatgtatccctcgtttatcatcccctttgtttgtgattgctgctaaagtcagtagtatcgtttttttaaaaaaaaagtttggtgtttttaaccatgctgttccagcaaagatgataccttaaactcccactgcaagcccatgaacttcccagagagtggaacggcttgctcttctttctagaatgtccatgcacttgggttttaatcagcagttccctattattctgattttaagctgttcctgtgatgaacttagagacagcatcggtgtctgctgctgtgtccccaggtcttgtgtgggtggcacagatctgggcagttagatagtgctctgtgcctaaggtgaagccacactagggtgaagcctcacttccctgtttgagcaatgcagtgcctgctgcccgtgtgcatgaaggtacagccattcagataagtggaactattgagttacataaagaaaatagatttgcatttgtcaggcagacgtttatacaacaccacggtgcttttatacattgtgcttattttaataaaactgaaattctaaaaaaaaaaaaaaaaaa

SEQ ID NO: 6457 - DNA, 2848 bp, Homo sapiens
  III.85 (U68162)
  misc_feature (2755)..(2755): n is a, c, g, or t
ctgcagataaagagggagtactgtgtttcaggcaaggtagtcagggatgacatttgaacagaggcctacaatgaggtgagggaatgaatccagtgttccagacagaacaaacattggagtgtttgaggaaactgcagcaccctttgttgaacctgcccaccactgacttccctcccctacctgaggttttcttcttactctactcccctgcccaactttattgccttgaccatgctcttatatctccaagccttactccccggcctcactgctcccccaccccaactgctgtcctcctccctgccaatccactgccatggctcagtctgcttctcttccttctcccccaggagactgaggcatgccctgtggccctcacttccagacctgcaccgggtcctaggccagtaccttagggacactgcagccctgagcccggtgagtgtgcttccctcccctgtgcccaccaccaaccctgcctggtactggatccttgccccaacaatacaacttgttcaaggtccttgccctaccagtgtgccatccccaggcactaccccagcactaccccagcccttctccttcctgtacagtccagcccctcctcccacaggatctgctttaatccagcgcctctcctcatctctcccagcccaaggccacagtctcagatacctgtgaagaagtggaacccagcctccttgaaatcctccccaagtcctcagagaggactcctttgcccctgtgttcctcccaggcccagatggactaccgaagattgcagccttcttgcctggggaccatgcccctgtctgtgtgcccacccatggctgagtcagggtcctgctgtaccacccacattgccaaccattcctacctaccactaagctattggcagcagccttgaggacaggctcctcactcccagttccctggacagagctaaactctcgagacttctctgtgaacttccctaccctacccccacaacacaagcaccccagacctcacctccatccccctctgtctgccctcacaattaggcttcattgcactgatcttactctactgctgctgacataaaaccaggaccctttctccacaggcaggctcatttcactaagctcctcctttacttcctctctcctctttgatgtcaaacgccttgaaaacaagcctccacttccccacacttcccatttactcttgagactacttcaattagttcccctactacactttgctagtgaactgcccaggcaaagtgcacctcaaatcttctaattccaagatccaataggatctcgttaatcatcagttcctttgatctcgctgtaagatttgtcaaggctgactactcacttctcctttaaattctttcctaccttggtcctgcctctttgagtatattagtaggttttttttatttgtttgagacagggtctcactctgtcacccaggctgcagtgcaatggcgcgatctcagctcactgcaacctccacctccgggttcaagcgattcttgtgcctcggcctccctagtagctgggattacaggcgcacaccaccacacacagctaatttttttttttttttttttttttttttttttttttagacggagccttgcctgttgccagactggagtgcagtggcacgatctcggctcactgcaacctctgcctcccgggttcaagccattctgcctcagcctcccaagtagctgggagtacagcgtctgccaccatgcctaatttttttctatttttaggagagaccggttttcaccacgttggccaggatggtctcgatatctgatctcgtgatccgcctgcctctgcctcccaaagtgctgggattacaggtgtgacccactgcgcacagccccagctaattttcatatttttagtagagacagggttttgccatgttgcccaggctggtcttgaactcctaacctcgggtgatccacccaccttggcctcccaaagtgttaggattacaggcatgagccactgcgcccggctgagtgtactagtagttaagagaataaactagatctagaatcagagctggattcaattcctgtccttcacatttactagctgtgcaaccttgggcacataacttaatgtctttgagccttagttttttcatctgtaaaacagggataataacagcaccccatagagttgtgacgaggattgagataatctaagtaaagcacagtccctaggacatagtaaatgattcatatatccgaactactgttataattattccttcttactctcctcttctagcatttcttccaattattacagtccttcaagattccatttcttaacagtctccaatcccatctattctctgcctttactatatgttgaccattccaaagttcttatctctagctcagacatctactacagcactgtgatgctttatgcaactaactgtttacatatctgtcccctgctactagattgtgagctccttgagggaaaggaacatgatttatttgtccttttcccccagcacctagagtagtgcttggtgcatgatagtaggccttcaataaattttttctaaatgaatgaaatctttctggacaaggttaccttaatcccatgccagctgtcctcatcctctaaaccgttcataggcagcagtaaatgtgccagacagttctgattatggactctcctaacacattctaattctcaaacaaatggttttgttgtcattgtttttnctggctccaaatatacccactgtatcagtcagggtcttggaagaaatagatgacacactcaaattgggtaatatgatgacagtgtaataaact

SEQ ID NO: 6458 - DNA, 4005 bp, Homo sapiens; identical to SEQ ID NO: 6268
  III.86 (NM_004555)

SEQ ID NO: 6459 - DNA, 2460 bp, Homo sapiens
  III.87 (XM_006931)
atttttagtttgttgaagttcgtgactgcttcactctctcattcttagcttgaatttggaaatgacttttgatgacctaaagatccagactgtgaaggaccagcctgatgagaagtcaaatggaaaaaaagctaaaggtcttcagtttctttactctccatggtggtgcctggctgctgcgactctaggggtcctttgcctgggattagtagtgaccattatggtgctgggcatgcaattatcccaggtgtctgacctcctaacacaagagcaagcaaacctaactcaccagaaaaagaaactggagggacagatctcagcccggcaacaagcagaagaagcttcacaggagtcagaaaacgaactcaaggaaatgatagaaacccttgctcggaagctgaatgagaaatccaaagagcaaatggaacttcaccaccagaatctgaatctccaagaaacactgaagagagtagcaaattgttcagctccttgtccgcaagactggatctggcatggagaaaactgttacctattttcctcgggctcatttaactgggaaaagagccaagagaagtgcttgtctttggatgccaagttgctgaaaattaatagcacagctgatctggacttcatccagcaagcaatttcctattccagttttccattctggatggggctgtctcggaggaaccccagctacccatggctctgggaggacggttctcctttgatgccccacttatttagagtccgaggcgctgtctcccagacatacccttcaggtacctgtgcatatatacaacgaggagctgtttatgcggaaaactgcattttagctgccttcagtatatgtcagaagaaggcaaacctaagagcacagtgaatttgaaggctctggaagaaaagaaaaaagtctttgagttttattctggaatttaagctattctttgtcacttgggtgccaaacatgagagcccagaaaactgtcatttagctggctgcagaactcctttgcagaaactggggttccaggagcctggcacctttatgtcaacatttttgattctagctacctgtattatttcacctagcttgtcccaagcttccctgccagcctgaagtccattttcccctttttattttaaaatttgactcctcttcaagcttgaaaaccctctgaactcagtcttctttacctcattatcaccttcccctcacactcctaaaattgcatgaaagacagaacatggagaacttgctcaagtgcaggcagagagcaaaaaggggaaatatgtctgggaaaaagtgcacgtgaagaaacaaagaaggacagaggccattccgaaatcaagaaactcatgttcttaactttaaaaaaggtatcaatccttggtttttaaactgtggtccatctccagactctaccacttacggacagacagacagacagacacacacacacacacacacacacattttgggacaagtggggagcccaagaaagtaattagtaagtgagtggtcttttctgtaagctaatccacaacctgttaccacttcctgaatcagttattatttcttcatttttttttctaccagaggacagattaatagatttaacccttcacaacagttcttgttagaatcatgggatgtgtggcccagaggtaagaatagaatttctttccctaaagaacataccttttgtagatgaactcttctcaactctgttttgctatgctataattccgaaacatacaagacaaaaaaaatgaagacactcaatctagaacaaactaagccaggtatgcaaatatcgctgaatagaaacagatggaattagaaatatatcttctatttttaggcttctatttcctttccacccactcttcacaggctattctactttaaaggaagcctttttattttgctgcacacaatctagcaggaatctttttttttttttaagagctgtgtcatccttatgtaggcaagagatgtttgcttttgttaaaagctttattgagatataattaacataaaataaactgaacatatttaaagtgtactatttgataagttttcacaccttgtggagaacatgcatactacaattaagagagtgaacatatccatcatccctcaaagtgtcacaatgctcctcctgatgactcctccccagaaaaccaccaatcggctttcattttgcattttgtagttttatgtgaatggaatcatatagtatgtcttttttttttgtctggcttctttcactttgcataattattttgagattcatatgtctccatcttgatgctcgtatgaattcattcttttaaatgttgaatattcccttgtatggatataccacaattcatttacccatttacttgttgatgacatttgggttgttttagttttgggatattacaaataaagctgctgtgaacatttgtgtac

SEQ ID NO: 6460 - DNA, 519 bp, Homo sapiens
  III.88 (XM_039764)
ctgctccagcgctgacgccgagccatggcggacgaggagcttgaggcgctgaggagacagaggctggccgagctgcaggccaaacacggggatcctggtgatgcggcccaacaggaagcaaagcacagggaagcagaaatgagaaacagtatcttagcccaagttctggatcagtcggcccgggccaggtgtaagtaacttagcacttgtaaagcctgaaaaaactaaagcagtagagaattaccttatacagatggcaagatatggacaactaagtgagaaggtatcagaacaaggtttaatagaaatccttaaaaaagtaagccaacaaacagaaaagacaacaacagtgaaattcaacagaagaaaagtaatggactctgatgaagatgacgattattgaactacaagtgctcacagactagaacttaacggaacaagtctaggacagaagttaagatctgattatttactttgtttattgtctatatgccttttaaaaaaataaacttgttatgc

SEQ ID NO: 6461 - DNA, 3104 bp, Homo sapiens
  III.89 (XM_029791)
caggatcaattttccccttgaaataaagtcacttccaagggaatccatgctcactgtaaaactgtttgggattgcctgtgcaaccaacaatgcaaatttactggcgtggacttgtcttccactgtttccaaaagaaaaatccattctcgggtctatgctgttcagcatgacattacagagtgagcctcccgtagaaatgataactccaggagtgtgggatgtaagtcagccatccccggtgaccctgcagattgattttccagctactgggtgggagtatatgaaacctgattctgaagagaatagaagtaatcttgaagagccactaaaggagtgtataaaacatattgccagactttcacagaaacagactcccctactactctctgaagaaaagaaaagatatttatggttttatcgcttctactgcaataatgaaaactgctcccttcctttagtcctgggtagtgcccctggatgggatgaaaggactgtttcagaaatgcataccattttgagaagatggacattttctcaacctttagaggctcttgggcttttgacttccagttttccagatcaagaaattcgtaaagtggcagttcaacaattagacaacctcttgaatgatgaactactggaatatctcccacagctagttcaggctgtcaagtttgaatggaaccttgagagtcctttagtgcaacttctactccaccgctccttgcagagcatccaggttgcccatcgtctttactggctgctaaaaaatgcagaaaatgaagcttattttaaaagctggtatcagaagctactagctgctctccaattctgtgcaggtaaagccttgaatgatgagttttccaaggagcagaaacttatcaaaattctgggagatattggggaaagagtcaagtctgccagtgaccatcaaagacaggaggtactgaagaaagaaattggcagactagaagagttctttcaagatgtaaatacttgtcatcttcctctgaaccctgccctatgtataaaagggattgatcacgatgcatgttcatattttacatctaatgctttgccattgaagattactttcatcaatgctaatccgatgggcaaaaacatcagcattatttttaaggctggagatgatcttcgtcaggatatgcttgttctgcagcttattcaagtgatggacaatatttggctgcaggaaggcttggatatgcaaatgatcatttatagatgtctatccacaggaaaagaccaaggattggtgcagatggtacctgatgctgtgaccctagcaaagattcatcgccattctggactgataggaccattgaaagaaaatacaattaaaaagtggttcagtcagcacaaccacttaaaggcagattatgaaaaggccttgaggaactttttctactcctgtgctggctggtgtgtggtaacattcatcctgggagtatgtgaccgtcacaatgataatatcatgctgacaaagtcgggccacatgtttcatattgactttggaaaattcttaggtcatgcacaaacatttggagggataaaaagggaccgagctcctttcatttttacttcagagatggaatactttattacagagggtgggaaaaacccacagcattttcaagattttgtggaactttgctgtcgtgcttataatattatcagaaagcacagccaactgctcttgaacctgctggaaatgatgctgtatgcaggactgcctgagctaagtggaattcaagacctgaaatatgtgtataataatcttcgtccacaagacacagacctggaagcaacaagtcattttaccaagaaaataaaggaaagtctggagtgtttccctgttaaattgaataacttgatccacacacttgcacaaatgtcagccataagccctgccaaatctacttcacagacttttcctcaggaatcctgtttgctgagtacaactaggtcgattgaaagagcaacaattttagggttcagcaagaaatccagtaatctgtatctgatccaggtgacacacagcaacaacgaaacaagcctgacagaaaaatcatttgagcagttttcaaaacttcacagccaacttcagaagcagtttgcatcactgactctcccagagtttcctcattggtggcacctaccttttacaaattcagatcacagaagattcagagatctaaatcattacatggaacagatattaaatgtatcacatgaagttacaaacagtgattgtgtacttagctttttcctctctgaggctgtgcaacaaacagttgaagaatcatcacctgtgtacctaggtaagtgagaagtttccagacaagaagcctaaggtgcagttagtcatatcctacgaggatgtgaagctgaccatactagtgaaacacatgaaaaacattcatctcccagatggctctgcgcccagtgcacatgttgaattttatcttttaccatatcccagtgaagttcgtaggaggaaaacaaaatctgttccaaaatgtacggaccccacttacaatgaaagtagtatatgatgaagtcacagagctccaaggacatgtcttaatgcttattgtgaagagtaaaactgtatttgtgggagcaattaacatccgactctgtagtgtcccactcgataaagaaaaatggtatccattaggaaacagtataatttgaccattgctatgaacatatgcattattcattaactacttgtatttttttcacttctgggcctctgaatcacataagtaaggcatctttgttgtcaaagacagcacagggtattaaggacacagaaaaaaaatcagaattagtcttttgtgttgtttattttctacctgtgctttcattgttttttcataatcttttctccttcagtggagtactgattgcatgaaatttgatgtgtaaaataataaaagacctttattaaatcattttaatatattttaaattaaacataggtttacatttgttttaattgtgtgcctacagttaaaagcagtatttttaatgtattttataagaaagacaatcaaataaacctcatcaattaattc

SEQ ID NO: 6462 - DNA, 2470 bp, Homo sapiens; identical to SEQ ID NO: 6305
  III.90 (XM_043864)

SEQ ID NO: 6463 - DNA, 1344 bp, Homo sapiens
  III.91 (NM_004166)
tgcagactgatatggattcaccactgctaacacctcctggttggaactacaggaatagaactggaaagggaaaaaaggcagcattcaccacatcccaatcctgaatccaagagtctaagatagtcccccactcctatctcaggcttagaggattagattaatctcctggagggaagactcttccttgaaacatttttttttatctgcctgtagctattgggataattcgggaaatccacagggacagttcaagtcatctttgtcctctactttctgttgcactctcagccttgttctctttttagaaactgcatggtaactattatatagctaaagaagagcattctgacctctgccctgggacttcctggatcctcctcttcttataaatacaagggcagagctggtatcccggggagccaggaagcagtgagcccaggagtcctcggccagccctgcctgcccaccaggaggatgaaggtctccgtggctgccctctcctgcctcatgcttgttgctgtccttggatcccaggcccagttcacaaatgatgcagagacagagttaatgatgtcaaagcttccactggaaaatccagtagttctgaacagctttcactttgctgctgactgctgcacctcctacatctcacaaagcatcccgtgttcactcatgaaaagttattttgaaacgagcagcgagtgctccaagccaggtgtcatattcctcaccaagaaggggcggcaagtctgtgccaaacccagtggtccgggagttcaggattgcatgaaaaagctgaagccctactcaatataataataaagagacaaaagaggccagccacccacctccaacacctcctgagcctctgaagctcccaccaggccagctctcctcccacaacagcttcccacagcatgaagatctccgtggctgccattcccttcttcctcctcatcaccatcgccctagggaccaagactgaatcctcctcacggggaccttaccacccctcagagtgctgcttcacctacactacctacaagatcccgcgtcagcggattatggattactatgagaccaacagccagtgctccaagcccggaattgtcttcatcaccaaaaggggccattccgtctgtaccaaccccagtgacaagtgggtccaggactatatcaaggacatgaaggagaactgagtgacccagaaggggtggcgaaggcacagctcagagacataaagagaagatgccaaggccccctcctccacccaccgctaactctcagccccagtcaccctcttggagcttccctgctttgaattaaagaccactcatgctcttc

SEQ ID NO: 6464 - DNA, 624 bp, Homo sapiens
  III.92 (XM_035854)
ctggcatcccgagaagccaggaagcagtgagcccaggagtcctcggccagccctgcctgcccaccaggaggatgaaggtctccgtggctgccctctcctgcctcatgcttgttactgcccttggatcccaggcccgggtcacaaaagatgcagagacagagttcatgatgtcaaagcttccattggaaaatccagtacttctggacatgctctggaggagaaagattggtcctcagatgaccctttctcatgctgcaggattccatgctactagtgctgactgctgcatctcctacaccccacgaagcatcccgtgttcactcctggagagttactttgaaacgaacagcgagtgctccaagccgggtgtcatcttcctcaccaagaaggggcgacgtttctgtgccaaccccagtgataagcaagttcaggtttgcgtgagaatgctgaagctggacacacggatcaagaccaggaagaattgaacttgtcaaggtgaagggacacaagttgccagccaccaactttcttgcctcaactaccttcctgaattattttttaaagaagcatttattcttgtgttctggatttagagcaattcatctaataaacagtttctcactt

SEQ ID NO: 6465 - DNA, 805 bp, Homo sapiens; identical to SEQ ID NO: 6356
  III.93 (XM_012649)

SEQ ID NO: 6466 - DNA, 3274 bp, Homo sapiens; identical to SEQ ID NO: 6340
  III.94 (XM_048068)

SEQ ID NO: 6467 - DNA, 3213 bp, Homo sapiens
  III.95 (NM_006219)
atgtgcttcagtttcataatgcctcctgctatggcagacatccttgacatctgggcggtggattcacagatagcatctgatggctccatacctgtggatttccttttgcccactgggatttatatccagttggaggtacctcgggaagctaccatttcttatattaagcagatgttatggaagcaagttcacaattacccaatgttcaacctccttatggatattgactcctatatgtttgcatgtgtgaatcagactgctgtatatgaggagcttgaagatgaaacacgaagactctgtgatgtcagaccttttcttccagttctcaaattagtgacaagaagttgtgacccaggggaaaaattagactcaaaaattggagtccttataggaaaaggtctgcatgaatttgattccttgaaggatcctgaagtaaatgaatttcgaagaaaaatgcgcaaattcagcgaggaaaaaatcctgtcacttgtgggattgtcttggatggactggctaaaacaaacatatccaccagagcatgaaccatccatccctgaaaacttagaagataaactttatgggggaaagctcatcgtagctgttcattttgaaaactgccaggacgtgtttagctttcaagtgtctcctaatatgaatcctatcaaagtaaatgaattggcaatccaaaaacgtttgactattcatgggaaggaagatgaagttagcccctatgattatgtgttgcaagtcagcgggagagtagaatatgtttttggtgatcatccactaattcagttccagtatatccggaactgtgtgatgaacagagccctgccccattttatacttgtggaatgctgcaagatcaagaaaatgtatgaacaagaaatgattgccatagaggctgccataaatcgaaattcatctaatcttcctcttccattaccaccaaagaaaacacgaattatttctcatgtttgggaaaataacaaccctttccaaattgtcttggttaagggaaataaacttaacacagaggaaactgtaaaagttcatgtcagggctggtctttttcatggtactgagctcctgtgtaaaaccatcgtaagctcagaggtatcagggaaaaatgatcatatttggaatgaaccactggaatttgatattaatatttgtgacttaccaagaatggctcgattatgttttgctgtttatgcagttttggataaagtaaaaacgaagaaatcaacgaaaactattaatccctctaaatatcagaccatcaggaaagctggaaaagtgcattatcctgtagcgtgggtaaatacgatggtttttgactttaaaggacaattgagaactggagacataatattacacagctggtcttcatttcctgatgaactcgaagaaatgttgaatccaatgggaactgttcaaacaaatccatatactgaaaatgcaacagctttgcatgttaaatttccagagaataaaaaacaaccttattattaccctcccttcgataagattattgaaaaggcagctgagattgcaagcagtgatagtgctaatgtgtcaagtcgaggtggaaaaaagtttcttcctgtattgaaagaaatcttggacagggatcccttgtctcaactgtgtgaaaatgaaatggatcttatttggactttgcgacaagactgccgagagattttcccacaatcactgccaaaattactgctgtcaatcaagtggaataaacttgaggatgttgctcagcttcaggcgctgcttcagatttggcctaaactgcccccccgggaggccctagagcttctggatttcaactatccagaccagtacgttcgagaatatgctgtaggctgcctgcgacagatgagtgatgaagaactttctcaatatcttttacaactggtgcaagtgttaaaatatgagccttttcttgattgtgccctctctagattcctattagaaagagcacttggtaatcggaggatagggcagtttctattttggcatcttaggtcagaagtgcacattcctgctgtctcagtacaatttggtgtcatccttgaagcatactgccggggaagtgtggggcacatgaaagtgctttctaagcaggttgaagcactcaataagttaaaaactttaaatagtttaatcaaactgaatgccgtgaagttaaacagagccaaagggaaggaggccatgcatacctgtttaaaacagagtgcttaccgggaagccctctctgacctgcagtcacccctgaacccatgtgttatcctctcagaactctatgttgaaaagtgcaaatacatggattccaaaatgaagcctttgtggctggtatacaataacaaggtatttggtgaggattcagttggagtgatttttaaaaatggtgatgatttacgacaggatatgttgacactccaaatgttgcgcttgatggatttactctggaaagaagctggtttggatcttcggatgttgccttatggctgtttagcaacaggagatcgctctggcctcattgaagttgtgagcacctctgaaacaattgctgacattcagctgaacagtagcaatgtggctgctgcagcagccttcaacaaagatgcccttctgaactggcttaaagaatacaactctggggatgacctggaccgagccattgaggaatttacactgtcctgtgctggctactgtgtagcttcttatgtccttgggattggtgacagacatagtgacaacatcatggtcaaaaaaactggccagctcttccacattgactttggacatattcttggaaatttcaaatctaagtttggcattaaaagggagcgagtgccttttattcttacctatgatttcatccatgtcattcaacaaggaaaaacaggaaatacagaaaagtttggccggttccgccagtgttgtgaggatgcatatctgattttacgacggcatgggaatctcttcatcactctctttgcgctgatgttgactgcagggcttcctgaactcacatcagtcaaagatatacagtatcttaaggactctcttgcattagggaagagtgaagaagaagcactcaaacagtttaagcaaaaatttgatgaggcgctcagggaaagctggactactaaagtgaactggatggcccacacagttcggaaagactacagatcttaa

SEQ ID NO: 6468 - DNA, 829 bp, Homo sapiens
  III.96 (BC016281)
cattgcctcaacagcttcaaggtgagccagctcaagactttgctctccaccaggcagaagatgacagactgtgaatttggatatatttacaggctggctcaggactatctgcagtgcgtcctacagataccacaacctggatcaggtccaagcaaaacgtccagagtgctacaaaatgttgcgttctcagtccaaaaagaagtggaaaagaatctgaagtcatgcttggacaatgttaatgttgtgtccgtagacactgccagaacactattcaaccaagtgatggaaaaggagtttgaagacggcatcattaactggggaagaattgtaaccatatttgcatttgaaggtattctcatcaagaaacttctacgacagcaaattgccccggatgtggatacctataaggagatttcatattttgttgcggagttcataatgaataacacaggagaatggataaggcaaaacggaggctgggaaaatggctttgtaaagaagtttgaacctaaatctggctggatgacttttctagaagttacaggaaagatctgtgaaatgctatctctcctgaagcaatactgttgaccagaaaggacactccatattgtgaaaccggcctaatttttctgactgatatggaaacgattgccaacacatacttctacttttaaataaacaactttgatgatgtaacttgaccttccagagttatggaaattttgtccccatgtaatgaataaattgtatgtatttttctctaaaaaaaaaaaaaaaaaaaaaaaaaaccaaaaaaaaaaaaaaaaaaaaaaaaaaaaaaaaaaaaaaa

SEQ ID NO: 6469 - DNA, 488 bp, Homo sapiens
  III.97 (N54505)
ttttttttttttttttgtgtgattccatttatatgaaatgtccagaacagggaaaacctattttagacaacagagacacaaagtcgatcagcagttgccaggggaggaggaagacgggaggggaaatgattgcttcacggggtgatgacagaatgttccagaacgtgacagaggtggtgcctacacaactttctggatgtactaaatgccgctgattgttcactttcaagtgattgatttttaggttatttgaatttcatctcaattaaaaaacccaaacacgcaaactgctcccgccagctcagccccgagcagacggcgcacccgttggaggatgcttgagccacccaggcttctccccgccccttcctggactcttctctcttttgcctttaatccactctgcgcagtcattgcctgtgttcatcctacctggccgacttctctctcaatatttccctgggtgaaacatcctaagaggaagttac

SEQ ID NO: 6470 - DNA, 469 bp, Homo sapiens
  III.98 (N76209)
  misc_feature (444)..(444): n is a, c, g, or t
taatgtaacttcctcttaggatgtttcaccaaggaaatattgagagagaagtcggccaggtaggatgaacacaggcaatgactgcgcagagtggattaaaggcaaaagagagaagagtccaggaaggggcggggagaagcctgggtggctcagcatcctccacgggctgcgcgtcttgctcggggctgagctggcgggacagtttgcgtgtttgggttttttaattgagatgaaattcaaataacctaaaaatcaatcacttgaaagtgaacaatcagcggcatttagtacatccagaaagttgtgtaggcaccacctctgtcacgttctggaacattctgtcatcaccccgtgaaagcaatcatttccccctcccgtctttcctcctcccctggcaactgctgatcgactttgtgtctctgttgtctaaaataggttttcccngttctggacatttcatataaatggg

SEQ ID NO: 6471 - DNA, 500 bp, Homo sapiens
  III.99 (N51441)
  misc_feature (343)..(343): n is a, c, g, or t
gacaaaggatttatctctttattaaagaacccatgtaattcaataagaaaaggctaagtgattccaacagttaaagagaacaggtcttaaacagacctaacaaagaggaaacgttgccagtaaacaaacatacaacaaaaaagctcaacaatggcagttgttaaataatgaaaataattgtgaggtagtaacatctttagctactaaattagctccccaaacctaagaaaaatggtggggagagggactccaactgctcatgaggagccgtgaaccccgtgagcagtgaagggttctgtcaaccgaaacaacgcttttagagagcaatgaggcagacgccggngtatcaggagccacagaagtattcacacctgacctggtgaatccactctgagcatccatgaggaaatcataaaactatgagaaaagtcatacacagctgccctccatacccagaggttccccatttcagattcaaccaaccgtgcatggaaaaattg

SEQ ID NO: 6472 - DNA, 433 bp, Homo sapiens
  III.100 (R05270)
  misc_feature (317)..(317): n is a, c, g, or t
  misc_feature (415)..(415): n is a, c, g, or t
ttaatatatagcctagactattgagtctctacaattgaggaagaaagaggttgttctcacctgctactcttccaacccctatttgaaaggaagaaggaaaagctacttaaggggtggcacagctactctaacttagataataaggagggggttagtcaagctctttaaaatagaagttttcttcgttgtctgggacgctaatggggtgggagtcatgcttaggacagagacagggtaactgagtccctgccagtgggggctcaggatgcctttgggggagctaggagggctaccatacccaaggagtcctgggggtnagcttccctgttggataccaccaccaaggcaccattccaatcagggtcaggcaacttttttcttgtggaggggccgggggaccttaaatacacccttntaggccccattcaagttt

SEQ ID NO: 6473 - DNA, 355 bp, Homo sapiens
  III.101 (R05327)
  misc_feature (300)..(300): n is a, c, g, or t
gctataccatctaggtttgtgtaagcacactatgatgtttgcatgacaaaatcgcctaatgacacatttctcagaatgtagttggaggaaaaaaattgaaaggagagtattacttcatgacacaggaaaatcatttgaaatacaaattccagtgtccataaataaagttcactaggaatgtgggccatgctcattcatttacatgtaatctgtgggtagtttttgtgctactgtgggcaggaattggaatacttgcagtggggaacttggatgggggctacaagggtgtatttagtaccnggggccctttcacaggaaaaagttttgctgaccctggattggatgtggcttgtgg

SEQ ID NO: 6474 - DNA, 471 bp, Homo sapiens
  III.102 (H80844)
  misc_feature (17)..(17): n is a, c, g, or t
  misc_feature (19)..(19): n is a, c, g, or t
  misc_feature (20)..(20): n is a, c, g, or t
  misc_feature (27)..(27): n is a, c, g, or t
  misc_feature (30)..(30): n is a, c, g, or t
  misc_feature (31)..(31): n is a, c, g, or t
  misc_feature (369)..(369): n is a, c, g, or t
  misc_feature (383)..(383): n is a, c, g, or t
  misc_feature (402)..(402): n is a, c, g, or t
  misc_feature (428)..(428): n is a, c, g, or t
  misc_feature (460)..(460): n is a, c, g, or t
  misc_feature (467)..(467): n is a, c, g, or t
taataaattaaaataananngtttaantannaatttgcactagccacatttcaagtgctcaatagctatatgtatctagtggctaccatattggacagtgctgatttagaacatttccatctttgcagaaggttatattgagcagttacattagtttcttaaggctgccataacaaattactacaaaatgggtgacttaaaataacaaatttgttccctgacgcttttggaggacagaagttcaaaatcaagatgttgcaaggtactggcaggacatatgggggaaaatttttttgtttgtttgtttttttaaataaaagggccgggtgtgggtgggcttatgcctggtaatcctaggcactttggggngggctggggacagngggttgagggtctcagtgnggctaggagggttggctgtggggccnaggatcctggccactggcccttccactctggnaccgggntttg

SEQ ID NO: 6475 - DNA, 367 bp, Homo sapiens
  III.103 (H80937)
  misc_feature (241)..(241): n is a, c, g, or t
  misc_feature (331)..(331): n is a, c, g, or t
  misc_feature (339)..(339): n is a, c, g, or t
  misc_feature (345)..(345): n is a, c, g, or t
aattattgtgcagcggttgtcaaagagtggtcccgcaaccagtagcatcagatcatatgaacctgttagaaatgcaaattctgtctgccctatctccaagccagtaagttgaaaactctgaggatgaagtcaagcagtctgtttttaaaaatcctccaggtgattctgatatgtgctacaatttgagaagctctatagaagtatcctaacatcagtatacataagatattaaaaacatgancaaacacatttctaacgtttagccaattactcaatttgccaaaaacagattactttttccttttgttgaattttacaaactttcaggctncaaaaatnactggntttcaaaacatttttcaacagc

SEQ ID NO: 6476 - DNA, 440 bp, Homo sapiens
  III.104 (R20834)
  misc_feature (330)..(330): n is a, c, g, or t
  misc_feature (367)..(367): n is a, c, g, or t
  misc_feature (376)..(376): n is a, c, g, or t
  misc_feature (424)..(424): n is a, c, g, or t
ggaaatatttactgtaccaaaacctattgaatgattggtccagaggttctcaactgggcacagttttagccccccagggaaaatctggccatgtctggagacatttttggttgtcacagctgggacactgctactggcatctggtgggtagaggccagggatgctatgaaatgtcctacaatacccaggccagcctcctacagcaaagaattacagcccgagggtcgccagtgctgaggtcgagagtccaggacggatctcatagctcccaacaagatcagccatggagaattgttttgttttgttttttctctgcccccggggtccttnccatgttttaaaagattttttgtctactaagtgaaangcctaagtnaccatatatttttacatttaaaaacattaaaaactaaccagaactttntaattcagtccctcca

SEQ ID NO: 6477 - DNA, 409 bp, Homo sapiens
  III.105 (R42014)
  misc_feature (203)..(203): n is a, c, g, or t
  misc_feature (217)..(217): n is a, c, g, or t
  misc_feature (254)..(254): n is a, c, g, or t
  misc_feature (277)..(277): n is a, c, g, or t
  misc_feature (321)..(321): n is a, c, g, or t
  misc_feature (329)..(329): n is a, c, g, or t
  misc_feature (342)..(342): n is a, c, g, or t
  misc_feature (353)..(353): n is a, c, g, or t
  misc_feature (367)..(367): n is a, c, g, or t
  misc_feature (378)..(378): n is a, c, g, or t
  misc_feature (388)..(388): n is a, c, g, or t
ttttttttttctttttttttgccttggaaacatgatttattagggaatcgttgggttacgctgcaaaggtcgtcttggcttgctttaatggatttcctgggttgcctttctgcccaggcccagcacgtgagcgcggcagaggggagcatgaagtcacaagacgacggacgtctgagctcctgggactcctgggagaccagatntggtggcaccacgntgcatctcgctggctcagcaagggctcagctggtctntcctcggctgcaccgggtttctntcctctctctgtcatgttcctgatgctcaaagctaatgacattntcccaaantacagagggaggncagaaggcggntcaccaaaccagtnttgcaggtcanttcctgtttnggaaattataggggaagccct

SEQ ID NO: 6478 - DNA, 446 bp, Homo sapiens
  III.106 (H18100)
  misc_feature (11)..(11): n is a, c, g, or t
  misc_feature (327)..(327): n is a, c, g, or t
  misc_feature (379)..(379): n is a, c, g, or t
  misc_feature (391)..(391): n is a, c, g, or t
  misc_feature (418)..(418): n is a, c, g, or t
cccttccaggnggcccttgcacaaaaaggccacaagccacaagttcctttaatctgcttcgctgcctcctttcttctccctgaaggaggtgggagtctcctccaggtctttgtgttcaactgcaggcagagctgagaggggaatgagtattttatggatggtaggcagaggtcacaggaatgctgtcctttcttaaaatgctctctgcagcaggaaattgcatgaactgagcctccttcactgacctcccacagcagccggctgtccttaacgctgatgctccacaacaaagacaaacgccttctgtcgggcgccttattccttctntaacgttaccagccgagcacctccaccgttgcaagaacacagtacagcactntgtatctatgtntctaattgcagcttaaaggttaatttngggaacttttcacacgggcgagcagctt

SEQ ID NO: 6479 - DNA, 420 bp, Homo sapiens
  III.107 (H18141)
  misc_feature (372)..(372): n is a, c, g, or t
  misc_feature (379)..(379): n is a, c, g, or t
  misc_feature (389)..(389): n is a, c, g, or t
  misc_feature (395)..(395): n is a, c, g, or t
  misc_feature (401)..(401): n is a, c, g, or t
  misc_feature (410)..(410): n is a, c, g, or t
  misc_feature (415)..(415): n is a, c, g, or t
aattcggcactagggctgctcgcccgtgtgataggtttccacagtaatctttatgctgcattagagacatagatacagaggtgctgtactgtgttcttgcaacggtggaggtgctcggctggtaacgttaaagaaggaataaggcgcccgacagaaggcgtttgtctttgttgtggagcatcagcgtttaaggacagccggctgctgtgggaggtcagtgaaggaggctcagttcatgcaatttcctgctgcagagagcattttaagaaaggacagcattcctgtgacctctgcctaccatccattaaaatacttcattcccctcttcagctcttgcctgcagtttgaacacaaagacctgggaggagactnccacctnctttcagggnagaagnaagganggcagcganaaganttaaa

SEQ ID NO: 6480 - DNA, 419 bp, Homo sapiens
  III.108 (H62563)
  misc_feature (9)..(9): n is a, c, g, or t
  misc_feature (43)..(43): n is a, c, g, or t
  misc_feature (75)..(75): n is a, c, g, or t
  misc_feature (219)..(219): n is a, c, g, or t
  misc_feature (249)..(249): n is a, c, g, or t
  misc_feature (331)..(331): n is a, c, g, or t
  misc_feature (340)..(340): n is a, c, g, or t
  misc_feature (347)..(347): n is a, c, g, or t
  misc_feature (385)..(385): n is a, c, g, or t
  misc_feature (395)..(395): n is a, c, g, or t
  misc_feature (407)..(407): n is a, c, g, or t
  misc_feature (415)..(415): n is a, c, g, or t
ttttatttnctttacaaggactatctctttctcgtttttcctncctgtttctggatggtatactttatcaccctngtaatcatcagagttaacatctgcttggatacagtctgagttttcagggtggacactgatgtgttcatttcccatttcttcttttggtgggcttccaaaactttcagcagtctctttaagagtaagtggctgtaccttacaggnatttgcagctgaactgggtaggcaccgggnccttgggccaaaactgaggtttttgaggcttatcatcttttgtttgtacatctgggatgatggatttattacttctttaggnaatggttcnggaaatncatggtaaattggcattcagggggctttaggaagggcnggggattttngttattttgtgngggaaggnggcc

SEQ ID NO: 6481 - DNA, 366 bp, Homo sapiens
  III.109 (H62645)
  misc_feature (2)..(2): n is a, c, g, or t
  misc_feature (260)..(260): n is a, c, g, or t
  misc_feature (348)..(348): n is a, c, g, or t
tncatcctgtagcagattgggtttcaaaaattcggatgtaaacattgacatccagtttccagccattatgtctcagccagatgtcctcttacttgttcaagaatgtttaaagaacagtgactcctttattgatgttgatgcagacttccatgctagggtgccagtggtggtgtgcagagaaaagcaaagtggtcttctgtgtaaagtgagcgcaggaaatgaaaatgcttgtctgacaacaaagcatttaactgcccttngaaaactagaaccaaagctggttcctttggtgattgcatttaggtactgggcaaagctttgcagtattagatcgccctgtaagaaggnggtctgccaccttatgtg

SEQ ID NO: 6482 - DNA, 490 bp, Homo sapiens
  III.110 (N33522)
  misc_feature (415)..(415): n is a, c, g, or t
attgtttcccaagacggcagatcagttctatgctttactttttttttctgagaggaactctcaggtaccactgctaaacctggaaaacattctttacatctgaaatgctaaattgcccaggctgtaaggcattttcttaaatcaacaaggatcaagaagctacaagctgctcatctttaaaaccaggccttttaaagatgacacctaatttgcattagagtaagcacatgaaatttacaaattaataatgcttcatttgggtagttatgcctgtcttttgttttaggaagtgggaaaaaagtacactttcaaggaaaggaagagcaaccaaaatctgctttaactggctacattattccttaacttgttagtttaagaaaatggtacttggaagtgggaaataaaaggaacccgncttttaccctccttgaatgggtggggaacggtccacagctgagtgcaccagcctcctgtacatcggggtggttaa

SEQ ID NO: 6483 - DNA, 429 bp, Homo sapiens
  III.111 (N41501)
aagtaacaaatatgtacatagcaatatgaagtgtggagagcaccccgtcatgtcatatttcttttttgcagtaaacagttctataacaggcagttagattttcttgttttgtctgttttggacatagacattttgacataagctacatgagattagaaacatttacatttttgaatttcattcatcagaatgaacattttcattgatgatgactctttaaaatgaaaggcaatttttcaaaataactattctatcacaactttaaggaatgtcatattaaactatatagtagtatatgtacattttttctgttaagttttaaagtacttcctctgagattttgctttaaaggtagaaaatattggccgggcgccgtggctcccgcctgtaatcccagcactttgggaggccaaggcaggaggattgctt

SEQ ID NO: 6484 - DNA, 147 bp, Homo sapiens
  III.112 (N73933)
  misc_feature (141)..(141): n is a, c, g, or t
aggctgtggaggactttattcattagacccagagagccatgagtgcctcccacgaagtccccactgcagggagccagggtcctagatgccaggccaatgcatgtgccgtgagctggccgaggggtctgctggtcccaagancgcctc

SEQ ID NO: 6485 - DNA, 342 bp, Homo sapiens
  III.113 (W03694)
  misc_feature (5)..(5): n is a, c, g, or t
  misc_feature (12)..(12): n is a, c, g, or t
  misc_feature (44)..(44): n is a, c, g, or t
  misc_feature (46)..(46): n is a, c, g, or t
  misc_feature (112)..(112): n is a, c, g, or t
gtctncccaggnggtccggggagccaatggtgtccatgcaggcngnagaggagatccgcatcctcgcagtgatcactatccaggcgggcgtccgtggctacctggcgcgtcnaggatccgcctaccagctggctgccctgagtcccaggcagccgcatcgccaggacaaagcgggccacagcatccagtccgcctggaggggctttaagatccgccagcagatgaggcagcagcaaatggcagcgaagatagttcaagccacctggcgagggccaccatacccggagctgtctgaagaacacagaggcgctcttgggaccagcagacccctcggccagttca

SEQ ID NO: 6486 - DNA, 321 bp, Homo sapiens
  III.114 (AA062878)
  misc_feature (2)..(2): n is a, c, g, or t
  misc_feature (18)..(18): n is a, c, g, or t
  misc_feature (142)..(142): n is a, c, g, or t
tnagacaagcatgtatgnattttcaatttcttagataccgtcatatggccaaagtggagacaccagtttaaacttttaacaagagagcctgtttgcccacaatcctcatcaacccacgatagtagcagactttttacctttngccatgtaagtgtgtggggagaagcagagccagcgctgtcaaaccacagctccacgtccatggtttgagatctccccaaagcaggggagcaaagagttcctcgggcttctgagctcgagcccagtataaatggccaatcccttgccctgccctctgccagctatctggaagaggcgagc

SEQ ID NO: 6487 - DNA, 347 bp, Homo sapiens
  III.115 (R14681)
  misc_feature (331)..(331): n is a, c, g, or t
catggtggtctctcgccatctatagatacactggatcatatcagagcacttgatcgcctacaagaagttccccatgagggtccaatgtgtgacttgctgtggtcagatccagatgaccgtggtggttggggtatatctcctcgaggagctggttacacctttgggcaagatatttctgagacatttaatcatgccaatggcctcacgttggtgtctagagctcaccagctagtgatgggaggggatataactgggtgccatgaccggaatgtagtaacgattttcagtgctccaaactatttgttattcgttgtgggtaaccaagctgcantcaggggacttgacgg

SEQ ID NO: 6488 - DNA, 284 bp, Homo sapiens
  III.116 (R42404)
  misc_feature (10)..(10): n is a, c, g, or t
  misc_feature (11)..(11): n is a, c, g, or t
  misc_feature (50)..(50): n is a, c, g, or t
  misc_feature (213)..(213): n is a, c, g, or t
  misc_feature (218)..(218): n is a, c, g, or t
  misc_feature (263)..(263): n is a, c, g, or t
tttttttttnnttttttgtagtgcccttgatttttattttacctacaagnctacaaattctaaaatttactcaattgatttaacttttttaataaacagcaccagtcttgcccattgatacaattaaaatttgaccttctcagttcttagttcacaagtttattatgaaaaacactgcagtgctcttgtgcagtcacatcgtcttacaggganggggnaaaaaacagttctgttcaaaacaactcaccggggtctgacaatancaagggaccaccaggggggct

SEQ ID NO: 6489 - DNA, 502 bp, Homo sapiens
  III.117 (T85946)
  misc_feature (33)..(33): n is a, c, g, or t
  misc_feature (117)..(117): n is a, c, g, or t
  misc_feature (164)..(164): n is a, c, g, or t
  misc_feature (168)..(168): n is a, c, g, or t
  misc_feature (196)..(196): n is a, c, g, or t
  misc_feature (339)..(339): n is a, c, g, or t
  misc_feature (359)..(359): n is a, c, g, or t
  misc_feature (365)..(365): n is a, c, g, or t
  misc_feature (416)..(416): n is a, c, g, or t
  misc_feature (425)..(425): n is a, c, g, or t
  misc_feature (473)..(473): n is a, c, g, or t
  misc_feature (483)..(483): n is a, c, g, or t
  misc_feature (489)..(489): n is a, c, g, or t
  misc_feature (496)..(496): n is a, c, g, or t
  misc_feature (502)..(502): n is a, c, g, or t
tttccctgaagtggctggggttcctgtttcctnctttgattgacaacttgtgttaaccctcgcacatctctgggccaatttttgcttgaaaatggcagctcccgagcagccgcttgnattatcaaggggatgcacgagctcctcctcgctttccccgcctcggncganccgaacccttctggtcaggcacctgcgnctgagcttactgctgaggagaaagaggacttgctgaagtacttcggggctcagtctgtgcgggtcctgtcagataaggggcgactggaaacatacagcttttgccacatttcccttaatggaaaaagcagctataaaagggcnttgacaagattccattcaantgaaanttttagggtcatattttagttcgttggattttgcaaaggggcaagttccgngtttcattncccctgttcccattttcaggtttttgaaaaaaaaaaaggttttgttgnacctgttggnggttgnttaaggnaaaatn

SEQ ID NO: 6490 - DNA, 527 bp, Homo sapiens
  III.118 (T86971)
  misc_feature (17)..(17): n is a, c, g, or t
  misc_feature (464)..(464): n is a, c, g, or t
  misc_feature (497)..(497): n is a, c, g, or t
  misc_feature (517)..(517): n is a, c, g, or t
ttctcacattggcgctntttacttgttttaggtcttttgggctgaagatttgctagttccattaatttgttcattctctgtcggtcctcatcatcagtgctttcatattctgattcttcactagataattcctcatcctcgtctggcaaaggaggttcctcaggtggctgaggagatgtgggtggaagaggtgcatgcaatggcatatagtcttcatacatgggaggtcgcgcagtaattggtccaaaaggtgtgggcaaattcattttattcataagatgaaggacctgtacatagaacttaggcacgcttgccaaggcatttacaatgtttgctaggattgtgctggaaggtgggtgggtacatatacttgaggcatgaatttaaaggaaaagtcagcccatgggtttgggtgccaattcccattttcctaccttgttaaataacccaagttcctttttttncttttaaccaaccttcggccagggtcaaccagnccttttttttttttttcagnacccttaagg

SEQ ID NO: 6491 - DNA, 465 bp, Homo sapiens
  III.119 (W57946)
  misc_feature (366)..(366): n is a, c, g, or t
caactatgaggtgattgatgagcagacacccctgtactcagcagatccaaacgccatcgatacggactattaccctggaggctacgacatcgaaagtgattttcctccacccccagaagacttccccgcagctgatgagctaccaccgttaccgcccgaattcagcaatcagtttgaatccatccaccctcctagagacatgcctgccgcgggtagcttgggttcttcatcaagaaaccggcagaggttcaacttgaatcagtatttgcccaatttttatcccctcgatatgtctgaacctcaaacaaaaggcactggtgagaatagtacttgtagagaaccccatgccccttacccgccaggatncaaagacacttcgaggcgcccgctgtcgagagcatgcccatgtctgtgtacgcctccaccgcctcctgctctgacgtgtcagcctgctgcgaagtggag

SEQ ID NO: 6492 - DNA, 473 bp, Homo sapiens
  III.120 (W58029)
  misc_feature (395)..(395): n is a, c, g, or t
  misc_feature (449)..(449): n is a, c, g, or t
  misc_feature (459)..(459): n is a, c, g, or t
  misc_feature (472)..(472): n is a, c, g, or t
attaataatttattgtcagtaagaaagactggctaatggtagttttcattaaaaacctttacaagaccattgcatcacaaatatacagacactataaaaactgtgtcatggtggttttggttctaaacaggtatgcagaaggtccccgttacactttccaataatgaaaaatgtttataattctaaatacagcaacccatgtaagacatgttcatgtatctgatctctccttcatcctatgtacagctagaaatgaatgactacactgaaatgtactaacaaaatgtcacacttcagtggaaaaagacagaatgaaaccctggttatagtaaaaaaaaaaatcagggtgctagataatggcactaccaccaccaaaattcagtttgaaacaaatncacaaaatatcttggaaatcctagttaaaactatgaaaaatccaatctggtacntaaaaatttnacaaaaaaaaggng

SEQ ID NO: 6493 - DNA, 450 bp, Homo sapiens
  III.121 (AA018449)
  misc_feature (4)..(4): n is a, c, g, or t
  misc_feature (11)..(11): n is a, c, g, or t
  misc_feature (13)..(13): n is a, c, g, or t
  misc_feature (17)..(17): n is a, c, g, or t
  misc_feature (238)..(238): n is a, c, g, or t
  misc_feature (291)..(291): n is a, c, g, or t
  misc_feature (296)..(296): n is a, c, g, or t
gtgncctccgnancctnaccccttcgagcgcatgatcttcggcgcctgctggcctcatcgggcagtcggcctcgtacccgctggatgtggtgcggcggcgcatgcagacggccggcgtcacgggctacccgcgcgcctccatcgcccgcacgctgcgcaccatcgtggggaggagggcgccgtgcggcctctacaaaggcttgagcatgaactgggtcaagggtcccatcgccgtggnatcagcttcaccaccttcgacctcatgcagatcctgctgcggcacctgcagangctanggggaccctgagctgctctcaggacggtggaccggttgacccctttgtattctggggcccatggaacggtgggggggtgcgcttgattctacttcaggaggcacatggggcgctttatggaacgagcaggtgggcctgaggggctgggctcaga

SEQ ID NO: 6494 - DNA, 468 bp, Homo sapiens
  III.122 (AA018477)
  misc_feature (160)..(160): n is a, c, g, or t
  misc_feature (376)..(376): n is a, c, g, or t
  misc_feature (393)..(393): n is a, c, g, or t
  misc_feature (409)..(409): n is a, c, g, or t
tttaagaagtcatttaagtttttattaaatatactctcttggcacaaatctttaaaatatataaacattagatataaacagtgtcttcatggcatcaaaatataactccagaccaagaccagtgaccagcagggaggcgagtgaccgcagagcctgaggnctggctgtgtgcaggggtgggggacagcactgtcccaactcctgccgggtcccactcagctaggagccatctccggggagacacactggggtcagcagggactgggggaccctcccacctaccccttgtctctcctgcctaagcctgtggcccaaatccactcatttggtctcacccacctggggcaagacccccaattcctactgctgttgcatncttgtgggagttgggtnccctcccatctccctntgagggttgccctgcctctcctgccaagtttaagtgctgggtaagggatacccacacag

SEQ ID NO: 6495 - DNA, 288 bp, Homo sapiens
  III.123 (H29557)
  misc_feature (193)..(193): n is a, c, g, or t
  misc_feature (194)..(194): n is a, c, g, or t
  misc_feature (217)..(217): n is a, c, g, or t
  misc_feature (225)..(225): n is a, c, g, or t
  misc_feature (226)..(226): n is a, c, g, or t
  misc_feature (244)..(244): n is a, c, g, or t
  misc_feature (247)..(247): n is a, c, g, or t
  misc_feature (253)..(253): n is a, c, g, or t
  misc_feature (275)..(275): n is a, c, g, or t
  misc_feature (281)..(281): n is a, c, g, or t
tttttttttttttaggaaaataacttaatttgctaaattcatcacacgcacaaacatcacacacacaaagaagctactctccttataaacagcttgtaaaggacttctcagacataactacagataagaataatacactttttaaaaaactataatagtgaagtgctagtgttgctgatctcacaacaaaagnncctttcaagaacaaacatcttantatataanntatgtttagaaacagggngangtgggnaatttgttatacaagtgcaatntaattngggcaga

SEQ ID NO: 6496 - DNA, 409 bp, Homo sapiens
  III.124 (W32008)
  misc_feature (259)..(259): n is a, c, g, or t
  misc_feature (260)..(260): n is a, c, g, or t
  misc_feature (269)..(269): n is a, c, g, or t
  misc_feature (273)..(273): n is a, c, g, or t
  misc_feature (276)..(276): n is a, c, g, or t
  misc_feature (293)..(293): n is a, c, g, or t
  misc_feature (320)..(320): n is a, c, g, or t
  misc_feature (323)..(323): n is a, c, g, or t
  misc_feature (326)..(326): n is a, c, g, or t
  misc_feature (373)..(373): n is a, c, g, or t
ctctttctacttttatttttcaaattttatttctgtgaaaatgtatttgtttacataaaaatacaaatctgggtagcaactgggtatttcaagaaaacaccgtggacagacttgtctccattcccacggggaagtgaaggcgctttgataaaagggccaagggtgccctccgtgtggccacggagggaaatgccgcggcttcagcagaaaggaggggctccaggagctggtcgtgaagtcatcagctccctccctttcnnaaaaaacgncctngantttcccaacaggctttntccatcttttccactccttgcagtttngtnatncctgtcacaacttaagaagttccgagtgctcacatgggtaagctttngatttccatcgagaggaaaggctttatgttttataa

SEQ ID NO: 6497 - DNA, 436 bp, Homo sapiens
  III.125 (W32156)
  misc_feature (300)..(300): n is a, c, g, or t
gtttttctttgaagaaatgggttattgactcatatgtcataaccttgagtgttactctcccggtgtccgaggtcacattcatgttgcggggttggtatgaaattaaatcttggtgatgtgaccctacattctcttctggtccctagaatcggcttctggtctcctgataactgaagtggagacagaagttgagcctgttgcccaggcaaactaaagctgcttttgttcttcggaatctgctttgcctccgtcagcctgcttccttccccacacatgctggccgcactgtccccactccangacctctgctgtgtgtcctgggcagggcgccgttttggcagtaccctttcaactcatcctaagcttccgtgtagattactttagtatatattttttataaaacataaagcctttcctctcgatggaaatcaaagct

SEQ ID NO: 6498 - DNA, 371 bp, Homo sapiens
  III.126 (R13941)
  misc_feature (368)..(368): n is a, c, g, or t
gtcaagatagacccttaacaaaaattaatagtgtaaagctgaattctctgccatctgaatatgagagtgggtcagcatgccctgctcagactgtgcactacagaccaatcaacttgagcagttcagagaacaaaatagtcaatgttagcctggcagatcttagaggtggaaatcgccccaatacagggcccttatacacagaggccgatcgagtcatacagagaacaaattcaatgcagcagttgggaacagtgggattaaaatccaggaaggggaggggttcatggaaggaagaaaccagggggagttatttctttaccaaacatttaccaaggaattatggccaagttcacagggcccaggttatnggc

SEQ ID NO: 6499 - DNA, 415 bp, Homo sapiens
  III.127 (R40000)
  misc_feature (400)..(400): n is a, c, g, or t
  misc_feature (406)..(406): n is a, c, g, or t
  misc_feature (411)..(411): n is a, c, g, or t
ttttttttttaggaaaatggcacatttaatattcaacagcaaaatgttcagcgaagcatggctaagaatactgcagcatcttgaaaagcatggatgaattgtggttttccaaataaacataaacaaaaaataaaataagaaaaacactgatgtcatgagtaaatctgaggaataaatcaaaactgtcactgggggattttgcaggatggataaaggcaggtatcattcactgttccaaggaccttacttgctgggtacagttgggggtcttaggcgccgagttcttcaatcattgtgtggaaccatgggtgattaatagggttcattttcttttcatctattttcaaatcaggggggaggcatacaggcaaacatccgttttacagcctagctggatggntccccnatttntggg

SEQ ID NO: 6500 - DNA, 414 bp, Homo sapiens
  III.128 (T85849)
  misc_feature (279)..(279): n is a, c, g, or t
  misc_feature (289)..(289): n is a, c, g, or t
  misc_feature (321)..(321): n is a, c, g, or t
  misc_feature (327)..(327): n is a, c, g, or t
  misc_feature (366)..(366): n is a, c, g, or t
  misc_feature (403)..(403): n is a, c, g, or t
tcactttcagggctcttggaagccaggtgcattttaggattaaagagaaacaaggaaacccgtttgacaaaggtgtttttcaagattgaagagaaagaaatagaacatgctctgaaagataaagctttaattggaaatatcttagctactggattgccttaaattcttctcttacaccccacccgaaagtattcagctgggcatttagagagctacagtcttcattttagtgctttacacattcgggcctgaaaacaaatatgaccttttttacttganggccaatggnattttaatctataggattcttttaatattagncacagnaattaatatctttgggggtctttacttatttttaccccnttaaaaagtgaccggggtaggaccccttttttaattnccatttcacta

SEQ ID NO: 6501 - DNA, 387 bp, Homo sapiens
  III.129 (T90853)
  misc_feature (286)..(286): n is a, c, g, or t
  misc_feature (341)..(341): n is a, c, g, or t
  misc_feature (375)..(375): n is a, c, g, or t
ttgaaaataaatatattcacaatctgtagagttatagtctccattatgaccccaacgcccttgggagtgcccaagaaactcaacgagtctaaaatgccacaatgttgtagtatctgcaccatgaacatagtatactatacaaagaaataaattctttaaccagtgtcctccaaatctccatgtggacttgcttgcatttttctggatcattttcattcttcttaccctaaacttaaaggttcttaacaaaataccttaatggctgagcatgggtggctcacggctnttaatcccagcacttagggaggccaaggtgggcaggatcacttgagggtcagggngtttcaaggccagcctggggcaacatgggtaaanccctggtcttct

SEQ ID NO: 6502 - DNA, 454 bp, Homo sapiens
  III.130 (H67143)
  misc_feature (116)..(116): n is a, c, g, or t
  misc_feature (289)..(289): n is a, c, g, or t
  misc_feature (360)..(360): n is a, c, g, or t
  misc_feature (375)..(375): n is a, c, g, or t
  misc_feature (390)..(390): n is a, c, g, or t
  misc_feature (404)..(404): n is a, c, g, or t
  misc_feature (412)..(412): n is a, c, g, or t
  misc_feature (419)..(419): n is a, c, g, or t
  misc_feature (437)..(437): n is a, c, g, or t
  misc_feature (445)..(445): n is a, c, g, or t
  misc_feature (450)..(450): n is a, c, g, or t
tgtggccttatcttctttctttccttcctgtcttccttttaatgaaggtgattttctctgatggcatgatttagtttcttcctttttattttttgtgtatctgttgtatgtttttntggtttgaggttaccatgaggcttacaaatattatcttataatctattattttaagcttataacaacttaattcttcttgcataagcaaacaagcaaaaagaaagccaataaagactacaccttaacttcattccctgcttttttaactttttgttgctactacttacatctnactgtactgtccatggtcttggacaaggttgttgtaggttattatctttggattggcatcatcatttaggnctttctatttaaggntaagggggtaatttnaccacaccacaggntacaaagntattaanattccgggggtttccccngggacttnccatnaccg

SEQ ID NO: 6503 - DNA, 348 bp, Homo sapiens
  III.131 (H81445)
  misc_feature (201)..(201): n is a, c, g, or t
  misc_feature (270)..(270): n is a, c, g, or t
  misc_feature (325)..(325): n is a, c, g, or t
  misc_feature (344)..(344): n is a, c, g, or t
taacagagagctttccaaacctagagaaagataccaatattgaagaaggctgtaaaacaccaaacagatttaacctaaataagactacctcaatacactaaataatcaaactcccaaagattgaagaaaaaaaattcctaaaagcaacaagagaaaagaagcaaataacatgcaatggagttccaatatgtctggcagcanagttttcagtggaaattttacaggccaggagatagtggcatgttaaatttaaagtgctgaaggaaatanacttttaccctataattgtatatccagcaaaattatcattcagatttgagggagntattaaagactttcccagncata

SEQ ID NO: 6504 - DNA, 246 bp, Homo sapiens
  III.132 (H70886)
  misc_feature (219)..(219): n is a, c, g, or t
  misc_feature (231)..(231): n is a, c, g, or t
gggtctgtttaatgacacagctgggtctggttacaaacatcagaaactagaaaaggaggacgggcggttgcacagatgaggatgaggatgaagatgaggatgaggatgggccaggaggggacacagcaggagccacagcagcaaaacatccttgaagacgacacacgtgaccaaggggcacacacggggggccccctgggcaagcctgacgcagatgantagacagggccnactgcccgccaggga

SEQ ID NO: 6505 - DNA, 380 bp, Homo sapiens
  III.133 (H71288)
  misc_feature (367)..(367): n is a, c, g, or t
agacctagctgagcgactggcaggaagcgggacaggtctaggagtcccttagggaataaaccagccccgtttctatcagcccggccagcatgcaggtctccacatcaccatctagagtatcacgcacacatctaccatatatacagatatattctatatacgatctatatataaatatatatatacatatatatatacacacatacatatctagaatgtgtatccgcggcgcccagaagcctcggtttggcccacctgtgagtggggcagggaggggttccggttgtgcagagaacagagtgttctgggcaaagaggaaatcccacagcagcgcagagggacctggggcctgggaggggcagggctngggcaacccggct

SEQ ID NO: 6506 - DNA, 590 bp, Homo sapiens
  III.134 (N57537)
  misc_feature (19)..(19): n is a, c, g, or t
  misc_feature (20)..(20): n is a, c, g, or t
  misc_feature (25)..(25): n is a, c, g, or t
  misc_feature (89)..(89): n is a, c, g, or t
  misc_feature (337)..(337): n is a, c, g, or t
  misc_feature (369)..(369): n is a, c, g, or t
  misc_feature (465)..(465): n is a, c, g, or t
  misc_feature (484)..(484): n is a, c, g, or t
  misc_feature (505)..(505): n is a, c, g, or t
  misc_feature (534)..(534): n is a, c, g, or t
tgtctcgctcttccctctnnacccngaccacaacccccttaaagggccagcccctctacaggcccctctcccctactccgcccccgggnaggggtaaggggagggtctattcggcagggggtggcctagctgtccgtactccccaaacgcaaccttccagtcccaaacccaggcgttctaagcgctcaggacgacgatttgcgctcacgccaggaccctagtcttcattggacccttcctcattctgtcctcattgaggccatctgagaataggggctatctgagaatgcaggggagtggacatcgtgtgcagacagggaatctggtgaggagacgntgcggtcccccgatgttccaggtccttccagnccttgggcagcgaaggaacgaacgggcttcttccgcacggaccgacacgtggactgggcttctgggaaaggaagagttgagaaaggcgggcaaganctgttccgggttcctagantctccgagtaagcaggtccangccccagcgaagaagccgggcttggggtnaacggtggacccggcgggccactcgtgcgaatttttggctcaaggcaaatttctat

SEQ ID NO: 6507 - DNA, 380 bp, Homo sapiens
  III.135 (R33626)
  misc_feature (142)..(142): n is a, c, g, or t
  misc_feature (349)..(349): n is a, c, g, or t
taaagatttcaaatatttatttatctgggcaacaaaggactatgatacattgacaggcatggaaactactgccagcacaactcaatacaatgcaactagaactgcttccaatatggccagtgaaaatacagaataccagggnggtcccaaatgtttgaagttctttgaacagaaagagagaggagagagagagagagagggaaaattccctaacccttgggtttaaagacaatattcatttattgctcaaatgatgcttttaaggggagggacagtggggaattaaaataacttttttttttctccccctaccaatacataggaggggggttatccaacccacttccangtttccaaatctttccagggggggccccata

SEQ ID NO: 6508 - DNA, 357 bp, Homo sapiens
  III.136 (R33738)
ctttaaggtaaagcgaccaacttgaactttctctggcaacacgattcgcagttatataagggaatcagtgttcacgtctctgtatatatttatttatgtgtaatttaatgggaattgtaaatatggtgagtctgttttaagcctttttttttttatttatctgatcttgtttacctcttgtttagtgggttttgaatcttccctattagttcttcatgtggttcatggtactgatttagaaatccagtttttgggggatttttttctctggggattcatgaatttagccctgttgtaggcatgttaaaggtgacaaacagctgggacaaatttttaaaaagtaaaataaaattttat

SEQ ID NO: 6509 - DNA, 450 bp, Homo sapiens
  III.137 (N29860)
  misc_feature (154)..(154): n is a, c, g, or t
  misc_feature (159)..(159): n is a, c, g, or t
  misc_feature (450)..(450): n is a, c, g, or t
ttggaggttgccccaaaaagcttttattatctagattaaggttaatgcacttttaaatcataatgttaacattttttttcttaatagagacagagtttagccatgttgcccaggctgaccttgaattcctgagctcaagtgatccgcccacctnagccncccagagtgctgggattacaggcatgagccaccatgcccagcccacgttaacattttttatgaagaataacttccaaaacaatccaaggagaagggtggcattttacagtctctttagtatcttgttataataaacagttgaattcttacagctgcttctacatccaaacttttttgttgaagtaagttgacttcacacagatacgcagtttggaaaagtttttaaaatagccctttcagctaattgtggctattccttgataccacaccaagactacaagtgattttttn

SEQ ID NO: 6510 - DNA, 600 bp, Homo sapiens
  III.138 (N57282)
  misc_feature (537)..(537): n is a, c, g, or t
  misc_feature (598)..(598): n is a, c, g, or t
gagtgaaaccctgtctcaaaaagaaaaaaaaagttgaccttgagaatttataatattctgagaaaactggaagcatgcataaagcccctctgctgtgcactgaagtatgggtgccttgaggaaaagcagttacacagttgagttgcaagctgaattggctgtgttcaaggcatgccctttagaattgaaagaactagcagattacggtatttagacttgaatatttggctgatattttctggaaattaatggaatgagcctctcacctcaagggaaacaactgatagtgttgccagtgataaagctttcaagcaaaaattggaatttccgaaaatctgtactccaccatgagctttattgttggggatattaacaaatgtgatttgtataatgaaatgcatttcatttggaagaattcaatgaaccatttttccaagtgaccagtacgtgatgttacaaaatcatgcatggctcaaagattgattcaaagtgtaagacaggccagtggattttaatgtattaacaatataagagtgnattaagtttccggagcctacattgcctttaggaacctatggcttgtagtagccgggcccgntt

SEQ ID NO: 6511 - DNA, 553 bp, Homo sapiens
  III.139 (AF086128)
gtaaagatcaaatcagtataattgggatacttattgccttaaacaggtatcttttctttttctggaggcagccaaatgattcttatctgggtatttgaaaatatcaactagatttttgtgaactatagtcactctactagattgatcaaagcctaggtctcatttcttctgtctgtttgtacccattgatcaacttctctccatcctcttctttgctttgctgaattattgtttccacactggaattcctcagcatgcttcctgaatgccttctgctgtagcgaatctcctgcagggtccacacgttagtggctctgtacgctacttttactttaggtttctgattgtttatgttgtaaaggaaatatttccatttatgattttaaaaatattgtttgtgaaagaacaattcttttcacagtttttaatgaaaggtttatgcctataagtaatgtctatggaggaagagacctcagggaattgacttcaggaaatcatgaatttgctctttattatgttgtgtaataaaacacttttatattcaaaaaaaaaa

SEQ ID NO: 6512 - DNA, 533 bp, Homo sapiens
  III.140 (AI822048)
  misc_feature (493)..(493): n is a, c, g, or t
gtaaagatcaaatcagtataattgggatacttattgccttaaacaggtatcttttctttttctggaggcagccaaatgattcttatctgggtatttgaaaatatcaactagatttttgtgaactatagtcactctactagattgatcaaagcctaggtctcatttcttctgtctgtttgtacccattgatcaacttctctccatcctcttctttgctttgctgaattattgtttccacactggaattcctcagcatgcttcctgaatgccttctgctgtagcgaatctcctgcagggtccacacgttagtggctctgtacgctacttttactttaggtttctgattgtttatgttgtaaaggaaatatttccatttatgattttaaaaatattgtttgtgaaagaacaattcttttcacagtttttaatgaaaggtttatgcctataagtaatgtctatggaggaagagacctcagggaattgacttcagganatcatgaatttgctctttattatgttgtgtaataaaacac

SEQ ID NO: 6513 - DNA, 490 bp, Homo sapiens
  III.141 (AI822101)
ttgaatattaaagtgttttattacacaacataataaagagcaaattcatgatttcctgaagtcaattccctgaggtctcttcctccatagacattacttataggcataaacctttcattaaaaactgtgaaaagaattgttctttcacaaacaatatttttaaaatcataaatggaaatatttcctttacaacataaacaatcagaaacctaaagtaaaagtagcgtacagagccactaacgtgtggaccctgcaggagattcgctacagcagaaggcattcaggaagcatgctgaggaattccagtgtggaaacaataattcagcaaagcaaagaagaggatggagagaagttgatcaatgggtacaaacagacagaagaaatgagacctaggctttgatcaatctagtagagtgactatagttcacaaaaatctagttgatattttcaaatacccagataagaatcatttggctgcctccagaaaaag

SEQ ID NO: 6514 - DNA, 399 bp, Homo sapiens
  III.142 (N75394)
gaatataaaagtgttttattacacaacataataaagagcaaattcatgatttcctgaagtcaattccctgaggtctcttcctccatagacattacttataggcataaacctttcattaaaaactgtgaaaagaattgttctttcacaaacaatatttttaaaatcataaatggaaatatttcctttacaacataaacaatcagaaacctaaagtaaaagtagcgtacagagccactaacgtgtggaccctgcaggagattcgctacagcagaaggcattcaggaagcatgctgaggaattccagtgtggaaacaataattcagcaaagcaaagaagaggatggagagaagttgatcaatgggtacaaacagacagaagaaatggagacctaggctttga

SEQ ID NO: 6515 - DNA, 449 bp, Homo sapiens
  III.143 (W04893)
  misc_feature (1)..(1): n is a, c, g, or t
  misc_feature (315)..(315): n is a, c, g, or t
  misc_feature (316)..(316): n is a, c, g, or t
ngtaaaggatcaaatcagtataattgggatacttattgccttaaacaggtatcttttctttttctggaggcagccaaatgattcttatctgggtatttgaaaatatcaactagatttttgtgaactatagtcactctactagattgatcaaagcctaggtctcatttcttctgtctgtttgtacccattgatcaacttctctccatcctcttctttgctttgctgaattattgtttccacactggaattcctcagcatgcttcctgaatgccttctgctgtagcgaatctcctgcagggtccacaccgttagggnntcctgtacgctacttttactttaggtttctgattgtttatgttgtaaaggaaatatttccatttatgattttaaaaatattgttttgtgaaaagaacaattcttttcacagtttttaatgaaagggttatgcc

SEQ ID NO: 6516 - DNA, 444 bp, Homo sapiens
  III.144 (R52308)
  misc_feature (17)..(17): n is a, c, g, or t
  misc_feature (360)..(360): n is a, c, g, or t
  misc_feature (387)..(387): n is a, c, g, or t
  misc_feature (393)..(393): n is a, c, g, or t
  misc_feature (408)..(408): n is a, c, g, or t
  misc_feature (417)..(417): n is a, c, g, or t
ggtgacccaggcccttnagcaccgttcacagtattttgaaggtgttgtgaagtgcaataagctggaaatactggagaccatcgtggacagaatagtaagagctgaggtccatcggctggtggtggtaaatgaagcagatagtattgtgggtattatttccctgtcggacattctgcaagccctgatcctcacaccagcaggtgccaaacaaaaggagacagaaacggagtagccgccgtgaatgtagacgccctaggaggagaacttgaacaaagtctctgggtcacgttttgcctcatgaacactggctgcaagtggttaagaatgtatatcagggtttaacgataggtatttcttccngtggatgtttgaaattaagcttaaaanaggaangtttttatgtgcttngaaggttcnggcttgcattataagtctgtttttcag

SEQ ID NO: 6517 - DNA, 255 bp, Homo sapiens
  III.145 (R54471)
tttttttttaacaaaatggtagatagtaggatttattttaatttttcaatctgaaaaaaaaaaaacccaaaacaaaaaaaaacaaactatcctcatatatatatatacagtgtcaacattttcagagcacttacattaggaaacattgtttctcttcaactgtatgacaatactgtatatgccacaataaaatttacaaaaacaatcggcatcagcagtcataacaaacatcatggattttacatttcaatacac

SEQ ID NO: 6518 - DNA, 380 bp, Homo sapiens
  III.146 (R60283)
  misc_feature (239)..(239): n is a, c, g, or t
  misc_feature (246)..(246): n is a, c, g, or t
  misc_feature (259)..(259): n is a, c, g, or t
  misc_feature (285)..(285): n is a, c, g, or t
  misc_feature (294)..(294): n is a, c, g, or t
  misc_feature (303)..(303): n is a, c, g, or t
  misc_feature (331)..(331): n is a, c, g, or t
  misc_feature (361)..(361): n is a, c, g, or t
gtgcaatctttggggggaacaggtgcacttcgaattggagctgatttcttagcgcgttggtacaatggaacaaacaacaagaacacacctgtctatgtgtcctcaccaacctgggagaatcacaatgctgtgttttccgctgctggttttaaagacattcggtcctatcgctactgggatgcagagaagagaggattggacctccagggcttcctgaatgatctggagaatgctcctgnagttctncattgttgtcctncacgcctgtgcacacaaccccaactnggatttgancccaacttnccgagcaattggaagcagatttgctttnttgttcatgaagcaaccggttttctttttnccccttttttttgaattca

SEQ ID NO: 6519 - DNA, 475 bp, Homo sapiens
  III.147 (R60789)
  misc_feature (68)..(68): n is a, c, g, or t
  misc_feature (397)..(397): n is a, c, g, or t
ttttttttttctcatgatcaaagtactcttttattcttaaataaaaatcttaatttgctttgacctcnaaaggctctaatcccagtctccaaattcgtctcaagggatgttctcttcatgtggggccggtttaaacagaggctgcctcaccagagcagcctttcagtcctgcaagtgtctctaatccatggtatgtacatgtaggtttgtgcaggcagggaacacacatgacagagaactactttggtggtactggacgggtggtgtttcttcactgggattttgggtgactgcttcatgggatgggaggtgggccacgtaatctaggatttttggtgggttaagccacttcacgttgattcgaccacttgggcaggcagggtaggatgtgcttttncattggaccaggatactcaacctgcttgggggtttcaacccagttgaaggtggaacatgccatttggatcagtgatgt

SEQ ID NO: 6520 - DNA, 423 bp, Homo sapiens
  III.148 (H11296)
  misc_feature (374)..(374): n is a, c, g, or t
  misc_feature (397)..(397): n is a, c, g, or t
atttgtttgacaacagctacaattgaaatacagcaattctgaaggtctttaaatgggttgcactttgccctgttaactcactatttcctgattggcaataattttacttggtaatgctctgtattatggtaaaagctaacaataataatttatcgagtatattctttgtagcaggcacagttatgagtgctatgtgaatacatttaatcttcacagcaactttgaagtagggtactattactgtggcatattttgaaggatggggaaaactgagggcagacagtttgcctctgggagccctcactctggaaactctttatggatatatacccagaaactgtggacataggcccggggtgcccaattctgggccncttccacctgcttttggttaaantaaagttttttttgggattacaccca

SEQ ID NO: 6521 - DNA, 451 bp, Homo sapiens
  III.149 (H11297)
  misc_feature (51)..(51): n is a, c, g, or t
  misc_feature (68)..(68): n is a, c, g, or t
  misc_feature (118)..(118): n is a, c, g, or t
  misc_feature (318)..(318): n is a, c, g, or t
  misc_feature (384)..(384): n is a, c, g, or t
ttttttttttaactgtcagacagctgtggagtcaggagaaagaaccctggnagaggagaagacctggnttctctagctgggtgacctttgtaactgtcattcatttagcaagtatttnctgagtgtccaccctgtgctagcatcgtggtaggtgacagggacatgatgatgaagacacatgatccctacactcatggagtttgctcttcagcctagagtgtaagtcatttaatccctctgaactcctgattcttcatttctaaaatggaaataaaaagactacttacttcacaggattgctatgagaattaagtaagntaaatatgtacaaatccacaggtaaataccaaacataagggcatttttattataaggatattattnctttccctttaaactccagtctttttgtgaagtttaaagttgacatcagggggttagcaaacttttt

SEQ ID NO: 6522 - DNA, 442 bp, Homo sapiens
  III.150 (N69850)
  misc_feature (220)..(220): n is a, c, g, or t
  misc_feature (391)..(391): n is a, c, g, or t
  misc_feature (428)..(428): n is a, c, g, or t
atagtaagcactgatgtgtttattcgatgaaataggggtgggggtgtagcagccctagtcccacattgcatgggctggtgactgagttaacagcaaagtgggatgcaaaaggttcctgattggagacccccggattcgggttctggatttgctggccacttactctatgacttggggcatgtcactgtcatggcctcagtttccccttctgcacagtgtnttattggatagttccagctctgacatgctaggattatgtgatactgtcaatcaagactagggttggcctaagcacatggtctgaaaacacctcgggctcatggacatattttctccgcatggggagtgggcagctgctgagtggcaaggctgccctccaaagctgtccatnccacgcccggggtgctgtgggtctcctttccctcgtngccgaattcttggg

SEQ ID NO: 6523 - DNA, 349 bp, Homo sapiens
  III.151 (H69676)
  misc_feature (327)..(327): n is a, c, g, or t
  misc_feature (332)..(332): n is a, c, g, or t
tatattgtcttctattggttagagacagtgagagaagagacagaatgcactgaggtctcaattatttaacagatcctacttaacattttatattttaacataaacccgtgccaacaattgttctcatgagctttctaaaccattaagctacactgctctccttcttctaaatcaaatataagtaatttgttgtcatagcaatgcttcttcctactccaaaacagttcaatacatgctttgttttagccggcaactatctgtctaccaaaattgggcccataatcttccatctccttggacaaatgtcttattaaatttaggctgccnggggntttttacagtcatcggg

SEQ ID NO: 6524 - DNA, 159 bp, Homo sapiens
  III.152 (H70092)
  misc_feature (97)..(97): n is a, c, g, or t
  misc_feature (102)..(102): n is a, c, g, or t
  misc_feature (122)..(122): n is a, c, g, or t
cctcaatccctcctttccccctacctttccccacctctagtaactactactgtactctctacttctatgagatcaacttttttagtcctgctctttnttttnctttttattattattattantatcactatactttaagtcttaggatacatgtgcaca

SEQ ID NO: 6525 - DNA, 303 bp, Homo sapiens
  III.153 (T85350)
  misc_feature (122)..(122): n is a, c, g, or t
  misc_feature (124)..(124): n is a, c, g, or t
  misc_feature (126)..(126): n is a, c, g, or t
  misc_feature (148)..(148): n is a, c, g, or t
  misc_feature (187)..(187): n is a, c, g, or t
  misc_feature (189)..(189): n is a, c, g, or t
  misc_feature (191)..(191): n is a, c, g, or t
  misc_feature (198)..(198): n is a, c, g, or t
  misc_feature (215)..(215): n is a, c, g, or t
  misc_feature (224)..(224): n is a, c, g, or t
  misc_feature (236)..(236): n is a, c, g, or t
  misc_feature (239)..(239): n is a, c, g, or t
  misc_feature (294)..(294): n is a, c, g, or t
  misc_feature (299)..(299): n is a, c, g, or t
ttgtaaaatagtcttcccttttattttaaatcaacccttttccaagttagtgccacgagttgagatcagggggtcagagcccactgggatgtggcaggggcagcagggggactcatgtccancncncccagcttagtccctccaaggntgggaccggcagccagggatgaagggtgcgaggcgaggntntntgccccntcccctgccagccctantccctagtntgccccctcagntantcccaaggccaaggacagaaatggggagcacagtgggccaagagcagggaggcgntcctntgca

SEQ ID NO: 6526 - DNA, 380 bp, Homo sapiens
  III.154 (T85446)
  misc_feature (251)..(251): n is a, c, g, or t
  misc_feature (293)..(293): n is a, c, g, or t
  misc_feature (309)..(309): n is a, c, g, or t
  misc_feature (318)..(318): n is a, c, g, or t
  misc_feature (336)..(336): n is a, c, g, or t
  misc_feature (352)..(352): n is a, c, g, or t
tttcaaccctcaggaatccaagcgctttgtgcagtggcagtcgtctatctgagcccctcctcccggctggactggagcctggctccctcttcgttccttccctggctgccggagagaccccactaacccagcctgcctgggctctgaccactaacactcttggccatggacagcctgcacaggaccgcctccctgctcttggccactgtgctcccatttctgtccttggccttgggagtagctgagggggnagactaggggagtagggctggcaggggagggggcagacagcntcgccttgcacccttnatcctgggnttgccggtcccatccttnggagggattaaggttngggggttgggggacattgagttccttgg

SEQ ID NO: 6527 - DNA, 352 bp, Homo sapiens
  III.155 (W68526)
  misc_feature (148)..(148): n is a, c, g, or t
  misc_feature (161)..(161): n is a, c, g, or t
atgtgtaaaaaggctttatttggcaggggagcaggaatttaatcaaaaaggccaaatcccatgtcatcatctgactcttcagactcctccttcttctcatctttcttctcctctgctgcagcaggggcagaaccagcagcaggggctnacgatcctcgggnagcagagacggctacagcccaccagcaggtacactggcaagcttgccaataccctgggcaatgacgtcttcaatgttttttccattcagctcactgataaccttgttgagccggtcgtcgtccgcctcgatacccacgctgtccaagatcttcttgatgtccttggcgctgggggaggagttgccccctag

SEQ ID NO: 6528 - DNA, 442 bp, Homo sapiens
  III.156 (W68812)
  misc_feature (68)..(68): n is a, c, g, or t
  misc_feature (95)..(95): n is a, c, g, or t
  misc_feature (301)..(301): n is a, c, g, or t
  misc_feature (305)..(305): n is a, c, g, or t
  misc_feature (327)..(327): n is a, c, g, or t
accgaggtcgcacgcgtgagacttctccgccgcctccgccgcagacgccgccgcgactgcctacgtcnctcctacctgctggctgccctaggggnaactcctcccccagcgccaaggacatcaagaagatcttggacagcgtgggtatcgaggcggacgacgaccggctcaacaaggttatcagtgagctgaatggaaaaaacattgaagacgtcattgcccagggtattggcaagcttgcagtgtacctgctggtggggctgtagcgtctctgctgccccaggctctgcagcccctgctnctgngttctgcccctgctgcagaganggagaagaaagatgagaagaaggaggagtctgaagagtcagatgatgacatgggatttggcctttttgattaaattcctgctcccctgcaaataaagcctttttacacatctctc

SEQ ID NO: 6529 - DNA, 458 bp, Homo sapiens
  III.157 (R33029)
  misc_feature (310)..(310): n is a, c, g, or t
  misc_feature (401)..(401): n is a, c, g, or t
  misc_feature (409)..(409): n is a, c, g, or t
  misc_feature (414)..(414): n is a, c, g, or t
tgaggttcttttttgtctctttaaaatcatttttaaaaagttacaaaacaatatcattcatcatatattcttattttcctttttttaaaaaattaaagtaataaaaaagtcactttataaaataatataaaagggcttgatgggtggggccggtgggtgctgtctgagctggtggactgaggaatccagtgcttctcttctgggctaccccctcgttgtcaggaaggacccccagggccacagatgggggatgacagcaggtcccttgtctctgggctggggctgtggggagaggggcaggggaaagccnggggcagggaggggcagtggggcagaccccagaacagggggggacggctgggggccctgtccccgaaggagacgggagggcctgcttggtnggggggtnaggtngcactttggggcagccggtttcttgggcccttcagtgcccgttt

SEQ ID NO: 6530 - DNA, 333 bp, Homo sapiens
  III.158 (R33916)
  misc_feature (1)..(1): n is a, c, g, or t
  misc_feature (35)..(35): n is a, c, g, or t
  misc_feature (37)..(37): n is a, c, g, or t
  misc_feature (330)..(330): n is a, c, g, or t
ngagatcatcatccggagccactggacggatgcgntngaaaggggacgtcgctgccccgagcactgcactgctgggacaggagcctccatgacagccacaaggccagcaagacccccctcaagggctgccccgtccacctggtggacagctgcccctggccccactgcaacccctcatgccccaccgtccgagaccagttcacggggcaagagatgaacgtggcccagttcctcatgcacatgggcttcgacatgcagacggtggcccagccgcagggacttggagcccagttgagctgctgggggattgttgagcaacggaagctaggnaag

SEQ ID NO: 6531 - DNA, 474 bp, Homo sapiens
  III.159 (H04638)
  misc_feature (319)..(319): n is a, c, g, or t
  misc_feature (406)..(406): n is a, c, g, or t
  misc_feature (416)..(416): n is a, c, g, or t
  misc_feature (424)..(424): n is a, c, g, or t
  misc_feature (442)..(442): n is a, c, g, or t
gtatcactcactcctgagggtagccccttcaggttgggatccatagagagcagcgggacaaaaggcagttcctaggctggatgcccggcttctcacaggcacgtcgtaaacctggcgtctcaaattcttgcaggaacaagcaggtactaattataacctgtacagcctgttaacagtcgaccttggactccaaggaggtgaaggttctggggagaaggtctcaagggtcctctggatatctcagatataagacaggaggtaggccgggcgcagtggctcacgcctttaatcccagcacttttggaggccgaggcgggtnggatcacctgaggtcaagagttcaagaccagcctgaccaacatggtgaaactccgtctctactaaaaataaaaaaattagtcgggtntggtgcagtnctgtagtnccagctattctggagctnagcaggagaattcttaacatggagcggagttc

SEQ ID NO: 6532 - DNA, 249 bp, Homo sapiens
  III.160 (H04658)
  misc_feature (61)..(61): n is a, c, g, or t
tttttttttttttttgagatgggagtttagctcttgttgcccaggctggagtgcagtggcnccatctcagctcactgcaacctccgcctcccatgttcaagcaattctcctgcctcagcctccagaatagctgggactacaggcacctgccaccacacccgactaatttttttatttttagtagagacggagtttcaccatgttggtcaggctggtcttgaactcttgacctcaggtgatccacccgcc

SEQ ID NO: 6533 - DNA, 433 bp, Homo sapiens
  III.161 (H08733)
  misc_feature (222)..(222): n is a, c, g, or t
  misc_feature (374)..(374): n is a, c, g, or t
  misc_feature (395)..(395): n is a, c, g, or t
  misc_feature (432)..(432): n is a, c, g, or t
tttttttttatcaaaggagtttttctttatttttcataatttagctgaatcaacacaaaattgaatactgtaaaacaagaaaaaaaaatatgctgtaacatcttaaatctcccgatctctgccctcgaaggtgtctacacttgctttcaaaagaaacaggcgagggggaggccgtgagacggctggctggcagaggctgccggcccgggccccggagccggngcagcttgggaaggaccctttccaggcccaccccctctgtgatgacaaacccaacctcagccccttcttttagtccagggtacaaatgcctataaatttgtgggtgactgaaaggtaaattatgtcctcatgggtaccgggaacaggtcttnaaataaatgggattttctttncgtattctttcagtctatggtttgctgggaacagttnc

SEQ ID NO: 6534 - DNA, 347 bp, Homo sapiens
  III.162 (H93108)
  misc_feature (263)..(263): n is a, c, g, or t
  misc_feature (290)..(290): n is a, c, g, or t
  misc_feature (299)..(299): n is a, c, g, or t
  misc_feature (318)..(318): n is a, c, g, or t
  misc_feature (325)..(325): n is a, c, g, or t
  misc_feature (338)..(338): n is a, c, g, or t
ttttttttttgtgatctctcagcagaatagatttattatttgtattgcttgcagaataaagcctatccttgaaagctctgaatcatgggcagtgagctcagtggtatctggaggacagggcactggccactgcagtcaccatcttctgccaggaagcctgcacctcaggggtgaattctttgccgaaatggattgccaaaacggtcaccagcacatttcccaggagcttgaagttctcaggatccacatgcagcttgtcacangtgcagttcacccagctgggcaaaggngccctttgngatcatccaggtgccttgnggcatcncccccaagggaantcaagcacc

SEQ ID NO: 6535 - DNA, 426 bp, Homo sapiens
  III.163 (H93236)
  misc_feature (244)..(244): n is a, c, g, or t
  misc_feature (279)..(279): n is a, c, g, or t
  misc_feature (301)..(301): n is a, c, g, or t
  misc_feature (374)..(374): n is a, c, g, or t
  misc_feature (389)..(389): n is a, c, g, or t
gaggttatcaataagctcctagtccagacgccatgggtcatttcacagaggaggacaaggctactatcacaagcctgtggggcaaggtgaatgtggaagatgctggaggagaaaccctgggaaggctcctggttgtctacccatggacccagaggttctttgacagctttggcaacctgtcctctgcctctgccatcatgggcaaccccaaagtcaaggcacatggcaagaaggtgctgacttncttgggagatgccacaaagcacctggatgatctcnagggcacctttggccagctgantgaactgcactgtggacaagctggcatgtggattctggagaactttcaagctcctgggaaatgtgctggtgancgtttttgggcaatncatttcgggcaagaaattcacccccgaggttggcagg

SEQ ID NO: 6536 - DNA, 276 bp, Homo sapiens
  III.164 (R55942)
  misc_feature (3)..(3): n is a, c, g, or t
agntggggaatgaccccctgagcatgcagagcccagagtcactgtccatctgcgttcccagagaacaattgtgaagagtcctagaacaggaactctgaatcagactgtcaggggcctatgtagccaaaatgttactaaatataaaattcctgtcgtcttcagtcttcatgctttgtcactgtaaaaagaacaaaaagcatttttactataatttaaaggagctgcttttttataggcacatactatttcgctttgtactatatttgatagttgcag

SEQ ID NO: 6537 - DNA, 285 bp, Homo sapiens
  III.165 (R55943)
  misc_feature (4)..(4): n is a, c, g, or t
  misc_feature (9)..(9): n is a, c, g, or t
  misc_feature (18)..(18): n is a, c, g, or t
  misc_feature (24)..(24): n is a, c, g, or t
  misc_feature (38)..(38): n is a, c, g, or t
  misc_feature (57)..(57): n is a, c, g, or t
  misc_feature (59)..(59): n is a, c, g, or t
  misc_feature (92)..(92): n is a, c, g, or t
  misc_feature (178)..(178): n is a, c, g, or t
  misc_feature (185)..(185): n is a, c, g, or t
  misc_feature (214)..(214): n is a, c, g, or t
  misc_feature (281)..(281): n is a, c, g, or t
ttcnagttnaattttttnattttnctccagaatatctnaatattgaaacccaagttntnactttgagaaagggaaagacagagaaacatgangagacaaacatttcatttcatttaacttatggtattgtgagcagtcacttttgtaggcaacacttgttttctttgtagaaaagaantaaaaancaaacagcaccattaaaggattgcatganccctgatttctaaacaaaacactgtctaaaatttttcttaaatgcttgttgcactcggtcacatttnggtc

SEQ ID NO: 6538 - DNA, 286 bp, Homo sapiens
  III.166 (R23575)
  misc_feature (224)..(224): n is a, c, g, or t
  misc_feature (274)..(274): n is a, c, g, or t
gagtgtgtgtattaagttgaatttccaaaattgctgatctccaacagttttgtcccacaaaaatgacagtctcatactatttagctcaatatatcagtcgatgattttccccgagcctgaaatcttcatataataataagtaatattttaaacactaaaattaaatataagacatgaatacattatttttcttttctatatgtaccctgtaggccactttttantctcttgggtggcacaattctatttatttggctttctggaacttatcatngggtttgcacct

SEQ ID NO: 6539 - DNA, 381 bp, Homo sapiens
  III.167 (R32648)
  misc_feature (107)..(107): n is a, c, g, or t
  misc_feature (205)..(205): n is a, c, g, or t
  misc_feature (234)..(234): n is a, c, g, or t
  misc_feature (328)..(328): n is a, c, g, or t
  misc_feature (371)..(371): n is a, c, g, or t
ttttttaatattattttccaagtatcttgaggaaattaacaaaataggggcctaagaaagcttcccttttagttctatttgctttagtggctaaattgctccctggnattaatcctggaaaagaaacttcaatcttttaacttgtacatatggtggtcatcagaaatgaaatagaatttatcagggccttccactgtttcagagncttacacacttctggggatgtacaacagnaaagtataacacccaactggcacccaaaataaattattcaaaggaattgatttttattatttggaggtcaggagtttaaaaacaaaaaaaaaancattaaaacccccaactttttggtggggggcaccctggggggntccccactgg

SEQ ID NO: 6540 - DNA, 434 bp, Homo sapiens
  III.168 (H81308)
  misc_feature (182)..(182): n is a, c, g, or t
  misc_feature (316)..(316): n is a, c, g, or t
  misc_feature (406)..(406): n is a, c, g, or t
  misc_feature (429)..(429): n is a, c, g, or t
tcaagttccattctatggcagactaatttaacagagattccaaggttctctgcctccaagctgaataagctactagaacaaaaaacaactagaagccaccttattcccaattcattaacgttgacttcatggtccacaccagaaaatgaacgcaactcaattctcgaagacactattctagnaattttatacacttaggaattcagatcacaggctcaaaagttttaggcaggagacccacggaggcttggggccttgatgcaaaagcaggcttttgaaactggcaaggccactctacgcttaatcgcgggcactnattaggggaatttaagtttatttctggaccgcggcatgctaaaaaatcagtaggggtatggggggctaggaggcaacaaaaaacgtaaanaaatttatttccccattaaaggntttaa

SEQ ID NO: 6541 - DNA, 418 bp, Homo sapiens
  III.169 (H81364)
  misc_feature (296)..(296): n is a, c, g, or t
  misc_feature (391)..(391): n is a, c, g, or t
  misc_feature (406)..(406): n is a, c, g, or t
agggtgcatctgccaaggtcgtgttcactcacctaaagggtgcagaaacgaggggggagagaacgagtgacgacactaggtgatatctatgattttaaagaaaagctgaatgtttagagcttccatatttggctacgtacttcagttagcgacggaaaatagtttttaaagctttattggggaattaattttttttacgttttttgttgcttctagccccatatcctactgatttttagcatgctgcggttcagaaataaacttaattccctatagctgccgcgattaagcgtagnagtgggcttgcagtttcaaaagctgcttttgcatcaaggcccaagctccgtggggtctcctggctaaaacttttgaggcctgtgatctggaattncctaagtgtataaantctaggattagg

SEQ ID NO: 6542 - DNA, 545 bp, Homo sapiens
  III.170 (N73939)
  misc_feature (481)..(481): n is a, c, g, or t
cagttcagcaaatgtttattgggcacctacaataggcaaggcacagtaccagctgctgtgggttacaaagacaagaaggctaggctcaccctcgagaggcttacagtctaatagagagagacacactcacaggtaacaaaaatacaaggcaaaatgaggtgagctctatggcagaggcaaaaacaacgggagaacagcgagcagagatagatcagacatatctcagcagatcagatgttggatgcagggagtgacgtttcagccaggctctgggaggtgggtcggattcgcacaggtgaactggaaaaaagaggacactaaggcacaggcaaggtatagaggtgggaaagtgcaatgaatgttcagagaacagagatgcctgccttgaccaatacataggaggccaacaggataacagagggacctaagctggggaagtggtttcaggccagatggtgtgatcgctcgtagtaggatttcnttccttccttccttccttcctttttttccaatgaaacaagccttgatctacccccaggctggag

SEQ ID NO: 6543 - DNA, 461 bp, Homo sapiens
  III.171 (W03699)
  misc_feature (56)..(56): n is a, c, g, or t
  misc_feature (392)..(392): n is a, c, g, or t
ctgcagcttattcttgccatgcttaggtgacagaagtttgttaagtaccatccttntgccctgcctcttattctcaaatcgttctggaaagcctcacttccttttctgtggagaaggtgcaaagctgttaaatgagctcagagtttacctagctaaggccactgcttcctgctttgtgaagcctggaaagtatgtgtggccacagggctcaggttcacacttcttctttgagaccaggatggggtgtaagccatagagtaaggttaacaaaaagaataaagctaatcatgtattacaaacagcagtgtgcccagacttgtggaaatgaagtcatgtcactcctctgctcagaaaccttcaatggttcaccattaccagtggaatgaagtcanttctcctcactataactggggtgtggtagtttaagcctataatctcagcccttttggaggccaaggtaa

SEQ ID NO: 6544 - DNA, 537 bp, Homo sapiens
  III.172 (H09980)
  misc_feature (398)..(398): n is a, c, g, or t
  misc_feature (429)..(429): n is a, c, g, or t
  misc_feature (454)..(454): n is a, c, g, or t
  misc_feature (470)..(470): n is a, c, g, or t
  misc_feature (482)..(482): n is a, c, g, or t
  misc_feature (488)..(488): n is a, c, g, or t
  misc_feature (502)..(502): n is a, c, g, or t
  misc_feature (508)..(508): n is a, c, g, or t
  misc_feature (515)..(515): n is a, c, g, or t
  misc_feature (524)..(524): n is a, c, g, or t
ctacccttgttggcacttaatttagaaatagggtgagaagtttaaaagcccatcttgattttattttcattccttttggttctctgtgtaataatagcaggctacatagtgacattccagttccaagaaggtacatcctgtccattcattaattgctttgattactaggagggtttctgttcagttttgtttttaaatgtcttgctgatctagttctttcagatggaataaccttccagtcccttagagagtggaactagtccatataacccagcttcagtagcaaaagtaggaagccgccacatcttttcatttctccaagagggagagtgggggaaggttcccatgaccagctggggcagtcagggatttctctagggcatttcttaatgtggaantaagtgtaggactggctgttcaagggagggnttcattcaggaggatgtattaggcnttttgaatgttcttantggataatggcntatccnttgggatcccaggntttggnaaatttntggattaanggccccaggtttg

SEQ ID NO: 6545 - DNA, 265 bp, Homo sapiens
  III.173 (H09981)
  misc_feature (211)..(211): n is a, c, g, or t
  misc_feature (241)..(241): n is a, c, g, or t
tttttttttgcatggtccaagcatgtggtgatttttattaagaataactttggttctaagaattccaccctcaattctttaatactttccgttaaaaacaattatacaagagcaaatacaaaaaatattaaattatgaaaaccaatccattaaggctccctttatatatattatatacactcaaacaagtcaagatttttcagagtaggangaataaagtcgactgttataggcttagganagcaacactactactatgagacta

SEQ ID NO: 6546 - DNA, 452 bp, Homo sapiens
  III.174 (H09606)
  misc_feature (342)..(342): n is a, c, g, or t
  misc_feature (428)..(428): n is a, c, g, or t
  misc_feature (433)..(433): n is a, c, g, or t
tgacatgacaccgcccatcctgcctcgcgtgtacatacatcacgggccctaggaacgccgccagagcagcgtccatgagcttgccaagtgttctctgctggctctttcctgccactgccaacacgaggttggaatttggcagaaaattgtgatctccagtccgtgtggtgatgctggtggtgcaggttttgtttgttcctttcgggtggtgacttcggccttttgtttgacctttgccttttgactttgtgcctcttttgatccactttcagcctccatgccaagcaacacccacctctccatccaaggctggtcaggaacgtcctttgcagggtcggggtngtgcgggagaggctcactttgcctgggttagacccaagggctagttaccttttccttgggacggctcatgttcaggtcttgcaggnttcantttaaatgggccacagaaa

SEQ ID NO: 6547 - DNA, 468 bp, Homo sapiens
  III.175 (H09607)
  misc_feature (226)..(226): n is a, c, g, or t
  misc_feature (324)..(324): n is a, c, g, or t
  misc_feature (355)..(355): n is a, c, g, or t
  misc_feature (366)..(366): n is a, c, g, or t
  misc_feature (372)..(372): n is a, c, g, or t
  misc_feature (424)..(424): n is a, c, g, or t
  misc_feature (433)..(433): n is a, c, g, or t
  misc_feature (448)..(448): n is a, c, g, or t
  misc_feature (460)..(460): n is a, c, g, or t
  misc_feature (466)..(466): n is a, c, g, or t
ttttttttttctcagggataataaatctattttaataacgttacttttgacaacgatttgtacatgtatttaaagataacaactttcaacccccacccttaccccagactcccattacaaattgaggcatgacctgcccttgccaggaagtgagcaaagctgcaacatcaaaactctgcacatcccactctcagaggagggtgactttacactgtgttgggaaaantaactaaggcatttaaatttttcattgtacacctgtacattggtttagattgaatgggctcaaattaaacaaatatagagagatttcatatatacaantattatatcatgtatagggtatattatatcntcttatttganaagggntaaaatttttaaactttgactttggcatggctgggcccaaatgttttctcantccccgaanccccaagtgtagaangggttacccggngccctncc

SEQ ID NO: 6548 - DNA, 388 bp, Homo sapiens
  III.176 (H59787)
  misc_feature (47)..(47): n is a, c, g, or t
  misc_feature (80)..(80): n is a, c, g, or t
  misc_feature (83)..(83): n is a, c, g, or t
  misc_feature (202)..(202): n is a, c, g, or t
  misc_feature (220)..(220): n is a, c, g, or t
  misc_feature (265)..(265): n is a, c, g, or t
  misc_feature (267)..(267): n is a, c, g, or t
  misc_feature (270)..(270): n is a, c, g, or t
  misc_feature (284)..(284): n is a, c, g, or t
  misc_feature (337)..(337): n is a, c, g, or t
  misc_feature (377)..(377): n is a, c, g, or t
gggggcaggcctgagtgcagcatgggttggcccagctgtgcccaggncctcttccccctccccagagctgccctgggggnaanagcctagtctcctgaggccccagtgcctccctgactagtccccctgtgtttcttccccctgctgcagatggcggtgggaccccccgactgccctgtgggagggccgctgaccttccctngccggggttctggggctngggtcgggacaaccctgacccccctcccaccctctaagatgcccncnccnacgatcctgagcanggtccctcggcagatgttcagcgatgcaggtagcggggacgatgccttggatngagacgatgacctggtgattcgacatcccggagtgacctnacatcaagtta

SEQ ID NO: 6549 - DNA, 403 bp, Homo sapiens
  III.177 (H59788)
  misc_feature (4)..(4): n is a, c, g, or t
  misc_feature (6)..(6): n is a, c, g, or t
  misc_feature (8)..(8): n is a, c, g, or t
  misc_feature (171)..(171): n is a, c, g, or t
  misc_feature (392)..(392): n is a, c, g, or t
ttanantnttttttttccagagccactcctttaatacagaaacttcattgaaaaaacctagccctgtacagctgcccttttaaagaggtggccattgcagggtctctgcctccccagcaggtggcagatgctcccggccactcgtttaaataactgtcccctgggaggggnccggggtttgaaggcagggcccctgccaaccctcctgggggaacacccgtgcatgtttacgccttttctggttgtgtcagtgggccggagcatgggcagctggggcatcaataaacacctccgagggaagctgggactcgtgtgtgctgggcacgggggaggggcgccgggcggggccctgggtggggcatgggcgtgatgtcacgggtcactccgggatntcgattcacca

SEQ ID NO: 6550 - DNA, 403 bp, Homo sapiens
  III.178 (H81265)
  misc_feature (92)..(92): n is a, c, g, or t
  misc_feature (313)..(313): n is a, c, g, or t
  misc_feature (332)..(332): n is a, c, g, or t
  misc_feature (360)..(360): n is a, c, g, or t
  misc_feature (393)..(393): n is a, c, g, or t
agcttaagaaatacttttatatttgaatgatgttatttaagttttaaaatgaataaaatagaatgaaatacactgagagtaaaatattagtnctgagctagaaatggagcttaggaatgctctccggttctctagtggcagcgacatgatttgcaggcaatgtttacaaggacttcctcatgctgggatagacagaccagtgctggagaaggagtttcaggaggaagctttcctgttctatgtaagtgggactcaccatttgaaggaaggtcacataattatttctttgaacaaactttgtttctactaaggnatttttatcatttttgccngtgtgtatggtcacagggatggattccngatggccacggtggatttccaccgcggccttcngggggttttc

SEQ ID NO: 6551 - DNA, 415 bp, Homo sapiens
  III.179 (H81321)
  misc_feature (375)..(375): n is a, c, g, or t
  misc_feature (398)..(398): n is a, c, g, or t
  misc_feature (410)..(410): n is a, c, g, or t
agagctcagcactcccgtcaccttccctgatgggcgctccttgcccaaaggtatcatggtcctcctctccatttatggccttcaccacaacccaaaagtgtggcccaacccagaggtgtttgacccttcccgttttgcaccgggttctgctcaacacagccacgctttcctgcccttctcaggaggatcaaggtgagacgtcctgtgtggtaattggaatagagaaatgagggaagtctctggtcaaccctctgatctttgtgagcccgatgttcatatgtgggcatcttcaggtgtgctcttaaatattggtatttgtggggaaagtcagggcacctgggtgtggggcgttttctgtgttacaaaaggaaggtnggcatttcaggaggcaccccatnggagaattttgnttccc

SEQ ID NO: 6552 - DNA, 432 bp, Homo sapiens
  III.180 (N54839)
  misc_feature (368)..(368): n is a, c, g, or t
  misc_feature (376)..(376): n is a, c, g, or t
tttgctgacatggaacagctggctgtatttcatcactaagtacaaatcacaattattaactcactggtagggcagtgatgatcaaaccaattgcattcatccatgctgtaatgttctctcttggcactaaaggctgactgcaaccggcaaaaaagaatgtaagtatgaatttataaaaacattttagatggctgacaacggatcttatttttaaagaatatgtctaattcagaggatcgacaactaatccatttcaataaaacaatggggaattttttattgaataaaaatgtaatatgcataaaaactcaagaaggctttttaaaaatacttcctcccccaatccattatcccatactttcatggcnaatttttnaaaaagaatcctgaaaatcttgaaaaccagatgaaagagaatcctggttttaaagg

SEQ ID NO: 6553 - DNA, 462 bp, Homo sapiens
  III.181 (H18595)
  misc_feature (285)..(285): n is a, c, g, or t
  misc_feature (354)..(354): n is a, c, g, or t
  misc_feature (436)..(436): n is a, c, g, or t
  misc_feature (457)..(457): n is a, c, g, or t
cgcggcgtgagaagccatgagcagcaaagtctctcgcgacaccctgtacgaggcggtgcgggaagtcctgcacgggaaccagcgcaagcgcgcaagttcctggagacggtggagttgcagatcagcttgaagaactatgatccccagaaggacaagcgcttctcgggcaccttcagctttaagtccactccccgccctaagttctctgtgtgtgtcctgggggaccagcagcactgtgacgaggctaaggccttggatatcccccacatggacatcgaggcgctnaaaaaactcaacaagaataaaaaactggtcaagaagctggccaaggaagtatgatggcgtttttgggcntcagagtcttttgattcaaggcagatttccacggattccttcgggcccggttttaattaagggcagggaaatttcctttccntgttcacacacaacgaaaacnggttt

SEQ ID NO: 6554 - DNA, 447 bp, Homo sapiens
  III.182 (H18596)
  misc_feature (175)..(175): n is a, c, g, or t
  misc_feature (347)..(347): n is a, c, g, or t
  misc_feature (425)..(425): n is a, c, g, or t
  misc_feature (440)..(440): n is a, c, g, or t
gaactggtaatagaatttattcaaatgtgccttaatataggcgctggggcttgcaatggtgctcttgatatataaggcccggacattctgccagtttttcttgagcaatgacaccaagaagttgacagccaggtgaatgttatacacaagctcatcgtctgtcatcttcacgtgnccaacagctacagccagacataacaccttcttcatttggaacttgattgtggacttcacctcatccactttggccaccatgttttcgttgtgtgtgagcagggaagggaactttcctgccttatttaaacctggggccgaggattcgtgggaatctgcttgatcagagactntgagggccaaaaacggcatcatacttcttgggccagcttcttgaccagttttttattcttgttgagttttttcagcgnctcgatgtccaagtngggggtt

SEQ ID NO: 6555 - DNA, 479 bp, Homo sapiens
  III.183 (N54512)
  misc_feature (344)..(344): n is a, c, g, or t
  misc_feature (429)..(429): n is a, c, g, or t
  misc_feature (437)..(437): n is a, c, g, or t
  misc_feature (462)..(462): n is a, c, g, or t
gagaaaaagtaattattttattttagttttattgtggtaaaattgttgccattttaagccttttttgtttgtttttttaagtgacaaggtctcactttgctgcctgggctgaagtgcagtggtgcaattatggctccctgtaacaccatgctcctgggctcaagcaatccttacacctcagtcttctgcactttgaagagttcctgaataagcaggttcatctaggaggacattatctccaggattaatgatcatttcaaacacctaacaaaagaagcataggttagcttgttagtcagcataggttagtactgtttccatgctcagaagcccattttttagtntgagctcacatggttctagagtaagaattagcaaattggtttataaaggggccaaacagtaaacactttgcgggtcatagtatcnctgttgcnactaccctgcaactactctgcctcnatagtggaaaagtagcc

SEQ ID NO: 6556 - DNA, 453 bp, Homo sapiens
  III.184 (N76215)
tctctgacactttacacaggcctggcgtatagtaaacatttaatagattttcaaagaagcaataaaaggaataaatgaatgttagcagccaaacctctgttcacctttctctggaacaggagttggcaaactatggtttgagagccaaatccagcccttcatcaaattttgtaaataaagttttattggaactcagtcacacccattcatttatatattgtctatggctactttttcactatagaggcagagtagttgcagggtagttgcaacagagatactatgacccgcaaagtgtttactgtttggccctttataaacaatttgctaattcttactctagaaccatgtgagctcaaactaaaaaatgggcttctgagcatggaaacagtactaacctatgctgactaacaagctaacctatgcttcttttgttaggtgtttgaaatgatc

SEQ ID NO: 6557 - DNA, 377 bp, Homo sapiens
  III.185 (AA022466)
  misc_feature (14)..(14): n is a, c, g, or t
  misc_feature (316)..(316): n is a, c, g, or t
  misc_feature (371)..(371): n is a, c, g, or t
tttgtttgtccttnggaatatttatttgggttataactctcagcgagattccaactactggactttcaggcttagaatagtgcctcaccaggagtggtcactaacggatatgaagccaaccaaaagaaactaccatcttggcacgcatctgtgtgttagtttcccttagtgccactacaaagtacaaacaactaggtggcttaaacaacagaaatgtactgtcttgaatttctggaggccagaagtccaaaatcaagatgttggcagggttggttccctcctgatggcccgtaagacaaaatctgttccatgcttntttgtcagcttctggtaacctccaggtgtgccttggtttggtaagatgggccacnttctcc

SEQ ID NO: 6558 - DNA, 390 bp, Homo sapiens
  III.186 (AA022999)
  misc_feature (344)..(344): n is a, c, g, or t
  misc_feature (370)..(370): n is a, c, g, or t
cccattatgtggatgagaaaacaagtcctgagtgattacatgactttctcaaggcagtcaccactcaccagtaagtggtgaagccaggattcaaacacaggtataattgcaaagcccatgttctttctaccacaccaagatgattcaagattatatggagttagagtcttcacagaggtaatccgagttgggtctctagattgaaccctaatccaaaatgactgctgcccttataaaaaggagaaatttggaccaagacaaaccgaacacagggaagaacgtacagacaccaaggaagaaaggtggccatctacaaaccaaggcacaccctgaggctaccaagnagctgacaaagaagccttgggacaangtttttggctttacgggcct

SEQ ID NO: 6559 - DNA, 466 bp, Homo sapiens
  III.187 (N71104)
aaggttttcacagagatttattttaaaccgtggcggcaactccgcattgagagttgtacattggtaatggctacacgtatattttggttagaggaaagcacagtgggaaagtgagcggagtaaaaacattcacaatattcagcagcatttgattgggggcctggatacagatgtttcaacatcctaggaaattcttgctcattaccacctaatcacattcaggaagtcaatgtcaggactggcagggagtgtggcaaatgccggacgggtccagctagaccacacgggagaaatctgttccaatgtcaggcttattacattctcagcctgaccccctgaagaatctcctcactttaaaaaaagaaagaaaaagatatccatacggtaatatgcccactgcagccaggtccagacttgggctgcagtccggtggatgtagagaatggaagatccgtgtccctggtta

SEQ ID NO: 6560 - DNA, 682 bp, Homo sapiens
  III.188 (W05847)
  misc_feature (475)..(475): n is a, c, g, or t
  misc_feature (527)..(527): n is a, c, g, or t
  misc_feature (536)..(536): n is a, c, g, or t
  misc_feature (560)..(560): n is a, c, g, or t
  misc_feature (619)..(619): n is a, c, g, or t
  misc_feature (624)..(624): n is a, c, g, or t
  misc_feature (656)..(656): n is a, c, g, or t
  misc_feature (661)..(661): n is a, c, g, or t
  misc_feature (679)..(679): n is a, c, g, or t
cggggatgcatgagaaggtgagctgtcactcacaaaaaaagggaaaatgatttgaaaaatgtttcacatatacactttttatcattttagtggatggcagccttacgtcagtagtatatgccactatgaagtatggccaaaaccctagcgtcacttgtaaccattgtactcttatggatttgtgtcttacaccatttgccttgctttttaaatgactttgtttttcaaggtgctgtcattttgcaaaaggaaatctttatatgaaatgtacaaaaaccgttactaactggacaacagggaaggtgctggccccacattagtgcctgcccaccgctctacttctaaccagggacacggatcttccattctctacatccaccggactgcagcccaagtctggacctggctgcagtgggcatattaccgtatggatacttttctttctttttttaaagtgaggagatcttcagggggncaggtgagaatgtaataagctgacattggaacagattctcccgtgtggctantggaccctncggcatttgcacactcctgccagnctgacattgcttcctgaatgtgataggtggtaatgacaagattcctaggatgtgaacantgtancagccccatcaatgtgtgatatggaaggtttnaccgnaattccatgggttccctnaca

SEQ ID NO: 6561 - DNA, 461 bp, Homo sapiens
  III.189 (AA010908)
  misc_feature (109)..(109): n is a, c, g, or t
  misc_feature (138)..(138): n is a, c, g, or t
  misc_feature (453)..(453): n is a, c, g, or t
agcccggccagcaggaggagtactaccgcaagctcgcagggctggtggaggagatgcacgctgcctatgggaagcctgtcttcctcattggccacagcctcggctgtcntacacttgctctatttcctgctgcgccancccaggcctggaaggaccgctttattgatggcttcatctctcttggggctccctggggtggctccatcaagcccatgctggtcttggcctcaggtgacaaccagggcatccccatcatgtccagcatcaagctgaaagaggagcagcgcataaccaccacctccccctggatgtttccctctcgcatggcgtggcctgaggaccacgtgttcatttccacacccagcttcaactacacaggccgtggacttccaacgcttctttgcagacctgcactttgaggaaggctggtacatgtggctgcagtcacgtganctcctggg

SEQ ID NO: 6562 - DNA, 443 bp, Homo sapiens
  III.190 (AA011299)
  misc_feature (227)..(227): n is a, c, g, or t
  misc_feature (320)..(320): n is a, c, g, or t
  misc_feature (333)..(333): n is a, c, g, or t
  misc_feature (336)..(336): n is a, c, g, or t
  misc_feature (361)..(361): n is a, c, g, or t
  misc_feature (388)..(388): n is a, c, g, or t
tacggtagcaaaggaaggtctttattcaggaggcgggggctctgggctggcagtcggggatgcagggggaccctggcggtaggcacccagcaggatggcattgatgtgctccagggtcaggttgctgaagaccatgttgagatgctgtatcccgtgcaggggcagcaggtgcacaggctgtggctggcggccctgccacaggccacagagctcggtgctgcgggtcnccaccgtgtcatcaccatcctcatagagcacacccacatgggtccgtgtaggggaaagccgtggtcgtagatgtaggtgcggggcgtgggcanggcccacggttanaangacagtatactttccacaccaggtnctgggagtcctgccaggaggtcacgtngactgcagccacatgtaccagccttcctcaaagttgcaggtctgcaaagaaagca

SEQ ID NO: 6563 - DNA, 351 bp, Homo sapiens
  III.191 (H43273)
  misc_feature (125)..(125): n is a, c, g, or t
  misc_feature (168)..(168): n is a, c, g, or t
  misc_feature (169)..(169): n is a, c, g, or t
  misc_feature (172)..(172): n is a, c, g, or t
  misc_feature (298)..(298): n is a, c, g, or t
  misc_feature (330)..(330): n is a, c, g, or t
attcggcacaggctaccactcgaggccagcctccactgcctgttaggcggtagaacctaagagccggtccaaggcaacacaaaagacagtgaggctaggtctttaattgcagccaacgatcaagnaagcaactccatcaaatgacactgtctttttaaaaaaaatttnnctnttttgtgacagagcgagactccgtctcaaaaaaaataattattatttaacataatcattggggcctgggcccggtggcttcacacctgtaatcctaggcactttggggaggccaaggcgggtgggntcacgaggttcagggagatttgagatccagcntgggccaacatgggtgaaacc

SEQ ID NO: 6564 - DNA, 463 bp, Homo sapiens
  III.192 (H43274)
  misc_feature (16)..(16): n is a, c, g, or t
  misc_feature (41)..(41): n is a, c, g, or t
  misc_feature (64)..(64): n is a, c, g, or t
  misc_feature (84)..(84): n is a, c, g, or t
  misc_feature (113)..(113): n is a, c, g, or t
  misc_feature (145)..(145): n is a, c, g, or t
  misc_feature (170)..(170): n is a, c, g, or t
  misc_feature (171)..(171): n is a, c, g, or t
  misc_feature (182)..(182): n is a, c, g, or t
  misc_feature (248)..(248): n is a, c, g, or t
  misc_feature (296)..(296): n is a, c, g, or t
  misc_feature (310)..(310): n is a, c, g, or t
  misc_feature (376)..(376): n is a, c, g, or t
  misc_feature (383)..(383): n is a, c, g, or t
  misc_feature (389)..(389): n is a, c, g, or t
  misc_feature (416)..(416): n is a, c, g, or t
  misc_feature (435)..(435): n is a, c, g, or t
  misc_feature (445)..(445): n is a, c, g, or t
  misc_feature (450)..(450): n is a, c, g, or t
aattttaatgaaagcngctcatgaaattaggtttactgggncacagttttcagatgaggaaccngggacagtgaagggacaganttggaacccagttctgtcataccacagangccccacctgttctacactggcctgtcaagantaacaataataataattattatttnngagagaggccngctgtgttggccagggggactgcagtggcacgacctcggctcactgcaaccttcgactcccagggntcaagcgattctcctgcctcagtctcccgactagccgggattacaggngcccaccaccacgntcagctaatttaaaaaatatttttagcagagatgggggtttcaccatgttgggccagggtggatcntcaatcncccganccccgggatcccacccgtcttgggctncccaaagtgtcaagggttnacaggtttgnggcanccgggcaggggcc

SEQ ID NO: 6565 - DNA, 211 bp, Homo sapiens
  III.193 (H78266)
  misc_feature (12)..(12): n is a, c, g, or t
  misc_feature (39)..(39): n is a, c, g, or t
  misc_feature (109)..(109): n is a, c, g, or t
  misc_feature (143)..(143): n is a, c, g, or t
aacatcggagcnggccttcaactaccatcccaccacctnctgaggagaaaaattcttcaagactcagagcacacagccagcaccagaggccccatgaccctggacagancaggggagggggccaccatgctgaagacattcantgttttggctcttttgcattcggatgagtctgggtatgacatcgatagtgatggaccctcaaccggag

SEQ ID NO: 6566 - DNA, 432 bp, Homo sapiens
  III.194 (H78267)
  misc_feature (46)..(46): n is a, c, g, or t
  misc_feature (114)..(114): n is a, c, g, or t
  misc_feature (138)..(138): n is a, c, g, or t
  misc_feature (191)..(191): n is a, c, g, or t
  misc_feature (258)..(258): n is a, c, g, or t
  misc_feature (263)..(263): n is a, c, g, or t
  misc_feature (266)..(266): n is a, c, g, or t
  misc_feature (269)..(269): n is a, c, g, or t
  misc_feature (394)..(394): n is a, c, g, or t
  misc_feature (416)..(416): n is a, c, g, or t
atatatctaccatttattgagaacttatatgccaggcactgtacanatatatttaggcaaatcctcacaacaaccctgtgaggtaggcattattattaaaccaattttgcagancaggaagctgaggcacagagagangcattacacagtagatcagatagatactgttatcccatttttagagtagaggnagccaaagcacagaaaagtgaagtgacttgctcaagaccacacagggaggcagtgtcagaaataganctagnaanccngtattactgcttctaagtctagggtactttctgtaggcaccacagctgtccccaaggcctatttaggctgggataggagagactaaaggcaaatgtgggcccaatttccatcggggaaacctccnggggccatgggggtggggggantgcgggctggggacat

SEQ ID NO: 6567 - DNA, 371 bp, Homo sapiens
  III.195 (AA009627)
  misc_feature (14)..(14): n is a, c, g, or t
  misc_feature (97)..(97): n is a, c, g, or t
  misc_feature (184)..(184): n is a, c, g, or t
  misc_feature (297)..(297): n is a, c, g, or t
  misc_feature (301)..(301): n is a, c, g, or t
cattaagctagagnaagaccgtggctctagctgagggccgaagcaagaacagcacccaaaacaaacgagaaagactgcaaacatgttgcctcgattnggttcttttttctcctcgcctagtttctgtgtgaactctcagacatctctttcccggatcctcaaccctgagcactcttatcaatcncaaccatcttccttgggttcattttggtttctggtttttctttttcctttttgttgattccaaaccaacaaacccaactctaatgctgcatcttggactatccgaagagatcnaccnccaagcactccacaactcaaggctcagctgggtttttgttccagagactggttccgcttggttttttccc

SEQ ID NO: 6568 - DNA, 392 bp, Homo sapiens
  III.196 (AA009628)
tttttttttttttttttaaggcaacaaaaagcttcaatctcttctccaagtaaacaaaacttgtacagtatattattttcttgtaaaatgtaccccaggagaagtaacataagagttaaaggggccctctctgaacactcacccctcgcccaaacacacacacaatgaaccagccgctctctcacacacccacacacagagagctattcacacacacacatgtctactatgtacatacacacagatccaggcttcccctcacgtctcctggcaagactggccactgagaggaggtatgggataaggcaaggggaaaaaacaaagcggaaccagtctctggaacaaaaccagctgagccttgagtttgtgggagtgcttggggggttggatct

SEQ ID NO: 6569 - DNA, 381 bp, Homo sapiens
  III.197 (H97728)
  misc_feature (188)..(188): n is a, c, g, or t
  misc_feature (347)..(347): n is a, c, g, or t
  misc_feature (349)..(349): n is a, c, g, or t
aattcagtccaaacaaaagttatagggcacccactgttacaaagaacatcacaagcactaagaaaacaccatcccagtgtttaagaaaacatggcccggtgtaggagacctccttacacacaaacaactacaacgtaaaccagatttaaccactacatggcaacagaaaccatgtacaatgggtagangggagaggaagaaggctaatcaaggaaggctggacaaaagaagagatatgtgttccctaccttcttccacaaaagttttgaggcagcctgaaggatgagcagggtttcaacaagcagagcaaaaaccaggcaacccaggcagaaaaacaggcatagaantngggggaggagggcacagcgggctcaaaagata

SEQ ID NO: 6570 - DNA, 473 bp, Homo sapiens
  III.198 (R59573)
  misc_feature (275)..(275): n is a, c, g, or t
  misc_feature (424)..(424): n is a, c, g, or t
  misc_feature (435)..(435): n is a, c, g, or t
ttttttttttacaatttcaacttttatttggcaataagttcagagtcacataacacataaaatcaacatttaaaataaatagcaaattcacatctagaataaataggtctgcctaatttgcattaattgtgcctgatatcatacaggcacaatctgtcattccacgagataactggaaaagtctccaaagtcagagttcaaacctgcaggactgaaaacacacagaagcactgtcgcaggttgggttccccgaaagcagatactgaggtggagantgggcgtgcaggaaggttcatagggacagtgctgtggggctgagccggctgggttacaggcttgtcagggagagggcactggggctgttaatgtgggccacaatggaggttttcactggaccccacaaggggcttctgggagctggggntgggccccagnggtttttcccaagtttgggggttgagggagggccagcc

SEQ ID NO: 6571 - DNA, 402 bp, Homo sapiens
  III.199 (R59632)
tgccttaggagcttagctcaaagttcagctaacctttgacactactagtgtcatttagtaacagtaatctttgacactactagtgtcatttaggagcttagctcaaagttcagctaacctttgacactgctagtgcgttcaagaaagggtagggaatgaagtacccttaatgcagggtcagcaaacttttcctgtaaaaggccagataggaagtatttttggctttttgggctgtttgcttttgctactactactgtgggaatgaccatggtcatgggctgtgttccagcacaacttgatttaccaagacaagctgtggggctgtatttggtcctcaggctgtggcttgcttagcccctgctctaatgggattgtgttgggcggcaatgggcaaggtttccc

SEQ ID NO: 6572 - DNA, 458 bp, Homo sapiens
  III.200 (N68489)
  misc_feature (426)..(426): n is a, c, g, or t
ccttctttcttttttttttttttttttttttgagacagtctcgctctgtcaccaggctggaatgcagtggcccaatcttggctcattgcaatttccacctcctgggttcaagtaattctcctgcctcagcctcccaagtagctggaattaaaggcctgtgccactgtgcccagcgaagttttgtatttgttttagtagagacagggtttcaccatgttggccagggtggtctttatcttctgacctcatgatctgcccgcctcagcctcccaaggtgctgggattacaggcgtgacaccgcacccagccttgttatttattttctagattttgctagtgtctaggaatagtcctgattgttcccttcatctggctcattgatcggcagtcagctcctggaattccttaaaactgcgtcacttccantctgcggatcctcttgccttggttcccggggg

SEQ ID NO: 6573 - DNA, 471 bp, Homo sapiens
  III.201 (N91333)
  misc_feature (5)..(5): n is a, c, g, or t
  misc_feature (350)..(350): n is a, c, g, or t
ccacntcagagactggcatatcctccagctggtggtgtctgtaccatactttgtgatctttctgacctcaagttggctgctagagtctgctcggtggctcattatcaacaataaaccagaggaaggcttaaaggaacttagaaaagctgcacacaggagtggaatgaagaatgccagagacaccctaaccctggagattttgaaatccaccatgaaaaaagaactggaggcagcacaaaaaaaaaaaccttctctgtgtgaaatgctccacatgcccaacatatgtaaaaggatctccctcctgtcctttacgagatttgcaaactttatgggcctaattttgggccttnaatctccatggtccaagcatctggggggaacaatgttttcctgttggcagactctctttggtgcagtccatcctcctggccaactggtgttgcaccttggggcactgaaatacatgaaccg

SEQ ID NO: 6574 - DNA, 396 bp, Homo sapiens
  III.202 (N90220)
  misc_feature (231)..(231): n is a, c, g, or t
  misc_feature (233)..(233): n is a, c, g, or t
taacttaagtaaactttattttcaaaatgcttcaggtacaaaagaaaacaatggcaaagtctaacaataattaacaaaccagctcttgagcggcagagtgctccagggatgagaggggctggggatggaaaggtggttgggagacacaacatttttctagcttcagaaagtcagggagcccagatcacagcctgaacttcatggtattggttacagattctttacaaaggngntttacctctctcatgaggtcttcttgtttggttacttcctcagaaaaatcatcattgacatccaacaccagcactggaatgttcatcagagcctcaaagtggagcctgtcactgtacacagacctctcaaagatctgtactggcttcctgggcctgtaagagg

SEQ ID NO: 6575 - DNA, 566 bp, Homo sapiens
  III.203 (W38948)
  misc_feature (41)..(41): n is a, c, g, or t
  misc_feature (68)..(68): n is a, c, g, or t
  misc_feature (83)..(83): n is a, c, g, or t
  misc_feature (97)..(97): n is a, c, g, or t
  misc_feature (112)..(112): n is a, c, g, or t
  misc_feature (119)..(119): n is a, c, g, or t
  misc_feature (561)..(561): n is a, c, g, or t
gggtgggatggccgcggcgccttctttctaagtcggcttantgtacccttcagttccatggccaaganccactcgagggcgtnttcctcctccagangcctgcacgcggggncgggccnaaaggctctccatcgaaggcaacattgctgtgggaaagtccacgtttgtgaagttactcacgaaaacttacccagaatggcacgtagctacagaacctgtagcaacatggcagaatatccaggctgctggcacccaaaaagcctgcactggccaaaagtcttggaaacttgctggaatatgatgtaccgggaagcaagcacgatgggtcctacacattccagacatttttcctttttgagccgcctgaaagtacagctggagcccttccctgagaaactcttacaggccaggaagccagtacagatctttgagaggtctgtgtacagtgacaggctccactttgaggctctgatgaacattccagtgctggtgttggatgtcaatgatgatttttctgaggaagtaaccaacaagaagacctcatgagagaggtaaacaccntttgt

SEQ ID NO: 6576 - DNA, 467 bp, Homo sapiens
  III.204 (R07860)
  misc_feature (299)..(299): n is a, c, g, or t
  misc_feature (310)..(310): n is a, c, g, or t
  misc_feature (315)..(315): n is a, c, g, or t
  misc_feature (341)..(341): n is a, c, g, or t
  misc_feature (375)..(375): n is a, c, g, or t
  misc_feature (380)..(380): n is a, c, g, or t
  misc_feature (415)..(415): n is a, c, g, or t
  misc_feature (420)..(420): n is a, c, g, or t
  misc_feature (440)..(440): n is a, c, g, or t
  misc_feature (466)..(466): n is a, c, g, or t
tttttgaaattgtttatgccttcattcatttattcatcaaatgttcaatgaagacccatcttctgcttttgcacggggaattcactttccatctatacaaaggagaattaccaatttaaacctctagattagacccacatttgcatcagccaacttgatgtctccactctgaggtatctcaaatttactgcgtgtaaaattgaacctgaggatcttccctaatcagggactatcttgggtgggcaagtgccaggaaccccaaccggaaactgggcttaagccattatggggaaaggttnttgggctcaantttanccaggtaggtccgggggccagggggngacttcagggggtaaaatggattttgggggaggnctcgnatggtctgtctttcccatctcttgcttctgggggntttcnctctttctggcttcactctngggggcctaccctcctctccgggggnt

SEQ ID NO: 6577 - DNA, 333 bp, Homo sapiens
  III.205 (R07915)
gaaacaccagcttcatttttccttctggaatgatacctcttctcacactcaaactaagtggttttggtatagctgatttcatcccccacactgagttgacatatgacccaggtagggttaccagataaaacacaggatgcatacttgggaatactaatccaaaaaaatttattcattgtgtatctgaaattcaaatgtcctgtatttttatgtgctaaatctgggcaactccacatccaggcctatttaatagggacactaggatttgatttgggaaaagggccatggagtcctaagggtagggcttgagggaggagtcatcctttgggacat

SEQ ID NO: 6578 - DNA, 372 bp, Homo sapiens
  III.206 (R65765)
  misc_feature (14)..(14): n is a, c, g, or t
  misc_feature (17)..(17): n is a, c, g, or t
  misc_feature (303)..(303): n is a, c, g, or t
  misc_feature (343)..(343): n is a, c, g, or t
  misc_feature (353)..(353): n is a, c, g, or t
tctgccgagcgcancanactaaatcggcttggatgattcgcgacctgagcaagatgtacccgcagaccagacacccggcaccgcatcagcctgctcaaccctttaaatttacaatttccgaatcctgtgatcggattaaggaagagtttcagtttttacaggctcaataccacagtctgaaggctgggaatgtgagaaactcgccagtgaggaagacagagatgcagcggcattatgtcatgtattatggaaatgtcctatgggttgaatataggaaatgcacaagcagggtaaggttatttnccttattaaccctttttaaatggacagtaatactgggggncacttttggnaaagggaaatttgtatggt

SEQ ID NO: 6579 - DNA, 380 bp, Homo sapiens
  III.207 (R65854)
tactgaactaattgctagatttcaagacccaatgttgaaccttatcacatcctcctatcaggctcatttactctgtacaaattttggaagtaacggttatagttcttggtaagacccaactaagtagcctcaggggaccagtacaaggattttacatcaatttcttttgtagctccacagatttcattttcatcctcccagctcaccctctatccattctttcacatcaagccaacgaaggcgccacacaatttaattttactgtttaatattttcccaggaaaagctcttttcacaaggacaagtttgcaatggcccaaaatacataaaggcaactcttttcaggagggattaaccagggggggttttttaaaatttgg

SEQ ID NO: 6580 - DNA, 424 bp, Homo sapiens
  III.208 (H51103)
  misc_feature (18)..(18): n is a, c, g, or t
  misc_feature (27)..(27): n is a, c, g, or t
  misc_feature (42)..(42): n is a, c, g, or t
  misc_feature (83)..(83): n is a, c, g, or t
  misc_feature (137)..(137): n is a, c, g, or t
  misc_feature (158)..(158): n is a, c, g, or t
  misc_feature (174)..(174): n is a, c, g, or t
  misc_feature (185)..(185): n is a, c, g, or t
  misc_feature (228)..(228): n is a, c, g, or t
  misc_feature (255)..(255): n is a, c, g, or t
  misc_feature (351)..(351): n is a, c, g, or t
  misc_feature (397)..(397): n is a, c, g, or t
  misc_feature (406)..(406): n is a, c, g, or t
  misc_feature (414)..(414): n is a, c, g, or t
  misc_feature (422)..(422): n is a, c, g, or t
gcagctttattgatagancaaccgcgnccgcaactagaggtnacatttgggggcttggaggtgaaagagaggcaaatggggancagaggctggggtggagacagacagcaaggcaaaggggtgaggatggggctgtntgactaaaaaaacaaccccantcatttcacccattantaagggggtcncctgttgtgcttttaccttggtggcggggtgggctggggtggncagacatgtgggcctgggcatgagganttttggcttttctcccaagtctttgaggtctcagggctggtgcagccccttccctccctgacccttctcctgggctggggataaaggccttgggtnagctggctactctagggcaggaagattgcatggagacccagagggnccaccaganttgggctnagatgggnat

SEQ ID NO: 6581 - DNA, 451 bp, Homo sapiens
  III.209 (H51140)
  misc_feature (143)..(143): n is a, c, g, or t
  misc_feature (168)..(168): n is a, c, g, or t
  misc_feature (284)..(284): n is a, c, g, or t
  misc_feature (336)..(336): n is a, c, g, or t
  misc_feature (389)..(389): n is a, c, g, or t
  misc_feature (400)..(400): n is a, c, g, or t
  misc_feature (424)..(424): n is a, c, g, or t
ggaatgagtgtctttgtgtatcacctggtgacttgtcagtgtctgtgtctgtgtgtgcctgtgagccagcatctctgtatcagtgttgctcatgctgtgtctttgtgcgccatggtgtgtcagtgtctgtgtgttgatgggtngcccatgagtgacccccgccagagnatccaggctggctggatccagcacatctccccagtggcagcctcgccctctgggtcagggtgactgaggcattttgtggccttaaaacggggtgttcagggtcagccctcagggtngctggggcccttccatcccttgtccccttcaggttggtgaaaaggactccgnggggccagggtgctgtatagcagctttatggaagttttcaagcttgggctatnccttccctttnggaagcacaagacaagggttcctnagggttgctgagtgaaagcctgaaaga

SEQ ID NO: 6582 - DNA, 465 bp, Homo sapiens
  III.210 (N53031)
  misc_feature (309)..(309): n is a, c, g, or t
  misc_feature (386)..(386): n is a, c, g, or t
  misc_feature (427)..(427): n is a, c, g, or t
acaatttaattatttattagtttcctcaacaacagttaaaacaacacaatcctgcatgaaatggatccaaagtatgctgagtatttgcaaaacagtactgatactgtcagtggacttcttaatgttcttgtttccatgtacaatcgtgtgacatgtagttaagcttagtaaattgtttttcatgtaacctgtgaattggaacaataaatttcaatataagctcaatacatttcaatataacctcatatggctttatatcatttttgttttccctaatgttttcctccttgacatgaaatatttctaatnggttaaacaggtactaaaacaaattttggacttgacaaggtaagttttgaaagatgttttgtcacaagaagaaaggnatctcttgggatcacaaacgtcttcctggttggaataaacnaaaggagttccctttattggggttcccagcttccagcc

SEQ ID NO: 6583 - DNA, 371 bp, Homo sapiens
  III.211 (N73214)
  misc_feature (165)..(165): n is a, c, g, or t
  misc_feature (205)..(205): n is a, c, g, or t
  misc_feature (233)..(233): n is a, c, g, or t
  misc_feature (282)..(282): n is a, c, g, or t
  misc_feature (337)..(337): n is a, c, g, or t
  misc_feature (347)..(347): n is a, c, g, or t
  misc_feature (360)..(360): n is a, c, g, or t
gcgagcagtcttctggattgaatttgtcatgcgccataaaggagccaagcaccttcgggttgcagcccacgacctcacctggttccagtaccactctttggatgtgactgggttcctgctggcctgtgtggcaactgtgatattcatcatcacaaaatgtctgtnttgtgtctggaagtttgttagaacaggaaagaaggggaanagagattaattacgtctgaggctggaantgggaaacccaataaatgaactcctttagtttattacaacaagaagacngttgtgatacaagagattcctttcttcttgtgacaaaacatctttcaaaacttancttgtcaagncaaaaatttgttnttaagtaacct

SEQ ID NO: 6584 - DNA, 466 bp, Homo sapiens
  III.212 (N62096)
taaaagccaaaataataattttatataacataaatacagactaaagcaagcgtaaatgttatgtgttttaaagtctatgaaaacatacatatttttaaagcagtcaactcattgaaagatactaatatttaaagtagaaagttgtgttgtctgctgaacatgagactctgaggtatttgtgagagagaaattgtcaggaaagcagtagaacatttcctgcccatgggtgcagtcttgagtatttgtaatagccatgacgaatccaaaaaccatcaccacagcaccaatgggaagcatgacacaagacataatcttatcggagtgtgtccttggttcttcagacagtttcagataacaggctgatggaatgataaaaatgaggggagttgcacagagcacaccattgagttctagaactatcccgaggcaatcaatcagcaatgacaccagcgtgggctacagtgat

SEQ ID NO: 6585 - DNA, 548 bp, Homo sapiens
  III.213 (N78327)
  misc_feature (249)..(249): n is a, c, g, or t
ggtgatttcctcattgtgcaaacatcacagagtatacgtacacaaatctagatggtagcacctattacacacctaggctatatgctatagcttattgctcctaggctataaacctctacagcatgtttctgtactgaattctgtaggcaactgtagcagaatggaaagtatttatgtatctaaacatagaaaaatatatagtaaaaatacagcattgtaatcatatatgtgggccattaggtgatgcanaactgtgatatctccatatataaaatttattagataggttatccccaaacatttaggtatctagtaaataaacttattttatattactatctaggggacttatttgaaaattactgcagaaatgatgacctggtaacatttggaagattttgttatggtgtcactgtcattttgacataccctatggaatgctttgtgacaagagaggtaattgccaatgtgttttttggtgggaatccttcatcgggttttccacattggttggtaacagtgatggtcatcactgtagccacgcctgt

SEQ ID NO: 6586 - DNA, 268 bp, Homo sapiens
  III.214 (N74326)
  misc_feature (20)..(20): n is a, c, g, or t
  misc_feature (72)..(72): n is a, c, g, or t
  misc_feature (98)..(98): n is a, c, g, or t
  misc_feature (105)..(105): n is a, c, g, or t
  misc_feature (243)..(243): n is a, c, g, or t
  misc_feature (260)..(260): n is a, c, g, or t
tggaaacacaaagtatttantaggatttgctgactgctataacatagaaactcaaaatacagtttcatggtncttttgccttgaagtaagcaaattcnttcattngttcattcattcattcatttattcaacacacatttactgagcacctaccacattccaggatctgtgcaaggttctggggataggaagatgaatagaaggacacagctcctgccctccaggagctcacaatctgatggnggaggtaacgttcttgngtgggtgt

SEQ ID NO: 6587 - DNA, 166 bp, Homo sapiens
  III.215 (W05233)
cggcacgagggtactctggatcccttcccctgctttgacccccagactttgctccatctattattgcttctccatcctggatccttgacatttgtcaccccactggccttctcaggtgcaatcagtaaaaatgctgagaactcttggatcttaatcttcatgactg

SEQ ID NO: 6588 - DNA, 433 bp, Homo sapiens
  III.216 (H71689)
  misc_feature (421)..(421): n is a, c, g, or t
attcggcacagtaggtcttagctccttgaagactgcattaatgtgtcttttgccttcatcccccccccaccctcccgcttcctctagtccttgtgtttaccaaaatacttttgctaaaacctgtatgtctagcttctgctgatactcttagcaatactcccttatttccttctggcgccatttgccaatcaccagctaatggctttgctctttgcatggtacctgtttctgtcctactagcttctagtctgaaaaggaagcctttactagcagcttcaacccagtcctccttaccttgcacctattaacgttggttcaacatgaaggggaagtaagataagtgggaagaggatacacagggaaaggtgggaactgggatttcaggtgttctgtgttcttgccatttgacactttgggattncgtttccagctt

SEQ ID NO: 6589 - DNA, 459 bp, Homo sapiens
  III.217 (H72252)
  misc_feature (365)..(365): n is a, c, g, or t
  misc_feature (377)..(377): n is a, c, g, or t
  misc_feature (413)..(413): n is a, c, g, or t
  misc_feature (422)..(422): n is a, c, g, or t
  misc_feature (445)..(445): n is a, c, g, or t
ctgtatcacattccttagctcacaattgttttattattcaccttaactattaatatatacatagcacttacggataaagattctacagaatacagtacagttctgagtcccctttcctaactggaggtttttcagtcctgctatgaggtgatacttatttcccatggctactcaagttaatttaccagagttctaggatatttgtccattcaggaccattttagggactccatggctaaaggggcaggataatgagggtaaagggtcaagggtgggttgggatttttgactacaaggggtaggtaggaggtcttggggcaggcctaaggtcttgacccctttgttagggggataatggactatangccgggggactncccaccctggccgtgtacttgcaggggttacaaggnaggcagggncaccctttcaaggaaacccgggnttttatgggttttg

SEQ ID NO: 6590 - DNA, 297 bp, Homo sapiens
  III.218 (R38859)
  misc_feature (198)..(198): n is a, c, g, or t
  misc_feature (261)..(261): n is a, c, g, or t
  misc_feature (271)..(271): n is a, c, g, or t
tttttttttgatagttgagacagtatttattttttaacgtggcactgaaggtcatatactttaatccctcccaacacatgtaacaagtcctctgcccatcattagccgattctgaggatgaaaccgttatgcaaagtcccttacagagtcaaatttggcctgagagataaaaagtcgagcttagcagatggcagggantaaaagggagcaggggcaggagaaggctcgtctttttaatctaagccaaagcccaaaccaggngccagaaagntaaacaggtttgagccaccgtgcctg

SEQ ID NO: 6591 - DNA, 410 bp, Homo sapiens
  III.219 (T80554)
  misc_feature (97)..(97): n is a, c, g, or t
  misc_feature (122)..(122): n is a, c, g, or t
  misc_feature (309)..(309): n is a, c, g, or t
  misc_feature (344)..(344): n is a, c, g, or t
  misc_feature (363)..(363): n is a, c, g, or t
  misc_feature (381)..(381): n is a, c, g, or t
  misc_feature (389)..(389): n is a, c, g, or t
  misc_feature (400)..(400): n is a, c, g, or t
cgataagaggcagcagttcggaagccggttcctgagcgatccggcgcgcgtcttccaccacaatgcctggtaatcaccctgccccctcgcccggccntgtcgctggccgtctgtcccgccgnctcggagcattccgaaaagcccctgaccgccggccacgagtcaagctgccctacccggccacgagtcaagctgccctacccgaggcactctccaaggggagagaaactcctaggccagcgactcaccctgctcgcagccaggacgtgaagcccctaagctgcccgtttgattttctcagggacaatntggagtggtcggaagagcaagccgcggcgcggagnagaaaaagtccagggagancagtatccagcgggtgtnccaggagnaaacaagttgnttatgagatc

SEQ ID NO: 6592 - DNA, 233 bp, Homo sapiens
  III.220 (H81946)
  misc_feature (172)..(172): n is a, c, g, or t
  misc_feature (214)..(214): n is a, c, g, or t
  misc_feature (229)..(229): n is a, c, g, or t
aacatttttaaaatttatccttttaattcttgaatgagtaaggacaatattttgctgtttattggtataaaacagccctgtcccgggtatacaagggtatacgtaagtctgtaacatcattagatacagtgaatttactttacttgaaagcatagcaaaatagggattaacnaaaggatatatttttaataaggaaaatggctttgaaataacntgaaatcaatgaacntttg

SEQ ID NO: 6593 - DNA, 340 bp, Homo sapiens
  III.221 (H82041)
  misc_feature (178)..(178): n is a, c, g, or t
  misc_feature (186)..(186): n is a, c, g, or t
  misc_feature (232)..(232): n is a, c, g, or t
  misc_feature (241)..(241): n is a, c, g, or t
  misc_feature (248)..(248): n is a, c, g, or t
  misc_feature (271)..(271): n is a, c, g, or t
  misc_feature (280)..(280): n is a, c, g, or t
  misc_feature (306)..(306): n is a, c, g, or t
  misc_feature (320)..(320): n is a, c, g, or t
  misc_feature (336)..(336): n is a, c, g, or t
ctgtataaaaagcaattgctcttttgtttccaaaacaggtattacaagtggataaataatgtgcactgctctgagcccaaaggtacgcagtgggcctgggctctctgatatgcatcagtatagccaatggctagccagcagacatgaagctaatttgctaccaatgaaagaagatctngccttgtngttaaccaatctattagggaaggagattacagcagaaacttttatngagaagttngacaatngtgccttgctctgtcaacttgcngaaactttncaggggaaatttcaagggggagcatnggtgcttaacaagnccacaaaggaattctnaccc

SEQ ID NO: 6594 - DNA, 443 bp, Homo sapiens
  III.222 (R65820)
  misc_feature (30)..(30): n is a, c, g, or t
  misc_feature (68)..(68): n is a, c, g, or t
  misc_feature (352)..(352): n is a, c, g, or t
  misc_feature (383)..(383): n is a, c, g, or t
  misc_feature (438)..(438): n is a, c, g, or t
ggcagggctgggggctccacagtaaaaaancagctccaggcgggggaaggcaggcggcatggaggccntgggggacactggagtcaggctggacagccgtcggtcagcgtgtccacaccaacatccagctctgtgtagtagaagtcctcctcaccatcactctgatcaggctctgctgcctccccaggtgcaccaggcggatgtgtctctgcatcgccgacgccgtgctcagcaccttcccgcagctcttccacagacactggaacatgacctggggccgggctcttcctttttctcagggtgggctccccaaacagaaagtggggctgccttcggggggcagtggggggtnacggggttggacggagaggacttgtcaattnggccaggttccccattcgttgccgaatttttttggccttgaagggcaaatttccntttaa

SEQ ID NO: 6595 - DNA, 349 bp, Homo sapiens
  III.223 (R65919)
  misc_feature (254)..(254): n is a, c, g, or t
  misc_feature (330)..(330): n is a, c, g, or t
  misc_feature (338)..(338): n is a, c, g, or t
aattcggcacgatggggacctggccagtgaccagtcctctccgtccaccccgtcacccccactgccccccgaggcagcccactttctgtttggggagcccaccctgagaaaaaggaagagcccggcccaggtcatgttccagtgtctgtggaagagctgcgggaaggtgctgagcagggcgttcggcgatgcagagacacatccgcctgggtgcacctgggggaggcaggcagagctgattcagagtgatggtnaggaggatttttactacacagagctggatgtttggtgttggacacgcttgaccgacgggctgttcagcttgaattncagtgttncccccacgggc

SEQ ID NO: 6596 - DNA, 365 bp, Homo sapiens
  III.224 (H11442)
  misc_feature (182)..(182): n is a, c, g, or t
  misc_feature (242)..(242): n is a, c, g, or t
  misc_feature (306)..(306): n is a, c, g, or t
ttttttttgtttcataaatatattttatttttcaatgaaaaagtttgcacattagaaaaattagtaagggtcaggggtgggcttcctgggaggatggctgagatggttcctcaaccctggttggtggccctgttgaccttcactgggaacaagttcaggggcgaggtcacagctttgagganttcctcactgctgtgattcaggtctctcctgtccaccctggctctgggtacctgggtgtnttacttgtgggcacttgtcacgccagcaagttggctaaggatgggcacagagcagtcacacagntaccaaaaaggtccaattcataggcctcgctggctgccgacctttggccttttgcatag

SEQ ID NO: 6597 - DNA, 318 bp, Homo sapiens
  III.225 (H11551)
  misc_feature (73)..(73): n is a, c, g, or t
  misc_feature (120)..(120): n is a, c, g, or t
  misc_feature (149)..(149): n is a, c, g, or t
  misc_feature (207)..(207): n is a, c, g, or t
  misc_feature (220)..(220): n is a, c, g, or t
  misc_feature (242)..(242): n is a, c, g, or t
  misc_feature (267)..(267): n is a, c, g, or t
  misc_feature (286)..(286): n is a, c, g, or t
  misc_feature (294)..(294): n is a, c, g, or t
cgtgggctatctactcagttgatccctccctcgctggcttggctctgactcctgctcagacccatcacctttnccgggaatgatgtctggagaacccctgcacgtgaagacccccatccntgacagcatggccctgtccaaaatggccngcaccagcgtctacctcaagatggacagtgcccagccctccggctccttcaagatccngggcattgggcanttctgcaagaggtaggccaagnaaggctgtgcacattttgtctgctncttggcgggtaacggaggnatggcggntgcatatgcggtcagggaactggg

SEQ ID NO: 6598 - DNA, 590 bp, Homo sapiens
  III.226 (N58117)
  misc_feature (590)..(590): n is a, c, g, or t
gagactgcacaaactttagtaagatggatgagatcagtgatgccatagctggaaaaaacagaaagtctacatttctagttccctgctctcctttgttcagactagcatctgaggaaacttgtgaagaagtcaccgtgaaataaaagtctttgtcaaaaataaaaacaaatacaaacctacaaaagaagtgatggggctggtcatggtggctcacaacagtaatcccagtgctttgggaggctgaggtgggaggatcacttgtggccaggagttccagaccagcctgggcaacatatcaagacccccatctctgtgcaaaaaaaattttttttaattagccaggtgtggtggcatgtgcctgtaagtcctagctacttgggagactacagtgaggatcacttgggcccaggtgtttgagactacaatgagctatgattgcaccactgcattccggcctaaatgatggagtgagaccttgtctccaagggcggggggtggaaatagatgtgatgatatgatggagtaagatcaattacctgccttcctcaccatatcaggtggtctcactactgtaggacagactggaacan

SEQ ID NO: 6599 - DNA, 283 bp, Homo sapiens
  III.227 (N73880)
  misc_feature (231)..(231): n is a, c, g, or t
  misc_feature (238)..(238): n is a, c, g, or t
  misc_feature (261)..(261): n is a, c, g, or t
  misc_feature (279)..(279): n is a, c, g, or t
aaattttgagaggagactttatttcttataaagggttaggctgggctaggtggctcacacctataatcccagcactttgggaggccaaggcaggaggatcacttgaacccaggaggccttaaccagcctggacaacatagtaagaacccatctctacaaaaaattttacaaattagccaggtgtggtggcatgcacctgtagtcccagccaccccggacgcctggaggcangaggatnaactttttgcccaaggagttttncggttggaattgggctangatg

SEQ ID NO: 6600 - DNA, 402 bp, Homo sapiens
  III.228 (N78656)
  misc_feature (176)..(176): n is a, c, g, or t
  misc_feature (259)..(259): n is a, c, g, or t
catttattatttatttatttatttttgaaacagggtctcactttgtcgtcccccagagtacagtggagtacagtggcggctcactgcaggctcaattgctcttatcttgtaaatgcttcctgtgtccttagtgcctgtgcatgatctcttttcatctccaaaacaagtagttttantctctccatttcacagatcaggaaactgaggtttcataaattgcctgaggcactcaattcccaagtgactgagccaggacttnacaggagttctgactctgaagctgtttcttccaactgattctgttccgcctcgtcttatctctctaggaaagaggtgggctgttttaaagctcattggtcagttgccagatcgaggactctgactatcaggagtacagagcat

SEQ ID NO: 6601 - DNA, 492 bp, Homo sapiens
  III.229 (W15145)
  misc_feature (484)..(484): n is a, c, g, or t
gccaaggactggacatcttgacaccaagaaacatagcaaaatccagtcaaaagtgactttgcaagcagtatgatgaatttctatatggttctccagctccagcattttcttagggaaagcatggccagaaatgcccaagtctgtattttggcaacagcccaagcttctcagactccactggccagttccagatctttaagtaactataataagagccatgctgtctgtctctaaaaagtgaagcatgaatcaaaagtgactttgttttaatttaacagcattgagactgtgaaaggcactggatatgtttaggcacctgtaaacggagaatgtggggtgaaaaaagagaggcatactgggtgcgatggctcacgcctgtaatcccagcactttgggaggctgaacaggcagatccttgaggccaggagtttgagacagcctggccaacacggtaaaacccgtctctactaaaaatctaaaatantgggtgtg

SEQ ID NO: 6602 - DNA, 444 bp, Homo sapiens
  III.230 (H05784)
  misc_feature (190)..(190): n is a, c, g, or t
  misc_feature (249)..(249): n is a, c, g, or t
  misc_feature (284)..(284): n is a, c, g, or t
  misc_feature (298)..(298): n is a, c, g, or t
  misc_feature (307)..(307): n is a, c, g, or t
  misc_feature (321)..(321): n is a, c, g, or t
  misc_feature (350)..(350): n is a, c, g, or t
  misc_feature (365)..(365): n is a, c, g, or t
  misc_feature (402)..(402): n is a, c, g, or t
tttttttttttaatcgttataacagttttattcaagtctctgtgtgctctggcattgagaccaggctgagatcagcattacactgtaatacaataagaggtttagccattgaaccaagcctgcttggcatccctagttaacaatttacagtacctcgaaaaaaaaaaaaaaaaaaagccaaaggaaagancctgggaagtttccttcaggactttttcatctttaaatattgttgacaacatacaatancttaaatcccaaagcaaagtggggatttcaagggncacggggtcagggncacatggancaaggacactgggnggcaggaggaaggtctaggggtttaaaancttaggtaggcttantttacaggggcaacccaaacaaacacatgtgttggancttttcactttcacctgggttttaaaagccctaggggggagg

SEQ ID NO: 6603 - DNA, 351 bp, Homo sapiens
  III.231 (H06074)
  misc_feature (277)..(277): n is a, c, g, or t
  misc_feature (310)..(310): n is a, c, g, or t
ccttcccctcaggtcctgagtgaggcagtggctctctggcggtgctcgcatttaaataggagtgtgtaggcttacagcaatgaaacatctaggagcttttaactttggatctatacctgggtgtgacatttccttggtgttctctggctgcctttctggctctgcagccctgagggaacttgtgtgtgtgtgtgttctctggagaagggaagtgattatggcagagaggctcctttagattctcctcttaaacctctttgggaacatgtttgaattncagaagtgaatgaacttcattcattctctcgtnccagatttcagaagggactaaagtgaacggaggctttttca

SEQ ID NO: 6604 - DNA, 398 bp, Homo sapiens
  III.232 (H18967)
  misc_feature (15)..(15): n is a, c, g, or t
  misc_feature (294)..(294): n is a, c, g, or t
  misc_feature (310)..(310): n is a, c, g, or t
  misc_feature (366)..(366): n is a, c, g, or t
  misc_feature (385)..(385): n is a, c, g, or t
  misc_feature (394)..(394): n is a, c, g, or t
aaatccctcaaaatntgtttattatacaagtgagttttgagtcacgatgggcttatcggtaggatttctggtagcgagcgcggggcaccaggacctccaaactttttggactcgcagcgacgagggtcagctaccagcagggtccggtcatactggatgaggatgtctttgatctccttcttggaagcctcatccacatatttctggtaataggccacaggggctttggagatggactgacggatagcataaatctgggccacgtgaccaccaccctttacacggacacggatntctacaccagcaaatngctccttgccgagaagcaggaactgggctccagcagcttgtactgtaggcgtgcgnggcttcaatcattttccangggggccgncctt

SEQ ID NO: 6605 - DNA, 464 bp, Homo sapiens
  III.233 (H19064)
  misc_feature (1)..(1): n is a, c, g, or t
  misc_feature (12)..(12): n is a, c, g, or t
  misc_feature (110)..(110): n is a, c, g, or t
  misc_feature (114)..(114): n is a, c, g, or t
  misc_feature (272)..(272): n is a, c, g, or t
  misc_feature (430)..(430): n is a, c, g, or t
  misc_feature (461)..(461): n is a, c, g, or t
nattcgtcacgnggcgcgcggtgaggttgtctagtccacgctcggagccatgccgtccaagggccccctgcagtctgtgcaggtcttcggacgcaagaagacagcgacanttgnggcgcactgcaaacgcggcaatggtctcatcaaggtgaacgggcggcccctggagatgattgagccgcgcacgctacagtacaagctgctggagccagttctgcttctcggcaaggagcgatttgctggtgtagacatccgtgtccgtgtaaagggtngtggtcacgtggcccagatttatgctatccgtcagtccatctccaaagcccctgtggcctattaccagaaatatgtggatgaggcttccaagaaggagatcaaagacatcctcatccagttttgaccggaccctgctggttagctgaccttcgttcgnttgcgagttccaaaaagttttggaagttctnggt

SEQ ID NO: 6606 - DNA, 243 bp, Homo sapiens
  III.234 (N58332)
  misc_feature (192)..(192): n is a, c, g, or t
  misc_feature (226)..(226): n is a, c, g, or t
  misc_feature (236)..(236): n is a, c, g, or t
ttgctgacatatcgaattgcacagtgaatttttacatttcaaaaactaactttattgcatttaatacagatataagcacgaataagacaaattagttccattttcagacaggaagaaaaacattttgggtagggagaagttaattgctggtaaagtgtagtagtattattattctaaaagataatgagttcnagaagtattaaggaaatatgtgtgtgtgtacgcntaggtattcnaggtaaa

SEQ ID NO: 6607 - DNA, 175 bp, Homo sapiens
  III.235 (N77699)
  misc_feature (160)..(160): n is a, c, g, or t
aatacttaaacaaaagcgcaacatcttgaaaaccagtctagtcattgaaacctatgaaatgacactgaaagatcctgggctgcttcttaaataagtagatcagcaagacttgtttcagagtgacagtggagtcgttaccgctggaggactaaagggcccngtgcagctgtcactg

SEQ ID NO: 6608 - DNA, 453 bp, Homo sapiens
  III.236 (W15302)
  misc_feature (77)..(77): n is a, c, g, or t
  misc_feature (246)..(246): n is a, c, g, or t
  misc_feature (438)..(438): n is a, c, g, or t
gcgaccgctgcgccacttgcccctggccccggagctccgcccctctcctgctccccgcccgcttgccccctcgcgtnccccaactgccgagcccagctcccctcgtagcccactcgcgggctgccttctaacccctaccccagttagtcccggttccttcaccgtctccttagcccgcagagagcttagctgactcttcagggtcgctgagggcgcgtcttctgttccccgagggccacaggcggnctcgggtccccagcagacggcgagccccgcgcttaggtcctctcctgccctctcccgtgccgagccaaggggttcccggctctcaaatcctgttcccgctgtcctcttccctgacccctactcctttggcgatggaaagaagtttaaggggcgcttacgacgcaccaacgttctctgttgccgagggtgggnaaaattttttttttt

SEQ ID NO: 6609 - DNA, 426 bp, Homo sapiens
  III.237 (W39414)
  misc_feature (16)..(16): n is a, c, g, or t
  misc_feature (17)..(17): n is a, c, g, or t
  misc_feature (18)..(18): n is a, c, g, or t
  misc_feature (175)..(175): n is a, c, g, or t
  misc_feature (219)..(219): n is a, c, g, or t
gaatgagtaagagttnnngcacgcgatttgtatttattttactgtgaatctctggccttatatcagaaaaaaaaaaattgtgccaccctcggcacagagaacgttggtggcgtcgtaagcgccctaagcttctttccatcgccaaggagtaggggtcagggaagaggacagcggnaacaggatttgagagccgggaacccctggctcggcacgggagangggcaggagaggacctaagcgcggggctcgccgtctgctggggacccgaagccggcctgtgccctcggggaacaagaaagaccgcgccctcagcgaccctgaaagagtcagctaaagctctctgcgggctaaaggagacggttgaaggaacccgggacttaacttggggtaaggggtttagaaggcagcccgcgaagttggcttacg

SEQ ID NO: 6610 - DNA, 452 bp, Homo sapiens
  III.238 (R13071)
  misc_feature (156)..(156): n is a, c, g, or t
  misc_feature (174)..(174): n is a, c, g, or t
  misc_feature (224)..(224): n is a, c, g, or t
  misc_feature (230)..(230): n is a, c, g, or t
  misc_feature (268)..(268): n is a, c, g, or t
  misc_feature (273)..(273): n is a, c, g, or t
  misc_feature (293)..(293): n is a, c, g, or t
  misc_feature (307)..(307): n is a, c, g, or t
  misc_feature (332)..(332): n is a, c, g, or t
  misc_feature (358)..(358): n is a, c, g, or t
  misc_feature (367)..(367): n is a, c, g, or t
  misc_feature (384)..(384): n is a, c, g, or t
  misc_feature (415)..(415): n is a, c, g, or t
  misc_feature (420)..(420): n is a, c, g, or t
  misc_feature (433)..(433): n is a, c, g, or t
  misc_feature (438)..(438): n is a, c, g, or t
cacacaaatttaaatctatttctacatctatctttatatattttttagtctaacttttattttagatacagggcatacatgtacaggttttgtacatgggcatattgcatccaggtagtaagcctagtacccagtaggtagtttttcaacccacantccccatcctccctccantctctagtagtctgcagtgtctgttattctcatgttttagtccatgtgtnctcagngtatagctcccacttataaatgaggaatatgcaggtgnctggntttcttttcctgcattaatncactcagggttatnggtctccaggctctactatgtctcngtgaaggggcatgaattcatcctccnatatggggngccataggtattctgtngggggtattatattattaaccacactttgcnttatnccaattcccccantggtngggggccaccaggg

SEQ ID NO: 6611 - DNA, 450 bp, Homo sapiens
  III.239 (R40502)
  misc_feature (246)..(246): n is a, c, g, or t
  misc_feature (296)..(296): n is a, c, g, or t
  misc_feature (301)..(301): n is a, c, g, or t
  misc_feature (381)..(381): n is a, c, g, or t
tttttttttttcatgaaacagaagaaatttattacttacagatctgacagcttaggggtgctgatggggagcgcagataagtctggaggtggcagggagctcagcagtgggtagggagtgagagagcagctgtgggagttcacctttattaaggtatatgggtattatccctccggtcttctaacaggagttgtggattggctggtttaaggaaaacacgccagaagggggaaacttatttatatnactctggtggttgatcattaggttttatcacggttagcagctgtggggtnttttnggtttgggattagcaggatgagaaacaagtgggctatatctccaccacacggggaggagttattttaactagtacaaagntccaggtatgattggggtttcaaacaacttattgtcagacctaaaaatgcatgaccctacatcctgaag

SEQ ID NO: 6612 - DNA, 389 bp, Homo sapiens
  III.240 (R82434)
  misc_feature (304)..(304): n is a, c, g, or t
  misc_feature (310)..(310): n is a, c, g, or t
  misc_feature (330)..(330): n is a, c, g, or t
  misc_feature (358)..(358): n is a, c, g, or t
  misc_feature (372)..(372): n is a, c, g, or t
gaagagagcactgggtctcgcgagcaagatgtcagactgcttcaggaaattgtagatcaatgcatgaacagaagtattgcattaactcaggcgcgctacttggagaaagaagagaagtgtctccctcctcccagcattcgggttgtggtcacggtggaacaaacagaggaagaactggagagagctgcgtccaccatcaaggaggtagcccaggccgtcctgctctaggcagagtcccgggaccatggcctcctgccacacaacacgcagagaggactcaagactcccgctggccatgggagtngcttgnaaagagagcaagaacatgtngggtcttttgataggattgtttaccaantggtgttcagtatnggaccatttttgttgac

SEQ ID NO: 6613 - DNA, 331 bp, Homo sapiens
  III.241 (R82435)
  misc_feature (11)..(11): n is a, c, g, or t
  misc_feature (12)..(12): n is a, c, g, or t
  misc_feature (17)..(17): n is a, c, g, or t
  misc_feature (192)..(192): n is a, c, g, or t
  misc_feature (244)..(244): n is a, c, g, or t
  misc_feature (289)..(289): n is a, c, g, or t
  misc_feature (300)..(300): n is a, c, g, or t
  misc_feature (310)..(310): n is a, c, g, or t
  misc_feature (319)..(319): n is a, c, g, or t
gactggaaaannttttngtttatttagatcttcaatataaatttgtaccacatatgttgaagtgttcctcttagctttaatgttgcagtcatttttctatgaaatactaaggagttaaggagtgcttactgaaccattactattagagggagggaagagacactgaagctccagttttaaacgacaacaaangaatataaaatactaggtataagaaaacatttaaatagtactaaatgcacantttaaacatcagttatacactgtcattaggttttcctcttaaaanaatcagttccnggggcttttngggtgtgtnttccttttttaa

SEQ ID NO: 6614 - DNA, 416 bp, Homo sapiens
  III.242 (R74313)
  misc_feature (8)..(8): n is a, c, g, or t
  misc_feature (28)..(28): n is a, c, g, or t
  misc_feature (54)..(54): n is a, c, g, or t
  misc_feature (278)..(278): n is a, c, g, or t
  misc_feature (297)..(297): n is a, c, g, or t
  misc_feature (404)..(404): n is a, c, g, or t
aagcagantttaaatagtttatcctgtncacattatgcagaatttcagtatcanccacaatgttagtacagtaactgaaacacaatgaagaaaaacggggagtgaggggaggttcctagtgtgacctgacatagtctaagggttctctccttttgtatgcatctcccaaaggcaagtatcagttaattgtttgaaggagagtagactatccagggttcatttattgttcaggtgtcttttccaaagtgtgagaaaataggagtcaattcaataatgantatctgtaatccaaaccantttaactacaatcaaggatgtctttctcatctattatcacaaacatcccaggttgcctccatctaaaaatttctttggaaaagttaagggcacaattaattataccntatttaattccc

SEQ ID NO: 6615 - DNA, 342 bp, Homo sapiens
  III.243 (R74405)
  misc_feature (27)..(27): n is a, c, g, or t
  misc_feature (140)..(140): n is a, c, g, or t
  misc_feature (282)..(282): n is a, c, g, or t
  misc_feature (295)..(295): n is a, c, g, or t
  misc_feature (304)..(304): n is a, c, g, or t
  misc_feature (318)..(318): n is a, c, g, or t
  misc_feature (326)..(326): n is a, c, g, or t
atgttaactgtccaacaaactgtgggnttattctaagttcacaattattgagaactgattgaggttaagatttcatgaagaaagcatgtattgtgtggaagtaattttttttaatttatactgacctacatttatacgangaattctgtacatgttaaaagtaaggatgaccaaatgcaaatttaatgagtgggccaattaagaaagatacatatgcacttttactgtgtaacttttgtatgctgaatggtacatatatttttttgcttttgagggggaatnaataagggtatanttaattgtntcctaaaccttttncaagggtntttttagggtgggggg

SEQ ID NO: 6616 - DNA, 398 bp, Homo sapiens
  III.244 (H53481)
  misc_feature (289)..(289): n is a, c, g, or t
  misc_feature (362)..(362): n is a, c, g, or t
  misc_feature (368)..(368): n is a, c, g, or t
  misc_feature (378)..(378): n is a, c, g, or t
tcgagcctttgactattctttccatataggaagataggactagagttaagttgggaggcagatggggaaactgcctgattgttctgcgtcagaaagcagaattcattcctttgcccctgagaaggcaggaaagagaggtaaaatgggaaatggagagaagggagagaggagatgagagcttagccacatggcagggaaattgagcagctggactttttttgcctgtcttctcagacctctccatagcactgcatgtgagtagttttctgtgaaaattaggggaaacttngaactccaggggctgaatagatgtacccttgaaggaaaaaacatgagattatccatccaccacacacactgantcagtnggaaggaagnaagggagctcagagccagag

SEQ ID NO: 6617 - DNA, 420 bp, Homo sapiens
  III.245 (H53856)
  misc_feature (51)..(51): n is a, c, g, or t
  misc_feature (276)..(276): n is a, c, g, or t
  misc_feature (331)..(331): n is a, c, g, or t
  misc_feature (356)..(356): n is a, c, g, or t
  misc_feature (381)..(381): n is a, c, g, or t
  misc_feature (389)..(389): n is a, c, g, or t
gcaattataagtaaccaaaattagattattgtctttatttatttataaatngtctttctgtttcaataggtcataagctccaggaggccagcaactttgtttagtccctcaatcctcaatactccaaagaatgccttgtatatatcaccattatgttgaatgactgagtagatggatggatgatggggaaatctgttaaatggaggaagaaatacctgcattacccagtcccagaccatagggtacctaggatatccagtaggcagtgtatatttnatgtgtaaggtgaaatattattttggcaactgctgtcccttttaaggttaggggnaggattgcaggcaaactcttactcnaaatttatggcacaggggcaattgncccctttnaaaattcccccaattttccgggggccgcctt

SEQ ID NO: 6618 - DNA, 386 bp, Homo sapiens
  III.246 (R02099)
  misc_feature (71)..(71): n is a, c, g, or t
  misc_feature (334)..(334): n is a, c, g, or t
  misc_feature (343)..(343): n is a, c, g, or t
gagacggggtttcaccgtgttagccagaagctctgcatatctcttaaggcaacaggtgctatcttccaggnctttctgacagtccgtatgcccttccctcaaagcccttcaggccaactcatccacagattactgccctcagtgtcttaaggcataactaacttctgtagagcccttatcagtgtgggtcacatcattttgtttgacacattatgactgtatggtgtgcataatattcggactccagattcgttgattcattaatttgttcagggatcctacagccagacagtagggggagttggggacttaggcccactagggaaggaatcancggccgggntggggggaatctcaggggcctggggctctcaggggtttcagct

SEQ ID NO: 6619 - DNA, 348 bp, Homo sapiens
  III.247 (R02212)
  misc_feature (338)..(338): n is a, c, g, or t
  misc_feature (344)..(344): n is a, c, g, or t
tgggccttcccttcaggtgtgtgtcagtctcctctaatgatcctggtccccactgtctgcccctgcccgtagcatctccactaaaggaaagaaatgataggagggatgggaatagaggcgagatgatagacctgctgttcagtactgtagccactagctacatgtggctgttgggcactggaaatacagctagtccaagttgagatgtgcgtaagtgtaaaatacaccatgctttgagactatataaaaaaatgtaaaatttcttatttaacaaattgttaatattggttacatgttggaaacagccattagttttggatatagtaggtttaaaccanaatatnttta

SEQ ID NO: 6620 - DNA, 485 bp, Homo sapiens
  III.248 (R59593)
  misc_feature (404)..(404): n is a, c, g, or t
ttttttttttttttttgccattgaaaagaaagtttaatgttacaattctccccagaaatgagggtcatggcatgccacagggggccacatgaaactctgtcacaagcagagaccacaaagcagagagaggacctgagactatgcctttattgctaagtcagtgggatggatctaggtggggatgtcccctgtttgggcataaagcaaaaacagacattctatggttgtcactgggaagtctgtgatatgagttttgtgcacccacgagagagggcttaaaaggatgatgtaaacaactttagcctttagtttgtccctgtacttaatatatgtcaaatagggcaaacacaaattctaaggtaaacacagattagttccgggagcagcttggcttatggcacacnttcagggaaacaccttggcttaaatcttacaggggaccacctgtttttttcaaactttggggttattccgtttctgacttt

SEQ ID NO: 6621 - DNA, 436 bp, Homo sapiens
  III.249 (R59651)
  misc_feature (396)..(396): n is a, c, g, or t
  misc_feature (412)..(412): n is a, c, g, or t
  misc_feature (431)..(431): n is a, c, g, or t
agaactcacagttctgaaataccaaattgaaaccttttagttgtttgcagatcattttgccatgttttctcagttcagcatgcacacaagctaatctttggaatttttacttggaaattttccggcctgttgggttctggtatgctttcctgaaaatgtgtttttgtgcttatgcttattgcagtaaactagaactattcatttcaagcatttgtaccattctttggtgggacttctatagacaaccccgtgttgactgaaattatttttagttctaagtataaaaaccttaaaagtaggataatccatcacttttcatcttataaaactggaacagtacacccatttaaaccctattctcccctccccccagcccctaggcaaccacaattctantttctgcctctctggntttggactactctgggtanttcat

SEQ ID NO: 6622 - DNA, 343 bp, Homo sapiens
  III.250 (R09791)
  misc_feature (264)..(264): n is a, c, g, or t
  misc_feature (329)..(329): n is a, c, g, or t
ttgggctcctactatgtgctgcgtgctccatgctcagcctctcagtcctcattcctcgtatatccacctagatttgaggatgagtggcctctcccatcagccacaatcacatgcagtttctcctctatcctcagctcagggagcatacggacgttgcgcagtgaatgcagctggctgggggaaggctcagggaaccgcacccagggaagcccacctacagatcccaccttcaaaccacggacatgcttgcagccttccccagtnggccagagcagctttaacaaaggcatcttttgttttccttttcttgcaaccccaggaaaataggntgtgtttgggtctt

SEQ ID NO: 6623 - DNA, 225 bp, Homo sapiens
  III.251 (R12381)
ttaaataatttttgttgttgttttgagacagggtctcactctgtcgcccaggctggagtgcagtggtgtgatcatagctcactgcagcctcaaattcctgggctcaagccatcctcccacttcaacatccagagtagctgggatcacaggtgcacaccgccacacctgggtacttaaaaacattttttttttttttgtaaaaaaaaaaatctcactatgttgccc

SEQ ID NO: 6624 - DNA, 438 bp, Homo sapiens
  III.252 (N30458)
  misc_feature (76)..(76): n is a, c, g, or t
  misc_feature (430)..(430): n is a, c, g, or t
gttcctctcctcttcgcttttcttccttttaatttgctgtttctttttcagtttcctttttttatttttgcttatngtggtgccatctgtgtgctgtcgctgagatttctcctgtaacagactctgctgtttctctaattctgcttgttctataagaacattattgggatttttaaattttttctttgatttatgcttcctaattcttcttctctttggctggtcatgaggatcctgatcttctgtgtcatccccggagtctgcaccctcttcctccccagcccatgtcgggtcttcctcgctggcgtccgcaccgtcctcctccctggtgtctttaccgtcttcctccccggcccgtgtcaggtcttcctcaaatggtgtccacaccgtcctcctccctggcgtctttaaacgtcttccgtccccggcngggtgtcg

SEQ ID NO: 6625 - DNA, 489 bp, Homo sapiens
  III.253 (T86674)
  misc_feature (452)..(452): n is a, c, g, or t
  misc_feature (457)..(457): n is a, c, g, or t
aggtaaataaaaatgattgaaattcaaaaattaatagttacttaaaagaccttgacattttaatcaacttttttctcctaataactgaataaaaaatagaaatttaagctttagagctgtttttttaatcctgtagatatgctgtagaatgaattatctggtgtgaacttgcccatctagacataacagaagcaaacagattttagggctttcaaaagtagataaaatgcaagtgatgttaatcgggaatcatattctaatattagctcccatcctgatagggaaggtctctaggttttatttctctacctggggggctcaggaattcagtctcgtgcctgggggttacccttaggttactcaaggggctgggggtgcccaatgtggatggaaccatcaggagggtttgctgccccgtttccaaatttattaggccttcccttttcgtctanggggnccccaaaggtacccccagggagagctgagtga

SEQ ID NO: 6626 - DNA, 433 bp, Homo sapiens
  III.254 (T86766)
  misc_feature (391)..(391): n is a, c, g, or t
  misc_feature (416)..(416): n is a, c, g, or t
aaaattggtgtttctgttgggcaagacagttctcttccaagaacccagcctccttccattttgtagctcctccagcttcaatgtacggtttccaaagttgctgacaaaggggtaagaagcatgaaggattgtgcctttttcaggcacattttcaagggccatggctggaaaggcacattgcatttctgcccacattccattgtttgtaactcagtcacatgactttgcctaaccacaaaggaacctgggtaatggagttaactatgtgcctaggagaggaaatgagtttggtgagtaagaaccagactttgccacagtacttaacctccacccagggacattctttcctccgactttctggattctttccaaatgctctcctattttcttncataaattaacttttggacccggantaggataaaagtatctt

SEQ ID NO: 6627 - DNA, 557 bp, Homo sapiens
  III.255 (N63823)
  misc_feature (534)..(534): n is a, c, g, or t
  misc_feature (545)..(545): n is a, c, g, or t
taaaatgcaaatagttctaacagagatttcacataaatcctgatcatgcatacttcaagtcaaataaatttatcaaaaactttttttcttagtgtattgaccaaacatgacaataaacacagtagagtcctaaacatagagaggagacatcattgaatggagaaagagattgaaaagaatgaaaagctgagagtgctgaagacaaaacttagtgccatttacactatgacttaagaatacaccaggctgggcgtggtagctcaggctgggcgcggtgcctcacacctgtaactccagcactttgggagaccaaggccggtggatcacttgaggtcaggagttcgagaccagcctggtcaacatggtgaaatcccatctctactaacaatacaaaaatcagctggggtgtggtagcccatgcctggtaatcccagctactcaggaggctgaggcaggagaatcgctttgaacctggggaagcagagattgtgggtgagccaagatcgcactactgcactcctgccttgggacacncatctttaaanaaaaaaaaagcc

SEQ ID NO: 6628 - DNA, 196 bp, Homo sapiens
  III.256 (N94181)
tctctggataaggagtggagttgctggctcgtgataactctatgtttagattttgagaaaatgccaaacggttttacagagtggctgcagtaggcacattttttaaaaacagctttattgaggtctatttgatatacaaaaatctgtacattgtatatatatatatatatatatatatatatatatatatatatgc

SEQ ID NO: 6629 - DNA, 143 bp, Homo sapiens
  III.257 (N74330)
  misc_feature (142)..(142): n is a, c, g, or t
atttgcctttcctttttaatcctcttcttactccaactctttaaaaaaaaactgcccagaaaacccagtaattaagcaaaagggagctcaaagaccaaggcaagccagcccaagagtagcagggtccctcccgcaggccaang

SEQ ID NO: 6630 - DNA, 199 bp, Homo sapiens
  III.258 (W05238)
  misc_feature (1)..(1): n is a, c, g, or t
  misc_feature (3)..(3): n is a, c, g, or t
  misc_feature (59)..(59): n is a, c, g, or t
  misc_feature (83)..(83): n is a, c, g, or t
  misc_feature (190)..(190): n is a, c, g, or t
ngngagccagcttgcagctttccgccgcttgggccattgtccggagctgcggccttagnttcgcttcctacggggcgcacgcnattctcccagatgcctacgggaaggagctgtttgacaaggccaacaaacaccacttcttacacagcctggccctgttaggggtgccccattgcagaaagccactctnggctgggtg

SEQ ID NO: 6631 - DNA, 638 bp, Homo sapiens
  III.259 (AF086377)
ggataagactcaacagaaatgtacctgataacaaatcctctgaagagtgttagggaaagatttcaataaagggaaaggtttcagtaaatcttccacaactgcaccctacagaactgacactgttttctgcttccttagaaaatgtacctcaacagcttaaagaatagtaacagcaaagtaaaatgtagcatactaacacaggaattctaaaaaaggcagccccagaacaaaatataattaagtactctggcaataacaactatttgaagaaaaactggaaaacaattattcacaaacatccccaaaaagaaaaaaaccagggccactcttacccgcagagcatgcagttcccacagagcagtgttctgagcattgcagtactcaggctcatccagttcaggaaggaaaactccacttccctgagattcactgtcaagcagtagatctgttttggggaaagtctgcaaaaatgtcacataaaaagaattggttaaattaacattgttaatataagaggtgttactggtttgtagttgtatttgcatttaaatttatggttgtataagagctttgcataaagtctttacacctagatttaataaaaaacaatttaagtttatatagtaagaaaaaaaaaa

SEQ ID NO: 6632 - DNA, 300 bp, Homo sapiens
  III.260 (W72020)
  misc_feature (133)..(133): n is a, c, g, or t
  misc_feature (184)..(184): n is a, c, g, or t
  misc_feature (202)..(202): n is a, c, g, or t
  misc_feature (258)..(258): n is a, c, g, or t
  misc_feature (259)..(259): n is a, c, g, or t
cttactatataaacttaaattgttttttattaaatctaggtgtaaagactttatgcaaagctcttatacaaccataaatttaaatgcaaatacaactacaaaccagtaacacctcttatattaacaatgttanctttaaccaattctttttatgtgacatttttcgcagactttccccaaaacngatctactgcttgacacntgaatctcagggaactggagttttccttcctgaactcggatgagcctgagtactgnnatgctcagaacactgctctgtgggaactgcttgctctgcgg

SEQ ID NO: 6633 - DNA, 336 bp, Homo sapiens
  III.261 (W77749)
  misc_feature (310)..(310): n is a, c, g, or t
  misc_feature (316)..(316): n is a, c, g, or t
ggataagactcaacagaaatgtacctgataacaaatcctctgaagagtgttagggaaagatttcaataaagggaaaggtttcagtaaatcttccacaactgcaccctacagaactgacactgttttctgcttccttagaaaatgtacctcaacagcttaaagaatagtaacagcaaagtaaaatgtagcatactaacacaggaattctaaaaaaggcagccccagaacaaaatataattaagtactctggcaataacaactatttgaagaaaaactggaaaacaattattcacaaacatccccaaaaagngaaagnaccaggggccactcttaccc

SEQ ID NO: 6634 - DNA, 436 bp, Homo sapiens
  III.262 (R17836)
  misc_feature (276)..(276): n is a, c, g, or t
  misc_feature (322)..(322): n is a, c, g, or t
  misc_feature (352)..(352): n is a, c, g, or t
  misc_feature (360)..(360): n is a, c, g, or t
  misc_feature (426)..(426): n is a, c, g, or t
tctcataaaagctgcctttaaatatccctaggagacagggtgaaggagacccttgacagccccagcctaggcagatgggggctgtggaaagattgttctgtgtctcattccctcttaagccactcccccaccctgcccttttaaaaataattaaggatttgaggtctaggctcacatgcaggtaattagaacgttatggaagcagtgaacccacaatccacaatccccaaactcagagtgcatcccagaagaggccccaggcaggagctcaggttngccctggcttttgccatcccgggaggccccctagccagcaagagtnggattgcctttcctgtggaaccactgcttncccagggnggaaggaaagagggagtttttggccaactgagccttttcctttgccaatttcagggtaggacagangccctgcttt

SEQ ID NO: 6635 - DNA, 462 bp, Homo sapiens
  III.263 (R43038)
  misc_feature (247)..(247): n is a, c, g, or t
  misc_feature (425)..(425): n is a, c, g, or t
  misc_feature (439)..(439): n is a, c, g, or t
tttttttttttttaacaggtgggaacaagttttcttagaaactgttatgaaggaggagccctccacccccacccccacatcttttactatctgacatgttatcagatcagaggccttcagcctcagcaacatctggggattagagggaccccacacagctggggcctcagaccaagctgatccatgcctgtggggtggaggggaaatcctcctgggaaaaatatgtgcaaggccctacaggccaggnaaaggctgaccaaggcaaggtgagtcatggtgttctaagctgaatcttttgcccatctcacagaagcaggcaggaagcaccaccattgatcagctttatatggcacccactgtatacaacagacagacaaagacaggacagacagaggcacacaccactttttaaggttcaacattgnttcaccaattaggngcaccttggtttaaggacttttg

SEQ ID NO: 6636 - DNA, 437 bp, Homo sapiens
  III.264 (H02323)
  misc_feature (14)..(14): n is a, c, g, or t
agttttaaagtttnaatttatttatttattttaaaaatattagtcagctgtaactacatcacctcccccaaaaacatagatgcgtaccttgtgtgaaagttacagtcattccgggctttaaacaataaaaattatttccttgcgtttgttcttaactcttcagggttttgtcttctgtagctctaaataagttttactcttgcaatgtgaacaacatcaaatgaaatctggacggtgtggaagaatattcccaagtgtattattgagtcccagggttgctaatttcatggcccacattttggtttactgttctgtttttttgagggggggtgggggtgggttttccaatgggcatgctcccaaataacagtgtaatagaacactttgaacacaatttctttccagacagaggatctcaacgcatactgctcacaggt

SEQ ID NO: 6637 - DNA, 458 bp, Homo sapiens
  III.265 (H02425)
  misc_feature (331)..(331): n is a, c, g, or t
  misc_feature (411)..(411): n is a, c, g, or t
  misc_feature (416)..(416): n is a, c, g, or t
  misc_feature (423)..(423): n is a, c, g, or t
  misc_feature (428)..(428): n is a, c, g, or t
  misc_feature (443)..(443): n is a, c, g, or t
ctgatggtagtggaggagccgagtatcttgattgtatcaatgtcaatatcctggttgtgctattgaactaaattttgcatgtctatgtactgatatggaactgagttcaaatatgcatgttaatgataaaacaaaaggtgcaaaaccatgtaaatatattgttaccatttgtgttaaggggagagagcgagttttatattcatttgccttcatttgtaaagtttctttttgttttatcttatgtgtaatattcaaaagctcccaaataataaaatataaattgggtaaatctgggttgtttggggggtagtaaatcaagccaaattaaaanggggtgcaaaggggacattttgttccccgtcttttgtaggtgtttggatcttgtaccaatggtaaatttttaggccaaanccccnaattatnccaanttcagtctccaaaantattggtatttgttt

SEQ ID NO: 6638 - DNA, 449 bp, Homo sapiens
  III.266 (H22772)
  misc_feature (324)..(324): n is a, c, g, or t
  misc_feature (400)..(400): n is a, c, g, or t
  misc_feature (407)..(407): n is a, c, g, or t
  misc_feature (428)..(428): n is a, c, g, or t
  misc_feature (444)..(444): n is a, c, g, or t
tggagtttcccggagaaatgacaattacctgacgatcacagggccttcgcaccccttcctgtcaggggccgagacattccatacaccaagcttgggtgatgaggaatttgaaatcccacctatctccttggattctgatccctcattggctgtctcagatgtggttggccactttgatgacctggcagacccttcctcttcacaggatggcagtttttcagcccagtatggggtccagacattggacatgcctgtgggcatgacccatggcttgatggagcagggcgggggggctcctgagtgggggcttgaccatgggacttnggaccactctatagggaactcagtattagttgccaacccacctgtttacaattgatgttaccaatgacagacatgnacatctnggttttgatgggggcataagncagtttggaccaaccntttga

SEQ ID NO: 6639 - DNA, 412 bp, Homo sapiens
  III.267 (H24053)
  misc_feature (237)..(237): n is a, c, g, or t
  misc_feature (288)..(288): n is a, c, g, or t
  misc_feature (327)..(327): n is a, c, g, or t
  misc_feature (374)..(374): n is a, c, g, or t
  misc_feature (392)..(392): n is a, c, g, or t
ttttttttttataatgcaaagttgacactttaatagatccgaaataaacatctgttccaaaataaaagttcaagaaaaattatctgacttcgatattagaaattgaaattttcataaagaaatcttgcatttcactaaatgagttggtaacttttttcaggcagcaaccaaaacaaaaacatttaacacaggattccttcaatctcatggatttctgaaggacacaaaagcataggnatatccaaaagctattgtattgggatattctaataagggtacactcaaggncacacatatacaatgggaactctggaatttcagtaggcnatgatggaaccaaaaaaaatactggactttggccaatggactttttngccttattcacttcaccntcgttttggggggattactt

SEQ ID NO: 6640 - DNA, 310 bp, Homo sapiens
  III.268 (H80847)
  misc_feature (51)..(51): n is a, c, g, or t
  misc_feature (261)..(261): n is a, c, g, or t
cctgggaatggcggtctagaagagtcagttgttgcaccactagtgtctgtnttatttctacatgggtgttatgggcgatgcaaacctgattttcttcgaatcggcctggcttcaaacagaaagaaaagaccaatttcaattttcccaccacatttagaagactgtattttaaaagaggaaaactgacggcaaattaattcttaatatgagtgcagaagaaaagagccttaggtgactttacctttaggaacttgtgtaaanataggatgggccaatgaggaacgccttcaagtccagaaactggggtcag

SEQ ID NO: 6641 - DNA, 437 bp, Homo sapiens
  III.269 (H80940)
  misc_feature (346)..(346): n is a, c, g, or t
  misc_feature (368)..(368): n is a, c, g, or t
  misc_feature (397)..(397): n is a, c, g, or t
aactggatttcggattctacatttccaagtgaagtcccggctcagacacatcagaaaaagcaacatacgctctgagtaattcaaaccaagcctgcattttaaatccactagcacagagttaggactgaaagtgacagagaccctactgtgtaaactcacgaaatgttttcatcgaggaatcgaaacacacagtttcagtcacggacaattcctgccaccctgaacagatatgttttccattagatggcagtgtaaggtcagatttaaaccttctaaaaaacagctagccccaagccagggagaagacacagggcctgtggactgaggcgaagagacacaaacaggncaagttctttcacactttcagncacttggcttttccagtatggagggactnttctggcagcattggacccttgtcagccttgcaaattttt

SEQ ID NO: 6642 - DNA, 275 bp, Homo sapiens
  III.270 (H85015)
  misc_feature (60)..(60): n is a, c, g, or t
  misc_feature (61)..(61): n is a, c, g, or t
  misc_feature (249)..(249): n is a, c, g, or t
  misc_feature (254)..(254): n is a, c, g, or t
  misc_feature (270)..(270): n is a, c, g, or t
cacccaggctacagtgcagtagagcaatcacaactcactgcagcctcaacctccctgggnncatgcaatcctcccacctcagcctcgcaagtagctcggaccatggccacacgccaccacacccggccaactttcgtacttcttgcagagagagggatttgccatgttgcccaggccggtcttgaatttccgggctcgagtgatccactcacctcagcctcccaaagtactgtgattacaggcatgagncactntgcccagccaataaantcttt

SEQ ID NO: 6643 - DNA, 452 bp, Homo sapiens
  III.271 (H85645)
  misc_feature (404)..(404): n is a, c, g, or t
ttcaacacccagctcaaatcccacttctgtaaacactttattctccactctagtctaccccttattatctgtatgattattttggtataccattagtaccttgtaagatttttcgtatttttttcataaactacttttgtaattttgtattcagtttttgagtgggtaatgtgcacatggtacagattttaaatttacaaaaataccctcccatccaattctatccccagcatccagttttcctccttggaagcaaccacttttacaactttctgtgttcttcccagtatattctatgcctctcttagagagagagagagagaatacacaaacacaagggggaatacacgggtgatacacccggcaaatgttgggcatacaacatggaaatcctttggcccctntggacttctcttttactttaacttatggacttttttttggttgtggct

SEQ ID NO: 6644 - DNA, 415 bp, Homo sapiens
  III.272 (H73423)
tacaagccagtgaagtgggtgataagcctgactccactatctcagccaggtccttcttctaatattattggccagtctgtggaagaagctatcagaggggtgtttgatgcttccctcaaaatggctggcttctatggattgtatacctggctgactcatactatgtttggcatcaatattgtcttcataccatcagcattagcagcaatccttggagcagtgccattcctggggacatactgggcagcagtacctgcagttcttgacctgtggctgacacaagggttaggatgcaaggccattttactgttgatttttcatctcttgccaacatactttgtaggatactggcaatctactctgacatattcagggaggtgtccattccttacctgaacagggttgggcagtgggc

SEQ ID NO: 6645 - DNA, 385 bp, Homo sapiens
  III.273 (H74193)
  misc_feature (5)..(5): n is a, c, g, or t
  misc_feature (43)..(43): n is a, c, g, or t
  misc_feature (50)..(50): n is a, c, g, or t
  misc_feature (217)..(217): n is a, c, g, or t
  misc_feature (238)..(238): n is a, c, g, or t
atccntttttagagttcttaaaataactttataaatatataanacagtancatagataaccaaagtggaaaaatttcaagccagggtaccagtgtataaaatgaaacttttcaagccatcttaacaacagttaagtgagcaaaccaccaacgctgaactctcaagctgtgttttaaaatacaaagcagcccgcagcaagttctctcttgtccagggnattctgtatgtaaggccaggnggcttctgcttctttcctgggttttgcttgctaggcacagctggaagggcagagggccacagctgagctgaaactcgctgtcaaatttgaaacttcctaggaaaaatcactgcagaggaaaccacattcaacctactgaaggttttc

SEQ ID NO: 6646 - DNA, 368 bp, Homo sapiens
  III.274 (H86783)
  misc_feature (79)..(79): n is a, c, g, or t
  misc_feature (243)..(243): n is a, c, g, or t
  misc_feature (315)..(315): n is a, c, g, or t
  misc_feature (349)..(349): n is a, c, g, or t
  misc_feature (355)..(355): n is a, c, g, or t
gggcggcgactgtggatctggagctggacgcgctggaggggaaggagttgatgcaggacggcgcgtccctgagcgacanaccgaggacgaggaggagggggcgagcctgggcacggcagcggggcggaaggcggcactgcagcagcacagggcggttcgggcggcgatggcggggacgaagtggagggcagcggtgtgggagctggcgaaggagagactgtccagcacttcccgctcgcgcgncccaagtctctaatgcagaagctccaatgctccttccagacctcctgggctcaaggactttccctgggcttncgctattccaaggatactggtcttattgtctttncggctngttgccaaaagac

SEQ ID NO: 6647 - DNA, 352 bp, Homo sapiens
  III.275 (H86841)
  misc_feature (327)..(327): n is a, c, g, or t
  misc_feature (338)..(338): n is a, c, g, or t
  misc_feature (345)..(345): n is a, c, g, or t
tgaaaagcaatataaagtcttaaagaaacggctgcctgcaaccaggatgttcttatgagctttgaagatttttccgcttaccacaatgctgacatcacaaagaatacctttctttctctgttcatttagttgtcgcagaagttgatagcaataagagttctcatttggcctactattaaagtcacagtacccctcctctgatggtatttctgactcctggggcgttggcttcgtgggagtttgtgctcggtagagacgtggtgcctcaggaggagggttttcttgtagttgcgggtccctcgcgaaagttcattcatggccccactnggggaaaggtnccacggnttccccc

SEQ ID NO: 6648 - DNA, 340 bp, Homo sapiens
  III.276 (AA018632)
  misc_feature (60)..(60): n is a, c, g, or t
  misc_feature (64)..(64): n is a, c, g, or t
  misc_feature (136)..(136): n is a, c, g, or t
  misc_feature (239)..(239): n is a, c, g, or t
  misc_feature (335)..(335): n is a, c, g, or t
atacagataagtgctaaataaagaaaaaaaagatcccaaataaacctcaaaaaatagaanaaanataatcaagcccaaaattagaaggaaataacaaagatcatagcagaaataaatgaaatagactagaaaaacnatagaaaagatgaatgaaacgaagagttgattttttgaaaagataataaaaatttgaccaacctctcactaggccaagaaaaaagaaatctcaagtaaataanattagaacaaaaaagggagatattaaaattggtaccatagaaatacaaagggtaataatagtctactctaaacaactatgtgtcaacaaatcctcngtgcc

SEQ ID NO: 6649 - DNA, 263 bp, Homo sapiens
  III.277 (AA018729)
  misc_feature (50)..(50): n is a, c, g, or t
  misc_feature (96)..(96): n is a, c, g, or t
  misc_feature (115)..(115): n is a, c, g, or t
  misc_feature (145)..(145): n is a, c, g, or t
  misc_feature (153)..(153): n is a, c, g, or t
  misc_feature (155)..(155): n is a, c, g, or t
  misc_feature (186)..(186): n is a, c, g, or t
  misc_feature (251)..(251): n is a, c, g, or t
atttgttgacacatagttgtttagagtagactattattatcctttgtatntctatggtaccaattttaatatctccttttttgttctaattttatntacttgagatttctttttncttggcctagtgagaggttggtcaattttnattatctntncaaaaaatcaactcttcgtttcattcatctnttctattgtgtttctagtctatttcatttatttctgctatgatctttgttatttccttctaattntgggcttgatta

SEQ ID NO: 6650 - DNA, 370 bp, Homo sapiens
  III.278 (R18597)
  misc_feature (33)..(33): n is a, c, g, or t
aggaatagaccggcctgggcatgctctgcagtnttccggatccctgggtgcctgggtcctgtgcctggtccctgaatatccaagcaaataactgcttcagtacaggcttgtctcggcgggtcctgttgaccaacgtggtgacgggacaccggcagtcctttgggaccaacagtgatgtcttggcccagcagtttgctctcatggctcctctgctgtttaatggctgccgctctgggggaaatctttgccattgatctgcgttgtgggaaatcaaggcaaggggatgggaaggccacccgcctgttttcatggattcaagcagttgacctctgttgcggattcctccaaggatgaggcaattacctgatgg

SEQ ID NO: 6651 - DNA, 409 bp, Homo sapiens
  III.279 (R41677)
  misc_feature (350)..(350): n is a, c, g, or t
  misc_feature (407)..(407): n is a, c, g, or t
tttttttttttttttttttcttctcttggttttattgtttggtagaaaaacaggctctttaacactgaataaacatctcacgaactgtcgctcctagattacaaaaagtcaaaaccaatttcctttgacgccgggcccttgaatctgacattcaagtcaccgtaatagaaaccagagctgctgaaccttacattctgggaaggtgcttgaacaaaggcatgttaaggaccgtttaaaacttctaggcatgtaagaagatccatctttccttccaacgcctttgggataataacaggcaggaatcccggaggatctgctgctgagtttgaggaagggccaagtttaagggnttccaaactccaggccttcaatattttctggcagaaacttagggggaaggtaacctncc

SEQ ID NO: 6652 - DNA, 385 bp, Homo sapiens
  III.280 (R36319)
  misc_feature (382)..(382): n is a, c, g, or t
tggcccttctcaaacagaaagcatttagaacgggtacaagcacacggctggatgatcgtgtatatgccatgtgtcagataaagtctcagccacttgttcatctaatgaaaatgattcatcccaacttatacaggatagacagattgacagatgagggtgcagtacatgttaatgacaggattgtaccacagccacctcttcaaaaattgtctgcagagaagctgacaagagaaggtgctttccttatggactgtggctctgttttttacatttgggttgggaaaggctgtgacaataacttcatagaggatgtgcttgggatatactaattttgccatcaataccacaggaaatggacacatcttccagaggctaggatacnctt

SEQ ID NO: 6653 - DNA, 452 bp, Homo sapiens
  III.281 (R49251)
  misc_feature (20)..(20): n is a, c, g, or t
  misc_feature (315)..(315): n is a, c, g, or t
  misc_feature (345)..(345): n is a, c, g, or t
  misc_feature (376)..(376): n is a, c, g, or t
  misc_feature (384)..(384): n is a, c, g, or t
  misc_feature (405)..(405): n is a, c, g, or t
  misc_feature (415)..(415): n is a, c, g, or t
  misc_feature (444)..(444): n is a, c, g, or t
  misc_feature (450)..(450): n is a, c, g, or t
tttttttttttactgtcaancgaaatagttttaattagtaggctgatcataaataaatctacataaaagatttaacagaattacaaagagttttgtgttcctttgtggactcaattcataatatgcattagtcaacctcattctctaactgtgacaaaaagagttgtcatccaacaatgcagcacagtttaagcaattcatatgctatagttacatttttacattttctttacaaatgtaacatttatgtacattatatataggatttttttctatagttcatgtactggaaactctattgtttttacagggganaatgttggaattcatttaatggaatagggnaacattccttggttaaaaggtaattcctatnaaaccaantaacacgggtacccatggccntttggggctnctcttggcccggggttccaggtcccggantggttntt

SEQ ID NO: 6654 - DNA, 397 bp, Homo sapiens
  III.282 (H72591)
  misc_feature (359)..(359): n is a, c, g, or t
aaagtgtgatgacgataacacttaagtgtgaatttttaaatatagttgagtagactgcatcatctgagttagaagcctattccttcagggctcggggtagcttgaatttgtagcaggcacatgacagaaattgtatgtattgtggatctgcatgtgtgctgagtattccctatttctttgatcccttttcccccattttctgctctgctcccccctgaggctgtcttctagagactggggtttcttcataggtttgaacagtggggagataccagaggtggggaggagaaaaagttatttattaccgttcccttcctcctgccgggaccatggtaggcttctgtgttcccgtaaggatnacagcttcctttggggaagcccccatctatgggctgta

SEQ ID NO: 6655 - DNA, 422 bp, Homo sapiens
  III.283 (H72592)
  misc_feature (59)..(59): n is a, c, g, or t
  misc_feature (232)..(232): n is a, c, g, or t
  misc_feature (247)..(247): n is a, c, g, or t
  misc_feature (257)..(257): n is a, c, g, or t
  misc_feature (398)..(398): n is a, c, g, or t
  misc_feature (419)..(419): n is a, c, g, or t
atgagtgatacacaagtttattaacacagactacaacgtcaatgaagcctcctggcatntgtcggaaatagaaaacatgtataaaaatcttcgaaatgcaggttaaaatgcaaatccaagtgaaaggaaaaagcactactgtgaagcctaacggcaattatttcccgtcaaaggaggtttgtgtccagctggagagaaggcctgggtggacagaagacaaaggaaggcaaanttcctaagggagaanttcaaaaaantgatgggggtgctgccctctgctgggcctctttggcagtcgacttcaacttaatgcattagcgccgtaaggttgtaagagaagcaactctgggctttgatcttaggaaaagctggatttttctttttgggcagcctatttnccggtgaggaactgatggggnaag

SEQ ID NO: 6656 - DNA, 417 bp, Homo sapiens
  III.284 (R25709)
  misc_feature (309)..(309): n is a, c, g, or t
  misc_feature (333)..(333): n is a, c, g, or t
  misc_feature (345)..(345): n is a, c, g, or t
  misc_feature (359)..(359): n is a, c, g, or t
  misc_feature (381)..(381): n is a, c, g, or t
  misc_feature (392)..(392): n is a, c, g, or t
  misc_feature (399)..(399): n is a, c, g, or t
  misc_feature (404)..(404): n is a, c, g, or t
tctaggacttggggggccggccctccctcctaagcataacaaaggtggtgttgctccagctcagccccaggggacacagatgcactttgggggtgagggcaggtaatgactccatcgcaccctcagttcagctggacagaggctcaggtgaccccagccttcactgtctcccgctctccagggagcttatcttcgccccatctcccaaataagtgggcccttgtgctgtgaggaagaccaaagcctcagggaagataaggagatatgggagatggggagggggagggacaaggggcagagagtagggtntagctggctatctctgggccttantaacaccccctngggaggcatgcccnttttttccagcacacaagcacntttggggcacntgggaanttttngtttccaggttcc

SEQ ID NO: 6657 - DNA, 416 bp, Homo sapiens
  III.285 (R62453)
  misc_feature (12)..(12): n is a, c, g, or t
  misc_feature (355)..(355): n is a, c, g, or t
tttttttttttntgctttccaaaatactgcagtttaattctgaaaaactcaaatgcaagaggcccagagctgtctatgggattggatctcctgcaacctgccttgggccccagaagagactggcaatgtcagcctcctccctgctctgcctgagggaggccacggagaacttccttatcgggcccaaactggagccgctgactgctcagagcaagatttctgccttgaaagcaaatgcagtagcctcagaaatgtgcagcgcatacttcttcctccccgtgggccccctccagggccggcagagctgcagtaaagatgcctgcaggtcatggacctcatgtttcctgtccacttnccatgggcagggatcagagttttggggagatatgtgaccaagggaggacacatggaatttt

SEQ ID NO: 6658 - DNA, 480 bp, Homo sapiens
  III.286 (H67748)
  misc_feature (369)..(369): n is a, c, g, or t
  misc_feature (374)..(374): n is a, c, g, or t
  misc_feature (434)..(434): n is a, c, g, or t
  misc_feature (470)..(470): n is a, c, g, or t
tactgtgtacccacaaaatttgaaattaaaagtttttaaaaaggcctcttgttccagaggccaaatgagctgactgacagtacatttttccctgtttctatctctttaacccctcttggtggctgtgactgacatgtgaagttttgtccacaccttctggagtcccaagtgtctggttgacagtgcagtcttctttttagcctctcagttttggaatgacaggttacaaaatgacttgttggaaatatcgacctgtaggtgatgagctggaaaaggtcaaatgccttctctcatgggctctcccaaaaaccaaagtgagttcttctctcttcaggttaccgggcttctttctggcatttattttttccngcccnttctccagtatggggggagtggggttgtttgttcgggtcacaccaggcagtaggccaggntttttttgttattttcaaatggggattttttttccntttcgtaaca

SEQ ID NO: 6659 - DNA, 431 bp, Homo sapiens
  III.287 (H67749)
  misc_feature (254)..(254): n is a, c, g, or t
  misc_feature (264)..(264): n is a, c, g, or t
  misc_feature (330)..(330): n is a, c, g, or t
  misc_feature (343)..(343): n is a, c, g, or t
  misc_feature (368)..(368): n is a, c, g, or t
  misc_feature (409)..(409): n is a, c, g, or t
  misc_feature (420)..(420): n is a, c, g, or t
tgtaaggctttatttaggagcttgcatttattaggaaaggtgaaagtgcaggtcactgagaggttatttcaggaaaaggctctgcagatgatttcgtcacttcaaacaggtgccatgatgtgtttgctcaagcacaatttgggatatcagatcacaaactcagggaggccacaaatgccaaatgggtacaagtaaaatacttaaaagacaaggcccttcctccatgttacgaaaggaaaaaaatccatatgaantaacaaaaantctgggctactgcttgggtgtgaccgacaacaacccactccccatactgggagaagggggcagggnaaatttaaatgcnggaaggaggccggtagctgaggagnggaggactcactttgggtttttgggggagagccctggaggnggagggctttngacctttttcc

SEQ ID NO: 6660 - DNA, 449 bp, Homo sapiens
  III.288 (N62444)
  misc_feature (381)..(381): n is a, c, g, or t
  misc_feature (423)..(423): n is a, c, g, or t
cttaatcacattagattattatacaaaatattttctcttcctgggtcaaatgatatatataccctcatctcagctcaaaaatggaaactcatttgggaagctttataagtaattaccctattagttggaagcacgtttagatatggattagaaaggatgagatctttattttatgaattttaatatagtatttttatgattttgaagttatctttatatatgttatacttgttctatgatgatactcctcttttcctgcaaagaagaaattcaagtgtataaactttgctaaaagttaatgtagatattcaggtgacctataaaatataataagaacaaaccatgtatagattcagattattaagttttaggcagttttcntttagaacttatcacagtacagtgtattttatgatattttcnagttttccaactataaattggcatta

SEQ ID NO: 6661 - DNA, 260 bp, Homo sapiens
  III.289 (N79159)
  misc_feature (211)..(211): n is a, c, g, or t
  misc_feature (217)..(217): n is a, c, g, or t
  misc_feature (228)..(228): n is a, c, g, or t
  misc_feature (234)..(234): n is a, c, g, or t
  misc_feature (242)..(242): n is a, c, g, or t
  misc_feature (256)..(256): n is a, c, g, or t
ttgagacagagtcttgctcttgtcacccaggctggggtgcagtggcatgatctcagctcactgcaacctccacctccctggttcaagcgattctcctgtctctgcctccggagtagctgggattacaggtgcccgctaccacaccccggctaacttctgtatttttagtagagacggggtttcaccacgttggccaggctggtcttcgtanacctgnacctgaagtgnttcctnccaaattnagccttcccaaaantggc

SEQ ID NO: 6662 - DNA, 400 bp, Homo sapiens
  III.290 (T66152)
  misc_feature (18)..(18): n is a, c, g, or t
  misc_feature (20)..(20): n is a, c, g, or t
  misc_feature (66)..(66): n is a, c, g, or t
  misc_feature (69)..(69): n is a, c, g, or t
  misc_feature (82)..(82): n is a, c, g, or t
  misc_feature (176)..(176): n is a, c, g, or t
  misc_feature (205)..(205): n is a, c, g, or t
  misc_feature (212)..(212): n is a, c, g, or t
  misc_feature (237)..(237): n is a, c, g, or t
  misc_feature (296)..(296): n is a, c, g, or t
  misc_feature (304)..(304): n is a, c, g, or t
gtcttacaaaaatcattngnttgaaatatgggaatacaagaaaagatatttgcggtcaggtgtctngtngtcaacagccagntacaggttcataaagggggaaaatccaagattccaaacccacaggacaaattcttcctaatagatgttaaagcttttaacccaaaaggtttgtnttttcaagcacattgcagaggttcaaggntttaganttaacactgattcattgtcactgantgtctgtaataccactttgactagagaggtacatgatatgaagcacagtcaaaactgantacattantttgttatagaggcgaatgatatattcaacattgtcttaggtactgtaggtgtctaaggcactttccgtaatgtcagtttgcttaactaccaaccc

SEQ ID NO: 6663 - DNA, 409 bp, Homo sapiens
  III.291 (T66222)
  misc_feature (14)..(14): n is a, c, g, or t
  misc_feature (31)..(31): n is a, c, g, or t
  misc_feature (112)..(112): n is a, c, g, or t
taaacagattgttnatcattgcatctatttncatatagtcatcaagagaccattttataaaacatggtaagaccctttttaaaacaaactccaggcccttggttgcgggtcntgggttattggggcagccgtggtcgtcactcagtcgctctgcatgctctctgtcatacagacaggtaacctagttctgtgttcacgtggcccccgactcctcagccacatcaagtctcctagaccactgtggactctaaactgcacttgtctctctcatttccttcaaataatgatcaatgctatttcagtgagcaaactgtgaaaggggctttggaaagagtaggaggggtgggctggatcggaagcaacacccatttggggtttaccatgtccatcccccaaggggcccctggcc

SEQ ID NO: 6664 - DNA, 447 bp, Homo sapiens
  III.292 (R12633)
  misc_feature (369)..(369): n is a, c, g, or t
  misc_feature (375)..(375): n is a, c, g, or t
  misc_feature (376)..(376): n is a, c, g, or t
  misc_feature (402)..(402): n is a, c, g, or t
  misc_feature (411)..(411): n is a, c, g, or t
gctttaggagtggagcacgtttctgcgaacgttaacccagagcacagcgccaaggcctgtcttccctttattgggtagagttcttgatggctccaaggtgacttctggtgacagccagatcgtccctcgagtccccagcgagaaagaaagcatttagccattcttacagaggagaaattaaccctgtaatgtgtttctattttagatgagtgtttcctaatacaagcaacattaacatcttcagaaaaggaagcaggcatggtcctgggaaaattggggaatgacgggccaatctgtgtttcctaaggtcctggaagaatctgggcaaagagtcctgtgggttgttttttacctggggtgggccagggncttccnnttttgtttacccaaagtccagggttnggcgatttnttttcttggtttcaggggaaagggggacagcccagt

SEQ ID NO: 6665 - DNA, 335 bp, Homo sapiens
  III.293 (R20534)
tttttttttatgtgttgagataatttaatactggcttggacacactggattccaggtgcaggaaccctggaaccccctggaatgtgctagagataagcataaggcatcctgtctgtgcccactccaccctggttgggagtcgcagaatgaggacctcctgacttgagacagattctttatccagagaatctgagattccaattcagatcctgggagctgggcctgctactcacctccccagttaaatgtccagggcagcattgggacagagaggctggccccgcccttgacgggggcttgaaggaacaggcccccaggcagccttgttgtttggg

SEQ ID NO: 6666 - DNA, 480 bp, Homo sapiens
  III.294 (R23510)
  misc_feature (439)..(439): n is a, c, g, or t
  misc_feature (478)..(478): n is a, c, g, or t
ggatttcggcatgtgaaggaatcccagagctgatctcattgaaatgatctatcgtacagacaaggatatgcaaatccacagaagtgaagggatttttgctcaagatcacatagctggtaaactaaggtaaggttagggcttgaacttgggccttctgactccttgtccagtcagtgttctttcatctcaccacagctgcctcctttgaaacagaggtattaagatctgtccttctggttcaccctctcatacctctttactgcctctcccacatcccccacatgcctcccaaaatgaaagacaaacaggattgtttctgaggaccaagatcagtctgtctgtgatcagcctgtgtgtgggttcacccagtcatggcaattaaggggcagatctggggccagtgggaatagggataggctggattgggtgttttgtttantgtggaaccctaggaccgttaccccttgggatgggtgtntt

SEQ ID NO: 6667 - DNA, 329 bp, Homo sapiens
  III.295 (R44642)
  misc_feature (12)..(12): n is a, c, g, or t
  misc_feature (26)..(26): n is a, c, g, or t
  misc_feature (191)..(191): n is a, c, g, or t
  misc_feature (247)..(247): n is a, c, g, or t
  misc_feature (294)..(294): n is a, c, g, or t
  misc_feature (304)..(304): n is a, c, g, or t
  misc_feature (316)..(316): n is a, c, g, or t
  misc_feature (324)..(324): n is a, c, g, or t
tttttttttttntccattttgaacancttttattatacgtttagtgttctctatacaaaagaaatcagtttttttacagtgattcaaaaaaaattcagaataatttggccttttcattgctcatgcagtcagtttataagtccatgtattagacggccctccatggcccagaagtcttccctgctgaaggncatgtgtgacaccctcagatacgcatctgtcactgacaaagttggttaatgcaaantaactcgcaaaaaaggaaagaacatgatgtgagaggggttaaaacanggtctgggcntggggttaaatntttaaccnatggg

SEQ ID NO: 6668 - DNA, 361 bp, Homo sapiens
  III.296 (H70260)
  misc_feature (315)..(315): n is a, c, g, or t
  misc_feature (335)..(335): n is a, c, g, or t
tctaaatgtgaatcagtccttggactgcaactatatattcacctacaaaatcccaatcaaaaaattacatgagcctgtcaagcagatctttagttttccacttcacataagatcgttaatgttctaaattaatctattcatttagatgatttttgtcagttcttaaatggggatataataaatttaggcattttcatcttaacaaggcaaaagagttaaaaaacaaaacaaaacactactccaggcccaaatacattctaggctgggttaattcccggacttgtccccagtggggttcccccaacctcttttccnctggggtaatttcttttcanggcggggcggatttgggggggtgcga

SEQ ID NO: 6669 - DNA, 408 bp, Homo sapiens
  III.297 (H70261)
  misc_feature (264)..(264): n is a, c, g, or t
  misc_feature (322)..(322): n is a, c, g, or t
  misc_feature (384)..(384): n is a, c, g, or t
  misc_feature (407)..(407): n is a, c, g, or t
atttacagattctgcacaatatttcatcatacaaaactgttttcctaaattcaaagtaaactgcatatggttactacagaagcattataaaattttcattggcatttttaaaattggagcatttaaaacagatttgagaatgagaaaagaatgtctgactcaaaatgaaaacatactagcctctttcataaactcctaggaatcttggacattattgggttgctgtgggttgggtgggataaatcaaatccacaaagtgggggntaaaccctctaggggtgccaaggttataaggctcccctcaaggcaaggccttttatcnggaaaggacttgagggtattctctcctctggtctggccccttccattggataggggcatggnaatggacccccaaaactcggggna

SEQ ID NO: 6670 - DNA, 432 bp, Homo sapiens
  III.298 (N59232)
  misc_feature (360)..(360): n is a, c, g, or t
  misc_feature (397)..(397): n is a, c, g, or t
  misc_feature (432)..(432): n is a, c, g, or t
ggaattaattgttaattttattgcaaaaaggattggtacattctaaagacagatgtaatgacctttgaattatttgtaggacacttccattctagcattccaaataattcggttaatgtgttcccctttttaaaacatttccaagtcccactttattctaatttcatcatcatctagcactttctgtgctttcataggagtcttcatggaccattttgccaataccgattattttcttctcaataagaaatgtggtggcaagaaataaaaatctctttctatatttgtatgcttagttcacattatacaaaatccttgggttttctagtaggttttatggccaaaatcatgtcttgttcnttgtagggttgtactgttttagctgcccagtaggtcncatttttatatatttcggaggatttgtatatttan

SEQ ID NO: 6671 - DNA, 339 bp, Homo sapiens
  III.299 (N76700)
  misc_feature (3)..(3): n is a, c, g, or t
  misc_feature (304)..(304): n is a, c, g, or t
gcntccaggacccactccaccaccacaagagtgtgagaacagaaataaggaaaaagcttttaagtcaagtatgaagaccccacatgtatcccactattctccctactgcaggtctgtatgtagaatttacaaaggaagcaacaaaaagacgctacaattctcacaaaaaagacttgacttcatctactacagagaacctcaactcttgtcatcttaccctcaaagcagaacttaaataccccaggtaatcaaaggggcaataattcacttctgcaccactgaagataacccttgacttccacancaccaattagggtgaatctttttgggtgaacaaag

SEQ ID NO: 6672 - DNA, 416 bp, Homo sapiens
  III.300 (R11676)
  misc_feature (186)..(186): n is a, c, g, or t
  misc_feature (191)..(191): n is a, c, g, or t
  misc_feature (218)..(218): n is a, c, g, or t
  misc_feature (233)..(233): n is a, c, g, or t
  misc_feature (235)..(235): n is a, c, g, or t
  misc_feature (371)..(371): n is a, c, g, or t
  misc_feature (382)..(382): n is a, c, g, or t
tttgaagggagacatgactttattagaaaaataaaaaacaactgaggtgatgggttggtcttcagcggatccattggtggatgaggctgcttttggctgcactggccttctcccgctcccgccgccgcgcagggtccaactcaaaacagcgccatagcctcagggtctcatctgctgctgcggatncactntggccccatctgggctcatggtcagantcaggacccgggatntntgacctttgagttcagccaccttggccatggttgggtacttccaaataactagctggttctgtgcaaagccatggcctgagatgagctccttgtaatggggagaccagaggatgggagcacacctggggaatgggnatccacggcantcagacaggccccagagcacacattccagatgcg

SEQ ID NO: 6673 - DNA, 351 bp, Homo sapiens
  III.301 (R12284)
  misc_feature (282)..(282): n is a, c, g, or t
  misc_feature (304)..(304): n is a, c, g, or t
  misc_feature (317)..(317): n is a, c, g, or t
agcctgaaaacagccagacgcccaccaagaaggaacatcagaaagcctgggctttgaacctgaacggttttgatgtagaggaagccaagatccttcggctcagtggaaaaccacaaaatgcgccagagggttatcagaacagactgaaagtactctacagccaaaaggccactcctggctccagccggaaggacctgccgttacattccttccctgccagaccgtatcctgggatgcgcctgaaatccgaaatgactatttacctggaaccttgtgggattnggagttctggggaatgttactnggccgtggcactnggacaacagtgttgttacctgttggagttgcaag

SEQ ID NO: 6674 - DNA, 392 bp, Homo sapiens
  III.302 (R20579)
  misc_feature (363)..(363): n is a, c, g, or t
tttcggcgttgcaatgcggggaggagaagtcagattatgtacatagttttctaaaaagcctttcttctaaaaacgaaaaaagaccccccacccaaaatgtttcgagtcaacaaatttaagagacagagcccattttctccataaatttgtaacatgctatttttatgtgcatgttttatgagttcaaaatgcaatgagggaaatctgacaggggaaattatctgtatgaactaaaagtaaggggaaccccggggaatggggaggacagggttttttcaagggaaccttttttcaatggaaaggggaagggaagtttaaaacctataggggttattttttgtagggagccttgaggtgttttantacgggggccccaggaaattaaaggtatc

SEQ ID NO: 6675 - DNA, 366 bp, Homo sapiens
  III.303 (R46080)
  misc_feature (363)..(363): n is a, c, g, or t
ttttttttgtaatcactttaacgaatgagtggtttaagcaaaattatcaaaatgacttcccaaattacacgtcaattgtcagatcagcattatacttaaagctattctcgaatgcaggctgaattcggttctcattaaacttatagcataggctcacttttggacggacagtccatactccagggacaaggaagggtgttgagaaagcgaggggaaacctaaggctgctgaaataaacgtatttccatctggggcttcaagtgttttttttttccaaaaatataatttcatcttaacgttgtggattaatttttaaatgtatttgctacagtataatttttaaatggccaatattttaatgcnggt

SEQ ID NO: 6676 - DNA, 481 bp, Homo sapiens
  III.304 (R95838)
  misc_feature (388)..(388): n is a, c, g, or t
  misc_feature (439)..(439): n is a, c, g, or t
  misc_feature (451)..(451): n is a, c, g, or t
  misc_feature (471)..(471): n is a, c, g, or t
ggtttcaccatgttggccaggatggtcttgatctcttgacctcgtgatccgcccaccttggcctcccaaagtgctggattacaggtgtgagccaccgtgcctggcctaaataaataatttcgtaagcatatacaatccacttcccactaagaattagggtcaaagacattctatttgaacacttgcaattacctagatctagttggcctttggttgatagatcctctgcctcggaatttcattgagtttttttcttccttgcctttgggtgtctgcttgccacttcctaagaattcttgtagaaggcagtttcctctacttgcccaagagcactgagtacttcttctactatcctattattagcttctattctcttagtgttaacttnaaaacttttaaggagcagtggaaggttgggtcaggggacatgtgggcaatnatttatttaccntaaaggaaaaacatttgttncccgttcaat

SEQ ID NO: 6677 - DNA, 318 bp, Homo sapiens
  III.305 (R95839)
  misc_feature (1)..(1): n is a, c, g, or t
  misc_feature (2)..(2): n is a, c, g, or t
  misc_feature (202)..(202): n is a, c, g, or t
  misc_feature (270)..(270): n is a, c, g, or t
nnaaaacatgcatatatttaataatgaaacaattcatcaacagcaaaaagaaagtagaaaaattcgtaagacctcagggctgtggaagagaatgggacatcaaggaaaaaagatatatatagcaaccaacccagaaggctgcatgatgagtgaagcaaaggcaagtttggctaagatagtattatatgctctgaaaagagantggctggataggtacccacttatgtgactgcttactagcaggcagccttactgtatgcctcatgggantgggaggcaaaaagccaggggaaaggtggggaggggagaaggaagagg

SEQ ID NO: 6678 - DNA, 165 bp, Homo sapiens
  III.306 (H96659)
  misc_feature (2)..(2): n is a, c, g, or t
  misc_feature (63)..(63): n is a, c, g, or t
  misc_feature (121)..(121): n is a, c, g, or t
  misc_feature (125)..(125): n is a, c, g, or t
anatttctacttaagggcaagtagaaatttaaaaaaaaaaaaaaaaaaaaaaaattttataancctttatgaatgctttaaccacctggataagaaatatgacttaattactacacaaacncttnaaaattcattagaaaaaccttagcaaaataaaatgaaagc

SEQ ID NO: 6679 - DNA, 406 bp, Homo sapiens
  III.307 (N75937)
  misc_feature (37)..(37): n is a, c, g, or t
  misc_feature (40)..(40): n is a, c, g, or t
  misc_feature (343)..(343): n is a, c, g, or t
  misc_feature (353)..(353): n is a, c, g, or t
  misc_feature (380)..(380): n is a, c, g, or t
  misc_feature (385)..(385): n is a, c, g, or t
  misc_feature (393)..(393): n is a, c, g, or t
  misc_feature (400)..(400): n is a, c, g, or t
taagacaaggtcttactctgttgcccaggcgggacanctnttgatttaagtgaaaaaactcaatgcatcctggaggatatcctagaacagaacatggaactcttctgcattccttttaatagttgcatagaattccattgtgtatatccgatcgtgatttcttccaccagattttgttgatgggtatttttttgggttgtttctggtcttttgttctcatgactacatcttaaccagtggttctaaagatgtggtacccagaacaacatcattactacctaaaaatctattagaaatgaaaattattgggtggaagccagatcttacctgaatccgatactcnggagtgaggnccagggaatcttggcaccatacgtccnggtanagggatcnggacgcnagcccg

SEQ ID NO: 6680 - DNA, 426 bp, Homo sapiens
  III.308 (W05122)
  misc_feature (155)..(155): n is a, c, g, or t
ggcacgagcaccatgtacataaataataatgaaaaagaatatatttgcggtaacaacatcaacaacaaaaaaattctgagcatcactgttttttttcttttcttttctttttgagacagttttgctctcgttgcccaggctggagtgcagtagcnccatcacggctcactgcaacctctgcctctcgggttcaaacgattctcctcctgcgacctcccaaagtgttgggattacaggcgtgacaccccgtgcctggccaagcattacttttttaagatatgtgcaaaatgttgaaacaactcaatacccaaaaagataaaattgcattcatttctccacactccaggacaaattccaaagaaattaaagttataataaatggtaaaatatggaaaccaagtacctacagggaaacatggggtgaat

SEQ ID NO: 6681 - DNA, 463 bp, Homo sapiens
  III.309 (H79834)
  misc_feature (411)..(411): n is a, c, g, or t
ggctctctcatgaccagctctctgcctcccttccaggaggctccatcccacactgttcacccaggctgcggagactcaccttcccgagctaacttaactactgtacataataatatgtattaaactggtatcgtggtgatataatgtggtgcagttacttatatattaaatatctattgtatccatagaataggcagcattatttcaaacatattcaagttgggagtggagatctttgcctagaagtcaatattcaataaatcttgtacataactatttcgatggcaaatgttaagccttctaaaaggaaagtgtagattgggaaaatgattttttttccaaatgatgtttttgccttctaatatactgtaaggtaatggagcttcaggaacaggccaacctggaccctgncggaggtcgcgtgctgtggggatgacagcgggacgggagctcacagtgcttt

SEQ ID NO: 6682 - DNA, 291 bp, Homo sapiens
  III.310 (H79835)
  misc_feature (11)..(11): n is a, c, g, or t
  misc_feature (75)..(75): n is a, c, g, or t
  misc_feature (203)..(203): n is a, c, g, or t
  misc_feature (250)..(250): n is a, c, g, or t
attataaatcnaatatggttgattaatgaaaaatgacaatgaagtaccaagaaaatgtttgtcaatataaaactnttagcagcatttccatagtttcaggctccaacattagtcgtacttcctccctcccgctatcaaaaaaagaagagactccaatggggatggagtagagcccggggggtgtccagctttggtgtgggccntcagaggaaatacttccatcccggcaatcccggggtttttcctcccntcttaatcccctgaaggtgcttaggaattgtcaaaggcaac

SEQ ID NO: 6683 - DNA, 243 bp, Homo sapiens
  III.311 (AA037805)
  misc_feature (19)..(19): n is a, c, g, or t
agataaaagtaaaaaatgngccgggctcagtggctcacgcctgtaatcccagcactttgggaggccaaggtgggtggtttcaccatgttggccaggatggtctcaatctcctgacctcgtgatctagctgcctcggcctcccaaggtgcatgggattacaggtgtgagccatcgcgtctggcctgaaatacttatttttaagctagaaatagtttggcaataaggttgtgaaactggacagat

SEQ ID NO: 6684 - DNA, 481 bp, Homo sapiens
  III.312 (AA037806)
ccagttgtccaaaacatttattgactactacagtaggaacaagaaatgatccctcaatgtaaaggagctctataacatttatttatgaatcaatgaatgaattagtctggccctgttgcccaggctggagcgcagtggtgcgatctcagcttgctacaacctccacctcccaggctcaagtgattctcatgcctcagcctcctgagtagctgggattacaggtatgtatttttagtagagatggggtattgccatgctggccaggctgttcttgaactcctgacctcaagtgatctgcccacctcaccctcccaaagtgctgggatcacaggtgtgagccaccgcgcccagcctgaaatttcttttaaatttagttcctctgggtaattaagtccctgtatgcaattcaagtttcttatagtcaagagttttttcgattattaaattgttcacttgatcagtaactaattggctattatct

SEQ ID NO: 6685 - DNA, 444 bp, Homo sapiens
  III.313 (H05746)
  misc_feature (183)..(183): n is a, c, g, or t
  misc_feature (196)..(196): n is a, c, g, or t
  misc_feature (351)..(351): n is a, c, g, or t
  misc_feature (407)..(407): n is a, c, g, or t
  misc_feature (416)..(416): n is a, c, g, or t
ttttttttttttttttttttaagggtataataaaattatttttattgcattttgtgcagacgggagtctaaaaaagtaatacagtaaaagccataaagcattaaatgggagcattcaacaataaaggaaagaaccaaccctctctttttcatattggcacaaagaacacaagatcaatactgnggcaggatgcggncatactgaacacttacactgaaaattaaaggcaggcctaataataatagcagtaatagtaataaatactcttgatttggtttgcaacctctcctatttacaagggttttcaacttcattggcattgccctgcacataggtccatctaaaacaaanggcaacactaggtttattcacttacagggctatttggaaatattggcactccgggnttaaaagtncacttggatggggcctggaaaccttctt

SEQ ID NO: 6686 - DNA, 496 bp, Homo sapiens
  III.314 (H05852)
  misc_feature (425)..(425): n is a, c, g, or t
  misc_feature (450)..(450): n is a, c, g, or t
  misc_feature (466)..(466): n is a, c, g, or t
  misc_feature (478)..(478): n is a, c, g, or t
  misc_feature (483)..(483): n is a, c, g, or t
gacccagggcctttggttccccagctcatccttggcccttccgctccaccagcctggtctgaggcgtgctctgtccttagagaaggcgcggtggccggagttcccttcccctagggcacattactaagggggtcaggcactgcatgctcgttccagcaccatctgggactgggtacagtacctccagccccagggccctgacctgcgcacctagcttgacatctcacgcacctcccagagctggcgccactgagtaatccggacctcaccacctcttttcctttgagcccaaggcagagctgggagctgggcgccacccagacagcgtcaggtgtggctgggggtaggttttggaggtcttgccagttaacggccaagttcccttttgagatttcgattcaggggattggatagattttttttcnaggtaatttaaattaagggaagttngaaggtttttaagaanaccaggcccccngaatncttttaagtaaga

SEQ ID NO: 6687 - DNA, 412 bp, Homo sapiens
  III.315 (R89277)
tcttattcctatgtaaaacagacattaacataattatttaatctattagacctacaagaatcttcaaaattatgattcaactcttcatttgactgaaaaactgacacaggttcttagaagtgaagtgaaattttctcaaatcacatgcttgatgacaggggtgggttttttttgtttgttttttgtgtgtgttttttgttttttgttttttgagacggagctttggctctgttgcccaggctggagtgcagggacgcgatctcggttcacgccattctcccgcctcagcctcccgagtagctggcactacaggcgtctgctaccacacccagctaaattttgtttttgtattttcagtaggagatgggggtttcaccatgttagccagggtggtcttgatctcctgacctcg

SEQ ID NO: 6688 - DNA, 184 bp, Homo sapiens
  III.316 (R89278)
  misc_feature (67)..(67): n is a, c, g, or t
  misc_feature (80)..(80): n is a, c, g, or t
  misc_feature (155)..(155): n is a, c, g, or t
aaatgttaacacttatttattctctgtgatgggtacacataaatctttaatatgactctacattttnctgtatgtttganacatttcataattaaaactacaaattcaaaccaaagaaaaaggtagttgtaataaaatcctttaaaccaccagangccaatttatgtacaataacttactgaac

SEQ ID NO: 6689 - DNA, 193 bp, Homo sapiens
  III.317 (N74676)
  misc_feature (186)..(186): n is a, c, g, or t
  misc_feature (190)..(190): n is a, c, g, or t
ttttttttttttttttttttgagtttttccaaagatttattgaagcagaaccaagttggttggatacttgctggaaaaaaaaaagcagttttaatggtattcaaaataccttttaaaaagtattctagcacaagatttttctgtaaactagattatgttgtaaacttttttctaaatcttgtaggngtgncgg

SEQ ID NO: 6690 - DNA, 452 bp, Homo sapiens
  III.318 (W05065)
  misc_feature (335)..(335): n is a, c, g, or t
  misc_feature (400)..(400): n is a, c, g, or t
  misc_feature (430)..(430): n is a, c, g, or t
  misc_feature (435)..(435): n is a, c, g, or t
caggaaggagatgcttcagagagaggaagccgaaaacaccctgcaatctttcagacaggatgttgacaatgcgtctctggcacgtcttgaccttgaacgcaaagtggaatctttgcaagaagagattgcctttttgaagaaactccacgaagaggaaatccaggagctgcaggctcagattcaggaacagcatgtccaaatcgatgtggatgtttccaagcctgacctcacggctgccctgcgtgacgtacgtcagcaatatgaaagtgtggctgccaagaacctgcaggaggcagaacgaatggtacaaatccaagtttgctgacctctctganggctgccaaccggaacaatgacgcccttgcgccaggccaaagcagggagtccacttggagtaccnggaagacaaggttgcaggtcccctcacctngttgnaagttggaatggccctt

SEQ ID NO: 6691 - DNA, 456 bp, Homo sapiens
  III.319 (N33921)
ttaatctcaggagacctgattctctcttgctgagatgggtagagagaaatcctttggcaactaaacctgttactctagcattgtctctgttttccaaaaatcctgcttaagctttacttatctgtatttaatgtgaacctatccccccttattgttcttctgtcgccacctcatcttaaagtctatacattgataggttctgcattgagttcttgcacttctctaaggaaagagagcaagagaattgtggaagtttggaagaagtgagggtaaagagactggatatctttccaagttaaagcagtttggagccaaggctgatggtaaagagaatattgcagaatttgttaaatatccattaatgagtagaatctggcaattcctggaaccatagttcgagattgagggtggaataaagatatatcagatacacccacaatcagagaatttaacacc

SEQ ID NO: 6692 - DNA, 443 bp, Homo sapiens
  III.320 (N49630)
  misc_feature (23)..(23): n is a, c, g, or t
  misc_feature (61)..(61): n is a, c, g, or t
  misc_feature (259)..(259): n is a, c, g, or t
  misc_feature (262)..(262): n is a, c, g, or t
  misc_feature (263)..(263): n is a, c, g, or t
  misc_feature (377)..(377): n is a, c, g, or t
gagtttcctctgtcacccaggcntcgagtgcagtggtgcgagcttggctcactgcaacctntgcctcccaggttcaagcgattctcctgcttcagcctctggagtagccgggactacaggcatgtgctccatgcccggctaattttgtattttttagtagagacggggtctctccacgctggccaggccggcctcgaactcccgacctcaggcgatccgccagcctcggtctcccaaagtgctgggattacaggcgtgnacnnatgcccggccaacaattttcaactcgtgtcaaccttgtgtcatctaaaccctgtataccttctcagctcccatcaggcactgaattattatgatgcagatctgtgatatgtcantttattcataatgttttaatatcaaacatacattcaaaaccttttttccaacaaagtctaatccat

SEQ ID NO: 6693 - DNA, 583 bp, Homo sapiens
  III.321 (N21112)
  misc_feature (13)..(13): n is a, c, g, or t
  misc_feature (403)..(403): n is a, c, g, or t
  misc_feature (430)..(430): n is a, c, g, or t
  misc_feature (460)..(460): n is a, c, g, or t
  misc_feature (471)..(471): n is a, c, g, or t
  misc_feature (479)..(479): n is a, c, g, or t
  misc_feature (538)..(538): n is a, c, g, or t
  misc_feature (549)..(549): n is a, c, g, or t
  misc_feature (563)..(563): n is a, c, g, or t
cctttaagcttanttaatatttgaaatctcattttctattttcccagaccccagaaaacagaaagtttttagatgaccaatattttgttccagaaacatacagccttatcagctaattcataaaagagctattttacaaaggtacatctggataattagaacaataaagtcttttaggcatttcaaaatgtgatcagtaaaaatacatgattattaataaagtttttttaaagatagttccagatattttttaaaagcaatttctgttaaagagtacatgattgtatggtgaacaaggaaaataaaatgttctagtaggaagaggcttattaaaaataaccaacagtgtgcacatgacagtttaccatttttgggatatatcccgcttagcagttgggcaccnggaaatgggtggggaaggcttccctcnaggagggacctttttttcccacccatttantatccaacccnccataccngtgggggaaggccctagggattagggcaaagggacccctttcctggggggaaggaaaantttggagatgnccccgaaagtgggngggaatttccgggaaaaatg

SEQ ID NO: 6694 - DNA, 498 bp, Homo sapiens
  III.322 (N31126)
  misc_feature (488)..(488): n is a, c, g, or t
gctatatattttgcatactttaaaatcacctaacttggactgcttgaattacattggcttttagaaccgaaattgtaactatgtattgtatttcatgggaggtatattttatgagctttttggctttcttttttcccacagcaactgccaatgaaggatgaatcccctttttaaaaagttgttgttgttgttgtttatttgattttgagttaggagggataatagagaagtccatttaaaaattatttttagaagctaaagaaagtaattatgcttcctgtgaattgtcttttactggcatctttgttttcctctttgatgttagtaaatttggtgtaatacgtggggcttccatatttcaaagtggaagctttcttctctgaagtcgatatatggttttgaattactagagctttggtcagtatttccttccctaatatgtcacagagggcaccactgagaactgcgtgccataggacctcaaaatnccaaaatttt

SEQ ID NO: 6695 - DNA, 242 bp, Homo sapiens
  III.323 (R43590)
  misc_feature (76)..(76): n is a, c, g, or t
  misc_feature (82)..(82): n is a, c, g, or t
  misc_feature (132)..(132): n is a, c, g, or t
tttttttttgcattttaagtatttgtacacaactgtaccctacagcaaatattcaaacactgggaaaatatctgtnaatgtnattggataacattaaaataatgtaaaatttgaattgctcagcaacactantactacacagaatcaagtgtagaaattgttaattcaaggatacattttgcctccaaaacttgtttcttgggacactataggaacttacataaagtatattatgtgtaaaa

SEQ ID NO: 6696 - DNA, 444 bp, Homo sapiens
  III.324 (T74729)
  misc_feature (394)..(394): n is a, c, g, or t
aaactaaattgacaagataagtagaatacaattaatacagctttgattgatacattgttgagaaaataacatttaccaaacaatatgtccatttatatctaatgataagataggagtctcagtgatttttcttagtgtttttcctgtaaatttttaaaaaatctttttgacttctaatttcttgtctgctgcagaaactagttcaaaaggtaagctgctttcgtcaaaagttttgaagtaacatttttttgtgctttatatttaccttcttaactttttatcgaagcatactaaggaatacagataaatgaattttcacaaactcagtgcacacatgtttttagccaaaaggcaggaatatttctaggctcccaggaggcatgccctcccgggngctcccttcccggggtgttacacactggcacccctggaaggtaatccaac

SEQ ID NO: 6697 - DNA, 320 bp, Homo sapiens
  III.325 (R71085)
  misc_feature (11)..(11): n is a, c, g, or t
  misc_feature (73)..(73): n is a, c, g, or t
  misc_feature (147)..(147): n is a, c, g, or t
  misc_feature (187)..(187): n is a, c, g, or t
  misc_feature (245)..(245): n is a, c, g, or t
  misc_feature (262)..(262): n is a, c, g, or t
  misc_feature (270)..(270): n is a, c, g, or t
  misc_feature (290)..(290): n is a, c, g, or t
  misc_feature (295)..(295): n is a, c, g, or t
  misc_feature (305)..(305): n is a, c, g, or t
  misc_feature (315)..(315): n is a, c, g, or t
tggtgggggtntgcgatttaatttcagaaaatttcggtatgggcaaaaggcgacccgtctactgcagcaagcnaatctcagctcaaggggaagccgttcgaaggaaaatggttcccaaatgccaatggtctccccacgccctggatntggggaccctatccagagtccccttcttctctttggggtntcacaggcccatccagagtggaactgggggctaagaccacggccacagactttggggngcctggcgccacctggnggtagttntgggaatttcaggcccaggntcgtnggacccccanggatttggangcttt

SEQ ID NO: 6698 - DNA, 474 bp, Homo sapiens
  III.326 (R71428)
  misc_feature (338)..(338): n is a, c, g, or t
  misc_feature (366)..(366): n is a, c, g, or t
  misc_feature (401)..(401): n is a, c, g, or t
  misc_feature (406)..(406): n is a, c, g, or t
  misc_feature (429)..(429): n is a, c, g, or t
  misc_feature (441)..(441): n is a, c, g, or t
  misc_feature (457)..(457): n is a, c, g, or t
ctgatcgtccatcacctgaccttctccaggactgtcttctcacccttccccactccctggtccccgggagcagctccttctgcccgactcactcacagtgcagggaaaggaggcagggaaaagaccaggattctgtgagttctgaggttgccacacacaaagaagctgtggtttctctgcctcggccactgatgagactaaaactggcttccccttggagacggcagatttcaggctgatccctgcttaagccctctcatccccacgctggtcctggtattgatacaagacccagctggtgacaaagcctccaatcctgggggtccacgagcctgggnctgacattcccagaacttaccgccagtnggcgctcagggccccacagtctgttggccgtggtnttagnccccagttccaatttggatgggnctgtgacagccnaaagagaagaaggggnattttgatagggtccca

SEQ ID NO: 6699 - DNA, 408 bp, Homo sapiens
  III.327 (R00832)
  misc_feature (207)..(207): n is a, c, g, or t
  misc_feature (290)..(290): n is a, c, g, or t
  misc_feature (354)..(354): n is a, c, g, or t
  misc_feature (377)..(377): n is a, c, g, or t
  misc_feature (403)..(403): n is a, c, g, or t
ttatgcttttgaagttttgtatgagaaatccttccccatccctctcccatgatattcgcctacattttttgtcctatttcctttacagtgttaagtagggataagttttgttgtttttttctccatagagtgagccaattatccccccatctactaaacaacctttcataagttctacatattttttgcaaattagatacactgggnatgaaacaaacagcatctgaaagagggggagaaagaggggtcatatgagtgggaaggaaaaggaaattaaaactccagctccntccccactggaatacttaacttcccttcccaaatgcctgcccttctgctactgtgaggtgggtngcggtttcccctttcagagcttngggggcatggcacttcatttggcacnaaagg

SEQ ID NO: 6700 - DNA, 408 bp, Homo sapiens
  III.328 (R01488)
  misc_feature (310)..(310): n is a, c, g, or t
  misc_feature (328)..(328): n is a, c, g, or t
  misc_feature (368)..(368): n is a, c, g, or t
  misc_feature (385)..(385): n is a, c, g, or t
  misc_feature (392)..(392): n is a, c, g, or t
ttggggaataaaaaaaaagatgagattcattcacttctgaacccatctgcaaccatccaagcatggcagctgatttctaaggacagaaccaaggagggcagtaaacactcagtattcacccatctttgaggcgtaaaggggagtaaagacttagactgtaggtccagagcagacctcaggcaagtaaggaacaagtgatgctgggccatttgggtgttaagccttccacctttggctgatcccggggttcttaaataggattttgattgtgggactccatctctctgaattttgctcctgccttcttctnagtgtttgaagggatccntgaactattcaacttccgtttcttccttaaacaacagctncttaagtagggcagggntttactntttgcagttttagggg

SEQ ID NO: 6701 - DNA, 482 bp, Homo sapiens
  III.329 (R19651)
  misc_feature (344)..(344): n is a, c, g, or t
  misc_feature (354)..(354): n is a, c, g, or t
  misc_feature (364)..(364): n is a, c, g, or t
  misc_feature (369)..(369): n is a, c, g, or t
  misc_feature (374)..(374): n is a, c, g, or t
  misc_feature (387)..(387): n is a, c, g, or t
  misc_feature (405)..(405): n is a, c, g, or t
  misc_feature (414)..(414): n is a, c, g, or t
  misc_feature (422)..(422): n is a, c, g, or t
  misc_feature (427)..(427): n is a, c, g, or t
  misc_feature (451)..(451): n is a, c, g, or t
  misc_feature (460)..(460): n is a, c, g, or t
  misc_feature (477)..(477): n is a, c, g, or t
cagaggggtccatacggcgttgttctggattcccgtcgtaacttaaagggaaactttcacaatgtccggagcccttgatgtcctgcaaatgaaggaggaggatgtccttaagttccttgcagcaggaacccacttaggtggcaccaatcttgacttccagatggaacagtacatctataaaaggaaaagtgatggcatctatatcataaatctcaagaggacctggggagaagcttctgctgggcagcttcgtgcaattgttgccattgaaaaccctgctgatgttcagtgttattattcctccaggaattactgggccagagggctgttgctggaagttttgntgcttgccantgggagccantccanttggntgggccgtttcantcctggggaacctttcanttaaccagntccagggnaggcnttccggggagccacggtttttttnttggtttanttgaccccagggtttgnaccac

SEQ ID NO: 6702 - DNA, 436 bp, Homo sapiens
  III.330 (R44437)
  misc_feature (276)..(276): n is a, c, g, or t
  misc_feature (370)..(370): n is a, c, g, or t
  misc_feature (405)..(405): n is a, c, g, or t
  misc_feature (428)..(428): n is a, c, g, or t
  misc_feature (433)..(433): n is a, c, g, or t
tttttttttctttttttttagaaactgatgtttattttccatcaaccatttttccatgctgcttaagagcctatgcaagaacagcttaagaccagtcagtggttgctcctacccattcagtggcctgagcagtgggagctgcagaccagtcttccgtggcaggctgagcgctccagtcttcagtagggaattgctgaataggcacagagggcacctgtacaccttcagaccagtctgcaacctcaggctgagtagcagtgaactcaggagcggganaggtccattcaccctgaaattcctccttgggtcacttgccttcttcaggcaggcagcctgctcttcttttttcaatctctttcagggatctctntaggaaggtacagatcaggggcattgacctccctngggtgtttcacggggaatggggngcccncgc

SEQ ID NO: 6703 - DNA, 353 bp, Homo sapiens
  III.331 (R40287)
  misc_feature (110)..(110): n is a, c, g, or t
  misc_feature (170)..(170): n is a, c, g, or t
  misc_feature (214)..(214): n is a, c, g, or t
  misc_feature (237)..(237): n is a, c, g, or t
  misc_feature (286)..(286): n is a, c, g, or t
tttttttttttttgaccatttcccacaatcttttattaagaaaaattccaaacatacagaaaagttgaaagaacaagtacactgttcactgaaataccagccactgcagnttcaacaatgaacattttggccttatttgctttgtgtattttggggggaactatttgganttaaattacacatttcttgaaggcattcacctatataatccagncatctatctcctaaggttgaggnacattttcccatggaactgcagtaccgttaaatgggctattagagggantgggttgggtctttgtgaggggtctcacgtccgggggacctcatcaaagcgtgctagggcccttagc

SEQ ID NO: 6704 - DNA, 393 bp, Homo sapiens
  III.332 (AA063157)
tgaaatgtttaaggtctttaatttcaaaacacttactaagcataatatatccagagattggcaattaattttaacaatttaggtctttagtaaaattaatgtgggcagaaaatgttacttcattacaaagtgttactatatactttgtcttgtgactaactagagcttacaggagtataaacaagttaactgaatttttcagtggctgaggattttgtatgcttcctcattttgaacttcaatcatgactatataatcatattcatacatctgagactgaactagatataaagatatcacaacacccactagaactggttaattagatatgcccattatttcttcactatttaccgaagaaaagtatgaagaaaaaaagactaatttggttta

SEQ ID NO: 6705 - DNA, 212 bp, Homo sapiens
  III.333 (R17828)
  misc_feature (144)..(144): n is a, c, g, or t
  misc_feature (172)..(172): n is a, c, g, or t
agcgtacaagtgtggtcagaatgctactgtcgtatgcaaatgacgagtgcattaagtgtcaaacaatgaaacaattgtgcaaagaataaaaaaacaaattttagcctttaaataaatcaaataacatcagtttcttggactgancaattttcacttctaggacaggcacaangttcgcttatggcaaaaacaaccccacagcgcatcctccc

SEQ ID NO: 6706 - DNA, 378 bp, Homo sapiens
  III.334 (R43032)
  misc_feature (140)..(140): n is a, c, g, or t
  misc_feature (307)..(307): n is a, c, g, or t
  misc_feature (374)..(374): n is a, c, g, or t
ccgacgtcattctcatgtgcttctcggtggacagcccggactcgctggagaacatccccgagaagtgggtccccgaggtgaagcacttctgtcccaatgtgcccatcatcctggtggccaacaaaaaagacctgcgcagnacggagcatgtccgcacagagctggcccgcatgaagcaggaacccgtgcgcacggatgacggccgcgccatggccgtgcgcatccaagcctacgactacctcgagtgctctgccaagaccaaggaaggcgtgcgcgaggtcttcgagacggccacgcgcgccgctgncagaaagcgttacggctcccagaacggctgcatcaactgctgcaaggtgctatgagggccgcgcttncggg

SEQ ID NO: 6707 - DNA, 258 bp, Homo sapiens
  III.335 (H79133)
  misc_feature (55)..(55): n is a, c, g, or t
  misc_feature (66)..(66): n is a, c, g, or t
  misc_feature (86)..(86): n is a, c, g, or t
  misc_feature (95)..(95): n is a, c, g, or t
  misc_feature (113)..(113): n is a, c, g, or t
  misc_feature (126)..(126): n is a, c, g, or t
  misc_feature (135)..(135): n is a, c, g, or t
  misc_feature (223)..(223): n is a, c, g, or t
  misc_feature (252)..(252): n is a, c, g, or t
tcgaaaacagagactggagaaagacactacatttgactactgggacattctgggngcttataaaantttgacatgatattattttncatgatggnaacttttaaggaataagngtctacaagaggnggacatggnccatgcttatacaacttaaagctctgaactctgagaggcaaagtctatttgttctctactctcctcacagcctcttgaatcagacctngggccaatccagttactctgttaaaggantcatta

SEQ ID NO: 6708 - DNA, 405 bp, Homo sapiens
  III.336 (H79225)
  misc_feature (26)..(26): n is a, c, g, or t
  misc_feature (356)..(356): n is a, c, g, or t
  misc_feature (372)..(372): n is a, c, g, or t
  misc_feature (393)..(393): n is a, c, g, or t
  misc_feature (403)..(403): n is a, c, g, or t
caaagtgctgggattataggcgtgcnccgttgcctggcccagaatgtttttttaaatcagatgtagcatcttcataaggtaaagcctgtcacatcagagtaacaaagctcctggagtacagtgatgctagagtagaatgttccagaagtctggccatagccccagcttctgaattacctgggagagacaagatgctcaggttactattttttctttattctgatagtacagcctctactcagagaccacggtgtgtgtcacacaaccgaggcagctagggcatattctgagggcttttttttttttttggtttccttaatgattctttaacagagtaactgggattggccaaggtnctgatttcaaggaggnctgttgagggagagtaggagnaacaattagnac

SEQ ID NO: 6709 - DNA, 277 bp, Homo sapiens
  III.337 (T81094)
  misc_feature (64)..(64): n is a, c, g, or t
  misc_feature (72)..(72): n is a, c, g, or t
  misc_feature (88)..(88): n is a, c, g, or t
  misc_feature (95)..(95): n is a, c, g, or t
  misc_feature (99)..(99): n is a, c, g, or t
  misc_feature (121)..(121): n is a, c, g, or t
  misc_feature (156)..(156): n is a, c, g, or t
  misc_feature (184)..(184): n is a, c, g, or t
  misc_feature (196)..(196): n is a, c, g, or t
  misc_feature (217)..(217): n is a, c, g, or t
  misc_feature (242)..(242): n is a, c, g, or t
  misc_feature (248)..(248): n is a, c, g, or t
  misc_feature (257)..(257): n is a, c, g, or t
  misc_feature (272)..(272): n is a, c, g, or t
tccttaatacagcttcccactgaggcgctgaatcaaccatatcattctcctgccgtattctgtntctctttntccggtgttctctatnagaattncctnattcactaccactgctggtgtnacagcgtgaacgtgacctcctcctttgcttaaganctgaatcttcaccactgtaatgggcttncctcctcctcanaggctgtacagaatcattgtnacttccacaggagggggtttcggcnacgcgntgtaagggnaactttgggcgactnaggtg

SEQ ID NO: 6710 - DNA, 417 bp, Homo sapiens
  III.338 (T81143)
  misc_feature (75)..(75): n is a, c, g, or t
gaaagatgatactagggtcaggaaatagcatttgaaagtcattctcatctggagggatgaagccaagataaggcngaccagggaaaagctttaagaaagcaaagaatgaaaatagccctgatacccaaagaagcaaatctcatgcaccgtgggaagaaaatggcccccagagtggactctacaattctcccagtgatcgcactaagtcgccaaagttcccttacacggcgtcgccgaaacccctcctgtgggaagtgacaatgattctgttacagcctgtggagggagggagggaaagcccttaacagtgggtgaaggtttcagatctttaaggcaaaggggggaggttcacgttttcacggttgtttaaccacccaggcagttggttagttggatttccggaaaattttcttaatt

SEQ ID NO: 6711 - DNA, 587 bp, Homo sapiens
  III.339 (W93806)
  misc_feature (477)..(477): n is a, c, g, or t
  misc_feature (544)..(544): n is a, c, g, or t
ttacaaaaaaaattttattattacaaaacatacaatctcacaaaggtacaatttgaaatacggggacacccttctaactaccacccaggtgaagaaacagaactttgtcaggcaccccagaacccctccaagtgcctcatcacaatgacaactccttccctctagaagtagccattattcttgtatagtactgactgtgtttctttatggttttatcttattttttagagacagggtcttgttctgtcacacaagaacaagtggacaggtggagtgcagtggtgttcatagctcactgcaatcttgagctcctggggctcaggtgatcttcctgtcttagcctcccaaggtgctgggattataggcgtgtgtcattgcacttgacctagttttattttttttttgagatggggtcttgctctgtcacccaggtgttgcccaggcttgagtgcagtggcgcgatctcagctcactggnacctccgcctcccaggttcacgcaattctcctgcctcgggctcccgagtagctgggattacaggtgnctggcaccatggcctggctaaattttggaattttagtagagac

SEQ ID NO: 6712 - DNA, 369 bp, Homo sapiens
  III.340 (W93917)
  misc_feature (320)..(320): n is a, c, g, or t
  misc_feature (353)..(353): n is a, c, g, or t
accccgtctctactaaaaatacaaaaaattagccaggcatggtggcaggcacctgtaatcccagctactcgggaggccgaggcaggagaattgcgtgaacctgggaggcggaggttgcagtgagctgagatcgcgccactgcactcaagcctgggcaacacctgggtgacagagcaagaccccatctcaaaaaaaaaataaaactaggtcaagtgcaatgacacacgcctataatcccagcaccttgggaggctaagacaggaagatcacctgagcccaggagctcaagattgcagtgagctatgaacaccactgcactncaccttgtccactttgttcttgtgttgacagancaaagaccctgtcttc

SEQ ID NO: 6713 - DNA, 359 bp, Homo sapiens
  III.341 (R52536)
  misc_feature (128)..(128): n is a, c, g, or t
  misc_feature (135)..(135): n is a, c, g, or t
  misc_feature (262)..(262): n is a, c, g, or t
  misc_feature (328)..(328): n is a, c, g, or t
  misc_feature (344)..(344): n is a, c, g, or t
tttttttttttttttttcacgtttccacgtatgtttattgcaggactagttacaatagcaaagacttggaaccaacccaaatgcccatcaacgatagactggatgaagaaaatgtggcacatataccncatggantactatgcagctacaaaaaagaacgagttcatgtcctttgcagggacatggatgaagctagaaactatcatcctcagcaaactaacacaggaacagaaagccaaacaccacatgttctcacgcatanttggggagctgaacattgagaacacatgggacacaggggaggggaacatcacacactgggggcctntggcagggttgggggngaaaggggaagggga

SEQ ID NO: 6714 - DNA, 459 bp, Homo sapiens
  III.342 (R52587)
  misc_feature (10)..(10): n is a, c, g, or t
  misc_feature (19)..(19): n is a, c, g, or t
  misc_feature (42)..(42): n is a, c, g, or t
  misc_feature (350)..(350): n is a, c, g, or t
  misc_feature (399)..(399): n is a, c, g, or t
  misc_feature (420)..(420): n is a, c, g, or t
  misc_feature (428)..(428): n is a, c, g, or t
  misc_feature (447)..(447): n is a, c, g, or t
  misc_feature (452)..(452): n is a, c, g, or t
  misc_feature (458)..(458): n is a, c, g, or t
gatctccaangattttcanattgccaagcagtcacataatanaaactaaatgagttcccaaatgagttgtgtcaagtgtccatgttgttttttagagtcaagatatatttagtttaaatgtgaaaagaaatttcaagtagtctttctgtttcagtcaacagtctgtgaaatgccaaatactcactattgttacattggcttcttaggaaaactgcccctaggtactatggcttgtgttgattttcagtgaagccagccttgtttatcctgggtctacaaatgtttgggacactataaagactaggacatggaaggagggctggacctcctgttcagcttaggagtgggcntaaaatttcaaggccaatttttgggcactccctttttggaatgggtggntttttggggtcctattaaccnttctctcnggtccttggggaggtaggncggcnttgtgna

SEQ ID NO: 6715 - DNA, 468 bp, Homo sapiens
  III.343 (R61545)
tttttttttgcactcttaatacttatctttattatgaaagtgtttccaaagtaaaatgatcctcataataatgattgcttccagagatcaagaatgaataattatattttcatataaaaatcagcaaaacacaataacaatacataaaataattctaattggctaacagtatttcattccatttctgacagagatgctcaagcactgaattgtcttaagaaaacaagtaaggttttgtcacctatcctatttctcactgcaagttgaaaaaaatcaaatccaaacaccaccaccccttctatgacaacaaacggctgtgggaggtaaatgactatgtgggcaaagagttgatgaaaatcatgagcttaggggctttatggaaactttggggaaatccaaactcagagggttgttttccattcttaaagtaatggaagctctaagttaaagtttccagaatcatcccct

SEQ ID NO: 6716 - DNA, 345 bp, Homo sapiens
  III.344 (R61599)
  misc_feature (313)..(313): n is a, c, g, or t
  misc_feature (336)..(336): n is a, c, g, or t
gagataaaatcagatcacctttgatcaaaatggttggtgaacctccacatgtccagttctgttgccaaactttccattcagagtatttggtggagtttgaatttgagcaaactaaatgccttcatcttaggtagaaagggcctgaatcttccattttatattcaaacctcattgttatttggcctaagtaaaaagtcagatttcatttccatttacctgagttcgctttaaagagcttttcaaagagagctttatagacacccacaattgtccccaatctcttcatgatgttgcattaatagttgtttttgtnccctttcttggggaaatgttaanggccaaagt

SEQ ID NO: 6717 - DNA, 446 bp, Homo sapiens
  III.345 (N68473)
  misc_feature (321)..(321): n is a, c, g, or t
tttacaagactaaagtttattttgcaaacaactcagtcctatcatgatttatttttaacaaaaatgagaactggagagaaattatgtttcaagacttatatatttgtcattagattttagactcattcgttgtttttaagttttggcccacattttaaactaacactgcttattcctgtgaaccaaccagcaatctctggctgcagctcagaagcagcaaaagggatgagaatgtaaaaatctggatcaatattctagttctgggcaattaccctgcaaatcctgccagatgattagactaaataaggtgcccataacctnggaggtttcttttttgggaaaataagaccaagggagctaacgaaagccaagcccaaaacaccccaatcttagcaggcataactatagctaccagttatctgggtgtgtcagcagccttaggattt

SEQ ID NO: 6718 - DNA, 478 bp, Homo sapiens
  III.346 (N91317)
  misc_feature (1)..(1): n is a, c, g, or t
nttgaaaagtgaggagggcagaatttattaagtgaaaaggaaaactctcaacaaaaagaggggtcctgcatgcagctctttccatctcactaaactgaataccaggccaccacacatgagctgaagagcctagtcttctccccctgcatgaattcctggtggctacaccccgttctcccagtgttgcaaggcaggcccttagtctgagccactccacattatttcccttactgtgtatgtgttaaggaacggaatttttcatcatgggcatgtttaggcaatccccctgtgcacaatgacctgggcagcatttggctgtctcctgattctatcattcccccctcctaaaagaaagtacatctaactttaaggataaggataaggggtaatgatcgattcttaactgggttcctggctggatggggggcactggtttttggggaaaataagcagtgagattcttcccctcaagaaggcc

SEQ ID NO: 6719 - DNA, 302 bp, Homo sapiens
  III.347 (R52544)
  misc_feature (189)..(189): n is a, c, g, or t
  misc_feature (197)..(197): n is a, c, g, or t
  misc_feature (245)..(245): n is a, c, g, or t
  misc_feature (253)..(253): n is a, c, g, or t
  misc_feature (280)..(280): n is a, c, g, or t
ttttttttagaaggagaacaattttattctaaaaatagaacttggtaacaatgaaataccaaaagctggtcattataataaaaagaaaagaagagtttaactttttttttgtgaaaatacaaaattatcactataatatactgccaactctgtttatctgtatttgaattattcctttcatggattatncaaggganattttaaaattgggcttctgcctaggtacttatacatctgggattgtntgttttgntcttcagataaatacattctcaagggnatgcaaggcaaaactgaggcat

SEQ ID NO: 6720 - DNA, 357 bp, Homo sapiens
  III.348 (R52600)
  misc_feature (336)..(336): n is a, c, g, or t
  misc_feature (347)..(347): n is a, c, g, or t
  misc_feature (353)..(353): n is a, c, g, or t
actggaagttactttagttcatttaattttaattttatattttgtgaatattttaagaactgtagagctgctttcaatatctagaaatttttaattgagtgtaaacacacctaactttaagaaaaagaaccgcttgtatgattttcaaaagaacatatagaattctatagagtcaaaactatagcgtaatgctgtgtttattaagccagggattgtgggacttcccccagggcaactaaacctggcaggatgaaaatgctatattttctttcatgcactgtcgatattactcagatttggggaaatgacatttttatactaaaacaaacaccaaantattttaggantaaatnctta

SEQ ID NO: 6721 - DNA, 459 bp, Homo sapiens
  III.349 (H18996)
  misc_feature (422)..(422): n is a, c, g, or t
  misc_feature (447)..(447): n is a, c, g, or t
cagagttttttttgaattttcatttttggataaccaagcagctctttaagaagaatgcacagaagagtcattctggcacttttggatagtacataagattttcttttttttttttaaattttttttaatagtcacattcagctcgcttgctcaaaccagactcccacattgggtgagcaagatgagcccataggattccagagttaatacgtaaccgtatatacaaacagccaaaaaaccataatggtgccacagggatggagcagggaagggcatctctaacgtgtcctctagtctatcttcgctaaacagaacccacgttacacatgataactaggagaggcacactgtgttggaaacgagggatgctgaccccaaatgggcacttgggcaggcatgcagtttaaaggcaaaaggggacntccctttaattaaccgtattaaatnccggggggtttt

SEQ ID NO: 6722 - DNA, 468 bp, Homo sapiens
  III.350 (H19096)
  misc_feature (362)..(362): n is a, c, g, or t
  misc_feature (447)..(447): n is a, c, g, or t
  misc_feature (460)..(460): n is a, c, g, or t
agcgtctcaaggtatgcgttctctcaaaggaaagctatgcatcgctgcttcgttgtctgattttgcttagattttgctttggttaggttgcgttttggggtttgcctttttttgttgtcgcttaaatgcaatttggttgtaaagatttgattcctttgtgttcatctgttccgcttctcagcgtccatctcagcgtctcccttcaggaaccgctgagtgtcctctcttaacatccaagccttttaatgaaatcgtactgaaatctgtatcagctaagagtcctccaatcctgggtcccattaactccaagtgcctttttgacagtgacaacagacagtccctcgctttttgttgttgttggntttcttaacccctttaaatgggaactgcccgggatttatacagttatttaaagggagtctcttttggctttaaactgcatgctgnccaagtgccattnggggtcag

SEQ ID NO: 6723 - DNA, 274 bp, Homo sapiens
  III.351 (H52708)
  misc_feature (211)..(211): n is a, c, g, or t
gaaagaaatagatttattctcatgtacaaagcggtcacccacgggaccatatacgacagttgcacagagtcctagaaaaacgcatctctctaaaggcaactcagaaaggtaaggcaggtggaccccctcccccaccccacaacgcacacagattgaaacggagaaaaagagagaagccagtggccgggctgacccaagagtcccggccctntggggtctcccaagccccagggcacaggtggatatggccttgaagagagagccctgccaggct

SEQ ID NO: 6724 - DNA, 478 bp, Homo sapiens
  III.352 (H52985)
  misc_feature (337)..(337): n is a, c, g, or t
  misc_feature (342)..(342): n is a, c, g, or t
  misc_feature (352)..(352): n is a, c, g, or t
  misc_feature (377)..(377): n is a, c, g, or t
  misc_feature (382)..(382): n is a, c, g, or t
  misc_feature (401)..(401): n is a, c, g, or t
  misc_feature (421)..(421): n is a, c, g, or t
  misc_feature (440)..(440): n is a, c, g, or t
  misc_feature (466)..(466): n is a, c, g, or t
tcgtctgtataatggaagcaagacttccaacctcacggagactttgtaatttgttctctgagagcacaggggtgaccaatgagcagtgggccctactctgcacctctgaccacaccttggcaagtctttcccaagccattctttgtctgagcagcttgatggtttctccttgccccatttctgccccaccagatctttgctcctttccctttgaggactcccaccctttggggtgctccaggatcctcatggaaggggaaggtgagacatctgagtgagcagagtgtggcatcttggaaacagtccttagttctgtgggaggactagaaacagccgnggggnaaggcctggnagggaccactactataactgatggntgggntttgggaccgggggtgatnacagggggccccagggaagnaagttttccagaggggcantttcagttgttttgcagagagggggncttgggaagaaa

SEQ ID NO: 6725 - DNA, 428 bp, Homo sapiens
  III.353 (AF086381)
ctttttttccgacttggttcttgtcagctaggtttaaaggtatttcactgagaacgcaaattctgtcttttcttgatttcggctgttttcagtattttggaggtatacatttacttaaattcagtattactcgtgttttgtttttgtttttgttttttgttttctttttcctaggggacaagcatgggtgtttgatttcagaaatcagtacctggcgagatttttgtctcaaaacgactatttgaatttcaagaactgtgctgcgaagacactctgagaacatttgcaagtcaggggcattttccttgacccttgactgatgctatgcggagactgatacattttcttaatggacaatgttcaagccaggtacccatgcttgatctgtcttcacaccagacctcctcatattaaaaggaaaaaaaaaa

SEQ ID NO: 6726 - DNA, 212 bp, Homo sapiens
  III.354 (W72079)
  misc_feature (135)..(135): n is a, c, g, or t
  misc_feature (168)..(168): n is a, c, g, or t
  misc_feature (184)..(184): n is a, c, g, or t
  misc_feature (201)..(201): n is a, c, g, or t
tccttttaatatgaggaggtctggtgtgaagacagatcaagcatgggtacctggcttgaacattgtccattaagaaaatgtatcagtctccgcatagcatcagtcaagggtcaaggaaaatgcccctgacttgcntgtgttctcagagtgtcttcgcagcacagtttntgaaattcaaatagtngttttgagacaaaaatnccgccaggtac

SEQ ID NO: 6727 - DNA, 433 bp, Homo sapiens
  III.355 (W77742)
  misc_feature (429)..(429): n is a, c, g, or t
ctttttttccgacttggttcttgtcagctaggtttaaaggtatttcactgagaacgcaaattctgtcttttcttgatttcggctgttttcagtattttggaggtatacatttacttaaattcagtattactcgtgttttgtttttgtttttgttttttgttttctttttcctaggggacaagcatgggtgtttgatttcagaaatcagtacctggcgagatttttgtctcaaaacgactatttgaatttcaagaactgtgctgcgaagacactctgagaacatttgcaagtcaggggcattttccttgacccttgactgatgctatgcggagactgatacattttcttaatggacaatgttcaagccaggtacccatgcttgatctggtccttcacaaccaggaccctccctccataattaaaaagggnaaaa

SEQ ID NO: 6728 - DNA, 501 bp, Homo sapiens
  III.356 (N74620)
  misc_feature (3)..(3): n is a, c, g, or t
  misc_feature (13)..(13): n is a, c, g, or t
  misc_feature (419)..(419): n is a, c, g, or t
  misc_feature (445)..(445): n is a, c, g, or t
  misc_feature (491)..(491): n is a, c, g, or t
ttnaattaaaaanattaataaggaaaacaaatacccaaaataaggaagactgacaaatgagtgagtggatgagagagtgaatggtgcttgacgtaggagcagtagtgctttagggaccagcatgaaggtggtgaccgggagccctgattcatgggattctgtccacctgactttataagaaccaagaatggctgggaatggtggctcacgcctgtaatcccagcactttgggaggccgaggtgggcggatcatgaggtcaggagtttgagaccagccagtttgagatcagcctggccaacatggtgaaattccatctctactacaaaaatacaaaaattatgggcgtggtggcacctgtctgtaatcctagctactccgggaggctgagagaggagaattgcttgaacccgggagttgngaggttgtagtgagccaagattgcancacttgcactccagcctgggctacagagcaagacactatccttagntccaaaaaac

SEQ ID NO: 6729 - DNA, 363 bp, Homo sapiens
  III.357 (R22950)
  misc_feature (334)..(334): n is a, c, g, or t
  misc_feature (345)..(345): n is a, c, g, or t
  misc_feature (352)..(352): n is a, c, g, or t
gaacagttcaatcctgggctgcgaaatttaataaacctggggaaaaattatgagaaagctgtaaacgctatgatcctggcaggaaaagcctactacgatggagtggccaagatcggtgagattgccactgggtcccccgtgtcaacttgaactgggacatgtcctcatagagatttcaagtacccacaagaaacttcaacgagagtctttgatggaaaatttttaaaaaattccacaaagagattatccattgagcttggaggaggaaggataggactttgacgttgaaattttattgaacggcacttctttaaaaaggttacccaaaccaggnccacaggattnatttggntttttttgggg

SEQ ID NO: 6730 - DNA, 490 bp, Homo sapiens
  III.358 (R23056)
  misc_feature (323)..(323): n is a, c, g, or t
  misc_feature (335)..(335): n is a, c, g, or t
  misc_feature (349)..(349): n is a, c, g, or t
  misc_feature (394)..(394): n is a, c, g, or t
  misc_feature (469)..(469): n is a, c, g, or t
  misc_feature (477)..(477): n is a, c, g, or t
gatcaagttaggaaacacacgattgaaatctggaagagaaaactggctcctaccacattgcttctctcgatcatgggtgaagcctgaggagttccagacacgggggtagaggctggggtctttatttcttcgatcatattcatgattttctctgggcactttgatggcatcaacacaggtctcctgccaccgaggcagcttgggaattcagtagttctgcagactgtaagtgataataatgtatgtgggttttgcaaagccacagtgcttattcaacccaggaaagcaggaagcgcctctttctctttcaagcaggagcctcntttggcaacccntcttggcaatggantttctggggattttcacttctggacggaggaagttaaccgggttnttcccaccatacttccaatttccttttggtggtttccaaattttggagtggcgttttcgggccttcccttggggnttttcccntcctgaacctttt

SEQ ID NO: 6731 - DNA, 361 bp, Homo sapiens
  III.359 (H66343)
  misc_feature (197)..(197): n is a, c, g, or t
  misc_feature (198)..(198): n is a, c, g, or t
  misc_feature (260)..(260): n is a, c, g, or t
  misc_feature (267)..(267): n is a, c, g, or t
  misc_feature (282)..(282): n is a, c, g, or t
  misc_feature (313)..(313): n is a, c, g, or t
  misc_feature (348)..(348): n is a, c, g, or t
aattaccacactgatacttactcatttaattatgccctggcccagagaactgacatttttactggcaggttatgaaatgtttgttaaagctatgaagtctaattataaaagccttctttcagaggttcacaaaggatggagaagaactagaaaattatctccctgggtaccaaaggaagagttataaaacaaatgannacaaatagagtgaaatcacatgaatgatacatgtgtagggtagtttaggagtacacacgggntgggganggctgggcataggantacacaggcaggaaaatgccaaggattgggnctgggtgccaatcctttggggtcctttataggaangtgcctatggatt

SEQ ID NO: 6732 - DNA, 331 bp, Homo sapiens
  III.360 (H66393)
  misc_feature (201)..(201): n is a, c, g, or t
  misc_feature (207)..(207): n is a, c, g, or t
  misc_feature (211)..(211): n is a, c, g, or t
  misc_feature (238)..(238): n is a, c, g, or t
aggcagcacccatgggagtaagatattgaacgtttacagcatgtgtacataagttacctcaaaggataattagatgattataatgacactttctttgagatagctaattttaaaaatctattgctcccaagtctaattatttgagtaatgataacatattagcaatcatgaaacttcagtcacagccaaccccattgaagnaaaaanagtnaatcatagcattttctataaagacccnaaggattgcaccagaccaatccttgcattttctgctgtgtattctatgcccagcctcccatccgtgtgtactctaaactacctacacatgtat

SEQ ID NO: 6733 - DNA, 1087 bp, Homo sapiens
  III.361 (AW874686)
gaattcggaacgaggattggaatgaagcccatgtgaatgcatggagacaaggtgaaaaggtagatgagaaaaaagttggaaatatttgcaggtacatttgacaggaccaggagatgtcttgggcattcatgatgatggaagagtggtcaataatgactctattttctagcttgtatcatgagatgaatggagacccgtagaagaataagttttgtgagtgactggggtcatgtaatatattttgggatttgttaaaaawkkgagcatctttaagaaactgtggggaaaacttcgttttgtttacatccatgaatcatttgaagcacgaaaaataattctcagctgaagatacaaatatgagggccctgggtgtataactgaaggcacgagtataaatgggattatttagggagggcttaaaagtggatagagagtaaattcacagactataggtacaaaataatcaccaatgacaatatattatgcagcttaagaccaattgtatgtattttcctgacaatgtcttttagagcctgtgactagttttctcctgaagatgtggtgatcttcttatcaattttyaagagtacttaaatgttttaacaattatatttmactcaaaattagtttccaacttgttttcctttaattataatttaaagtgtatattttatgtgtacgaatattaaaaatttatgaagtcatatctattgcctttgtctcttattactttaccaatgcttacaaaaactttcctcattaatgcttatataaattttttttttttttgcaaatttttccattcttctggtttgtaaaatgcctaaagtaaatgtgtcharraattaattaatcggttaaatatcttttcaattttctcaacccaatatattggacaattcacctcttactcccagagttttatctctacatattattcctatgaagcttttacacatgctgagactaaatggtctgttctatgtcattgattctatttgcctagttgtctatttaccttgtagttttgaggtaataaatggtcctttaaacaaaaaaaaaaaaaaaaaaaaaaaatggcggccgc

SEQ ID NO: 6734 - DNA, 426 bp, Homo sapiens
  III.362 (N49186)
  misc_feature (382)..(382): n is a, c, g, or t
  misc_feature (395)..(395): n is a, c, g, or t
  misc_feature (413)..(413): n is a, c, g, or t
ttttgtttaaaggaccatttattacctcaaaactacaaggtaaatagacaactaggcaaatagaatcaatgacatagaacagaccatttagtctcagcatgtgtaaaagcttcataggaataatatgtagagataaaactctgggagtaagaggtgaattgtccaatatattgggttgagaaaattgaaaagatatttaacgattaattaattcagatacacattttactttaggcattttacaaaccagaagaatggaaaaatttgcaaaaaaaaaaaaaatttatataagcattaatgaggaaagtttttgtaagcattggtaaagtaataagagacaaaggcaatagatatgacttcctaaatttttaatattcgtacncataaaatatacnctttaaattataattaangggaaaccaggtt

SEQ ID NO: 6735 - DNA, 273 bp, Homo sapiens
  III.363 (N50240)
tgtcttgggcattcatgatgatggaagagtggtcaataatgactctattttctagcttgtatcatgagatgaatggagacccgtagaagaataagttttgtgagtgactgggtcatgtaatatattttggatttgttaaatgtgaactacttttaagaaactgtggggaaaaacttcgttttgtttacatccatgaatcatttgaagcacgaaaaataattctcagctgaagatacaaatatgagggccctgggtgtataacttgaaggcccg

SEQ ID NO: 6736 - DNA, 513 bp, Homo sapiens
  III.364 (N63611)
  misc_feature (450)..(450): n is a, c, g, or t
  misc_feature (504)..(504): n is a, c, g, or t
caataaaatagtaaagaaatattttatttacctaaggtgttagtataccattaaaattagggaaggaagaaaattttgtacatgggcatagcttcaaaaattctgaagggtatttctgggtatttagataggacttttaagattgaggcctgtgcggttttttaatgggtctaaaattaagacaattcatgtcctttccttgatagtatttgcacaaatcatcattaccagtcacgactgtggtcagatgctgactcccaagtaagtcgaagagggaggcaaacagaaggaaaagagaaatcttcctgagatatctgggtaagacatgaagaggacagagaattgaggttaaggatttgcgtatatgtacctaataagatacaagtgatttcattcaccagaaatctgggcgcggggccgggaatatgtatccatatggtagacttttcngggaatgagacgtgagacctcccccctaagaacatggtcaggtacaacaggtcnctaaattgc

SEQ ID NO: 6737 - DNA, 468 bp, Homo sapiens
  III.365 (R18990)
  misc_feature (392)..(392): n is a, c, g, or t
  misc_feature (433)..(433): n is a, c, g, or t
  misc_feature (446)..(446): n is a, c, g, or t
  misc_feature (454)..(454): n is a, c, g, or t
  misc_feature (460)..(460): n is a, c, g, or t
agcaatcacaaactggaatatcgccttaaaaatcaaactgcacggagcaagctgaaactgagacaagattatatcttttaattgatctaaagcgttgtaaataaattgttctcgacatatctagacaggggttaaagggtttctttgacacattcggaaccgttcacccatgacatgtttccatggctcacccttggcatccatcctcggtgttagcagcagcgtttccctgcctcctgcagggatgacttaggaaatctagtgagtttcttgggtgtgatgccatttttattggccctttctgtgatcaaatcatatttctgtacattttcagtgggtagggaaaaaaaagggtttttaaaattgtatcctagggggaacagttttgcccntaagtcaggattttggcagtttaggctcataggtcctttanttggggtttttcncctaaaanatgganttttatta

SEQ ID NO: 6738 - DNA, 259 bp, Homo sapiens
  III.366 (R44875)
  misc_feature (178)..(178): n is a, c, g, or t
  misc_feature (210)..(210): n is a, c, g, or t
  misc_feature (211)..(211): n is a, c, g, or t
  misc_feature (223)..(223): n is a, c, g, or t
  misc_feature (228)..(228): n is a, c, g, or t
ttttttttgatttttggatatatattttatttgacagtgttttagaatatcatacagtaaacaagatttctgtaaaagttaatttatccatagtggtacgtttcataaaaatagttgctcacttacagtctttctgtgactattaatacatggaattatatttatagagatacagctntacagggtaaattcacagctaacactacacanntattatttggantgggntttagatgatgtgctgtcttcacaggttatg

SEQ ID NO: 6739 - DNA, 479 bp, Homo sapiens
  III.367 (R34907)
  misc_feature (7)..(7): n is a, c, g, or t
  misc_feature (368)..(368): n is a, c, g, or t
  misc_feature (379)..(379): n is a, c, g, or t
  misc_feature (413)..(413): n is a, c, g, or t
  misc_feature (445)..(445): n is a, c, g, or t
  misc_feature (458)..(458): n is a, c, g, or t
  misc_feature (470)..(470): n is a, c, g, or t
cccgtgnctccaatttggacgtgataaaacagcgtcgtaaagttttcaccccagagttctctgcttagtaagaagtagaaggaagtctaaacctaagtcatctgatttcagagcccatataattaaatgctctgaatgcagattcccagggtggtggtttctatgagagcctgtcacatacgatgtaggacactgcttctctgtaacgtgtgcaagattcccttgatgatggtgactatgagagcctgtcacatacgatgtagggacagtgcttccctgtaacagggcgcaagattcctgtggatgatgggtgactatggaggagcctgtttacatatggacgtagggacagcacttctctgttaacnttgcacaaggntccccgtggatggatggtgactattgaggagccntttcacatgttgatgttagggggcagtgcttncccctgttaaccntggcaccaaggnttcaccccg

SEQ ID NO: 6740 - DNA, 459 bp, Homo sapiens
  III.368 (R49298)
  misc_feature (391)..(391): n is a, c, g, or t
ttttttttttttagagacagggtttttccatgtttcctaaacttgtctcccactcctgagctcgagcaatctgcctgccccaacctcctaaagtgtagagctgtgtttttagtctttttttgagctgttttacaatccagtgttgaattgataagtttggattcactctgatatttgcagatttaacatcctacttcacaagatgttcatagccttgaaccattacagccgctgcctcatccatctctgctcatatccttgatccaatacaacaggccacctcttccatctatggctcatagcctaaactaataggaaggccaggaggggaaggaaatggggaggccaacggtgagttccaggaaccacacggtttttattaagggggccntaagggaaattttaaaaaataggccaaggttttaaaattggaggttttgttaatagggttgtggccta

SEQ ID NO: 6741 - DNA, 446 bp, Homo sapiens
  III.369 (R52108)
  misc_feature (335)..(335): n is a, c, g, or t
  misc_feature (350)..(350): n is a, c, g, or t
  misc_feature (384)..(384): n is a, c, g, or t
  misc_feature (401)..(401): n is a, c, g, or t
  misc_feature (419)..(419): n is a, c, g, or t
  misc_feature (429)..(429): n is a, c, g, or t
tttttttttttttttttttttttgcaaaaccaaaagcagtggacatttattccttaacttttgtgcaagagtgtaaagatgcatttgaaagaacctgatggctagagcatcagccatggctttcaggttggcctagtttacaattaggaaaagaaggggggaaaaaaggtaacttgcctagttcacatgaatgatgtttctggcaaacacagttgtttacaagtttcaagctatattttactagggtcaagggaagacttcaaaaagccacatacagtacaatttaaaattgtgtgaacatcctgcaaatgttagtgcaaagtaattatgtaggnctctccaaacaaggnctgtgctcttgtttcccgggtttggggcaatgtntcctcttttataaattncaatccccagaaggtttnaactttaccnaattgggcaatgccccc

SEQ ID NO: 6742 - DNA, 485 bp, Homo sapiens
  III.370 (R52205)
  misc_feature (382)..(382): n is a, c, g, or t
  misc_feature (392)..(392): n is a, c, g, or t
  misc_feature (411)..(411): n is a, c, g, or t
  misc_feature (445)..(445): n is a, c, g, or t
  misc_feature (476)..(476): n is a, c, g, or t
aacagaatagctcgggaatggactcagaagtatgcgatgtaattaaagaaattattggataacctctacaaataaagataggggaactctgaaagagaaagtccttttgatttccatttgactgctttctatgagcccacgcctcatcttcccctgtgcacatgtttacctgatacagcagtgctgcgtgttgtacatacttggaacaacaaactagaaatactgtacttctgtaccaacattgcctcctagcagagaagtgtgtgtgtgacaagccagttctacaggcattacctaggtgtgagactaaaagcttttcttattgacttaaatttgggataacagcaaggtgtgaggggggtggtgggtatgggtgtgtgcntgggtggggnaaggaaagggctccacttnacctataggggggattattttttaaggtggggantccctttttaaactccaaaaccggttttggnaaaaggcca

SEQ ID NO: 6743 - DNA, 260 bp, Homo sapiens
  III.371 (R31198)
  misc_feature (167)..(167): n is a, c, g, or t
  misc_feature (201)..(201): n is a, c, g, or t
  misc_feature (251)..(251): n is a, c, g, or t
gttttattcccttgcctcatgtcagagaagaaattattcaatgatacctgttagagcacagtaaggcagactttattcaagacctcattgcaatggggtcttgcaatgggagagagactggggttcaactctggaatacagcgtgggcagggtagggaatttatagnctaaggggccagggttgggggttagtgggatggnaaattacttaggggggaacatttgggggggtaggggggatttttggcctnaaccctccc

SEQ ID NO: 6744 - DNA, 281 bp, Homo sapiens
  III.372 (R31257)
  misc_feature (53)..(53): n is a, c, g, or t
  misc_feature (263)..(263): n is a, c, g, or t
gcatgaccagttggccaggctccccaaaagcctgaaaatatcgagaatgtttntcggtatgaggagggtggaaatgagaatttggagcagggatgagtgacaaagattctttgcttggccaaactttagtcaggcttctgagccttctcccaggcccatctgtgcacttcattataaaatccagtttttgcaaaataaccctgctaagtcagtgtagccagaaacccccatccttgatatctgatcatccttgatatctgatncggttcctcatccaccac

SEQ ID NO: 6745 - DNA, 373 bp, Homo sapiens
  III.373 (H11482)
  misc_feature (284)..(284): n is a, c, g, or t
tttttttttttgagttttaaaattctttatttaaaaatctctaactgtaatgtttcataaaaaatatacacgtttctatttacatattccattaattctattagtttgaattagattttaagtccaattttgaaaagcttgcagaatttcttctgaaattacttaaaattactgtatgcataaacttacaaaaacatatggctataccaagggcagaggaaaaggaaaaaaagtgaagtgggctacaaaggtcccggggggcatcacctggctcacctaggganccgggagtactgggatactgttccgttactgggtaacctatctgggatgtaaagggttcataaggttacaatgctttttttgttttaaa

SEQ ID NO: 6746 - DNA, 472 bp, Homo sapiens
  misc_feature (415)..(415): n is a, c, g or t.
  misc_feature (428)..(428): n is a, c, g or t.
  misc_feature (444)..(444): n is a, c, g or t.
  misc_feature (469)..(469): n is a, c, g or t.
  III.374 (H11838)
acaataggccatctgcaggctgaggagcaaggagagccagtccaagctccaaacttgaagaattcagagtccgatgttcaagggcaggaagcattcagcatgggagaaagatgtaggctgggaggctaggccagtctctcttttcacatttttctgcctgcttacattctagccatgctggcagctgattagattgtgcccattcgggttaagggcgggtcttcctttcccagcccactgactcaaatgttaatctcctttggcagcaccctcacagacacacccaggatcaatactttgtatccttcagtccaatcaagttgacactcagtattaaccatcacagtaacgtacaaaaagcaacatattatttagttaaggtatcttgatgggcttttttaaaaatttctaaaanttgttttttaatntttacttgggggaccntttcatttaaaaagaattggccacnttt

SEQ ID NO: 6747 - DNA, 372 bp, Homo sapiens
  III.375 (T84563)
  misc_feature (111)..(111): n is a, c, g, or t
  misc_feature (122)..(122): n is a, c, g, or t
  misc_feature (309)..(309): n is a, c, g, or t
  misc_feature (325)..(325): n is a, c, g, or t
tgaaacagaatggggggagaggactggaggtacaagtggggtctccactttccacagacatagcttggtttaactctcatcttttcagtgtggcaccctgccttcgatcangcctgccaggntcctcctggtccacaagcctttttccctgtccagataataagcttagttgccttcctcagtaggaaaggagaggttttcctacaagtatggagtaggaaagaggaactaggaatcttaacacttgttaaccaactttgcaacccttccttcttattgggaaagcctcacttctgggaaattcctganccgaattaccctcctnccaatttccagagtctttaagggtttttctcctgttaaaccgggttg

SEQ ID NO: 6748 - DNA, 462 bp, Homo sapiens
  III.376 (T90987)
  misc_feature (6)..(6): n is a, c, g, or t
  misc_feature (7)..(7): n is a, c, g, or t
  misc_feature (8)..(8): n is a, c, g, or t
  misc_feature (330)..(330): n is a, c, g, or t
  misc_feature (349)..(349): n is a, c, g, or t
  misc_feature (390)..(390): n is a, c, g, or t
  misc_feature (427)..(427): n is a, c, g, or t
  misc_feature (443)..(443): n is a, c, g, or t
ttgatnnntgcaagttgaaaatttattttactgttgtcaaagctgtgacttgctttgggaagaggtggtggtgcacacacatgagcatcccaaccccagcacgctgcagctcattcccactccttgcagagagtcatttcttggccatccctcaggcttagagtgtacacatgggcaatgcagtctgcttgactgccccaggaagaaatccttgcaggctcctagatgtcctgaagactgcttggaaagggaatttggggaatcttttataaacagaatgtgatcccaaaagggatgggttcagactctagggtggggcatacccattgntttcaagagatctttgccnctatatggatggggagcagcctcaggagctagggccccctnttgcccagatctgaggttgatacttatggggaagganctacagtccaaagggncaacaattttcttgaaact

SEQ ID NO: 6749 - DNA, 403 bp, Homo sapiens
  III.377 (AA046116)
gaaagcaaaagggtattttaattacaaatatttcctactgtctgatgacccatccataacaactgagagttaaaagattacaggtgattttgacatttaattaaattttatcagtagattataatccaaaataaaatttctgaacaccctgtcatttacatcataatccaacaccaacagcaacaaaaaaaggtggtgtggaaaataaggctctagagattatccatgtcattgctgtggatcttcacaactgtgtaaaagtcactaggcctttggtgctttaatatcatgtacagttatgagatgtgtttaaatagcaaacttgctgttcttggaacctactgtgttgaaaagaaaaataaaaaaattttttttgggctcattgacttcttttaaataattt

SEQ ID NO: 6750 - DNA, 243 bp, Homo sapiens
  III.378 (AA046224)
  misc_feature (160)..(160): n is a, c, g, or t
agaagatctcacaattaaaagatgaattaaaaacatcttctgcagtctccacaccatctaaagtgaagacaaaaacggaggcccagaaggagttattagatactgaactggacctccacaagaggctgtcctcaggagaagacaccacagaattacgganaaaactcagtcagttacaggttgaggctgcacggttaggtattttacctgtgggtcgaggaaagaccatgtcctctcaaggtc

SEQ ID NO: 6751 - DNA, 399 bp, Homo sapiens
  III.379 (H47113)
  misc_feature (1)..(1): n is a, c, g, or t
  misc_feature (11)..(11): n is a, c, g, or t
  misc_feature (30)..(30): n is a, c, g, or t
  misc_feature (31)..(31): n is a, c, g, or t
  misc_feature (35)..(35): n is a, c, g, or t
  misc_feature (36)..(36): n is a, c, g, or t
  misc_feature (37)..(37): n is a, c, g, or t
  misc_feature (40)..(40): n is a, c, g, or t
  misc_feature (43)..(43): n is a, c, g, or t
  misc_feature (69)..(69): n is a, c, g, or t
  misc_feature (77)..(77): n is a, c, g, or t
  misc_feature (78)..(78): n is a, c, g, or t
  misc_feature (81)..(81): n is a, c, g, or t
  misc_feature (94)..(94): n is a, c, g, or t
  misc_feature (132)..(132): n is a, c, g, or t
  misc_feature (136)..(136): n is a, c, g, or t
  misc_feature (219)..(219): n is a, c, g, or t
  misc_feature (333)..(333): n is a, c, g, or t
  misc_feature (349)..(349): n is a, c, g, or t
  misc_feature (368)..(368): n is a, c, g, or t
nggatagcttngaaaagatatatatatatnngggnnnagngtngggcagctggactcagtttagatgancccaattnngtnggcaacatccaangcatcgtaatcaggagccagtcgaacatatgccttctncggnccatcaggccgaatcagggtgttgaccttggccacatcaatgtcatacagcttcttcacagcctgtttaatctggtgcttgtnggctttaacatccacaatgaacacaagtgtgttgttgtcttctatcttcttcatggcagactcagtggtcagcggaaacttgatgatagcatagtggtcaagcttgtttctccnggggagcgcttttccnaggatatttggggctgtcncccggagtcgcagtgtctttcggccccccga

SEQ ID NO: 6752 - DNA, 389 bp, Homo sapiens
  III.380 (H47207)
  misc_feature (1)..(1): n is a, c, g, or t
  misc_feature (193)..(193): n is a, c, g, or t
  misc_feature (312)..(312): n is a, c, g, or t
  misc_feature (338)..(338): n is a, c, g, or t
  misc_feature (349)..(349): n is a, c, g, or t
  misc_feature (362)..(362): n is a, c, g, or t
  misc_feature (376)..(376): n is a, c, g, or t
naagcgaagaaggaagctcctgcccctcctaaagctgaagccaaagcgaaggctttaaaggccaagaaggcagtgttgaaaggtgtccacagccacaaaaagaagaagatccgcacgtcacccaccttccggcggccgaagacactgcgactccggagacagcccaaatatcctcggaagagcgctcccaggngaaacaagcttgaccactatgctatcatcaagtttccgctgaccactgagtctgccatgaagaagatagaagacaacaacacacttgtgtttcattgtgggatgttaaagccaacaagnaccagatttaaacagggctttgaagnagctgttttgncattgatgttggnccaaggttcaacancctcgatttgggc

SEQ ID NO: 6753 - DNA, 453 bp, Homo sapiens
  III.381 (W57892)
  misc_feature (354)..(354): n is a, c, g, or t
cacagtttcccattatgccgttggagatgagtgggaacgaatgtctgaatcaggctttaaactgttgtgccagtgcttaggctttggaagtggtcatttcagatgtgattcatctagatggtgccatgacaatggtgtgaactacaagattggagagaagtgggaccgtcaggacgaaaatggccagatgatgagctgcacatgtcttgggaacggaaaaggagaattcaagtgtgaccctcatgaggcaacgtgttatgatgatgggaagacataccacgtaggagaacagtggcagaaggaatatctcggtgccatttgctcctgcacatgctttggaggccagcggggctnggccttgttgacaactgccgcagacctgggggtgaacccagtcccgaagcactactggccagtcctacaaccagtattctcagagataccatcagagaa

SEQ ID NO: 6754 - DNA, 435 bp, Homo sapiens
  III.382 (W57893)
  misc_feature (415)..(415): n is a, c, g, or t
tgtggaatgtaaatcttttattaaaacagttgtctttccacagtagtaaagctttggcacatacagtataaaaaataatcacccaccataattataccaaattcctcttatcaactgcatactaagtgttttcaatacaattttttccgtataaaaatactcgggaaaaattgataaataacaggtaagagaaagatatttctaggcaattactaggatcatttggaaaaagtgagtactgtggatatttaaaatatcacagtaacaagatcatgcttgttcctacagtattgcgggccagacacttaagtgtttcgggtgactttcctacttaaaattttggtcatatcatttcaaaacatttgcatcttggttggctgcatatgctttcctattgatccccaaaccaaatccntagaatccactttcatttaa

SEQ ID NO: 6755 - DNA, 469 bp, Homo sapiens
  III.383 (T97564)
  misc_feature (249)..(249): n is a, c, g, or t
  misc_feature (329)..(329): n is a, c, g, or t
  misc_feature (377)..(377): n is a, c, g, or t
  misc_feature (388)..(388): n is a, c, g, or t
  misc_feature (400)..(400): n is a, c, g, or t
  misc_feature (410)..(410): n is a, c, g, or t
  misc_feature (419)..(419): n is a, c, g, or t
  misc_feature (432)..(432): n is a, c, g, or t
  misc_feature (445)..(445): n is a, c, g, or t
  misc_feature (454)..(454): n is a, c, g, or t
taccttctaaatattcctcaaatccatctacttttattcattcctatctctatcatcatctcttgcctggacttttgccatggcctcgctgtttgtctatctgagctcattctggcttcttgcttgttagttcctcaccctgcacccagagtgatcttttcaaaatatgtggttatgttataccctggcataaagcccttcatgggcccttaaggataagggcaaactccttaacatgcccaaaggccngggcatggatttgggctcccattcaaacatataggcacactcattcattggctccaggttccattcaatcttttttatanttggctctgtttccttctggcctctaggggtctttggcaggtgggggnttccgggggcngggggaagggtncttttccctncccattttnggggcataaaccnactttaaacaggnaggtttttncaaatttcccggttt

SEQ ID NO: 6756 - DNA, 365 bp, Homo sapiens
  III.384 (T97611)
  misc_feature (22)..(22): n is a, c, g, or t
  misc_feature (288)..(288): n is a, c, g, or t
  misc_feature (327)..(327): n is a, c, g, or t
  misc_feature (340)..(340): n is a, c, g, or t
  misc_feature (347)..(347): n is a, c, g, or t
ttattggttgtgttactttttncctgaatattttcattctaaggttgtttgaatctatggacacagaactcatggaaacagaaggcgaactgtgcaggatttggaattgtactgcttcgacttgagtcttggctctaatctttcactaaccttgtaaatagaggcaaaatacttaatctctcaattttcctatctttaaaatagggaggaaaatagtatgcacctcatagggttgctttgaagactaaataagtaaactcatgtaaattgcttaaaatatgcctgccnatgtaaggtgttcaataggtaaataagggacccggtacnttattatgagganttaaatnttaaactattattacctt

SEQ ID NO: 6757 - DNA, 521 bp, Homo sapiens
  III.385 (R61112)
  misc_feature (310)..(310): n is a, c, g, or t
  misc_feature (336)..(336): n is a, c, g, or t
  misc_feature (355)..(355): n is a, c, g, or t
  misc_feature (406)..(406): n is a, c, g, or t
  misc_feature (414)..(414): n is a, c, g, or t
  misc_feature (443)..(443): n is a, c, g, or t
  misc_feature (455)..(455): n is a, c, g, or t
  misc_feature (482)..(482): n is a, c, g, or t
  misc_feature (487)..(487): n is a, c, g, or t
  misc_feature (507)..(507): n is a, c, g, or t
  misc_feature (512)..(512): n is a, c, g, or t
  misc_feature (519)..(519): n is a, c, g, or t
tcatagtcttaaatagtgattaaatttctctagaaagaagttaacagctcattagaaaagttttaacctgtgaaataagtatttttctcaacattctttaaagtttttatataagttaacactaggtaaacattctgcatactagaagtcagtttattacaaatacatgtcaaaaataaagattatacaaggcaccaaactactagatttgggcattaaaacaaatgtttatttctaatcacaacaaaattattaatgaataaatgttcttgctttgtatgggaaatacaattctttattaaagttaacnggaagggactgatcgtttgtacccgntaaaggggaggaacacacngggttaatatcttcttgtgggggttaggggggtgggaccccttcttggccnttcacttntccagggttaccgggcttccaatttaggnctttttggggcnccccctcctgtgggggggggccccccngcggnggttcccgggggggttggantcttncgggggncc

SEQ ID NO: 6758 - DNA, 491 bp, Homo sapiens
  III.386 (R61834)
  misc_feature (303)..(303): n is a, c, g, or t
  misc_feature (370)..(370): n is a, c, g, or t
  misc_feature (390)..(390): n is a, c, g, or t
  misc_feature (451)..(451): n is a, c, g, or t
  misc_feature (463)..(463): n is a, c, g, or t
ttttttttgctaaagttgaagtagatttttatgattgacattttattttctgagtttgaaaataagctttttcctgcagagagtcttggccttcacctacacacccaagctaaaaatcctaggtgtaaaaaaactcaaaacatcaatgcttattttagcacgtcaatctttgaaggaatgcttaaaatttccttaccaagccatgaatctactttatctctagtatttaggaccatgagtagtttattttccttattgtgggcttgaaaaataggaaggaaaactgtaattgcaggctatgtncaaaatcaaccacattcagggttatttccttaataaaatactggatgggaatgttatatattgggcnggattattccacggcttgcngttattactgtagggtgtgtgtgtgtgtgtgtgtgtgtgtgtgggagaagggtcaccacancagtacattctnccctttaagggcattctctcttcagcct

SEQ ID NO: 6759 - DNA, 467 bp, Homo sapiens
  III.387 (R83836)
  misc_feature (376)..(376): n is a, c, g, or t
  misc_feature (448)..(448): n is a, c, g, or t
tggtctccgagtcactcatgtgcaaaattgcagattttggccttgctagagtaattgaagataatgagtacacagcaagggaaggtgctaagttccctattaagtggacggctccagaagcaatcaactttggatgtttcactattaagtctgatgtgtggtcctttggaatcctcctatacgaaattgtcacctatgggaaaattccctacccagggagaactaatgccgacgtgatgaccgccctgtcccagggctaacaggatgccccgtgtgggagaactgcccagatgagctctatggacattatgaaaatgtgctgggaaagaaaaggcagaaggagagaccaacgtttgactacttacagagcgtcctnggggtgattttttacacagccacggaagggcattaccagcagcagcctttagagcacagggagacccttccntttggcaggggttggtttt

SEQ ID NO: 6760 - DNA, 420 bp, Homo sapiens
  III.388 (R83837)
  misc_feature (1)..(1): n is a, c, g, or t
  misc_feature (2)..(2): n is a, c, g, or t
  misc_feature (4)..(4): n is a, c, g, or t
  misc_feature (8)..(8): n is a, c, g, or t
  misc_feature (363)..(363): n is a, c, g, or t
  misc_feature (368)..(368): n is a, c, g, or t
nntncttntttaagtaagccaaagcacaaagaaatgtcatgctatgtatatatccggttattttagctttataaatgagtttagttctgcaattattggggattcattgcaatggtctctgaaactttgagtcctatgtccatttgtaaacatagagctagttgggtgcatttttggagagaatagatgttttcttctcaaacggctgcactcagatgttgtcaagcagagcaagattaccagctgctgaggacaagtccaagttgcaactgagtgggagaatccatctaagagtacagaatactttcccatttagaggggtgttcttcctgaggtaatttaggcctctatttcagggatccnggggnacgggcaggatgatcccccgcacatggaaatcataaggtgccaaccagtgat

SEQ ID NO: 6761 - DNA, 398 bp, Homo sapiens
  III.389 (H75516)
  misc_feature (232)..(232): n is a, c, g, or t
  misc_feature (379)..(379): n is a, c, g, or t
  misc_feature (384)..(384): n is a, c, g, or t
  misc_feature (393)..(393): n is a, c, g, or t
tataataacattctttaatgaagatataaactcatcaagtaaattacaaaggaaacaaaaataacaaggacaaaattacatagtttgatacctcatgagacataattaaattcttctcaaagtttagctgaacaactaactatacagtaatattttcaaaaacctgtttgttttatacaaaagaatataccctaacacagtagagtctcataatgccttggcgaaacaccantttgatgctttaagattttaatgtattgttaacaaattttcaaactcagggcaagtttaggaaatgtcttcatattgaattccttcaactctgcgtccttttaaggggccagtttcatgacgttgtaggctggaaaaagtcttctcnttggngggattctnggggt

SEQ ID NO: 6762 - DNA, 354 bp, Homo sapiens
  III.390 (H75517)
  misc_feature (57)..(57): n is a, c, g, or t
  misc_feature (64)..(64): n is a, c, g, or t
  misc_feature (266)..(266): n is a, c, g, or t
  misc_feature (271)..(271): n is a, c, g, or t
  misc_feature (283)..(283): n is a, c, g, or t
  misc_feature (288)..(288): n is a, c, g, or t
  misc_feature (299)..(299): n is a, c, g, or t
ctacttttacggaattaagcagagaaaatgatgaagagaaaggtagttttatttttnatttttnctttttttaaacatagatgcttttatattggctttgttaaaaatgcaacttgtcaacatatctgagaataagacatcgaatgtgtctgagttacattgttcttattaatttaatgaaaagggtaatactaatgaattgattgggatagggataggctgaagccacaaggtaacaaaactgactacaattaacttaaacaatnggganatatcttggccntaatngggatccccgnggggtagggtgggttctgcctggccatctgggcccggggtggctggcccaaccct

SEQ ID NO: 6763 - DNA, 186 bp, Homo sapiens
  III.391 (R11186)
  misc_feature (71)..(71): n is a, c, g, or t
  misc_feature (99)..(99): n is a, c, g, or t
  misc_feature (121)..(121): n is a, c, g, or t
  misc_feature (152)..(152): n is a, c, g, or t
aaaaaacacacaacaaaccaccatggttaaaggccataatcagcatcaaccaaatgaaccagccacttggntacagtagctgataacaacactagtggntattattgcttataccccaagntcatttatacatccattatattttggcaagnttacaatcaaatggggagctttgggttgtaaaat

SEQ ID NO: 6764 - DNA, 385 bp, Homo sapiens
  III.392 (R11238)
tctttataatcattagaagggcttattaaatcccagcattatccagggcaaactcactggtggacctgaatacataagataccattagtgcgctggtgttcggattgctgtattagggtttacatctctcagtattccttgaacttgccatgcttctgcatgcagattcttcactgacttgaattgagatgggcaagggaaaaggtccctgggactccctcctgccatctacaggcttgtcacatcttcaccaccaggaaacaggcttcctcaggcttctcacctgtgggcccaactttcactttgtaaggacccatatttttaactcttcccgggggaaaattcatgttgctggcagaagtagggttaagggcagaccacccca

SEQ ID NO: 6765 - DNA, 467 bp, Homo sapiens
  III.393 (R18365)
  misc_feature (95)..(95): n is a, c, g, or t
  misc_feature (386)..(386): n is a, c, g, or t
  misc_feature (409)..(409): n is a, c, g, or t
  misc_feature (418)..(418): n is a, c, g, or t
  misc_feature (423)..(423): n is a, c, g, or t
  misc_feature (429)..(429): n is a, c, g, or t
  misc_feature (457)..(457): n is a, c, g, or t
tttacatatattttctggggtaagagcctctgaaatatcttatttatggttcactgaaaaagaaatagcctttaaaaagaggagtctgtgcgtantcttgtgaatctcacagagcattagatgttcgtgaagtgtccagcctcttcctgctctcaaggaacgcacatgcaggtggggtgacagtcccactgtggggtcgtggaaagggcaggcgtgaggaagccggagtatgatccagctcatccccctgggctctgcaacccagggcaggctgctctttccctagttgactcctttttctaacagggcataatgccattctattctctgtggattcttcgtggcaccatacagggttgggaactcaggaagagggaagggagggntgaggaggagggccctgttgttnttaggaaantaggntttcantagggaaggaaggacgggggcccaggantttcaggccc

SEQ ID NO: 6766 - DNA, 474 bp, Homo sapiens
  III.394 (R42569)
  misc_feature (463)..(463): n is a, c, g, or t
tttttttttttttaaagaaaataagtaaagtttatttctgtttaaagcacagtaagtttcaccatgaaaagttaacatacacatacaacaaacagtaagaacaaagtttcctttaatattcttacatttttggcatttagttgcacaaagttaggatggaacccactgtaggggacagaactcttaatagtgtcttagggatttttctcacattttgttaatctaactgggtgtgttgttatgatagaaagcagtaaggctccatgggtaatacttgttccctgtggacagaaggaaaggggacaaaggatgtggacatgggtcataacccctggcaacctccgaggatggctggctgtggtcctgtcccgggggggggcttccacttctttttagggggatgggctattattttaccccagttttacagcttacggggaaacacgtttgagggggccaggtnttcaattgaaa

SEQ ID NO: 6767 - DNA, 391 bp, Homo sapiens
  III.395 (H04648)
  misc_feature (53)..(53): n is a, c, g, or t
  misc_feature (294)..(294): n is a, c, g, or t
  misc_feature (322)..(322): n is a, c, g, or t
  misc_feature (337)..(337): n is a, c, g, or t
  misc_feature (385)..(385): n is a, c, g, or t
cctttaacaatgtctggatattttggaattaatatctcggacttctttctaanccacattggttcatcttgttcattatgaacagaggatctacttacaatgtactaaaatgttgttatgtattcaggaccattgaacattcaagttgtttatcattttctttgaccaccaacattgctgtaatgaatagggatttaagagcaaaagtaacgagaatacttgcttaaccacttatgaaaacatatcataaaagtagaacaatcaaaatggtggatgccatgagaaagcaagggnacaaaatggaagcctgggaccaataagnatatatccagggttnctatacacaaagtacacttcggtcagggaaaggattcagtccaaggcnctcagc

SEQ ID NO: 6768 - DNA, 522 bp, Homo sapiens
  III.396 (H04668)
  misc_feature (6)..(6): n is a, c, g, or t
  misc_feature (11)..(11): n is a, c, g, or t
  misc_feature (22)..(22): n is a, c, g, or t
  misc_feature (353)..(353): n is a, c, g, or t
  misc_feature (489)..(489): n is a, c, g, or t
  misc_feature (512)..(512): n is a, c, g, or t
  misc_feature (518)..(518): n is a, c, g, or t
gttttntagtnattttgtgttncaacttttcatgtaaaattttaattatttttgaatgtgtggatgtgagactgaggtgccttttggtactgaaattctttttccatgtacctgaagtgttacttttgtgatataggaaatccttgtatatatactttattggtccctaggcttcctattttgttaccttgctttctctatgggcatccaccattttgattgttctacttttatgatatgttttcataagtggttaagcaagtattctcgttacttttgctcttaaatccctattcattacagcaatgttggtggtcaaagaaaatgataaacaacttgaatgttcaatgggnctgaaatacataaccaccattttagtacattgtaaagtagaatcctctgttcataatgacaaggtgacccaatgtgggataggaagaagtccgaggtattaatccaaaatatccaggcattgttaaaggggaaaantgcaattaaatttttggtccatnacctangggg

SEQ ID NO: 6769 - DNA, 391 bp, Homo sapiens
  III.397 (R11737)
  misc_feature (256)..(256): n is a, c, g, or t
  misc_feature (356)..(356): n is a, c, g, or t
tacattttaaaataacaaacacccacatttgtgtttgaacccagataatactaatttttctccactgagagacccaaggtgccttccctgagctgcacagatacctccttgggaggtacgttaggggcccagcagatcccatctcagaatctcaccctaccttggtgtgtccagactgtcggggagaatatggagtgagaggtgaggcccagccagatctgaagcctcacccccacccatcatctatcctcctggnatctttcccctgcttctgggttaattagttgtttggattgatctgctgaacccagaggggttcttagaagcagttgctttatttccattttcaggtaggnaagaaggtttttaagggtattggggtccggggtta

SEQ ID NO: 6770 - DNA, 325 bp, Homo sapiens
  III.398 (R41376)
  misc_feature (88)..(88): n is a, c, g, or t
ttttttttaaagcagatcatctctccaaatcatcacttctatcaagcctattgcttgagcagtgttatagcactcagccctcaggganaaggataagtcttcaccattgtcacacgtagcacacacatattcagccatatcatgctgaatgggaatacaggactttgtagaaacagaactgattcctgcagaatatcctgagatacttatcaagctgttaaaggagacatcagtcttttgtctgtattgcccttggacacctcctcaagggaaagtatctaggaaattctttgtcttctggaaggaaccctcaggacctcttagg

SEQ ID NO: 6771 - DNA, 200 bp, Homo sapiens
  III.399 (AA707935)
tttttattgatttctgctctaatctttattgtttccttctgcttgctttgagtttcatttgcttttttctagttgcatagtggaagcttaagttatttacttgataccatttttctttctttaaataggcaataaaagctataaatttccatctaagcactgttttagctgtatcccataatttttaatatgttgtgttt

SEQ ID NO: 6772 - DNA, 472 bp, Homo sapiens
  III.400 (H02588)
  misc_feature (6)..(6): n is a, c, g, or t
  misc_feature (11)..(11): n is a, c, g, or t
  misc_feature (408)..(408): n is a, c, g, or t
  misc_feature (438)..(438): n is a, c, g, or t
  misc_feature (454)..(454): n is a, c, g, or t
  misc_feature (470)..(470): n is a, c, g, or t
ttgagnccatnatcttgctctgtcgcccaggctggagtgcagtggtgcgatcttggctcactgcaaactcttcccaccgggtttcacgccattctcctgcctcagccttccgggtagctaggattacaggtgcacgctaccacgtccggctaatttttgtatttttagtacagacggggcttcatcatcttggccaggctgatttcgatctcctgacatcgtgatctgcctgcctccccctcccaaagtgctgggattacagggcgtgacaacgcacgcctgggccaaggcctggctcctcttatctataccccctacccctggcaggctgtgccgggggaaagctggggcagtttccctcctccgaggcccctgtacataccatgaattgtgggggaccttcagagnttttcaattttcgggaaaatagggtcctgntgggggttacaaggtngggagtttgaagaggntt

SEQ ID NO: 6773 - DNA, 440 bp, Homo sapiens
  III.401 (H02677)
  misc_feature (114)..(114): n is a, c, g, or t
  misc_feature (195)..(195): n is a, c, g, or t
  misc_feature (365)..(365): n is a, c, g, or t
  misc_feature (391)..(391): n is a, c, g, or t
  misc_feature (418)..(418): n is a, c, g, or t
cacaatgaaaaatatcgcccatgatcaacgtgttctcttctggggaagggggcaaaggcagggtgaatcactttcttaaaaagtatagctcaagttgggagtgcagagggaatngggagaaaacccttccgctgcctgtgtcgaagtgcaggagcccccacccccatactcacctgagtccagcccctctgggcnaagaaggggtgcatgaactccccttagtccacaggcgcctccctgtggcccaaggccttcttcacactccatcttgtagccccagcaggagctattttccgaaaagtgaaaagctctggaaggtcccacaattcatgggtatgtacaggggctcggaggaggggaaactngcccagcttttcccccggcacagttntcagggggtaggggggtataggttagnagggagcaggcttttgccaggg

SEQ ID NO: 6774 - DNA, 627 bp, Homo sapiens
  III.402 (AA071012)
  misc_feature (559)..(559): n is a, c, g, or t
  misc_feature (573)..(573): n is a, c, g, or t
gtcctatgagtttaagaatgtagacagggagaggttaattatttcattttagaaggaagaaactgtgcttctgagaggttaagatcttcccacgttctcgcagaaagtaagtgggaaggcaaacatgagaacattttgtttgcctccagggtcaagagtttgcactctcccttctcaggatccccaagaagagagttcaagtgcctcaatgggttgaaatgataggaagtcaggggtgttccacggacacaaggtcaaaggtttggaagttttttttttttttttaattcttaggacggagaacgtgaccttgaagaagccagaaacttttccaaaaaatcaaaggagagtgtttcgagctcctgatctgaaaggaatgctagaagtgtttagaggtgaggagagctagatcaacaacagggttatggaattcaagtggtgttagggtgctaaatagggaagagggtgcagtttccaaatatggatagaggggataggggaggatagatattgtctgctgctgatgggattatatttaatgggaaatgctagtgctgtnccactcatcatcancaattactgcctacataggcataccactcttcctaactggaggaaatgattcag

SEQ ID NO: 6775 - DNA, 584 bp, Homo sapiens
  III.403 (AA071223)
  misc_feature (471)..(471): n is a, c, g, or t
  misc_feature (528)..(528): n is a, c, g, or t
  misc_feature (555)..(555): n is a, c, g, or t
  misc_feature (572)..(572): n is a, c, g, or t
  misc_feature (577)..(577): n is a, c, g, or t
caacatttcatgtgctgtcacatcaactgtagaaaaattaacaggtcagctaagggatataatgtaactttatttgtgatatgagagaaatcttgataaagacttgagagaaaactgggaggaaccttgtttagaagttataaggaggggtaagttatgtgtgtcttggaaggagaatcataaatcttaaaacatgagcctaatagagaacataaaattctaaaagataaagataataataatgataagccgcaggtggcttatgataatgtgacttctccttaccccagtagcgtcggacatctgtcagctctgaaatgataaaaatgcacaatattgaatacaaacaaaggagtcagcactgaaattcattttctctccagattagggaaagagtaggtatgccctatggtagggcagtaaattgctgaatgatgagatgaaacagccacctagccatttcccattaantataatcccatcagcagcagacaatatctatcctcccctatcccctctatccatatntggaactgcacctcttcctatttagcncctacaccacttgaatncatancctgttg

SEQ ID NO: 6776 - DNA, 441 bp, Homo sapiens
  III.404 (R59212)
  misc_feature (299)..(299): n is a, c, g, or t
  misc_feature (383)..(383): n is a, c, g, or t
  misc_feature (414)..(414): n is a, c, g, or t
  misc_feature (426)..(426): n is a, c, g, or t
ttttttttttttcaccattaacgtcatatttattgttatttaactgctcaggaaaacatatacaggtatatacaatatgcaggaatacagaagactgcactttacatatttttttaaaaaagaaagaaaaaaataacactcaatttcatgagctattgtcacagtcttccaaccaagcatttcaggaaatgaatttcttttaagagtcaaaaaaggattacagggattgcctaacacacaggcagagttaagttttcatattttacatgtgcaataacattttcgttttctttcccaangagtttgctatgcagtactggattaccagtgttcgggggtctagtgtgtaggggtgtgtttttcatttacttttattctttccntttaaaccaattttaatggaaataacatccntttgcttagggnattttttaaagccgt

SEQ ID NO: 6777 - DNA, 454 bp, Homo sapiens
  III.405 (R59272)
  misc_feature (69)..(69): n is a, c, g, or t
ttctggaatattgccgggtgaaagtccaattgtcatcacaatgttatatattgacaccccagtgtcatncagtcaggcaggagcaaacaatgaatgcccctcttaggtattccgcctgggattttgttttgtctgttccctaagaaaatatattttcattcctgcaaacacagtgctcagccttcagttcccttccacttgagttctctcttctcctgctggaagccgcccctctctgcgatggacgtgaggacgtgtccagctctgctctgtgggaaggagttggaatgttcgacagcagtgttttctctccttttctgggcctcctcgcaaatgcccaggccctgcattttcacgctgtgctaaagcagcctttggtctgcatgggggatggtgtgctcccagcctgcagtctttgggagcaaggctgcttgcccgtggccttgggtgctgg

SEQ ID NO: 6778 - DNA, 366 bp, Homo sapiens
  III.406 (H93407)
  misc_feature (37)..(37): n is a, c, g, or t
  misc_feature (62)..(62): n is a, c, g, or t
  misc_feature (342)..(342): n is a, c, g, or t
  misc_feature (350)..(350): n is a, c, g, or t
ttataggacaaatcaagttttatttgacaataatatnaaattccactcattagttcctgganatctgttgatcacataataagacaacctgcccatacagcaaaaacatattgaagatacatggcccgccactcttctggagcttagagcaagagcagacattaagacaggggagagacggccaggcaaggtagaagctggctctgtccacgtctctcaagtcatgagtactctgggctgaatttcacgtaaggccttttgggcataatgaattaggaggcggggaagagggactttgtgcaggatacagttcatgcttccgtgggctactttctccacatncagtccanatcctcgtcttggact

SEQ ID NO: 6779 - DNA, 434 bp, Homo sapiens
  III.407 (H93408)
  misc_feature (341)..(341): n is a, c, g, or t
  misc_feature (423)..(423): n is a, c, g, or t
tcatttctccagcactaaaatgggagtggagagttggggtggaaataagacatccttaaaaggttaaattgtctgcaaagcacctagcccagtgccgagctcccagtaggtgttcagtaaagcttagtgcctgactttctgaacactgattcctcctgtttggagtcactgggatactctcattgccgttgggatgttcctcactccttcccagttcgtggctgaggcagaacccagactgaagagggaagagacattccagaggaggattgccttcgtcagggtaaggggtgggctgctcaggggccctaccctttcacccccttctgtatcagattggncctccccactccccatctccacttctgcgtgtacaatctttccataatccgcaagtttccacttggcactctttcttggcancctgggcaaag

SEQ ID NO: 6780 - DNA, 526 bp, Homo sapiens
  III.408 (AA284288)
gtagtgttttcttaaaataagactgatttaaagcttatctagcagatagttttaaacacagattaaagaaaactagattgggtacaaatgtttggcttcccaagtgagaggccacatgtacatcaacagtactttccaacttaacactacgacccccattttgatggtgacagaattggaaacgggggacagtgatgagagcatcaccctcctgtcacttacagatggtcccttgggactggatttttcctgggagaccattgaccccaagaaccctgaaaacatgatatgcggtaagcaatggattagattgctgttagctttctggtaggtgaggggacctgaaaagaacagggccaccagcatttcaagggaacagccattccaattttcagaggttgattctcttggaattatttgacctgaggccataggaaagcaaagggttaaaaaagtcacgtttgacatgccagccttggggagctggacattggatacccgtgtgagcctcgtggaacaccataat

SEQ ID NO: 6781 - DNA, 663 bp, Homo sapiens
  III.409 (AF086215)
ttttttttttcaaaacagttttgcttttggttgatttgccttggggaatattgctcactggggtcctcatgcatcagtttagaaataaagacttaaattcttttactttaattaatcaactctaattttcacatttgattatggtgttccacgaggctcacacgggtatccaatgtccagctccccaggctggcatgtcaaacgtgacttttttaaccctttgctttcctatggcctcaggtcaaataattccaagagaatcaacctctgaaaattggaatggctgttcccttgaaatgctggtggccctgttcttttcaggtcccctcacctaccagaaagctaacagcaatctaatccattctgctaccgcatatcatgttttcagggttcttggggtcaatggtctcccaggaaaaatccagtcccaagggaccatctgtaagtgacaggagggtgatgctctcatcactgtcccccgtttccaattctgtcaccatcaaaatgggggtcgtagtgttaagttggaaagtactgttgatgtacatgtggcctctcacttgggaagccaaacatttgtacccaatctagttttctttaatctgtgtttaaaactatctgctagataagctttaaatcagtcttattttaagaaaacactac

SEQ ID NO: 6782 - DNA, 457 bp, Homo sapiens
  III.410 (W02702)
  misc_feature (355)..(355): n is a, c, g, or t
ttcaaaacagttttgcttttggttgatttgccttggggaatattgctcactggggtcctcatgcatcagtttagaaataaagacttaaattcttttactttaattaatcaactctaattttcacatttgattatggtgttccacgaggctcacacgggtatccaatgtccagctccccaggctggcatgtcaaacgtgacttttttaaccctttgctttcctatggcctcaggtcaaataattccaagagaatcaacctctgaaaattgggaatggctgttcccttgaaatgctggtggccctggttcttttcagggtcccctcacctaccagaaagctaacagcaatctaatcnattctggctaccgcaatatcatggttttcaggggtcttgggggtcaatgggtctccccaggaaaaaatccagttcccaagggacccatctgtaagtgacagg

SEQ ID NO: 6783 - DNA, 473 bp, Homo sapiens
  III.411 (W25655)
  misc_feature (254)..(254): n is a, c, g, or t
  misc_feature (466)..(466): n is a, c, g, or t
gtagtgttttcttaaaataagactgatttaaagcttatctagcagatagttttaaacacagattaaagaaaactagattgggtacaaatgtttggcttcccaagtgagaggccacatgtacatcaacagtactttccaacttaacactacgacccccattttgatggtgacagaattggaaacgggggacagtgatgagagcatcaccctcctgtcacttacagatggtcccttgggctgggatttttcctggnaagaccatttgaccccaagaaccctgaaaacatgatatgcggtacaggaaatggattagattgctgttagctttctgggtaggttgaggggaccttgaaaagaacagggccaccagcatttcaagggaacagccatttccaattttccagaggttgaatcccttggaattatttggacctgagggccatagggaaagccaaaggggttaaanaaaggcc

SEQ ID NO: 6784 - DNA, 716 bp, Homo sapiens
  III.412 (AA020783)
  misc_feature (194)..(194): n is a, c, g, or t
  misc_feature (203)..(203): n is a, c, g, or t
  misc_feature (259)..(259): n is a, c, g, or t
  misc_feature (312)..(312): n is a, c, g, or t
  misc_feature (318)..(318): n is a, c, g, or t
  misc_feature (350)..(350): n is a, c, g, or t
  misc_feature (430)..(430): n is a, c, g, or t
  misc_feature (503)..(503): n is a, c, g, or t
  misc_feature (515)..(515): n is a, c, g, or t
  misc_feature (592)..(592): n is a, c, g, or t
  misc_feature (635)..(635): n is a, c, g, or t
  misc_feature (658)..(658): n is a, c, g, or t
  misc_feature (677)..(677): n is a, c, g, or t
  misc_feature (684)..(684): n is a, c, g, or t
  misc_feature (701)..(701): n is a, c, g, or t
actgggctgcctcagggggagaggtagccataataactttatgggttggtttgtggggagggcagggtggggagtccttgatgagatcgcacagctgccaggaaggcttcatcgaatgtgtcacgcaggttcatggccagagtgtcggtccagaaggtgttgtcacccaggtgccgcttcctgggcactttccncacatgctnatggggtaaaagccctggggcaccttcattctgtatggccatacacgtgggtacangcatgcgcaaagcaccctcaaaaggcagccgcggcacgggcgccacccagtgncggtcnactgtgtgcagccgcgcaccgccgtgcccatnaggcctcacctccaggaagctgctgaagtcgtgctccggaatggggtcttggatgcacgcccaggcggatgccttgcgantggctgatctgggtggtggggggtctggcggggttgttgctaacattccacattgtggggccgcttgaccgtnggcttcctgtanatgggctttggcatctccgtgggctgtggaatgcattgcaggcgtgcatccacagagggttggaaactccctggaangctgcgattcccgttgctctggggtcttgaaaagccgtgccgngcttgcttggtatttgagaccanaaattgcctggttcacttnccttgancatttctgaaacacttnctgaaatttgtgcct

SEQ ID NO: 6785 - DNA, 657 bp, Homo sapiens
  III.413 (AA020896)
  misc_feature (27)..(27): n is a, c, g, or t
  misc_feature (346)..(346): n is a, c, g, or t
  misc_feature (510)..(510): n is a, c, g, or t
tgggaatcttaagtgaatcctgaaatnggggagggctttggggctgctgactccggcacaccgggtctgtttcagttccatttctctccagttctcagccctatcctcctctgatgtcagggtcaccagtcctcagagtcacacactgtccagaggaggcaaggcccatctgtttcctgtagctctaaccttttccagaagctccttgcatcttccctcatctcttatggcctcaattcgatcaagtgtccattctcgttcctttagctagaactaaaggaaagccatatgctgactgacttaggtctggggcaaggtctgatggaattatgatgattggcttaanccaatcagagcctgtgcctggagctgggtcaatctccaaagcctctgattgcttagcaacagtctgggatagtgagacaatggcggtgggggaggttctatgacaatatatggaaggctccgtggaggcaaggacagagctagattgagttgctgccaccgggnctggagagccagccaacttgtatcctccctacatgacttcttcaaggcccacacttccaagaagcgtgtccacatcaggccatccagtccttctgcttctccttccagggtcaagatgcagtgtgacttccatttgcctttccccat

SEQ ID NO: 6786 - DNA, 285 bp, Homo sapiens
  III.414 (R18923)
  misc_feature (138)..(138): n is a, c, g, or t
  misc_feature (272)..(272): n is a, c, g, or t
  misc_feature (277)..(277): n is a, c, g, or t
aggcggttgcagttcgagccaaggcctttggattcagcgtcatattttatgacccctacttgcaggatgggatcgagcggtccctgggcgtgcagagggtctacaccctgcaggatttgctgtatcagagcgactgcntctccttgcactgcaatcttcaacgaacataaccaccaccttcatcaatgactttaccataaagcagatgagggcagggagcattcctttgtggaacgcagcccgttggggccttgggttggaacgagaaaagnctttngggacaaa

SEQ ID NO: 6787 - DNA, 443 bp, Homo sapiens
  III.415 (R43294)
  misc_feature (137)..(137): n is a, c, g, or t
  misc_feature (314)..(314): n is a, c, g, or t
  misc_feature (413)..(413): n is a, c, g, or t
  misc_feature (421)..(421): n is a, c, g, or t
  misc_feature (428)..(428): n is a, c, g, or t
ttttttttttttttttgcatcatcagagggttttactgaacttacaaccgacttgcccgctcagtatgcagttcagatgtgagaggcgcttctctgtacagcagcctgtactgtcttcaatcctatgcgtgcaggtntctaccacaggcaaacagttttctccccattttgtagtaatgtgattttcctattagcaaaaagaggtcaccagcccctgtagacttaagggactcaagtcacaggatggggatttcctcttaatattttttattttgttgtttgaactcttgatgcaacattgtaggagcagggtnttcaggacctgtctgtgcccaaggggactgataaagggaaaaagctctatttattctttttgtggatttgatgcacaggatgaaaaacttaacacacantaacaggngttgggnccgttaattaaatct

SEQ ID NO: 6788 - DNA, 215 bp, Homo sapiens
  III.416 (H27730)
  misc_feature (79)..(79): n is a, c, g, or t
gtgtcttattctcccactgacagaaagattttcctgctttcaggaaacaagctttatgtggcccttttctggtcccctngcttagactacagttctgtgtggatttgtctgattgcttcagacatgtaatgttgtttttcatccttgggcagcttacatcagttgttttgtttgattagaaaaaggaagcagacacacacacacacacacacaca

SEQ ID NO: 6789 - DNA, 321 bp, Homo sapiens
  III.417 (H27731)
  misc_feature (84)..(84): n is a, c, g, or t
  misc_feature (122)..(122): n is a, c, g, or t
  misc_feature (125)..(125): n is a, c, g, or t
  misc_feature (305)..(305): n is a, c, g, or t
  misc_feature (312)..(312): n is a, c, g, or t
cttttttcagtttaagagaacaactctggagacagaaatggcttggctttccgacgcaatgagtaattaaactctattcgtccnccggaagatttccatcccaactgaacgttatgtaattnccnggaaacagcaggctcgtggaggcaaacgggggacagtgagactattctaggtacagaggactggagggagacatgcgagggaagaggaaagaggagagtaaggaactggatggaaacaggattactggagaatcaaaggggaaacagttacatcacatccagactgcagtcacctcaggntgctaancccgggggg

SEQ ID NO: 6790 - DNA, 327 bp, Homo sapiens
  III.418 (H51648)
  misc_feature (126)..(126): n is a, c, g, or t
  misc_feature (254)..(254): n is a, c, g, or t
ggcacgagattctttctaggtcccttcctcttgccttcgtggacctggaacagtgatctggcctcaggggaccagcatgcttttcttcagcaagaatttttatatttcttcaatttcttgtctttnggattactattcaggacaaccaatctctcaagaaagggtcaagtacctatcctagctgtggaacctacagaaccttacttcagaagcccaatatgagtaaacaggaaaaggggaatattctctggttnacaatggtgtggctgtcactgcatgtctgcaaaggaaaaactacaatgactgcatgttaaacacagcatcaca

SEQ ID NO: 6791 - DNA, 457 bp, Homo sapiens
  III.419 (R97219)
  misc_feature (120)..(120): n is a, c, g, or t
  misc_feature (293)..(293): n is a, c, g, or t
  misc_feature (336)..(336): n is a, c, g, or t
  misc_feature (371)..(371): n is a, c, g, or t
  misc_feature (419)..(419): n is a, c, g, or t
  misc_feature (435)..(435): n is a, c, g, or t
  misc_feature (441)..(441): n is a, c, g, or t
caaagctggtttcaagccactttcctagtctttgttgaatggtaaatgttccttcaagagttgcaggaagagcatgccttgcttgcgccatggggtggggctgcaccatcttgcttgctncgtgtgcttgtattgttcatcatacacaattcatggtttcttttcaggaatttttgaagtcgcttgtccattctatgaaggttagtttggttaaaattaaagcattttaactgagtacttacaaactgtagtagacccagataggctgaaagaaaagtaggatggagggcttngcttcggtgaggaccaagcctcttctgtcagccactcctgtgncgactgttcaggcccaggggatccacttcaggganggtaccagtgttcaaccttcaatattaactgttatgcaaagcttccgntctcttttattttagnccagangcaattattttaatgg

SEQ ID NO: 6792 - DNA, 412 bp, Homo sapiens
  III.420 (R97220)
  misc_feature (346)..(346): n is a, c, g, or t
  misc_feature (353)..(353): n is a, c, g, or t
  misc_feature (372)..(372): n is a, c, g, or t
  misc_feature (390)..(390): n is a, c, g, or t
  misc_feature (398)..(398): n is a, c, g, or t
  misc_feature (403)..(403): n is a, c, g, or t
  misc_feature (409)..(409): n is a, c, g, or t
actgtgaactaccactgtaaatattggtgataattaccgtgactcaaaggggttgtgctatccttgggcttcttttcctcttcagcttgctcctagaatacagaaaatggtgtttagatggtattgctggataattgttggaaacactgaaaactaatgttcctttttgcaggaaggaaagttatgaagatcctcgtcactgaggcggacaacgcacacaatacccagagtcttccggtgggtgcccgggaggggtacacatgatccatttgggacgtgggagggaatccattaaaagtattgcttctgggctaaaataaaagggacagggaggcttttgataacngttaatntttgagggttgacacaggnaccttccccgagttgggncccggggnccganagtcgnaca

SEQ ID NO: 6793 - DNA, 382 bp, Homo sapiens
  III.421 (H62284)
  misc_feature (1)..(1): n is a, c, g, or t
  misc_feature (91)..(91): n is a, c, g, or t
  misc_feature (93)..(93): n is a, c, g, or t
  misc_feature (111)..(111): n is a, c, g, or t
  misc_feature (112)..(112): n is a, c, g, or t
  misc_feature (318)..(318): n is a, c, g, or t
  misc_feature (352)..(352): n is a, c, g, or t
ntttttcttagacccaaagtgtcaagtgcacacctgccctgggtctttgtgtttgctgtttccatttcctggagtgcagctggccctgatntncatgtgaccagcaacttnncatctatgtctcaactcaaatgtcacctcttcactgaccatcctgtctaatgattccctccatctcatcccactcaccccagccactctctgttccattgccctgttttattttcttcacggtgcatcattctttgcaatgactttatttacttgttcattatttgcttctctcactaggagtgaacactccatgagagcaggganctgttttgccttgttcaccactttattcccagtnggctaggaaccacgtctggacacagagtag

SEQ ID NO: 6794 - DNA, 447 bp, Homo sapiens
  III.422 (N70020)
acagaaatgttaggcctcggcacagtcggctcacgtctgtaatcccagcactttgggaggccaaggcgggaggatcacaatgtcaggagattgagaccatcctggctaacacagtgaaaccccgtctctactgaaaatacaaaaacattatccgggcatggtggtcgggtgcctgtagtcccagctactagggaggctgagacaggagaatggcgtgaacctgggaggcaaggcttgcagtgagccgagattgcaccactgcactccagcctgggccacagagcaagactccgtctcaaaaaaagaaatgttatgaaaaatttggaaatattcgtcactagctgtatgaccttttgaaaaaggtccgcctaataccatgctcatctataaaattggggtatgatgattatcaatttacaggattgtggtgcattttaaatgaaacaa

SEQ ID NO: 6795 - DNA, 498 bp, Homo sapiens
  III.423 (W00906)
gactcggactcaatctgcccacattggcttcccaaagtgctgggattatagacatgagctaccacacccagcctgtatggtgttgtgaataatatgctgttatgaacatgggcacactaaacaccattcaacttaaaaaaataatcaaagccttaagaactgaaccaaaatggcttaggtgaaaataaaataccaaactctgctctaagaaaaggaaagaacattcactgaattataccttcagcaataagcacttaatggaacttgtttcatttaaaatgcaccacaatcctgtaaattgataatcatcataccccaattttatagatgagcatggtattaggcggacctttttcaaaaggtcatacagctagtgacgaatatttccaaatttttcataacatttctttttttgagacggagcttggctctgtgggcccaggctggaagtgcagtggtgcaatctcggctcactggaaggccttggcctcccaggtg

SEQ ID NO: 6796 - DNA, 404 bp, Homo sapiens
  III.424 (R43210)
  misc_feature (205)..(205): n is a, c, g, or t
  misc_feature (279)..(279): n is a, c, g, or t
  misc_feature (285)..(285): n is a, c, g, or t
  misc_feature (351)..(351): n is a, c, g, or t
  misc_feature (364)..(364): n is a, c, g, or t
  misc_feature (379)..(379): n is a, c, g, or t
tttttttttttgcaagagaagaagagtttttattctcgaacaagaggctgggtccagctcagaacacactctttccctcctcctcccgctcagaccctgccaccaggtagacgaacagtgtagacgcccctgcaggtgtgaagagtaccagagaccccagctaggggaagctggcaggagttgggggggttcctcccagatggantgaatggaaagaataaatcagggacttaaaggcgcaggcaggagatggagaggggtccatgggtggctcaaggntgggcntggcctctctgagccttagtttcctcatctgcaaaatggaagcagtcacgttcattcaatcatggnccaaacagggttnaggccttgcaagttncccgacaaaggcgcctaacacgggg

SEQ ID NO: 6797 - DNA, 289 bp, Homo sapiens
  III.425 (R52991)
  misc_feature (172)..(172): n is a, c, g, or t
  misc_feature (214)..(214): n is a, c, g, or t
  misc_feature (230)..(230): n is a, c, g, or t
  misc_feature (260)..(260): n is a, c, g, or t
  misc_feature (272)..(272): n is a, c, g, or t
caatgtctgtgggaggaagaagtggctcctcttccccccagggcaggaagaggccctgcgggaccgccacggcaacctgccctacgacgtgacctccccagcactctgcgacacacacctgcacccagggaaccagcttgctggcccacccttggagatcacgcaggaagcnggcgagatggtgtttgtgcccagtggctggcaccaccaggtnaacaaacctgggattnacaccatcttccatcaaccacaactgggtnaatgggtttaantgggccaacatgtgggc

SEQ ID NO: 6798 - DNA, 175 bp, Homo sapiens
  III.426 (R52992)
  misc_feature (17)..(17): n is a, c, g, or t
  misc_feature (26)..(26): n is a, c, g, or t
  misc_feature (124)..(124): n is a, c, g, or t
tttttttttgcctttgnaagcacttncacatgattcactgaacagagcagacagaaacccctgcccttcttgggggcttccatcctagacaagtgccagcggcccagttgatgccacgggaggncaatgtgcatagccatggcacgtgcgtccctgtggattcggatgcctcctc

SEQ ID NO: 6799 - DNA, 408 bp, Homo sapiens
  III.427 (R60674)
  misc_feature (396)..(396): n is a, c, g, or t
cagagaggggtgccccaactgtctggagatttcagaagggagggggctgctgctggattagtccctagcagcagagtggagatctctaagggtctgcatttgtgttatccctgggaaggaaaggataggaccactccatctgttttccttgacatcagagatcacaagtcaggatttcagtggttcctggatagggtgtccttataattgattgtccaaacagggaccctgagaatgaaggggaagctaatcagatgggaagctcagattgtgctctaaaacccagatgtatgttcaccctgtacctgggagctcctggggaaggagggacaagtgggcaggagccattaaggttgttgttcaatggctgctctgccaaactcacctttgagactngttagaggcaag

SEQ ID NO: 6800 - DNA, 269 bp, Homo sapiens
  III.428 (R60675)
  misc_feature (53)..(53): n is a, c, g, or t
  misc_feature (174)..(174): n is a, c, g, or t
  misc_feature (228)..(228): n is a, c, g, or t
ttttttttttttttttcagaaaaaggagacacattgacctggagtttccccgnttagacaatttcatatggttcaacttatccgcactttgtccagtaggtcacatgataggagatggcagtctcctgccatctggcaaaggtcagaaggcaggaggggcctggtccagggatntcccaggcatggggcacagatggctagtggcagccacaggaggagaatgacttntccctgcatgcaggaaacctgggagaaaggcacgcagccaa

SEQ ID NO: 6801 - DNA, 456 bp, Homo sapiens
  III.429 (R26707)
  misc_feature (11)..(11): n is a, c, g, or t
  misc_feature (174)..(174): n is a, c, g, or t
  misc_feature (314)..(314): n is a, c, g, or t
  misc_feature (355)..(355): n is a, c, g, or t
  misc_feature (419)..(419): n is a, c, g, or t
  misc_feature (448)..(448): n is a, c, g, or t
agtggctgaanattagaaaggtttatttcttgctcatgatacatctccactgttggtcagctgggactctaccttatgtcatcctcattccaagaaccaggctgatggagcagccattatagttctggaggctgggaagtccaagatcacaagaccagcatctggcgagacttncttgtgcaccatctgtgaattctttcttgtgatgatgtcaagaatctgggggaccggctgtggctgggggtctcgttggcatccagaaaccctcctgagccctcttgtgacaccagggattttgcccgacagagcaaatntgaggagagggcatcagaattttctcttaaggactttcttnagcttgaggcaacccatctaggaagggtttgggagctgccttttattttgggtggggggaattnttaagggggaaacccagcccccacaccancccagtga

SEQ ID NO: 6802 - DNA, 420 bp, Homo sapiens
  III.430 (R26930)
  misc_feature (262)..(262): n is a, c, g, or t
  misc_feature (290)..(290): n is a, c, g, or t
  misc_feature (298)..(298): n is a, c, g, or t
  misc_feature (348)..(348): n is a, c, g, or t
  misc_feature (369)..(369): n is a, c, g, or t
  misc_feature (374)..(374): n is a, c, g, or t
  misc_feature (383)..(383): n is a, c, g, or t
  misc_feature (409)..(409): n is a, c, g, or t
  misc_feature (414)..(414): n is a, c, g, or t
cagaaaccgccactgctacacatcttatggaatgactcacgagttctccttcactgattaatccttttcctcatcccttcctccccctcccatctgccctaagaacaaagagcttgtaaaccagtaaatttggcagagctcaagagctctgggccgtgagcaagcctccgatattctggtcccctgaacccgccttttaaatgcttattctgtctctttctaactcctatgtctccaccagactcagggtacccactgggtnggtgtgggggctggtttccctaacattncccaccanataaagcagctccaaccttctaggatgggttgcttcagcttcaggaagtncttaggaggaaattcttgatngcctnttccttcanattttgctctggttcggggcaaatcntgggngttcac

SEQ ID NO: 6803 - DNA, 376 bp, Homo sapiens
  III.431 (R94556)
  misc_feature (273)..(273): n is a, c, g, or t
  misc_feature (275)..(275): n is a, c, g, or t
  misc_feature (341)..(341): n is a, c, g, or t
  misc_feature (355)..(355): n is a, c, g, or t
gagagtagactcttgtcccccaacactcagtgttcccattacatttgctgagagctaaggagccctcacagacaagatacctattacaggagagcttgactcctcaactccccctagcagaggaataatttcggaagagtatacatgaagtatactatgtcccccgactgtttactctgagttcctgctacttttgctgagagagctaaggacccatcacagacaaaatccctattacaagataactcgactacccattttcaacagagaggnangatagtggtggtattccctaggaattcttaattgcaaaagagggcattttttctgggccgagtgtnggtgggctcacggnctggtaattcccaggcacttt

SEQ ID NO: 6804 - DNA, 293 bp, Homo sapiens
  III.432 (R94557)
  misc_feature (11)..(11): n is a, c, g, or t
  misc_feature (35)..(35): n is a, c, g, or t
  misc_feature (75)..(75): n is a, c, g, or t
  misc_feature (102)..(102): n is a, c, g, or t
  misc_feature (203)..(203): n is a, c, g, or t
  misc_feature (237)..(237): n is a, c, g, or t
  misc_feature (281)..(281): n is a, c, g, or t
cccaggttggnctcaaactcccggcctcaagtttncttttagcctcccaaagtgctgggattacaggcgtgacanccacactcggccagaaaaatgcctctnttgcaattagaattctagggaataccaccactatcttcctctctgttgaaaatggggtagtcgagttatcttgtaataggggattttgtctgtgatggggnccttaggctctctcaggcaaaagtaggcagggancttcaggaggtaaaacagttcgggggggacataggtattacttncatggtattact

SEQ ID NO: 6805 - DNA, 399 bp, Homo sapiens
  III.433 (H39210)
  misc_feature (147)..(147): n is a, c, g, or t
  misc_feature (266)..(266): n is a, c, g, or t
catgcctgctcctgcctctctcccaacatgtttccagcaagtagatgcccctgtgtgtgttttcccttgccttgtttcctgccttatatcttgtatttcgacttattacagagttgagggttcttgcttaatttagatcaagtatanaatttgtatgacttcaagtctcattttatctgaaaggtttttttctcatttaatctgatgtggcattttcgtcatctgaagcatgagtgacaagttgggaatgatgtggtgatttagantgcagtattggccaagtccaagttgtcaacttaagcgtctgtttaccaaagaccgggaacaggggcccaaacatgtccagtcctcttcttccctctgctggaacctttggggacactcaagggtacagtttga

SEQ ID NO: 6806 - DNA, 412 bp, Homo sapiens
  III.434 (H39211)
  misc_feature (240)..(240): n is a, c, g, or t
  misc_feature (303)..(303): n is a, c, g, or t
  misc_feature (377)..(377): n is a, c, g, or t
  misc_feature (391)..(391): n is a, c, g, or t
gagacatacagaagcagtgctttctctgggcagcctcatggaccagatcagtgtcaaactgtacccttgagtgtccccaaaggttccagcagagggaagaagaggactggacatgtttgggcccctgttcccggtctttggtaaacagacgcttaagttgacaacttggacttggccaatactgcattctaaatcaccacatcattcccaacttgtcactcatgcttcagatgacgaaantgccacatcagattaaatgagaaaaaaacctttcagataaaatgagacttgaagtcatacaanttttatacttgatctaaattaagcaagaaccctcaactctgtaataagtcgaaatacaagatataaggcagggnacaaggcaaggggnaaacacacacaggggcatcta

SEQ ID NO: 6807 - DNA, 335 bp, Homo sapiens
  III.435 (H53730)
  misc_feature (221)..(221): n is a, c, g, or t
  misc_feature (227)..(227): n is a, c, g, or t
  misc_feature (231)..(231): n is a, c, g, or t
  misc_feature (236)..(236): n is a, c, g, or t
  misc_feature (262)..(262): n is a, c, g, or t
  misc_feature (306)..(306): n is a, c, g, or t
  misc_feature (317)..(317): n is a, c, g, or t
  misc_feature (323)..(323): n is a, c, g, or t
ctgaaatacttgggactagtagaagcatcttggatttgggatgtttttccaaattttggaatacctgcatacacacaataagatatcttggagatgggacccaagtttaaacacaaattcacttgtttcatatataccttatgcacatagcttgaaggtaactttatataacattatttttaataattttgtgcattgagaccaagtttgcataccttganccatcngaangcaanggtgtcattatctcagccactcatgngggtaatttgtggtgggttgatgtcaccatcattcctgactgantgtatatgctnccaatnagcagttatttt

SEQ ID NO: 6808 - DNA, 346 bp, Homo sapiens
  III.436 (H53731)
  misc_feature (64)..(64): n is a, c, g, or t
  misc_feature (131)..(131): n is a, c, g, or t
  misc_feature (144)..(144): n is a, c, g, or t
  misc_feature (294)..(294): n is a, c, g, or t
  misc_feature (341)..(341): n is a, c, g, or t
cacaacacagtttattcggtctccctaaaggaaaaaacccattttaaaaagccatccagcagantccacatccctagaaagacccacttcctggcccttcagctgcttctgtttctcttcacctacaaaantaaaattacagtntacaataaccttttaaaatacagcatcattaagtgggaaactgaaagcctgccattgttgttgccgtttaacagctgatacaggtttctgggtgatgctactgttgcctagctaccctgaccacattattttttcactgtatcagtgggngtgtcatatttttttttttgccatccttgttcctgtgcgagttatgncatat

SEQ ID NO: 6809 - DNA, 459 bp, Homo sapiens
  III.437 (H96240)
  misc_feature (411)..(411): n is a, c, g, or t
  misc_feature (430)..(430): n is a, c, g, or t
  misc_feature (436)..(436): n is a, c, g, or t
gctagtgaattcatctggtggaaaagtaaactgaggctgttcatcaccatcttcctgggatattcttgaataagggtcacttgcaactatatacagaatacgcagaagctgaaggacatcttctactccacaagagttctgtccattgcctgctttggcctgaggttgttcttttgttaaattaagaatatcactactttgaagagtagaaatggccccctggtttaacccagactttgttccatgctcacaaaaatccttatatgcagctatgagctgagaacaatttctgtttttcctaatacttttaattagtgccagttaatttccagtgggccgcaggaaagcagcgtctgcattcttcttgcaggtaaggttatcaagtcattcctttggggaattccatccagngccaagggactggctccanatggcnctatagaccagcaacccattttt

SEQ ID NO: 6810 - DNA, 208 bp, Homo sapiens
  III.438 (T85281)
  misc_feature (4)..(4): n is a, c, g, or t
  misc_feature (25)..(25): n is a, c, g, or t
  misc_feature (173)..(173): n is a, c, g, or t
  misc_feature (193)..(193): n is a, c, g, or t
tttnaattttttttttttataacanaatgggtttatatttaatatagtacttctcatcaggaggatgttactcagttaatataaagttttttttcaaaacattaaatctcttttccatgtcaatgtctatagtttttttttaacattaaattttttcccgcatttcagtattngatacactgaatacattttnctaaatgtttttccc

SEQ ID NO: 6811 - DNA, 377 bp, Homo sapiens
  III.439 (T85491)
  misc_feature (348)..(348): n is a, c, g, or t
ggcacgaggctgcttcctagaaggtcgtgtcacgtggaacctcttaatctcagcatccggagctccaggaagggaaaatttcaagtcagatagaattctatatataccatttctttggaaccttcagccctcaagattccaacatcatgacctcagtttcaacacagttgtccttagtcctcatgtcactgcttttggtgctgcctgttgtggaagcagtagaagccggtgatgcaatcgcccttttgttaggtgtggttctcagcattacaggcatttgtgcctgcttggggggtattatgcacgaaaaagaaatggacagatgtggactttgaaaagggcctactngagtccaaacctaaccctggaaaaccttt

SEQ ID NO: 6812 - DNA, 371 bp, Homo sapiens
  III.440 (N52437)
  misc_feature (268)..(268): n is a, c, g, or t
  misc_feature (298)..(298): n is a, c, g, or t
  misc_feature (318)..(318): n is a, c, g, or t
  misc_feature (337)..(337): n is a, c, g, or t
  misc_feature (350)..(350): n is a, c, g, or t
tcctgcatcacaaagtttttgactggctgtttcggaagactatgtgatagtttcctttaacagggggagaagagcccttcatgatggcgctgaagaatgatgatgcctgtgtgtgtgcggacctgaccaaattctcaggtttggggttaccctctagataaagattctgatggggagagggagctgtgatttagttaatgcttatctgactgcgccacctaccggctcggcagggaatatgctgcctgcctctgaggttttcaccganggctgggtacggtggctcacggctgtcatnccaggaactttgggaaggcngaaggtgggtggatgaacntgaaggcaggagnttcaagaacaggctgggcaaa

SEQ ID NO: 6813 - DNA, 541 bp, Homo sapiens
  III.441 (N75653)
  misc_feature (8)..(8): n is a, c, g, or t
  misc_feature (345)..(345): n is a, c, g, or t
  misc_feature (394)..(394): n is a, c, g, or t
  misc_feature (493)..(493): n is a, c, g, or t
  misc_feature (541)..(541): n is a, c, g, or t
gcgcgccnatcggaccagaagtctctctgggcaggtgtagtggtcttgctgcttctccagggaggatctgcctacaaactggtttgctactttaccaactggtcccaggaccggcagaaccaggaaaattcacccctgagaatattgaccccttcctatgctctcatctcatctattcattcgccagcatcgaaaacaacaaggttatcatcaaggacaagagtgaagtgatgctctaccagaccatcaacagtctcaaaaccaagaatcccaaaactgtgaaaattctctggtccattggagggtacctgtttggttccaaagggttccaccctatggtgaatntcttctacatcacgcttgggaattcattaactccataatcctgtttctngaggaaccataactttgatgggactgggatgtaagctgggatctacccagatcagaaagaaaacactcattttcactggtgctggattcatgaggttangcagaagcctttcagagggacttcacaaattccaccaaggaagggctn

SEQ ID NO: 6814 - DNA, 427 bp, Homo sapiens
  III.442 (R17444)
  misc_feature (351)..(351): n is a, c, g, or t
  misc_feature (400)..(400): n is a, c, g, or t
ggctatttctgccgggcgctccgaagatgcagctcaagccgatggagatcaaccccgagatgctgaacaaagtgctgtcccggctgggggtcgccggccagtgggcttcgtggacgtgctggggctggaagaggagtctctgggctcggtgccagcgcctgcctgcgcgctgctgctgctgtttcccctcacggcccagcatgagaacttcaggaaaaagcagattgaagagctgaagggacaagaagttagtcctaaagtgtacttcatgaagcagaccattgggaattcctgtggcacaatcggacttattcacgcagtgcccaattaatcaagacaaactgggatttnaggatggatccagttctgaaacagtttctttcttgaaacagagaaaatnttcccctggaagacagagcaaattgct

SEQ ID NO: 6815 - DNA, 413 bp, Homo sapiens
  III.443 (R42791)
ttttctttttttttatcttatcagcagaaaagttttattccttttgaggacaaacaattaaaccacatccaaggtcttaacttacagacagaaaccaaagtagccatttaaagcgttagatatcggatacaagacatacactggggagaatgcttcaccatctgaagctcacaccacaatggcccagtggacagctgtgcactctgcttgtgcttaagtgcctgggtgtggctgaggggaaggcgtgtctgcagaacagaagaacagctgtgtttcacaagtactgaagcattttagactgcatgggggggtatatattttcatgttgaagggaagaggggaaatcagcaaagtccctcccacagagcattaggctgccttgccggagagccacggcagagaagcggacttct

SEQ ID NO: 6816 - DNA, 521 bp, Homo sapiens
  III.444 (R66633)
  misc_feature (330)..(330): n is a, c, g, or t
  misc_feature (341)..(341): n is a, c, g, or t
  misc_feature (360)..(360): n is a, c, g, or t
  misc_feature (368)..(368): n is a, c, g, or t
  misc_feature (378)..(378): n is a, c, g, or t
  misc_feature (402)..(402): n is a, c, g, or t
  misc_feature (416)..(416): n is a, c, g, or t
  misc_feature (442)..(442): n is a, c, g, or t
  misc_feature (455)..(455): n is a, c, g, or t
  misc_feature (469)..(469): n is a, c, g, or t
  misc_feature (485)..(485): n is a, c, g, or t
  misc_feature (497)..(497): n is a, c, g, or t
  misc_feature (512)..(512): n is a, c, g, or t
  misc_feature (517)..(517): n is a, c, g, or t
gaagacacagcctcaccttctcacttgctgtggggtgaggggccatttaagtggactgggagacagtgcgcagtttgtatataattccctttcttgtggaacagaagactgaggcctgcaggttccgatgtgtctccatgggctgtgctcccctcttcctactgtcagtttctgaaacttctgactggcctcccagttatgcctcctcctcaagttcctgggcccgtggatgttaaagctgctcgattcccagggatctcggctgccttttcctctatcttgagccctataaatgcccacgggacccccaccaccagcctttttgaagtnggttccacagntcctgttcctggggacatnctgttcanttttggtcantaaaaccttgaggccagatggaanggaggcaaccttgnacaagacatttgccatggccccaggnggggttttgggtngggcctaacccgtnaccagttttttttttnagaaattggggnagtttttttttaggnaaaangttg

SEQ ID NO: 6817 - DNA, 419 bp, Homo sapiens
  III.445 (R67355)
  misc_feature (1)..(1): n is a, c, g, or t
  misc_feature (21)..(21): n is a, c, g, or t
  misc_feature (270)..(270): n is a, c, g, or t
  misc_feature (271)..(271): n is a, c, g, or t
  misc_feature (331)..(331): n is a, c, g, or t
  misc_feature (343)..(343): n is a, c, g, or t
  misc_feature (397)..(397): n is a, c, g, or t
  misc_feature (408)..(408): n is a, c, g, or t
  misc_feature (418)..(418): n is a, c, g, or t
ntttttcacttttaattgatntttttttaattaaaatactgttataccaagtggaatgcggcaaattcctggtacagggtggcataacaaaacagccatgtttacattttaaatatttacgataacttaaacatacagacacacatcatggtctttggcagaaaatgttcacagcacaaaaaatactttaaaagaaataccaaatattaatccaaaatatattaagttgttttttttctttcacaatattttttgcctttttttcctctnntttctttttgctttgtaaacaatgcacatggaaccaaatgtatttttcaggctttaaacnggggtggggggnttttttaaaaaaaattgcaattgtcccgccaatgccaaatgtttaaaaaggggnacttggggggnccctgggggnt

SEQ ID NO: 6818 - DNA, 418 bp, Homo sapiens
  III.446 (W16423)
  misc_feature (368)..(368): n is a, c, g, or t
ttttttttttcagcaaaacattttaattataattctgaaacctaatcagaaaaaaaatgtatttagtacaatggtaatccattaaatacaactcatcattgttaggctgtctctgttatggaaactatcatgttatgaaaaggttatgaaaaggttaggaaactatcatgttatgaaaagctaatattgaatcttttaaaaacaactgaactttaccattgctagagattttttgaaaagctgtagatacacacgttggagataaaacaatcaaaattacttcctgaagctagtttaacaggttctaaatgctaaacaaaaatttcatgaaatgactcaggtgataagattgtaaaaatttcttcccngaagctattttgggcagcctctagggatgtgaaattccccaaaggtgccc

SEQ ID NO: 6819 - DNA, 432 bp, Homo sapiens
  III.447 (W39214)
  misc_feature (40)..(40): n is a, c, g, or t
  misc_feature (430)..(430): n is a, c, g, or t
acaatgaggatttttgaaagacaatccaggggacataacngcagtgtgcatgcaggcaggaggcagggaaatgtgaaatggcaatgatctcttattgagttgggagattcaccttgtgtgcaaagaaacacagatagtagtaaaaattctgagtaactgagaaaataatcagttggaaatgattagataatatgggaaatttcacacagcattttgaaactggctacaatacatagaagtagtgaggaaagtgtgagtctctcaaatgaacaaataagcaaactgtaggaggttaaatactgacctaagttcacttagcttattagcaggagtagaagtcaaggattctggttcttattctaggacttttcccattagagcaccttagggaatttcacatccctagaggctgccaaaatagcttcagggnag

SEQ ID NO: 6820 - DNA, 296 bp, Homo sapiens
  III.448 (W92138)
  misc_feature (1)..(1): n is a, c, g, or t
  misc_feature (247)..(247): n is a, c, g, or t
ngcgaattaagacaaatatttcagactggtgtaaaggacaaatatgacaacgacgtcaaggactcgcatccgtcgctttctgcagaaaggggcttcttcggtcccgagctcgcgtccaggtggccaggcctctgccggcggtccagtggctgcgattatcgggttcggtaaatgcccccacgtgcttgtgtctctttccccccttttctgtatatagagtggtttcagattgtaaatagcgcgtcanagcgtctgtctaaatcatatatttttgtctaataaactaaatgaaatga

SEQ ID NO: 6821 - DNA, 363 bp, Homo sapiens
  III.449 (W92278)
  misc_feature (277)..(277): n is a, c, g, or t
  misc_feature (289)..(289): n is a, c, g, or t
  misc_feature (297)..(297): n is a, c, g, or t
  misc_feature (306)..(306): n is a, c, g, or t
  misc_feature (334)..(334): n is a, c, g, or t
  misc_feature (342)..(342): n is a, c, g, or t
tttgtcatttcatttagtttattagacaaaaatatatgatttagacaagttcgctgacgcgctatttacaatctgaaaccactctatatacagaaaaggggggaaagagacacaagcacgtgggggcatttaccgaacccgataatcgcagccactggagccgccggagaggctgggccacctggacgcgagctcgggaccgaagaagcccctttctgcagaaagcgacggatgcgagtccttgacgtcgttgtcatatttgtcctttacaccagtntgaaatatttgntcttaaantcccctcgnggccgaattctttgggctccgaggggcnaaaatttnccccatagtggagttcggtat

SEQ ID NO: 6822 - DNA, 432 bp, Homo sapiens
  III.450 (W96179)
  misc_feature (17)..(17): n is a, c, g, or t
  misc_feature (40)..(40): n is a, c, g, or t
  misc_feature (57)..(57): n is a, c, g, or t
gcgaccgctgccatggnaccgacagccgcgcgccaaggcntcctggcgaggcccganccctgcacctgcagacggggaacctgctgaactggggccgcctgcgagagaagtgcccgtccacgcacagcaggagcttcatgattgtatccaaaaaaccttgaatgaatggagttcccaaatcaacccagatttggtcagggagtttccagatgtcttggaatgcactgtatctcatgcagtagaaaagataaatcctgatgaaagagaagaaatgaaagtttctgcaaaactgttcattgtagaatcaaactcttcatcatcaactagaagtgcagttgacatggcctgttcagtccttggagttgaacagctggattctgtgatcattgcttcacctcctattgaagatggagttaatctttccttggagca

SEQ ID NO: 6823 - DNA, 432 bp, Homo sapiens
  III.451 (W96268)
cgctctgtctacgaggctggagtgcagtgatgtgatctcggctcactgtaacctccgcctcccgggttcaagcgattctcctgcctcagcctcccaagtagctgagattacaggcgagtgccaccacgcccagccaatttttgtattttagtagagatggggttttaccatgttggtcaggctggtctcaaactcctgacctcgtgatctgcccacctcggcctcccaaagtgctgggattacaggtgtgagccactgcgcccggatgaaatacaagagatttttaaagaagttttcaaactatttcaggttacagacacaaatttatagaattaaggagatttatagtgtacatcaaagttcatagcttatttatttgcaattttgtggttcgtaaactaatgaaagaattatactaaatgacctatatag

SEQ ID NO: 6824 - DNA, 408 bp, Homo sapiens
  III.452 (H37827)
  misc_feature (1)..(1): n is a, c, g, or t
  misc_feature (2)..(2): n is a, c, g, or t
  misc_feature (6)..(6): n is a, c, g, or t
  misc_feature (7)..(7): n is a, c, g, or t
  misc_feature (344)..(344): n is a, c, g, or t
nntgannggcagttatttatttgttcaacaaatatttattgttcatcaaagacgagccagattttatgggcatttgtgatggaggctggccttagctttaggagaaggaactccaagagcagtagtgatctctgagatcaccttgttcaccctcctcggggcagatttagtcaaatccatcccaagctcttcaaatataccagcaaagaggttttttttgttttgttttttttttgagacagagtctcactctttttgcccagggctgggagtgcaatgggcgcaatctcgggctcactgccacctccacctcccggggttcaagtgattctcttgcctcagtntcccaagtaggctggggattacaggcatgcggccaccacacccaggtaaattttgtatttttag

SEQ ID NO: 6825 - DNA, 572 bp, Homo sapiens
  III.453 (H37880)
  misc_feature (312)..(312): n is a, c, g, or t
  misc_feature (452)..(452): n is a, c, g, or t
  misc_feature (466)..(466): n is a, c, g, or t
  misc_feature (513)..(513): n is a, c, g, or t
  misc_feature (521)..(521): n is a, c, g, or t
  misc_feature (561)..(561): n is a, c, g, or t
accttttcgaatcagccgtttcccaagcctgggcaaagcaccctttgacctctggccagaagcctcccttctgtgcacagtagccagtttcacagatggagaagatgtctcagatgaagggagtgtccctgagatatcatccttttcttctgcctcgcctgaatcccccataaacaccagatgattgagtctaccttctttccttggcccgctccctttttcttctgcctcacttgaatcccccgtaaacaccagacgattgagtctaccttcttttcttggccacctccccattcacaactactttctcgntcccagaaggttgatcagatattctacaatcacagagtagcaagggacgtttgagatggggtatatcagtaagaagagggcacaagaactggctttgggagaccaaagcagttgttaaaaaatttctctttgctgggggncgggtgttggtggntcacaactgtaatctcgggcattttgggggggctgagacaggcgggntcacctgnagggccagggatttcaagaccagcctgggccaacattggnggaaaccctta

SEQ ID NO: 6826 - DNA, 512 bp, Homo sapiens
  III.454 (N40557)
  misc_feature (93)..(93): n is a, c, g, or t
  misc_feature (476)..(476): n is a, c, g, or t
cagaatgttctgttcacttgcaaaccatggctaaggtcaaacttgtagaaaataaaattccatgtaaatcccaaagatagggccccttgggtnttcatccccttctctttctgtgagcccaagctcctctcttttccttgggaatggagcccggcagaggcacagaaggaagcaggaggccaaatgctcctctctcactggggctctgggttggaggttggtgagttgttcaagatggcaacagcagcttccagacactctctgacaacacgaaggccacgtcatatgaggtctcagcttcaagtacaggagttgcagcccacttgtagggagcaggagctccaaggagtccacgcactcacatggggtaattgagcacaacatcctgtttggcaagttccaagcaacataggatcatcgaagaatttgctgatgctcacatcttcactgaggcccttcctacggcgggtttttgntcatgaattcccggggccaggtgaggagctggcttt

SEQ ID NO: 6827 - DNA, 436 bp, Homo sapiens
  III.455 (N46601)
  misc_feature (206)..(206): n is a, c, g, or t
  misc_feature (369)..(369): n is a, c, g, or t
  misc_feature (405)..(405): n is a, c, g, or t
gatactctgccctctgaggtggacaaggctcttcttggttcagtgaatgacagcatcgttcaaggtttccagtggggaaccagggagggccccctctgtgatgaattgattcggaatgtcaagtttaagatcctggatgcggtggttgcccaggagcccctgcaccggggcgggggcagatcatccccacagccaggagagtcgtnctactctgccttcctcatggctactcctcgtctgatggagccttactactttgtagaggtccaggcccctgcagattgcgtctctgcagtttataccgtcctggccaggcgcaggggggcacgtgactcaaggatgcacccatcccaaggcttcccctctgtnacaccatcaaagcttttaatcccggccaatcggaantcttttttgggttttgaagaactgattttcc

SEQ ID NO: 6828 - DNA, 429 bp, Homo sapiens
  III.456 (R14313)
  misc_feature (271)..(271): n is a, c, g, or t
  misc_feature (351)..(351): n is a, c, g, or t
  misc_feature (362)..(362): n is a, c, g, or t
  misc_feature (381)..(381): n is a, c, g, or t
agaccattgcactcatcacttatctgatggagcacaaaagactcaatggcccctatctcatcattgttcccctttcgactctatctaactggacatatgaatttgacaaatgggctccttctgtggtgaagatttcttacaagggtactcctgccatgcgtcgctcccttgtcccccagctacggagtggcaaattcaatgtcctcttgacttacttatgagtatattataaaaggacaaggcacattcttggcaaaggattcggtggganatacatgatagtgggacggagggcacccgaattgaaggaattcaccactggcaagctggacttcagggtctttggaacanttcactatgtnggggcccccaggaggggtncctctttgactggggggacccccgttggcagggattaagggttcccct

SEQ ID NO: 6829 - DNA, 428 bp, Homo sapiens
  III.457 (R40263)
  misc_feature (355)..(355): n is a, c, g, or t
  misc_feature (362)..(362): n is a, c, g, or t
  misc_feature (416)..(416): n is a, c, g, or t
ccacgctgttcacggtacagagcctcagtacccggacctcgttctgctgcccgatgcggtgagctcggtcttgggcctgcagatcctgatgaggattccagtcgctgtcaaagatgaccactgtatcagctgcctgaagatttaagcccaggccaccagctcttgtgctcagcaagaaaatgaaatactggggatccagggttcattgaatttcttcagcaaagcaggcacgatcttcagacttgggtgggtgccatcaaggcgtagggtaaagggaagttccgaaaaggcaaaataatcctccatggatgggtcatggaggaggatgttcatctgggcaggaaaaggcaggcantcgggtngatttagttcgcttcttcaatttttggggcaggaattacggttccaaggcaggnttcaaactttcc

SEQ ID NO: 6830 - DNA, 448 bp, Homo sapiens
  III.458 (T98279)
  misc_feature (220)..(220): n is a, c, g, or t
  misc_feature (334)..(334): n is a, c, g, or t
  misc_feature (374)..(374): n is a, c, g, or t
  misc_feature (426)..(426): n is a, c, g, or t
agggtctatatgtttcccaggctagtctcgaactcctggactcaagtgctcctcttgctttggcttcccaaagtgctgggattactggaattacaggaatgagccactgcacccagcccagatagtactttcttgcaggcactgtcctgtgcattgtgggatatttagcagcatccttggcctctatccactagacacgaacagtacccctttccacctnttgtgacaaccaaaaatgtctccagacactgccaaatgcccctgggagagtgattcccccagttggggaaccactgtcatggggggaaaaatattattataaaaggtgaacttnaaaaaggaaggtacatggatatccctctactacagggggnatccccttcaggatgggggagggggataaggggaaaaggattcccctaaggnaggccaaggaactaatggacat

SEQ ID NO: 6831 - DNA, 366 bp, Homo sapiens
  III.459 (T98334)
  misc_feature (3)..(3): n is a, c, g, or t
  misc_feature (4)..(4): n is a, c, g, or t
  misc_feature (6)..(6): n is a, c, g, or t
  misc_feature (7)..(7): n is a, c, g, or t
  misc_feature (8)..(8): n is a, c, g, or t
  misc_feature (11)..(11): n is a, c, g, or t
  misc_feature (12)..(12): n is a, c, g, or t
  misc_feature (32)..(32): n is a, c, g, or t
  misc_feature (36)..(36): n is a, c, g, or t
  misc_feature (37)..(37): n is a, c, g, or t
  misc_feature (46)..(46): n is a, c, g, or t
  misc_feature (47)..(47): n is a, c, g, or t
  misc_feature (50)..(50): n is a, c, g, or t
  misc_feature (51)..(51): n is a, c, g, or t
  misc_feature (65)..(65): n is a, c, g, or t
  misc_feature (68)..(68): n is a, c, g, or t
  misc_feature (82)..(82): n is a, c, g, or t
  misc_feature (85)..(85): n is a, c, g, or t
  misc_feature (97)..(97): n is a, c, g, or t
  misc_feature (120)..(120): n is a, c, g, or t
  misc_feature (134)..(134): n is a, c, g, or t
  misc_feature (246)..(246): n is a, c, g, or t
  misc_feature (298)..(298): n is a, c, g, or t
  misc_feature (315)..(315): n is a, c, g, or t
  misc_feature (321)..(321): n is a, c, g, or t
  misc_feature (347)..(347): n is a, c, g, or t
tanntnnnaannatgaaggcaggaatttgggnaagnnttggcaatnntcnncttaaatgtagcancancagctaatggtatncanctaataggtggncaggcctggaggattctaagcanctttatttacacgnccggtgatttggctaggaaggctggaaggctaagctccagttgggcctatgtctgcgccatggtctttcccagccatgacggttttagggtagttgggaactgagccagaanctataaagctttttatgacgttctaagacccaagccttgttctgtagtcaancaagcttactaaggtcncctganttaatgtagagggattttggagggantacccaagaataacttaat

SEQ ID NO: 6832 - DNA, 420 bp, Homo sapiens
  III.460 (R10259)
  misc_feature (407)..(407): n is a, c, g, or t
tcaagatggcggcgtctgtattaaacaccgtgctgaggcggcttcctatgctatctctcttccgaggttctcacagagttcaggttcccctccagactctttgcaccaaagctccctctgaggaagattctttgtcctcagttcccatttctccttataaggatgagccctgggaaatatctggaatcagaagaataccagggagcgatatggttctcgccccgtctgggctggactaccgccgcaaccacaagggtggtgtacccccacagcggacttggaagacatgtattcgtcggaataaagttgttgggaatccctggccccatttgttcgagatcacaagtttgcattgtttgacttttagggaacgtggaaggtttttgggagcaattttgttttgcggnccacaaggggtat

SEQ ID NO: 6833 - DNA, 309 bp, Homo sapiens
  III.461 (R10762)
tctagctgtcacccaggctggagtgcaggggtgtgactgcaactcactgcaacctccgcctcctgggatcaagtgatcctaccttagcctccccaatagttgagactacaggtgtgcaccaccacacccagctaatttttgtattttttggtaaagacgaggtttcaccatggtgcccaggctggtctcaaactcctgggatcaagtgatcagcccaccttggcttcccaaagtgctgggattacaggagtgagccaccacgcctgggcctctcttcccagtctacagctcctacagagcactctgagg

SEQ ID NO: 6834 - DNA, 377 bp, Homo sapiens
  III.462 (N59089)
acaaaatttatttagaaagttacatatgcacatatggtaaaaagttcaaaaagtggcaccaaaagatataacagtgaaaataaggctggttcttgtttttatccactgaggcaaatactgagtttattttcaaaggtattctcgtgtgggcacaatcacgcttgcatatgttaaaaaatacaaaatggtatcatacttgttcctctgcactttcttttttttctttttaacaacatatcttagaggtagtcctatttcaatttagctagacccatttcattctgtttaatggctacatttcgtttttcattgtgagactgtgccataatttatttaatcagtgccatattgaaagacatttggatcgtttcccagca

SEQ ID NO: 6835 - DNA, 371 bp, Homo sapiens
  III.463 (N59493)
  misc_feature (20)..(20): n is a, c, g, or t
  misc_feature (22)..(22): n is a, c, g, or t
  misc_feature (253)..(253): n is a, c, g, or t
  misc_feature (298)..(298): n is a, c, g, or t
  misc_feature (313)..(313): n is a, c, g, or t
  misc_feature (340)..(340): n is a, c, g, or t
  misc_feature (366)..(366): n is a, c, g, or t
gtgagccaaggtttccgaancncttgcagatatgactgtgacttacaaaatggaaaaagtaaacgagaaacacaatttgatatgatttaataaaagatttgtttccaccacttctcctgggaacctcagcacattttctttccactgacagttattatctctacctttattgaacaaagacacccggaacacagctgctgaggatcagtaaagaaaatcattcttttattaataagactgttattagcagganaaaaaaatccatgtttggggggtttgcactggagttaccgggccnttttggaagggaatntgggctggcttggtggccaacatttantttccagggcaatttccaggggccanatggg

SEQ ID NO: 6836 - DNA, 292 bp, Homo sapiens
  III.464 (T93605)
  misc_feature (223)..(223): n is a, c, g, or t
  misc_feature (228)..(228): n is a, c, g, or t
tgcatagggctcggcttggttatttggatggttggatgactggttatttggatggttggctggctggttatttggatggttggctggctagagaacacagttagttgagtggttatctggctgttccattggctgattgctttgctgtttggctgatttgttagatggttgactatttggtaggttggctggttagaagttaaattgtttgactatttgttgncagtnggttggtttgttgcatagttggttggctgtttggtaggttggctggtttattggttgactgaat

SEQ ID NO: 6837 - DNA, 297 bp, Homo sapiens
  III.465 (T93649)
  misc_feature (1)..(1): n is a, c, g, or t
  misc_feature (11)..(11): n is a, c, g, or t
  misc_feature (14)..(14): n is a, c, g, or t
nttgcggcacnganagaattacatcctggcaaccccctccataatggttatagccaatgatacagaggagtcatgactaaccctggtcaattccagtgtctgtcctgcacccaacaaaccatccaaccaaccagtcaaccagccaacaaacagccaactaaccaatcatgcatcaatcatgcaatgcaaccatcaaccaaccattcagccaacaaaccagccagtcattcaaacttctaattcagccacctattcagtcaaccaattaaaccagccaaccttaccaaacagccaacc

SEQ ID NO: 6838 - DNA, 513 bp, Homo sapiens
  III.466 (AA016271)
  misc_feature (202)..(202): n is a, c, g, or t
  misc_feature (283)..(283): n is a, c, g, or t
  misc_feature (327)..(327): n is a, c, g, or t
  misc_feature (465)..(465): n is a, c, g, or t
  misc_feature (512)..(512): n is a, c, g, or t
tttggagacagagtcttgctctgtcgcccaagctggggtgtagtggcatgatctcggatctcggctcactgcaactctgcctccctggttcaagcaattctcttgcctcagcctcctgagtagctgggactacaggtgtgcaccaccatgcctggctaattttttgtatttttaatagagacggggtttcaccatgttggcnagggtggtctcaaacttctgacctcagatgatccacccgcctctgcctcccaaagtgctgggattacaggcgtgacacccntcgcccagccctaaggccctttgcactctgacctcacctctcangaatcctcactctgccctggtccctccagccacaacagcctcttcaatccttgatagtcctcaaacaccccaaagtactctcccaatttgagagcttttgcatttgctggtaatctctggcctagaatactcttctanggacattaactcttctttaagttaaatgaagactttccttcctggang

SEQ ID NO: 6839 - DNA, 318 bp, Homo sapiens
  III.467 (AA017663)
  misc_feature (127)..(127): n is a, c, g, or t
  misc_feature (253)..(253): n is a, c, g, or t
ccttccccaaatgcccttttctaattctccagagcataaaatgctaattgtgaatattaaatttatgtgggtggcacatatcctgtttaacataattttattatttaattatttcttgagacggagnttgctttgttgcccaggctggagcacggtgggcagtcataactcactgcagcctcaagctcctggaccatgcgaccctcccatctcggccttgtgagtagctgggaccacaggcatgagccaccgnaccgagccttaaaatatgttttttaaataagcaggaccatgttttttcaagaagtagcatgcaca

SEQ ID NO: 6840 - DNA, 374 bp, Homo sapiens
  III.468 (R14669)
  misc_feature (259)..(259): n is a, c, g, or t
  misc_feature (353)..(353): n is a, c, g, or t
  misc_feature (368)..(368): n is a, c, g, or t
attttagatttgtgcagcaaaataatttcataacttttttgtttttgttacttggataagatcaatctgttttattttagtaaatctttgcaggcaagttagagaaaatgcagtgtggcttaacgtctctttagtatgaagatttggccagaaaaagatacccagagaggaaatctaagataattataatggtccatactttttattgtatgaatcaaactcaaggcataacattgggccaagggaaaattaaataccnttgctaacttgtggaatgggaagtctgtggatttcgggagatgccaaagcattgtaggtaaaaaacacccatgtggaccctcggcccatcttcngcccccgggtatccnttcata

SEQ ID NO: 6841 - DNA, 394 bp, Homo sapiens
  misc_feature (117)..(117): n is a, c, g or t.
  misc_feature (328)..(328): n is a, c, g or t.
  misc_feature (386)..(386): n is a, c, g or t.
  III.469 (R42395)
tttttttttttacctattattggaacatttattaatatttgtaaggtgcagactatgatacacaaaaagacagtgatgtgaaataacaggcatcttcatcagaggtctggctttgcngcctgtgagtttagttgtcagcagtacactcaaggctgaggacttggcgccttgggttcctttgcctctgacacaaagcaaggaccttcagtactagctgatgctccaatcagttttttgttcatacacactgttgggccattgtgaatctttcttatcatgccttccagggaaaccaatacctaccttcaccaccatcacattggcaaancgggcccaaaaggcacatatggttcatggatggctttggtttcagaggctggggcccngaaaattg

SEQ ID NO: 6842 - DNA, 466 bp, Homo sapiens
  III.470 (H42506)
  misc_feature (7)..(7): n is a, c, g, or t
  misc_feature (10)..(10): n is a, c, g, or t
  misc_feature (11)..(11): n is a, c, g, or t
  misc_feature (19)..(19): n is a, c, g, or t
  misc_feature (121)..(121): n is a, c, g, or t
  misc_feature (324)..(324): n is a, c, g, or t
  misc_feature (408)..(408): n is a, c, g, or t
  misc_feature (414)..(414): n is a, c, g, or t
  misc_feature (428)..(428): n is a, c, g, or t
ggtggtntcnnttttattnatgtgcctcctaccttccccccacaatttcagtcccttccaactacccccaaaaaagaaggtagtgaaaggaagggattgctggggttctgagccccttggnagttcagaaagggaacagaaaccaaaacaatcactggatgtgacacagactgacaatcaagaagtctacagcaggatgggaaaggcgggcagagaaaggggaagaaaggagaaaggagagttacaagttgccaactccaccattacccctcctaagagaggctggagagaaagccacaaacattaagaagtgccggtcctgantaagggaggtggtttttgagcttgaaggagggaggaggtcaaggaaaggggggccacctctctctttgtagattgagacccccntccagntcaggggcagcagnttcacagaccctagacattttcgtcattttaggcattt

SEQ ID NO: 6843 - DNA, 513 bp, Homo sapiens
  III.471 (H43495)
  misc_feature (1)..(1): n is a, c, g, or t
  misc_feature (4)..(4): n is a, c, g, or t
  misc_feature (401)..(401): n is a, c, g, or t
  misc_feature (411)..(411): n is a, c, g, or t
  misc_feature (438)..(438): n is a, c, g, or t
  misc_feature (480)..(480): n is a, c, g, or t
  misc_feature (510)..(510): n is a, c, g, or t
natntcggcatgagggtcgtcgccgccccccgtcccggcccccctgggttccctcagcccagccctgtccagcccggttcccgaggatgaagttcgtgtacaaagaagagcatccgttcgagaagcgccgctctgagggcgagaagatccgaaagaaatacccggaccggtgccggtgatagtagaaaaggctcccaaagctcggataggagacctggacaaaaagaaatacctggtgccttctgatctcacagttggtcagttctacttcttgatccggaagcgaattcatctccgagctgaggatgccttgtttttctttgtcaacaatgtcattccacccaccagtgccacaatgggtcagctgtaccagggaacaccatgaagaagacttctttctnttacattgcntacagtgaacgaaagtgttttacggtnttgtgaagctgctggccctgaggttggaggggggtttcattntacaaagagagaggttggcccctttttttnttt

SEQ ID NO: 6844 - DNA, 280 bp, Homo sapiens
  III.472 (H52695)
  misc_feature (2)..(2): n is a, c, g, or t
  misc_feature (82)..(82): n is a, c, g, or t
  misc_feature (85)..(85): n is a, c, g, or t
  misc_feature (164)..(164): n is a, c, g, or t
  misc_feature (183)..(183): n is a, c, g, or t
  misc_feature (197)..(197): n is a, c, g, or t
  misc_feature (231)..(231): n is a, c, g, or t
  misc_feature (239)..(239): n is a, c, g, or t
  misc_feature (274)..(274): n is a, c, g, or t
tnattaggcatttagccacatgacaaaagacaatttgaagaccacagatataatttcaagttgcgtgaacattgattgcccnggnaaatatatcagtgaggctttcctaccacttctgatgactgcaagaacatgaaaatctataatgttttaatcaacaaaantcacagctaatgattaaangctatggccatgangattaactttttaattggcaaataatatttcttngttgatgngatactagggcagacaaattcacaaccctctgggntaactt

SEQ ID NO: 6845 - DNA, 416 bp, Homo sapiens
  III.473 (H52972)
  misc_feature (6)..(6): n is a, c, g, or t
  misc_feature (160)..(160): n is a, c, g, or t
  misc_feature (403)..(403): n is a, c, g, or t
catcgntgcaggcagcgttccccagagctcacacaggccgctatcatggagaagctggtggcttactcatccgatcaggcacactcctcagtggaaagagctgggttaattggtggagtgaaattaaaagccatcccctcagatggcaacttcgccatgntgcgtctgccctgcaggaaagccctggagagagacaaagcggctggcctgattcctttctttatggttgccaccctgggggaccacaacatgctgctcctttgacaatctcttagaagtcggtcctatctgcaacaaggaagacatatgggctgcacgttgatgcagcctaacgcagggcagtgcatttcatctgccctgagtttccggcaccttctggaatgggagttggaattttgcaganttcatttcaaatt

SEQ ID NO: 6846 - DNA, 487 bp, Homo sapiens
  III.474 (H66258)
  misc_feature (482)..(482): n is a, c, g, or t
ctgggggtaaagaggccacctgggtggtggatgtgaagaatggcaaaggatcagtgcttcctaactcagataagaaggctgactgcacaatcacaatggctgactcagacttcctggctttaatgactggtaaaatgaatcctcagtcggccttctttcaaggcaaattgaaaatcactggcaacatgggtctcgctatgaagttacaaaatcttcagcttcagccaggcaacgctaagctctgaagaactccctttggctacttttgaaaatcaagatgagatatatagatatatatccatacattttattgtcagaatttagactgaaactacacattggcaaatagcgtgggatagatttgtttcttaatgggtgtgaccaatcctgtttttcctatgcttctgggtgaataggagcctgatggtatactactgctttgcggaattgcctacaactgtgccttacaagttaatatggtnatttt

SEQ ID NO: 6847 - DNA, 274 bp, Homo sapiens
  III.475 (H70634)
  misc_feature (156)..(156): n is a, c, g, or t
  misc_feature (159)..(159): n is a, c, g, or t
  misc_feature (177)..(177): n is a, c, g, or t
  misc_feature (240)..(240): n is a, c, g, or t
  misc_feature (272)..(272): n is a, c, g, or t
ttttaattttctattaaacattcttctcaaagcattattttatcctatatctcactgaattttaagaaataacattagtattagaaaaactaggaaaaaagataaatgcagataattaaacttacatgaaaaaggaaaattataacaaaggactgngancgttataaattgaaatgngattataatttgaaaactgcatctgaaagcaaactttattgttcaattattcttaatgatggngttttatgactaatacactgatttttcaatangg

SEQ ID NO: 6848 - DNA, 451 bp, Homo sapiens
  III.476 (R18396)
  misc_feature (66)..(66): n is a, c, g, or t
  misc_feature (120)..(120): n is a, c, g, or t
  misc_feature (428)..(428): n is a, c, g, or t
  misc_feature (433)..(433): n is a, c, g, or t
  misc_feature (441)..(441): n is a, c, g, or t
  misc_feature (447)..(447): n is a, c, g, or t
ctatctcattcctttctttcgattacccgtggcgcggagagtcagggcggcggctgcggcacaagngggcggcggtggcggcggcggcactgcaagttgacatgtccagcatcaatcccnaatatgattatttattcaagttacttctgattggcgactcaggggttggaaagtcttgccttcttcttaggtttgcagatgatacatatacagaaagctacatcagcacaattggtgtggatttcaaaataagaactatagagttagacgggaaaacaatcaagcttcaaatatgggacacagcaggccagggaaagatttcgaacaattcacctccagttattacagaggagcccatggcattcattagttgtgtatgatgtgacaggttcagggagtccttcaattaatgtttaaacagttggttncaggnaattgatncttttngccc

SEQ ID NO: 6849 - DNA, 386 bp, Homo sapiens
  III.477 (R42459)
  misc_feature (9)..(9): n is a, c, g, or t
  misc_feature (218)..(218): n is a, c, g, or t
  misc_feature (362)..(362): n is a, c, g, or t
  misc_feature (371)..(371): n is a, c, g, or t
ttttttttntttacttccaataagtacaatatttattaaacatatcttcagttgttttgttacatagtgtgcaacaaattacaatattctgcagccacaaattatatgcagagtatgaagaaactattaatcagatagtgtaatctttccatttataactctacaaggaagaactagcaaatcagatcttacatataacatctcactaaactttatgncatgggaaagtgacaggacactgcttgtgctgtttgatacaaaatgggctgaacttcatcttcagaaggactaaacctgacatctaaacatgccaatataaacattcaaaacaaaaatatattctaaccaaccacgggggaacngtctggggntccggggaagccacc

SEQ ID NO: 6850 - DNA, 246 bp, Homo sapiens
  III.478 (R10758)
  misc_feature (30)..(30): n is a, c, g, or t
  misc_feature (59)..(59): n is a, c, g, or t
  misc_feature (161)..(161): n is a, c, g, or t
  misc_feature (241)..(241): n is a, c, g, or t
aaaatatatttacaattatgatacaatagnaaaatgtttacagtgggcagaatcaaagnctcttacaatgaaatgctacccagctcccgcaggacgtggcgcacctgagtactggatgcagcatacacgtgtgcaggtgggggcggccgacctgggggccnggcttggtgggcacagcgcactccacggggtatgcctcccgtgcgcagtgcctcctgctccttgaaggtcctttcccctnaatat

SEQ ID NO: 6851 - DNA, 408 bp, Homo sapiens
  III.479 (R88953)
  misc_feature (24)..(24): n is a, c, g, or t
  misc_feature (53)..(53): n is a, c, g, or t
  misc_feature (96)..(96): n is a, c, g, or t
  misc_feature (150)..(150): n is a, c, g, or t
  misc_feature (223)..(223): n is a, c, g, or t
  misc_feature (310)..(310): n is a, c, g, or t
  misc_feature (348)..(348): n is a, c, g, or t
  misc_feature (362)..(362): n is a, c, g, or t
ctcaagacaccttccgagcgtcancagcttccccttccaccctcagctccacnctcagcagatgataatatcaagacacctgccgagcgtctgcgngggccgcttccaccctcagcggatgataatctcaagacaccttccgagcgtcantcagcttccccttccaccctcagctccaccctcagcagatgataatatcaagacacctgccgagcgtctgcgngggccgcttccaccctcagcagatgataatctcaagacaccttccgagcgtcagtcaacttccccttccaccctcagctccaccctnagcagatgataatatcaagacacctgccgagcgtctgnggggggccggtttncacccttagcggatggatgaattttcaaggacacctttccgagggt

SEQ ID NO: 6852 - DNA, 340 bp, Homo sapiens
  III.480 (R89625)
  misc_feature (16)..(16): n is a, c, g, or t
  misc_feature (64)..(64): n is a, c, g, or t
  misc_feature (157)..(157): n is a, c, g, or t
  misc_feature (163)..(163): n is a, c, g, or t
  misc_feature (168)..(168): n is a, c, g, or t
  misc_feature (266)..(266): n is a, c, g, or t
  misc_feature (302)..(302): n is a, c, g, or t
  misc_feature (332)..(332): n is a, c, g, or t
aattttttattttgtnctactcggttttattcttattgctcaggcttgagtgcactggcctctnctcagctcaacctccgcctcttgggttcgggtaatgatggttccacgtcagcggccctccgcctcttgggtttgcgtgacggttccacgtcancgaccntccgnctcttgggttcgggtgatgatggttccacgtcagcggccctccgcctcttggggtttgcgtgacggttccacatcaccgaccctccgcctcttggggntcgggtgatgatggttccacgtcagcggccctccgnctcttggggtttgcgtgacggttccacgtnaacgaccc

SEQ ID NO: 6853 - DNA, 393 bp, Homo sapiens
  III.481 (R96525)
  misc_feature (286)..(286): n is a, c, g, or t
  misc_feature (343)..(343): n is a, c, g, or t
  misc_feature (352)..(352): n is a, c, g, or t
  misc_feature (371)..(371): n is a, c, g, or t
  misc_feature (377)..(377): n is a, c, g, or t
  misc_feature (389)..(389): n is a, c, g, or t
tggtttaattagccaattcaagcagacattttggccagacatagcctattgaaaataagcagaattacaagaatttggcattttaaaaaggagtagtttgtcaatggcagaatgttagactgcttctttacatccttgtctatgagccagacatagcagaactagtaacagtggtgtgtacgtgtgtgtgtgtgtgtgtgtgtgtgtgtttcaagcaatgctgacttgacattcagaacatctgctcgagggtagggcaagtaggcagggcatccctaggcatccngggagaaatgacagtacagtgctatgagctgccatgtttgaaatcccaaaggcaacnggagaaacnccttaaaaccccggggttnaacctnggggttgaaggnctcc

SEQ ID NO: 6854 - DNA, 433 bp, Homo sapiens
  III.482 (R96571)
  misc_feature (13)..(13): n is a, c, g, or t
  misc_feature (209)..(209): n is a, c, g, or t
  misc_feature (265)..(265): n is a, c, g, or t
  misc_feature (361)..(361): n is a, c, g, or t
  misc_feature (394)..(394): n is a, c, g, or t
  misc_feature (405)..(405): n is a, c, g, or t
  misc_feature (411)..(411): n is a, c, g, or t
aagaaacatggtngctgagctggtgaagtttctcagcatctctgtttcttgcatgtgtctcacacccttgtctaaaatgccttgctctcatctaacccagagttctctctcaactaaggcagcagggttggcgtgaggggggcaaaggagggaggaggaaggcaaccagcctcacaagtgggggccactcctcacagccacgagcagcngggccacatgcagcactggcagcccaggtggcctgttacggcgggcagtacttccntttgcctcccttcggaatctgttcagcacttttatgtgggagtcttcatcccatgttcaaccctgggggtttttaaggtgtttctcctttgctttngggatttcaaacatgggcaggttcattagcaantgttactgttnaatttnttccggggatggttaaggggat

SEQ ID NO: 6855 - DNA, 195 bp, Homo sapiens
  III.483 (N45592)
  misc_feature (55)..(55): n is a, c, g, or t
ttcatggggtgcagtaattaacacaccacatagtataaatctgaaataatgacanatgtgttaagggccttgggatattgggccatgtactctgaggagcacaaggtgaggtgcaggttcctgcccctaaagaactctatcttttgagattagcaactaacagtgtgagcccactaataggatgtgtaagttgtc

SEQ ID NO: 6856 - DNA, 480 bp, Homo sapiens
  III.484 (N48800)
  misc_feature (480)..(480): n is a, c, g, or t
tgaattccagaacttctttattgtacataaaaatctgaatttcttaatatggaaaccaaaggtctgcaaaatgtactctcctagctcaggatcattatttattcctcttatttttggaatctattcttcttttattcaaggaccaactcaaaggtcagcttttagttaactcttatatccccatacacatatcctaaaggcagagttaactgctatatccaagctacttcttggcatatccttgtcagcctaaataacagagagggagactctctgaaagaaaatgatgtttattcaggagtaggcattgcaataagaatacaagtgccacagtaaactatgtgcatatacagggaggtcaaggaagacaacggtttttaaagcaaaaatgattgttttgagagaattatccttggctacaaggatcaataacaaggatgttgccagttggacattggacagggagttgctgggcaaatn

SEQ ID NO: 6857 - DNA, 203 bp, Homo sapiens
  III.485 (N91376)
cataagaacttttttttaattatttagaaatgcagttatatacatagaacaattaaaattaaattaaactttgtacaaatattaaaatactatcttcacacccactgcaatgtacaggataccaaaaaatatatatataaaataaaataaagcaaacccaaactgattgagtgacatcctgcacagagtcaattatgaatgtg

SEQ ID NO: 6858 - DNA, 612 bp, Homo sapiens
  III.486 (W20018)
  misc_feature (427)..(427): n is a, c, g, or t
  misc_feature (518)..(518): n is a, c, g, or t
  misc_feature (523)..(523): n is a, c, g, or t
  misc_feature (560)..(560): n is a, c, g, or t
  misc_feature (565)..(565): n is a, c, g, or t
  misc_feature (583)..(583): n is a, c, g, or t
  misc_feature (590)..(590): n is a, c, g, or t
ggcacacttgagctgactcagtgcaggtttaatatcctggtgacttgcagtcagattctaatgactttcaagggccagaatatggtgaaaatcacttaaaatatccgtcccttccatgccttagtttagcaggtaggctctatcttttgccatttctgtattttatgtgctgtgttcccgtttcactgggtatgaactgtgaaatggactgaatcctggccactttatgagtttgtttggttttataaggcatttcaatgtacattctataaatacaagcactccatttgcaaacagatcttaagctaatattttctttcccattcatcttgccctccccctcctcccgccagctttaaagttcagttggagaagccagatggcaattcagacaaaggtatactcttcccggcttcatggggtggtnggcacgggaatagatagcccttagccccttcccctcccagtcccagctgagccctcagaccactttgctttcccacataacaatggtcgcntccanttccggaggaaatccttgcgtagagaatggaatatgnctggnatcatttctggatcctantccttancccccaggaaaaaaaaggggca

SEQ ID NO: 6859 - DNA, 255 bp, Homo sapiens
  III.487 (H56026)
  misc_feature (112)..(112): n is a, c, g, or t
  misc_feature (251)..(251): n is a, c, g, or t
aaatctgtgaacatgctagctgtgaagtacatgcttttattctttccataggacatatttccaaataatgatcacagtattatggttaataagatgctcgacagatgcgtancaaagaatattacataacaacaaaatctcatcaatgatatatcaaatgcaaatttactaagacatcaagagaatatctgtttgtagttacatggctaaaaacaaggcattattacagtaaccaagtccctaaaactagnaaaa

SEQ ID NO: 6860 - DNA, 254 bp, Homo sapiens
  III.488 (H56106)
  misc_feature (8)..(8): n is a, c, g, or t
  misc_feature (109)..(109): n is a, c, g, or t
  misc_feature (110)..(110): n is a, c, g, or t
  misc_feature (111)..(111): n is a, c, g, or t
  misc_feature (130)..(130): n is a, c, g, or t
  misc_feature (187)..(187): n is a, c, g, or t
  misc_feature (204)..(204): n is a, c, g, or t
  misc_feature (223)..(223): n is a, c, g, or t
acggcatnatttcatgactccgaagtattttacagaaacattttttaaataagggaaatattttatataccagatggttcacaagtgatggctcatagctagtttttcnnncttctaaaaaatgtcaggnttttaaaatcatttaccttattaaaatgaaaagtgccatacttaacttttaaagganagacctgacttgctttntcctctatttagactgttntttgtactttactaatcttttaaactatcag

SEQ ID NO: 6861 - DNA, 429 bp, Homo sapiens
  III.489 (N74219)
  misc_feature (380)..(380): n is a, c, g, or t
  misc_feature (392)..(392): n is a, c, g, or t
atcataaagtttaattatgattcagaaaaaatcgagcgaataactttctctgaaaaaatatattgactctgtatagaccacagttattgggggagaagggctggtaggttaaattatcctattttttattctgaaaatgatattaatagaaagtcccgtttccagtctgattataaagatacatatgcccaaaatggctgagaataaatacaacaggaaatgcaaaagctgtaaagctaagggcatgcaagagaaaatctcagaatacccaaagtggcaacaaggaacgtttggctggaatttgaagttatttcagtcatctttgtctttgggctccatgtttcaggatgcgtgtggaccccgatggtaattggaaattncccctttttaancaataaggggctcccctggtacagctcatccacttcc

SEQ ID NO: 6862 - DNA, 493 bp, Homo sapiens
  III.490 (W01220)
  misc_feature (12)..(12): n is a, c, g, or t
  misc_feature (14)..(14): n is a, c, g, or t
  misc_feature (395)..(395): n is a, c, g, or t
ttagcgggccgngngcggctcggagaggtgctcggattctcgtagctgtgccgggacttaaccaccactatgtcgagcaaaagaacaaagaccaagaccaagaagcgccctcagcgtgcaacatccaatgtgtttgctatgtttgacccagtcacagattcaggagttcaaagaggccttcaacatgattgatcagaacagagatggtttcatccgacaaggaagatttgcatgatatgcttgcttcattggggaagaatccaactgatgagtatctaagatggcatgatgaatgaggctccaggccccatcaatttcaccaatgttcctcaccatgtttggtgagaagttaaatggcacagatcctgaagatgtcatcagaaatggctttggcntgctttgatgaagaagcaactgggcaccatacaggaagattacttgagagagctgctgacaaccatggggggatcggtttacagatgaggaagtggat

SEQ ID NO: 6863 - DNA, 128 bp, Homo sapiens
  III.491 (R28085)
gctgactaaatgaatgttgcttcagcctgtgatttgtggtctagcgaacaaccgcagagcatgtcctttacaattgattgacctttgcatagcttattttgggccttactaagaacatcttaaactga

SEQ ID NO: 6864 - DNA, 313 bp, Homo sapiens
  III.492 (R28297)
  misc_feature (11)..(11): n is a, c, g, or t
  misc_feature (12)..(12): n is a, c, g, or t
  misc_feature (259)..(259): n is a, c, g, or t
  misc_feature (307)..(307): n is a, c, g, or t
aacttataagnngtttataccatgcaaatttttattttaccaagaacatacactatttttacaattagaagtaagttctaaagcattatgcattgtcaggacaagagctttgctttgtttgacgtttggggtgacatggaatgcatcaagacccttcagcatctgggaatgtctctgtcctccactcctgggggcacccctccacctcccacaggcaaataatttaaaccatttctctactaattgtcttctcttactngggatttctattttttaaaacctcacccataatggtcaatatcaagcntgttta

SEQ ID NO: 6865 - DNA, 354 bp, Homo sapiens
  III.493 (R68244)
  misc_feature (23)..(23): n is a, c, g, or t
  misc_feature (48)..(48): n is a, c, g, or t
  misc_feature (69)..(69): n is a, c, g, or t
  misc_feature (94)..(94): n is a, c, g, or t
  misc_feature (107)..(107): n is a, c, g, or t
  misc_feature (132)..(132): n is a, c, g, or t
  misc_feature (208)..(208): n is a, c, g, or t
  misc_feature (226)..(226): n is a, c, g, or t
  misc_feature (227)..(227): n is a, c, g, or t
  misc_feature (297)..(297): n is a, c, g, or t
  misc_feature (308)..(308): n is a, c, g, or t
  misc_feature (319)..(319): n is a, c, g, or t
  misc_feature (331)..(331): n is a, c, g, or t
  misc_feature (336)..(336): n is a, c, g, or t
  misc_feature (347)..(347): n is a, c, g, or t
cgaacggggcggcgggaagctgnacgtcacgcggccgggcattgttcncggggccgggcgggcgcgagntcctgggactgcggcccgctctatncgtgcgtctccgnctccgcaggtcagctccgccgaagncgccaaggaagaggtgagtgcgggccttctgcggggggtggtgggtttcccgtgagccgctggcctgccttctctnctcgctgactctcctttnnctttctccaagccaagaggagatcggcgcggttgtcagctgtaagtaaagcgagccccgtaaccgttcgntttccgcgggncgtcccgggtnaggacgctcagngctgncttttgccctncagaaac

SEQ ID NO: 6866 - DNA, 534 bp, Homo sapiens
  III.494 (R68538)
  misc_feature (433)..(433): n is a, c, g, or t
  misc_feature (472)..(472): n is a, c, g, or t
  misc_feature (511)..(511): n is a, c, g, or t
  misc_feature (529)..(529): n is a, c, g, or t
gatcacaactttttacctccccacccccaccccgtaaaaaggttaaggcttcccgaagttggcttggaaactgtatatataaaaacttacacgttccctttctcctggcctcggtgctaacttgactcttttattgtcaaaaaaggacaagcacgaattaaaagccaagcaccagccacaatgtacgcaacgcaaagaataaatttcctttgtagacttaatatttaatattttttgtcgtcctaagtctcctaacatctgcagcagcattagtgtgatatagttctattaaaccagggatggaatatatccatttacatttttggcctcggaccactaggaaaaattatttaccgtaattatttaaagtattaattaaagctccattggcttattcaaatggggaggccccgctttaggaggcgtgttggcntagggccccgttggcttcccatgcgggttttgggggttnccttggtggtggccttttcgggtttcgtttccttttgcngggggtttttgaaggggnaagcg

SEQ ID NO: 6867 - DNA, 328 bp, Homo sapiens
  III.495 (N90935)
  misc_feature (278)..(278): n is a, c, g, or t
  misc_feature (306)..(306): n is a, c, g, or t
  misc_feature (310)..(310): n is a, c, g, or t
tccaattttgcaacagagtttattgaggtgcccccccgtgggcctggcctgcccctcattcctctttctcgtctccatgggtgatgatgtagcacagtgacttgtagtcgatgttccccgccagtccatgggtgtcagggcgaacatctgctccacctcagctggagagaacttgtctgcctgggtcaggagaagctgcttgaactcatccttgttcaccacccctttgccgctggggtcaaacatgcggaaggcactcaggatggcttcctcggggnctgtcccattgagcttctccccaaagancgtnaggaagacggtgaagttg

SEQ ID NO: 6868 - DNA, 433 bp, Homo sapiens
  III.496 (W17098)
  misc_feature (433)..(433): n is a, c, g, or t
ctctgcagagagaatggccagcaggaaggcggggacccggggcaaggtggcagccaccaagcaggcccaacgtggttcttccaacgtcttttccatgtttgaacaagcccagatacaggagttcaaagaagccttcagctgtatcgaccagaatcgtgatggcatcatctgcaaggcagacctgagggagacctactcccagctggggaaggtgagtgtcccagaggaggagctggacgccatgctgcaagagggcaagggcccatcaacttcaccgtcttcctcacgctctttggggagaagctcaatgggacagaccccgaggaagccatcctgagtgccttccgcatgtttgaccccagcggcaaaggggtggtgaacaaggatgagttcaagcagttctccttgacccaggcagacaagttctctccan

SEQ ID NO: 6869 - DNA, 399 bp, Homo sapiens
  III.497 (H91356)
  misc_feature (343)..(343): n is a, c, g, or t
gaaggtcatgagatgagttccttgtaggtaccagcttctggctcaagagttgaaggtgccgtcgcagggtcaggcctgccctgtcccgaagtgatctcctggaagacaagtgccttctccctccatggatctgtgatcttcccagctctgcatcaacacagcagcctgcagataacacttggggggacctcagcctctattcgcaactcataatccgtagactacaagatgaaatctcaataaattatttttgagtttattaaagattgacattttaagtacaacttttaaggactaattactgtgatggacacagaaatgtagctgtgttctgggaactgantcttacatggtattattagttgctggctgggtaatttgtttggtatattatctggt

SEQ ID NO: 6870 - DNA, 398 bp, Homo sapiens
  III.498 (R97091)
  misc_feature (270)..(270): n is a, c, g, or t
  misc_feature (299)..(299): n is a, c, g, or t
  misc_feature (368)..(368): n is a, c, g, or t
atggagtttcgctcttgtcacccaggctggagagcaagactccgtctcaaaaataaataaataaataaataaaatgaacaagttgaattagttgctttacaaaattccatcttccatccaggtgtaaaactctatcattctaattatcttccttatttttttatgggtaactgaggaaaaataaaaagaacagcaggaaatatctaggaaaaggaactattgactgtttcatatcaaataggtcaattatttaaaacagggatctaaggnaatacaaggctcatttcaggtttagggcngggtgtggatggaaaaagggaatattagggctttaaaatcggggggacacggggtcccaaattgggggntcctacccccttttttccggccttagggat

SEQ ID NO: 6871 - DNA, 449 bp, Homo sapiens
  III.499 (R97139)
  misc_feature (399)..(399): n is a, c, g, or t
tagaaacagagaggttaggaagagtgattccaaagttaaatagtaccacagaaacatggagcagaggatgtaagctgcataaatctgaagaataataaaaactcaaataagatctgtgaatttgtcttttagaacatcaatgttgatctttgaaaattccatttcggtagattggtggaagcagaatttcaatttctgagaactatgctaagattgtgtagacgggaagtaaaggtagcaagtattaagcccttggtcaagaagttatgtgtttgtttgtttgtttgacagagtctcactctgtcacccaggctggagtgcagtggcgctatcttggggtcactgcatcctctgctggcccagggagcgattctcctgccttcagcctcccgagtggcngggaatttgcaggctcctgttcaccacgctttggccaattttttttttgt

SEQ ID NO: 6872 - DNA, 443 bp, Homo sapiens
  III.500 (R07848)
  misc_feature (93)..(93): n is a, c, g, or t
  misc_feature (175)..(175): n is a, c, g, or t
  misc_feature (357)..(357): n is a, c, g, or t
  misc_feature (377)..(377): n is a, c, g, or t
  misc_feature (395)..(395): n is a, c, g, or t
  misc_feature (427)..(427): n is a, c, g, or t
ttaagagcaggaagtaactggaagcgtcttgctgaactgcaacggaaaaaacaaaggttaaaacaccccagcaccactgccacctttcctggngggcaactgcttctcctccattccaaccatgtgattttggtggtgctgccaatcaagtaccctatctgcctagctagcgganaggaagagtaggcacatcacattcttggggtcctatgtggccaatcaagggtacttctgggaatttctctttattctaggggtgcttaatcttgggatgggcattaacacagggagtcatcttgcagtcacatcttttatggcatttatatacaggtcatgtgccccaaaaagacggttttnggggtcaacggacaggaccncatatacaaccatggggnccccttaacatttacacatatggggggcaggnaaatgccttttgggcc

SEQ ID NO: 6873 - DNA, 409 bp, Homo sapiens
  III.501 (R07899)
  misc_feature (199)..(199): n is a, c, g, or t
  misc_feature (366)..(366): n is a, c, g, or t
  misc_feature (381)..(381): n is a, c, g, or t
  misc_feature (396)..(396): n is a, c, g, or t
tggaatgtctttagaggcagtaacacatagggaactgtcatctcttatgataacagtgccttctggaatacctcctgaaggacctgcctgaaactgttttacagctaatttttaaatttttaaataagtggatgagtacactctaaagataaaaagtataggatagcaaatacataaactgggcacatagtttattatncaagtattatgtacttgcacataattgtatgtgcttagcttttatactactgggcagtgcggtagggtctgtttacatcagcatcacccacaggacaggatggggtaatgcattcattaccaacagctgtggacatcactggggctacaggggcattttttctggcncccattatggtggtnaatgttagggggggnccctggggtgtat

SEQ ID NO: 6874 - DNA, 221 bp, Homo sapiens
  III.502 (R34679)
  misc_feature (7)..(7): n is a, c, g, or t
  misc_feature (164)..(164): n is a, c, g, or t
  misc_feature (207)..(207): n is a, c, g, or t
  misc_feature (218)..(218): n is a, c, g, or t
gtttcanttttattttcctgtctcagtttcagtaaaagattcagagaactgattgacacacatcataagctatcacccatataccctaaatatacactgtttatgctttttctttttcacggaacaaggggacactatctttgttcaaaccaaagtgaaaaggnagagatacaataattttaaaaagaggggtgtgtgtgggtcttncactctcaganagt

SEQ ID NO: 6875 - DNA, 295 bp, Homo sapiens
  III.503 (R34781)
  misc_feature (245)..(245): n is a, c, g, or t
  misc_feature (265)..(265): n is a, c, g, or t
  misc_feature (282)..(282): n is a, c, g, or t
  misc_feature (294)..(294): n is a, c, g, or t
gttggtcataaaaaaaatttaggctaccaaagtttaaagaataaaatgaaaattttataagaacttacattaaaaactcagtagtttgcatgagtaagaactccttgagatacacagatccccccacatttgtatttaaaataattggtgaggcattgaaatccagaattataaggaaagcattactgaatatgtgtgttattaaaatcaatattattattaaacaaaatagggaggctaggaanttttggggtccaccgtaatngccttttcctccaaatntccttttggggnt

SEQ ID NO: 6876 - DNA, 415 bp, Homo sapiens
  III.504 (R94266)
  misc_feature (95)..(95): n is a, c, g, or t
  misc_feature (362)..(362): n is a, c, g, or t
tacctcttgcctgaattctgagggcaatttttgtatacaattcaaacagtcaaaaacccaactgatgtctgatggtaccagcaggtttacctcanagggaaaatcaatatatcactttggtaataccagcaccttctgtgaatacacagtgataaaggaaatctcagttgccaagattgatgcagtcgctcctctagagaaagtatgcctaattagctgtggcttttccactgggtttggtgctgcaatcaatactgccaaggtgactccaggttctacctgtgctgtgtttggcctggggaggagtcggcttgtctgttgtcatgggttgtaaagcagcaggagcagccagggattcattnggagtggatgttcaacaagggaggaaattttaaggaagggcacaggaatttgg

SEQ ID NO: 6877 - DNA, 43 bp, Homo sapiens
  III.505 (R94622)
  misc_feature (19)..(19): n is a, c, g, or t
  misc_feature (29)..(29): n is a, c, g, or t
atctgtcatatcaaataanacttcttganggggtttctttaag

SEQ ID NO: 6878 - DNA, 247 bp, Homo sapiens
  III.506 (H86488)
  misc_feature (111)..(111): n is a, c, g, or t
  misc_feature (128)..(128): n is a, c, g, or t
  misc_feature (229)..(229): n is a, c, g, or t
attttggaataatgatagctgcatctgaaaataatgatatatgcacattaatgagtatttaagaaaaagagcaaagtatgaagaaggaaggtaaaaataccaccccaagtnctaccacttagaaggancctttgttaaaatttaggtggttattggaaagccatatatatatacatatatctacctccacatatatatgtgtatatacatgtgtgtgtgtgtatatatncacacctccaggctgtaa

SEQ ID NO: 6879 - DNA, 320 bp, Homo sapiens
  III.507 (H86511)
  misc_feature (99)..(99): n is a, c, g, or t
  misc_feature (288)..(288): n is a, c, g, or t
  misc_feature (298)..(298): n is a, c, g, or t
  misc_feature (305)..(305): n is a, c, g, or t
ctgagaaggacaagggcggaaggcagctgcacagagcagggccacggctgtgcacacagtccagggagcttttgtgcaggagccaggcctccccctggntccccatgatgagagaatgggttctgctcatgtccgtgctgctctgtggcctggctggccccacacacctgttccagccaagcctggtgctggacatggccaaggtcctcttggataactactgcttcccggagaacctgctgggcatgcaggaagccatccagcaggccatcaagagccatgagattntgagcatctnagacccncagacgcttgccagt

SEQ ID NO: 6880 - DNA, 568 bp, Homo sapiens
  III.508 (N37065)
  misc_feature (476)..(476): n is a, c, g, or t
  misc_feature (549)..(549): n is a, c, g, or t
gaagtttcaaattatttattcattcaacaaacatgtcagagagaaatgaacagtctagtagcaaatatttcatagagaaatggacgtatcattccaactcaccacgccccaaacttcctgtggctcactccatcttttgcccctctagggagcttcggtgattgtggatctgccttggggcaggaaaaggggaaggggaggtcaggcctagtggctcacgcctgtaatggcagcactttgggaggcagagtcatgtggatcacctgaggtgaggagttcaagaccagcctaaccaacatgttgaatccctgtctctaaaaatataaaaattagccgggtatggtggcaccgtatctgtaatcctagctactctggaggctgaggcaggagaatcgcttgaacctgggaggcagaggttgcagtgagccgagatcatgccactgcactccagcctgggggacagagcaagactccgnttcaaaaaaaaaaaagttgggggggaaagaacaaatgagtggaagggttggaagaaggaagcctgctggggancccacgaaaaaggggcttg

SEQ ID NO: 6881 - DNA, 471 bp, Homo sapiens
  III.509 (N46457)
  misc_feature (43)..(43): n is a, c, g, or t
  misc_feature (45)..(45): n is a, c, g, or t
  misc_feature (98)..(98): n is a, c, g, or t
  misc_feature (104)..(104): n is a, c, g, or t
  misc_feature (231)..(231): n is a, c, g, or t
  misc_feature (250)..(250): n is a, c, g, or t
  misc_feature (276)..(276): n is a, c, g, or t
  misc_feature (292)..(292): n is a, c, g, or t
  misc_feature (302)..(302): n is a, c, g, or t
  misc_feature (324)..(324): n is a, c, g, or t
  misc_feature (365)..(365): n is a, c, g, or t
  misc_feature (401)..(401): n is a, c, g, or t
  misc_feature (406)..(406): n is a, c, g, or t
  misc_feature (422)..(422): n is a, c, g, or t
  misc_feature (429)..(429): n is a, c, g, or t
  misc_feature (443)..(443): n is a, c, g, or t
  misc_feature (448)..(448): n is a, c, g, or t
  misc_feature (453)..(453): n is a, c, g, or t
ctcattaccctgacattgatactagggaggaactggcccagangnaaggctcaccgaggcccgagtacaggtctggtttagcaaccgccgtgcaaganggaggnagcaagctggggccaatcaactgatggctttcaaccatctcattcccggggggttccctcccactgccatgccgaccttgccaacgtaccagctgtcggagacttcttaccagcccacatctattcnacaagcttgtgtcagatcncagcagcaccgttcacagacctcaancgcttcctccaagcantgtacaccanagcacgattccttccaacccanacagcagctctgcctactgcctctccagcaccaggcatggnattttccagctatacagacagctttttgcctccgtnggggncctccaaccccatgantcccatnaattggcaatggcntcttnacctnaggtaattgggattcttg

SEQ ID NO: 6882 - DNA, 381 bp, Homo sapiens
  III.510 (N58372)
cagtctattccccctgtctggaaggcccttcatcctactctcttggcctcttctaatttttttcagtggagtccaaagtactcataaacacattcattaaaaatgtaagaagccaaagggcaaaaaaaaaattttttttaatcagggatgaggagggaagctaagaattttaaaatagtaaatgaaaaatttagaaatatgtattttgtagaaaatagtagacttagcactaagatgaaatgtttttggtaaagtttttaatttgggagttttgctgattccttcttacccttcaggacaattcacagatatcaatcctttctggagttacccctggactccctcaacacccccaaaactctaaatgccacggtcatctgt

SEQ ID NO: 6883 - DNA, 481 bp, Homo sapiens
  III.511 (N77740)
  misc_feature (213)..(213): n is a, c, g, or t
  misc_feature (325)..(325): n is a, c, g, or t
  misc_feature (350)..(350): n is a, c, g, or t
  misc_feature (376)..(376): n is a, c, g, or t
  misc_feature (411)..(411): n is a, c, g, or t
  misc_feature (448)..(448): n is a, c, g, or t
accaaatgtgttcttgtagagtgcgttattttcccctattttctctgtggtattgcaaacagtcatggtgagtgctgcaggttatatgaggataagtaagacttggtacagaaatgtccagaatactcaaaactggaaaaaagtgatccctgatagttaaatggtcaagataggcttcctgaaggtgatggtgtttagccagtcctggaaggnatgcgcaatacaatttccaacaggtagaaataagatgattaagggtaaaataagaaaggggaagattagtgcatcatatagagcaggactgttgaaccagaagtgtagaccncaagttgagggtatgctaggaaatnaggctagaaaaagaaggttgagatcngattatggagattcctattaatactaaacttagcngtttagccttatttcccggtaaggcattggggtgccncttggagagagcccgggaaggaatatatgatgc

SEQ ID NO: 6884 - DNA, 428 bp, Homo sapiens
  III.512 (W33067)
  misc_feature (407)..(407): n is a, c, g, or t
gtaatacggtcccagaaaaactacaggatggactaaccctgcttattcctgtgaatcaagaggtgatcttctgcagcttggaaaaaaaaaagcgatggaatctccctctgttgcccaggctggagtacagtggtgcgatcttggcctacttcaacctctgcctcccgggttcagcgattctcgtgcctcagtctcctgggtagctgggattacaggcgctcaccatcatgccttgctaagttttgtatttttagtagagacggggtttcaccaatgttggccaggatggtcgtgatctcctgacctcgtgatccgcctgcctcagcctcccaaagtgctgggattacaggccgtgacaactcaaccgcccgggccctttaatcatttttatgaactgaaaaccagtntcacttgtcaaaaataaatat

SEQ ID NO: 6885 - DNA, 146 bp, Homo sapiens
  III.513 (W35416)
ttttttttttggcactagtctgtctttaatgtctttggaaagaaagacccgggatccaggttcatactttagttgggaaatgtctgtagttaagctttaacaacatcgttttgttttcattatatttatatttgggttcaatattt

SEQ ID NO: 6886 - DNA, 336 bp, Homo sapiens
  III.514 (R38935)
  misc_feature (170)..(170): n is a, c, g, or t
  misc_feature (180)..(180): n is a, c, g, or t
  misc_feature (222)..(222): n is a, c, g, or t
  misc_feature (250)..(250): n is a, c, g, or t
  misc_feature (268)..(268): n is a, c, g, or t
  misc_feature (276)..(276): n is a, c, g, or t
  misc_feature (308)..(308): n is a, c, g, or t
ttttttttgcattagaagttaaataattatgtgtttgctttaactagatttggggtattattctggcattaacacagaataagacttctcaaaatttgaaacaaagtttcataacttgaaatcctgaaattagaataactttgctattagggaatatgaattaatttggntcatctgagnccatcaatctgattattccaccagcctgataaagatcgtagngttataaagctgcaaagttataattgcnctttactgtgatttaagnttgcactnttcacttttgccccctataggggcgaatgagntttcaaaacatacacccggttgtatggg

SEQ ID NO: 6887 - DNA, 450 bp, Homo sapiens
  III.515 (T80583)
  misc_feature (97)..(97): n is a, c, g, or t
  misc_feature (158)..(158): n is a, c, g, or t
  misc_feature (395)..(395): n is a, c, g, or t
  misc_feature (429)..(429): n is a, c, g, or t
  misc_feature (434)..(434): n is a, c, g, or t
  misc_feature (439)..(439): n is a, c, g, or t
  misc_feature (447)..(447): n is a, c, g, or t
cttgaataaacagagtacccttggttttcctactttatagatgggttttacttaccagcagaccattttgtactttatttgaggtctattcccaggnctgcataaatttctccccacataagaagacccacaagtccacttatctgtggaggtgagtngaccatgtaccatcctagagcttcttccatgttacacaaggacacaagatttggatcactggtattcacaaagagcccttgttaatagtatgatcccaacccattctcactggttgcagaggaatgtccctttatgttatccttatgttgcaggaactcgggaaacaatagccacttcatggaaagcaaattgcttcgcgtgcagctaaacagtgcattggggtttttccacttcancattattccggaccattttggtttttctaggaantttantcagntggggaancct

SEQ ID NO: 6888 - DNA, 342 bp, Homo sapiens
  III.516 (R35062)
  misc_feature (1)..(1): n is a, c, g, or t
  misc_feature (301)..(301): n is a, c, g, or t
nactgtagcaaactgaggtactatgcattgatttcacagtctacttagttgatttcataattagttaatttcatgtatttttctacttttctatcagtctgaaaagttatatgttcctttcatcttccactcctttacctcactgaaacaatatggcctaggaactttctgatcagtcattcttcagatcagaggcatggggggagcaatgtggggtgataaacactcgggtagtcgctcagggtaattatctctagttcctttgggaggggattaaaaatttcatttcaggggcttcccngtatatttctttattaatccatattggaatggaatataatt

SEQ ID NO: 6889 - DNA, 377 bp, Homo sapiens
  III.517 (R35063)
  misc_feature (6)..(6): n is a, c, g, or t
  misc_feature (9)..(9): n is a, c, g, or t
  misc_feature (11)..(11): n is a, c, g, or t
  misc_feature (12)..(12): n is a, c, g, or t
  misc_feature (89)..(89): n is a, c, g, or t
  misc_feature (294)..(294): n is a, c, g, or t
  misc_feature (302)..(302): n is a, c, g, or t
  misc_feature (345)..(345): n is a, c, g, or t
  misc_feature (359)..(359): n is a, c, g, or t
  misc_feature (370)..(370): n is a, c, g, or t
cctctnttntnntaatgtgtagttctctcagacagacagaaatacaaagtactaagatacgaaatctacgtgaaggctattttcctggntttgcttactcgagactttagcatttttaattataattgttgaggtagggtctgtaggatccagacattacatataataattatcataggcaattaaaaaaaaactcaagactttaagtaggacaataaaagtattaggttgacaatggattacacttacaactgtcatagggaattatattcattccaatatggattatagggnaatatccngggaggcctctggaaatggaattttttatccctcccaaggggnctggggggatattnccctggggcgncctcccc

SEQ ID NO: 6890 - DNA, 361 bp, Homo sapiens
  III.518 (N40554)
atgggaaaaggtacacaactttattgaaaacattgagtgcagaaataaaccctgctcatgaatgggaaaattcaattttacacaggtgctgattttatccagactgatctatagattcagctgggttccattctacatctcaaggggtttttggggggaatttgacaagctgattctcaaggttacatggaagagcaagggccgagactagagtttaggagatgattcccaaagggcacaggggcagaaaaatgaccagtggaaccacatagaaaaatcaattattgtattttcaatggatcactaggcagcagggaaaaggaatgccatacagctacacacaataatccggatacatctc

SEQ ID NO: 6891 - DNA, 210 bp, Homo sapiens
  III.519 (N46598)
gtgttttgttttatttttcgagatggagtctctctgttgcccaagctggagtgcaatggcgcgatcttggctcacttcctgggttcaagcgattctcctgccttagcctcccaagtaactgggattgcaggcacccaccatcatgccctgctaaattttgtacttttgtagagatggagtttcaccatgttggtcagagctgggctttga

SEQ ID NO: 6892 - DNA, 429 bp, Homo sapiens
  III.520 (R10282)
  misc_feature (334)..(334): n is a, c, g, or t
  misc_feature (362)..(362): n is a, c, g, or t
  misc_feature (402)..(402): n is a, c, g, or t
  misc_feature (410)..(410): n is a, c, g, or t
gagtgtgtgacccagcccttcccccgtggccaagcagagagagtggccttgaggaagccatagcagcaggaccagcatggcctctgctgcctctgtgaccagcctggcagatgaagtcaactgccccatctgtcagggtaccctgagggagccggtcactatcgactgcggccacaacttctgccgggcctgccttacccgctactgtgagataccaggcccagacctgggaggagtcccctacttgcccactctgcaaagaacccttccgtcctggggagcttccggcccaactggcagctggctaaacgtggtgggagaacattgaggcgcntccagctggtgttccacaatggggtttngggagaggaggatgttttgccaagagcacgggagagaagntttatttntttttgttgaggatgattg

SEQ ID NO: 6893 - DNA, 427 bp, Homo sapiens
  III.521 (R10283)
  misc_feature (401)..(401): n is a, c, g, or t
  misc_feature (408)..(408): n is a, c, g, or t
acttatggatttgttccctatagggagccgctgcatcctccaggaagcgcatggtgtgggtagcgtgctccccagcctcccggcacaccacgcacaactgcatctcatcatcctcacagaagaagtagatcttctctccgtgctcttggcagacatcctcctctcccaaacccagtgtggacaccagctggaggcgctcaatgttctccaccacgttagccagctgccagttgggccggaagctcccagggacggaagggttctttgcagagtggggcaagtaggggactcctccaggtctgggcctgggtatctcacagtagcgggtaaggcaggcccggcagaagttgtggcccgcagtcgatagtgacccggcttccttcagggtaccctgacagatnggggcantttgatttcatcttccagg

SEQ ID NO: 6894 - DNA, 499 bp, Homo sapiens
  III.522 (R53920)
  misc_feature (20)..(20): n is a, c, g, or t
  misc_feature (94)..(94): n is a, c, g, or t
  misc_feature (124)..(124): n is a, c, g, or t
  misc_feature (196)..(196): n is a, c, g, or t
  misc_feature (313)..(313): n is a, c, g, or t
  misc_feature (343)..(343): n is a, c, g, or t
  misc_feature (350)..(350): n is a, c, g, or t
  misc_feature (380)..(380): n is a, c, g, or t
  misc_feature (444)..(444): n is a, c, g, or t
  misc_feature (462)..(462): n is a, c, g, or t
  misc_feature (472)..(472): n is a, c, g, or t
  misc_feature (486)..(486): n is a, c, g, or t
  misc_feature (492)..(492): n is a, c, g, or t
gcatggagccctccagtttngggacattcccaccagccacttgctattcaagcttcctcaggagctgctgaaacccaggtcacagtttgctgtngacatgcagacaacatcctccagaggactngtgtttcacacgggcactaagaactcctttatggctctttatctttcaaaaggacgtctggtctttgcactngggacagatgggaaaaaattgaggatcaaaagcaaggagaaatgcaatgatgggaaatggcacacggtggtgtttggccatgatggggaaaaggggcgcttggttgtggatggactnagggcccgggaggaagtttgcctgggaaantccaccntcagcattcagagcgccatttacctggggnttcaccttccttcaggggaaaccaaagagccttccccacaaacagtttttggggttgcctgaangattttcagttgggtttnaaaacctttntttacccttttttnaagttnggggttt

SEQ ID NO: 6895 - DNA, 266 bp, Homo sapiens
  III.523 (R53921)
  misc_feature (10)..(10): n is a, c, g, or t
  misc_feature (14)..(14): n is a, c, g, or t
  misc_feature (209)..(209): n is a, c, g, or t
  misc_feature (221)..(221): n is a, c, g, or t
  misc_feature (231)..(231): n is a, c, g, or t
aaggactacntttncattttttaattccataaattataatcctttaacatatatgaaagtttcatattcttaaagtgctttaaaatatatttaatttttttaacaagtggaaaagaatgtttcttaaaagacatttaattttttagtggaaattaatattaccaaaaacattctgtgcataacaatttgaataacaatttttttatctncaagaaatgggntttttatatngggtacacatgtaggcactgaatgccaaagtgatg

SEQ ID NO: 6896 - DNA, 598 bp, Homo sapiens
  III.524 (N38985)
  misc_feature (405)..(405): n is a, c, g, or t
  misc_feature (447)..(447): n is a, c, g, or t
  misc_feature (460)..(460): n is a, c, g, or t
  misc_feature (513)..(513): n is a, c, g, or t
  misc_feature (520)..(520): n is a, c, g, or t
  misc_feature (548)..(548): n is a, c, g, or t
  misc_feature (553)..(553): n is a, c, g, or t
  misc_feature (583)..(583): n is a, c, g, or t
  misc_feature (588)..(588): n is a, c, g, or t
aaaattaagacaagtttattgagtaaaaaaatgcatacattggaacggcaaaacatcaataaggccctaaaacaaaaaatacagttatgctttaacaaattcttagcaatgtggcccacgctttttaaaaaattgacgtgttggcagtgtttgttagaacactgacgtacatcccaaatagtaataaattcagtatgaaattatacgcataaccttactcaccatactactttttctcccaaactattgtgacttctttttgctctctgattaaaacaaacaggtaacatccttacacctttgctccatccctttgggctttaaaaagaatggctgtagttaagttttggattcactgatatactctctgtacttgagggaagagtaagctgtgtttaaaagtgnccctttccatgtcgtcatgtaccaatacccctctgcatttcnaaatgttgactcngatggtttttccctctacaggaactaggaaaattgtccccccactttgggtcnaattacnccatttggaaggaccaaccaggggtacntaagngttttacctaggtaattcccttagaggggncgagngggtaggtta

SEQ ID NO: 6897 - DNA, 435 bp, Homo sapiens
  III.525 (N48131)
  misc_feature (7)..(7): n is a, c, g, or t
  misc_feature (376)..(376): n is a, c, g, or t
ttttacncagagacagggtttcactgtgttagccaggatggtcttgatctcctgacctcatgatctgcctgcctcagcctcccaaagtgctgggattacaggcttgagccactgctcctggccaacatccagtattttatcttgactgtcctaaccttaccttagatgctaacagaagggtcctgctgaaataacactgggtgctatattgatgggtaaatgtgtacatcctattccttcctctttatctcacaatttttgtctccactaagcaagaagtaaactaacacttcgtcactctaaagaaataacttatgtaaaactcttagtaaccctggtttgtcttcaaatgagtaaatagaccaaagtggggggnacaattttctagttctgtagaggggaaaacatctgggtcaacattttgaaatgcagagg

SEQ ID NO: 6898 - DNA, 291 bp, Homo sapiens
  III.526 (T66172)
  misc_feature (129)..(129): n is a, c, g, or t
  misc_feature (213)..(213): n is a, c, g, or t
  misc_feature (227)..(227): n is a, c, g, or t
  misc_feature (232)..(232): n is a, c, g, or t
  misc_feature (266)..(266): n is a, c, g, or t
  misc_feature (280)..(280): n is a, c, g, or t
  misc_feature (290)..(290): n is a, c, g, or t
tttttttttttcggcagtgtcgtttattatgttaaatacatacctcaaaaataacccattaagctgccagataggaagccatagaattaaaaaaaaaaatcagggacaaacacaaaaaataaatagganttcaaaaataggtcaccccaccctgagagcaggccgcagtttatcaaaaagccaaagcgactcactgtgaagtggtttttttantacataaacaagtnttttntttaagaactcatttcacagtctattctttcggnttgcaaagtctctntcccatgcant

SEQ ID NO: 6899 - DNA, 502 bp, Homo sapiens
  III.527 (T66255)
  misc_feature (15)..(15): n is a, c, g, or t
  misc_feature (22)..(22): n is a, c, g, or t
  misc_feature (24)..(24): n is a, c, g, or t
  misc_feature (38)..(38): n is a, c, g, or t
  misc_feature (45)..(45): n is a, c, g, or t
  misc_feature (58)..(58): n is a, c, g, or t
  misc_feature (229)..(229): n is a, c, g, or t
  misc_feature (447)..(447): n is a, c, g, or t
  misc_feature (465)..(465): n is a, c, g, or t
  misc_feature (470)..(470): n is a, c, g, or t
  misc_feature (487)..(487): n is a, c, g, or t
ctggaagaattcctncggaggngnaaccatgccacagncgcaatncttaaaggaactnctcaaagagatgaaccagagcacattagccaaagaatgccctctctcccagagtatgatttcatccattgtaaatagcacatattatgccaatgtgtcagcaaccaagtgccaggagtttgggagatggtataaaaagtacaagaagattaaagtggaaagagtggaacgnggaaaacctttcagactattgtgttctgggccagcgtccaatgcatttaccaaatatgaaccagctggcatccctggggaaaaccaacgaacagtctcctcacagccaaattcaccacagtactccaatccgaaaccaagtgcccgcattacagcccattcatggagccctggggctttctttctcccccagctttagtccacaactttgttaagggnaacaattaggccatgggnccatnttgattaaaccaacagntttgccgtttaggcc

SEQ ID NO: 6900 - DNA, 347 bp, Homo sapiens
  III.528 (H11938)
ttttttttaatttaaggaaggggtgtcatcattgcccagagtacagcttcttcctgtcagtgatttgagcccccaactgcgaacatggatcaccctgctctggccattggcttcttaatctccagatcctgcttaccttagaaaaatatccaatcaggtgacagccagtgttgtccgcctctgtcataacatagaacaggaagggctccacatcataatataatgtcttgtggtccagaaaaagtttggccaacaggcacaggttttgggcagtagatcttgtttttcttgccatccacttcaaacacagagattgaacctttggcgatatatctcatcaccagggt

SEQ ID NO: 6901 - DNA, 420 bp, Homo sapiens
  III.529 (R10412)
  misc_feature (7)..(7): n is a, c, g, or t
  misc_feature (79)..(79): n is a, c, g, or t
  misc_feature (92)..(92): n is a, c, g, or t
  misc_feature (135)..(135): n is a, c, g, or t
  misc_feature (383)..(383): n is a, c, g, or t
  misc_feature (408)..(408): n is a, c, g, or t
ggtctgnttgctgaaacgctgccgctgagggtggactcgatttcccagggtcccgccgcggagtctccggcggcgggcngcgcgcgagccanccgagcgaggtgatagaggcggcggccaggcgtctgggttctnctggtcttcgcctttcttctccgcttctaccccgtcggccgctgccactggggtccctgggccccaccgacatgggcggcggtgttgcagcaagtcctgggagcgcacggagctgaacaagctggcccaagtctgtccagaacaaacttgaaaagttccttgctgatcagcaattccgagatcgatgggccttgaaggggcgggcatggagaaatttaaaggtgggagagcgaacagaaaagaggttnttcccacagttcagggagagatttnttgattgaaatt

SEQ ID NO: 6902 - DNA, 426 bp, Homo sapiens
  III.530 (R11490)
ttattttcaagattacatttaagctctagaatctcattccctttttctcttccaagagccagaagttcatcagttttggttttcaactctgtattcagccatgtattctgactatgtagcaattccttttcttgctccaagcgtttttctcgatacttaacagaaacatcagaagcttgaagttcatccaattttaactgaagttcaccctttgttgtattgctttctttaagtttttcattcagacgtttaacatcctctgttaagtattcaagttcttgagatagtctctcattgggttctaattaagtctcttttctcagcttctaattcttcctttgttcttgtaaattggctctgaatgggcaatattgcgatcctgaggcaatttcaagttctttgtttttctcaggtaggggccttcag

SEQ ID NO: 6903 - DNA, 462 bp, Homo sapiens
  III.531 (N20077)
  misc_feature (360)..(360): n is a, c, g, or t
  misc_feature (365)..(365): n is a, c, g, or t
gaaaattaatcgagatatttaatagacagtgcaaaccataatttcatctgaatataaatgtatgcacgtttccaatgagttatctatcagttatcacaaacagcaacaaggaccttatagctatgttagaaaactgtatagttggaacttaattctaacaatctcacttgctctcaagagaacaccatccatttcaaatcaatgtcacaaactccagaagaccaggggagcaagggggtgaggagtgggccagaagtggtaaacacagggccaatacacaggtgatggacagaaacacagctctggaggaaatcaaaatcagatgcattattacagctaagggcaaggaaaagcctatgnttttngaaaaatggacttttctgccagtaccgtacaagtaccccaagagatgtgcggcaagtcaactgacttacaaggacagaggctacatttcagggtctt

SEQ ID NO: 6904 - DNA, 661 bp, Homo sapiens
  III.532 (N23772)
  misc_feature (444)..(444): n is a, c, g, or t
  misc_feature (491)..(491): n is a, c, g, or t
  misc_feature (498)..(498): n is a, c, g, or t
  misc_feature (578)..(578): n is a, c, g, or t
  misc_feature (614)..(614): n is a, c, g, or t
  misc_feature (640)..(640): n is a, c, g, or t
  misc_feature (649)..(649): n is a, c, g, or t
aaaagatattacagccaattatcatttaatgaagatacatttttgcttgctgtcgggagaataaagcagggaacctttatgtagtgaacaccatcgggatgatcgggtactggtaattaaattcctggtggattgtgctgtaattagtttaaaatcggagtgtcatgcagccccgcctcttgtttgctgttgtggtaataatccgttccttccttgaggacagcaccgtgttagagtggagcggcaaccaggtctagccctgtctcaaaacatctaaataagtgatgcgctgtcacccagctaacaggaggaaataatacattttcatcaacaaccttgtacttgagagttcaaaaacgtcaccccttttccaattgctagatactgtggctacacctgaagcttatgggaagcaaaagatagataggttttagatttaaattntttttttaaagaaagcatgactgttagaactgagatgcagtcccatnatggtancgcatgctgtttaagtgcatatttagtagatggcattattatctctcaacatttctcccccccttgccgtgggttaagangataaattccagcatggtcctgaaccgatatcctgnaggaaggagaggattccctgaactcncacccgctncctggtgagagc

SEQ ID NO: 6905 - DNA, 392 bp, Homo sapiens
  III.533 (N73912)
  misc_feature (341)..(341): n is a, c, g, or t
  misc_feature (369)..(369): n is a, c, g, or t
caagcagttgagcacaaatattttaattgtctaaaatgacattttctttaagagttatctacagttcaaagctcacttttatgaggtgtcacatccatcaccattttaagagatataaaatcatgaaaagatatcaccagaagctatgtaaacatttcagctaagggtaaagagaaagttaagggtgttttcacaaggaaattgaaagagggcaatccaaatgaagtcaacatggtcacacaaaaatcttggtaaaagaactagaatggaagcccaagctgctgagcaagtgggagaagaaaagaaaacatagtccaaacagatcacacaaggggaacccnggacaaatgctgactttggcatttatcnaggggaacccccattttttggca

SEQ ID NO: 6906 - DNA, 353 bp, Homo sapiens
  III.534 (W03975)
  misc_feature (13)..(13): n is a, c, g, or t
  misc_feature (34)..(34): n is a, c, g, or t
  misc_feature (155)..(155): n is a, c, g, or t
  misc_feature (228)..(228): n is a, c, g, or t
  misc_feature (231)..(231): n is a, c, g, or t
  misc_feature (284)..(284): n is a, c, g, or t
  misc_feature (299)..(299): n is a, c, g, or t
  misc_feature (342)..(342): n is a, c, g, or t
aacgagtctccancaccatgtctggtttgtctgncccaccagcccggcgcggccttttccgttagcgttgctgcttttgttcctgctcggccccagattggtccttgccatctccttccatctgcccattaactctcgcaagtgcctccgtgagnaatctcacaaggacctgctagtgactggcgcgtacgagatctccgaccagtctgggggcgctggcggcatgcncancaccctcaagatcacagattctgctggccatattctctactccaaagaggatncaaccaaaggggaanatttgcctttaccactggaagatttatgacatgtttgaagtgngttttttttta

SEQ ID NO: 6907 - DNA, 489 bp, Homo sapiens
  III.535 (R98431)
  misc_feature (427)..(427): n is a, c, g, or t
  misc_feature (445)..(445): n is a, c, g, or t
aacacagcctcgctcttgtcgcccaggctggagtgcagtggtgtgatctcagctcaatgcaacctccgcctcctggatttaggcgattctcctgcctcagcctccctagtagctgggattacaggcgcctgcaccacatccggctaatttttacatttttagtagagacagtgtttcaccatgttggccaggctggtctcgaactcctgacctcaggtgatccaccctcctcggcctcccaaagtgctgggattacaggcgtgacaccagttgccccgccatacaatagattttagaatattttcatcacctcaaaaagaatccctgtcccaacacaaagaaatgataaatattttgaagtgacagatatggctaattaccctggatttgatgattacacattgtatatatgtattgaaattttcanggtgtttaccttaaaaantgtaccatttattatgtgtcctggaaaaattgttatttaaaggc

SEQ ID NO: 6908 - DNA, 420 bp, Homo sapiens
  III.536 (R98432)
  misc_feature (278)..(278): n is a, c, g, or t
  misc_feature (361)..(361): n is a, c, g, or t
  misc_feature (406)..(406): n is a, c, g, or t
ccaaaaatgctaacaatcatctgagcctttagcaagtcgtacactttgtatttttgcttttattataatttttcatggacacataataattgtacatttttatggtaaacagcgtgatatttcaatacatatatacaatgtgtaatcatcaaatcagggtaattagcatatctgtcacttcaaatatttatcatttctttgtgttgggacagggattctttttgaggtgatgaaaatattctaaaatctattgtatggcggggcactgtggctcacgnctgtaatcccagcactttgggaggccgagggaggggtgggtcacctgaggtccggagttcgagaccagccgggccaacctggngaaacactgtctctactaaaaatgtaaaaattagccggatgtggntggcggcgccgtaa

SEQ ID NO: 6909 - DNA, 425 bp, Homo sapiens
  III.537 (N51024)
  misc_feature (355)..(355): n is a, c, g, or t
  misc_feature (384)..(384): n is a, c, g, or t
  misc_feature (416)..(416): n is a, c, g, or t
taaaggttaaggaattttctttattttttacaaattaagactatgcagatttcatatatttctgaatcaaaaacacctttgtcttcacagtatgagttagaatgcagcctgagctgaaaatcaagaaactagaaaagaaagtggtagagataactatattaaaaatctgttaggcattttctttaaaagtaggtgtttttttttttttctttttctttttttttttttttaatatcttgtcattcttggcactgtttctaaagaaaaactccattatcccaagcaaaaaagcacagaaggtggagtttggcttcaagagatgttaactcaaaatcttaggcctagcagagaatcnccaaatttatgggagagttaacagggggnttaacaggaaggaagtgcccttagtaagttcnccaagccag

SEQ ID NO: 6910 - DNA, 379 bp, Homo sapiens
  III.538 (N72053)
  misc_feature (166)..(166): n is a, c, g, or t
  misc_feature (175)..(175): n is a, c, g, or t
  misc_feature (182)..(182): n is a, c, g, or t
  misc_feature (190)..(190): n is a, c, g, or t
  misc_feature (192)..(192): n is a, c, g, or t
  misc_feature (206)..(206): n is a, c, g, or t
  misc_feature (223)..(223): n is a, c, g, or t
  misc_feature (241)..(241): n is a, c, g, or t
  misc_feature (274)..(274): n is a, c, g, or t
  misc_feature (292)..(292): n is a, c, g, or t
gaatcatggccagagcttttccgaataagaaatgatccatcctgtttaattttttttaaaaaacataattatggttagtattacttatatttctacaggttcaaaaaatcattttgtgaagaacacctatattacattccaaaggtaaattatttagctacattanttttaatanatggatnacgcgctngncttccaaattttcnaaagaaaaataggtccncggaaaaatatatacccnataggaaaatcctgagtgagatcaaatgcttgncttttttgaaaaaaaggnaataattaattaattaattttagaaacagtctcgccttgttggcccaggctggtgtgcagtggtgcaatcccagtccactgcagcct

SEQ ID NO: 6911 - DNA, 403 bp, Homo sapiens
  III.539 (W02795)
  misc_feature (164)..(164): n is a, c, g, or t
  misc_feature (173)..(173): n is a, c, g, or t
  misc_feature (326)..(326): n is a, c, g, or t
tgtctaatctccccctattgttttgccaacagtaatttaagtttgtgtggaacatccccgtagttgaagtgtaaacaatgtataggaaggaatatatgataagatgatgcatcacatatgcattacatgtaggaccttcacaacttcatgcactcagaaacatngcatgaagnggaggagaggacggcccagggtcaccatccaggtgccttgagaacagagaatgcagatgcggcactgttgaaatttagcatgggtgtattaacaaagaagctgacagcctggaaatatttacttgatgggtactgttggtgaccccgagcgantgaaaatgaacattctcccactttccatcccggcggtgccacacacgagtctcttctgactgcattgtctttggcat

SEQ ID NO: 6912 - DNA, 504 bp, Homo sapiens
  III.540 (W30935)
  misc_feature (299)..(299): n is a, c, g, or t
  misc_feature (301)..(301): n is a, c, g, or t
  misc_feature (325)..(325): n is a, c, g, or t
  misc_feature (462)..(462): n is a, c, g, or t
  misc_feature (467)..(467): n is a, c, g, or t
caaagtcactgaacaactgatcgaagctatcaacaatggggactttgaagcctacacaaaaatctgtgacccaggccttactgcttttgaacctgaagctttgggtaatttagtggaagggatggattttcaccgattctactttgaaaatgctttgtccaaaagcaataaaccaatccacactattattctaaaccctcatgtacatctggtaggggatgatgccgcctgcatagcatatattaggctcacacagtacatggatggcagtggaatgccaaagacaatgcagtcagaananactccgtgtgtggcaccgcgggantggaaagtgggagaatgttcattttcatcgctcggggtcaccaacagtacccatcaagtaaatatttccagggctggtcaagcttcctttggttaatacacccatggctaaaatttcaacagtggcggcatctgcantcccnggtcccaaaggcacctggatgggtgaaccctggggcc

SEQ ID NO: 6913 - DNA, 320 bp, Homo sapiens
  III.541 (AA024741)
  misc_feature (130)..(130): n is a, c, g, or t
  misc_feature (160)..(160): n is a, c, g, or t
  misc_feature (300)..(300): n is a, c, g, or t
  misc_feature (306)..(306): n is a, c, g, or t
  misc_feature (314)..(314): n is a, c, g, or t
cttgacctcgtgactccacccaccttggcctcccaaagtgctgggattacaggcctgagccaccgcgcccagcccaaactctcaattctacaagcaattttttgtgtccttattatgtgccaggcactgnaactttcaggcctgggagatcaaatgtganccttgctcctgctctcagtgtgttcttcagccaagccctcccccaccaccactttcctgccttgtctcttgccaccaggacctgggcatcctcttccaggaaacttttggggattgaatgcccacttgccatgcagcccnacttgntcccgtgnctagtt

SEQ ID NO: 6914 - DNA, 326 bp, Homo sapiens
  III.542 (AA024742)
  misc_feature (45)..(45): n is a, c, g, or t
ttttattttttttgacacagccaatacatcttttattcaactganagggaccataagtcccctgttgggtaacccaaggaagttcacagttcatcagaaggaaccaattcagataatagctagaaatctgataggcacggagcagttgggctgcatggcaagtgggcattcatccccaaagtttcctggaagaggatgcccaggtgcctggtggcaagagacaaggcaggaaagtggtggtgggggagggcttggctgaagaacacactgagagcaggagcaaagggtcacatttgatctcccaggcctgaaaatttgccagtgcc

SEQ ID NO: 6915 - DNA, 399 bp, Homo sapiens
  III.543 (AA053778)
  misc_feature (223)..(223): n is a, c, g, or t
ggtgcccgcagcctcctgccaggaccgcagctggagacccctggatggacgcagggtccagggggaaagtacgggaggccccgagtgggagtcatagcagggacccgtagccccaccctatccccatccctgaacccgggatcagcgcctccctctggcccatggctggacatcgacgggctgtaccgcatcagtggaaacctggccaccatccagaagctangctataaggtggaccacgatgagcgccttgacctggatgacgggcgctgggaggacgtccacgttatcaccggagccctgaagctcttctttcgggagctgcccgagcccctcttccccttctcgcacttccgccagttattgcggccatcaagttgcaggacaaggcccggcgca

SEQ ID NO: 6916 - DNA, 413 bp, Homo sapiens
  III.544 (AA054262)
  misc_feature (12)..(12): n is a, c, g, or t
  misc_feature (294)..(294): n is a, c, g, or t
gcgaccgccgcnccagtcacaggccagcagtcagtgcggcgggaagatgtccgcgcactgctgcaggatgagctccaccacctggttctggaacaccatggtcatgggcatgctggtctcttccacctcgggccgcagcagcgtgggcccgaacacaatggccacgctctgcaccgacatgcggttctgctcgccgtgctcgatcacccggcagaggtgctggaagagcatccgcagagtgtcgtggttgggagcgggcagcatgcgcaccaagtcacgcacacagcggcttgnccggcccttggtcctgcaacttgatggccgcaatgaacttggcggaagtgcgagaaggggaagaggggctcgggcagctcccgaaagaagagcttcagggctccggttgataacgtgga

SEQ ID NO: 6917 - DNA, 433 bp, Homo sapiens
  III.545 (AA757665)
gggatttatataacgtacacattgtatccaaggatctcaaatacttgcagtcacgtctccagatctgagaaatcacggttcaatggaagccagaaagctggacgaatgctgggcaggttgcatggggtgtaaaatcccttggctaagtctatgatcaaacaaggtcaaagttggttggctagagctgggctcaatttctcttctcaaatatatactaccagtcagtaagttttaccctttcttaaaccacacacccatctccaggctactgcgtagagttaagaccaactgaagtagccatgtcctcatgataatgcatcaggataaaaaaaaaaaacagggaaatacattcatcagcatctggccaaaggagacgggggttgggagaattgatctgggaggcattcctagcaagaacgagacaaagtgtcat

SEQ ID NO: 6918 - DNA, 386 bp, Homo sapiens
  III.546 (R10843)
  misc_feature (17)..(17): n is a, c, g, or t
  misc_feature (105)..(105): n is a, c, g, or t
  misc_feature (362)..(362): n is a, c, g, or t
  misc_feature (372)..(372): n is a, c, g, or t
tgaggagagataaaganagttgtctcctcactgtcagaccccagatgttacatgcagggagcctgctctctttaaggcagtcttggaaatggagcctggagggtnggttgggcagggctgggtcatcctggcataatcccacatctgtgtgcatcgtagcatggctggcaagggagtccagggagcagcttcctcgggcctttaatgcagctgatccagggagctccagcctcctgaaaaggggacaagagcctgactggggcacatctctgcccattacccccctttcctaggagcatggggccaggggcttttgggattaggggtttaacccagcagacgagaccatttagggatttttntccatgggtngcccttcagcattg

SEQ ID NO: 6919 - DNA, 399 bp, Homo sapiens
  III.547 (R10844)
  misc_feature (35)..(35): n is a, c, g, or t
  misc_feature (42)..(42): n is a, c, g, or t
  misc_feature (146)..(146): n is a, c, g, or t
  misc_feature (363)..(363): n is a, c, g, or t
  misc_feature (388)..(388): n is a, c, g, or t
gctgtgtatgcttttagtgcctgtcgtatctaaanatctaanggtcataaagatttgcccctctgttcttttctaagagttgtatggtttaagctcttatatctaggtctttgatctattttgagttaatatttgtgtatggtgtnaggaaggggagaacttcattcttttgcatgtagacatccaggtgtcccggcaccatattttgaagagactattctttccccattgaatggccttggtacacttgttgaaaatcacctgggccatagatgtatggggttgtcaacaaatataaggtgagtcaaaagtatatgctgggattgaattgatatgctgacaccaatagggccacagagcctntccttccaggggggccccccagctnggtaaggggta

SEQ ID NO: 6920 - DNA, 425 bp, Homo sapiens
  III.548 (R66412)
  misc_feature (13)..(13): n is a, c, g, or t
  misc_feature (14)..(14): n is a, c, g, or t
  misc_feature (158)..(158): n is a, c, g, or t
  misc_feature (301)..(301): n is a, c, g, or t
  misc_feature (339)..(339): n is a, c, g, or t
  misc_feature (352)..(352): n is a, c, g, or t
  misc_feature (366)..(366): n is a, c, g, or t
  misc_feature (383)..(383): n is a, c, g, or t
  misc_feature (409)..(409): n is a, c, g, or t
  misc_feature (414)..(414): n is a, c, g, or t
agtgacttgagcnntattttgtggcactggaggttttcccagtcattgtaatgatacaatcagatttgcgttgtcttcaagttaccatggtaaccgtacttccacccaccaagagtggattggagaaggcaaaactagggcagagaagccagggagtnttgagaaggtctgaacccagacagtgggcagctgggccccaaggacggatgggggactccagaagcgtgggagctgggcagagagaaacctgcccggggcattcagaggaaaagggcgactttgcagggaacagagtaggatnaggttgggggaacctttttggggtaaggaaggagcttnaattcagggagcntttttagggcagcngttttttcaaacccttnaggaaggccaaccagccaggggcccngttcnccgttggcttt

SEQ ID NO: 6921 - DNA, 223 bp, Homo sapiens
  III.549 (R67145)
gagaattttttttttttttgaaagacaaggtctcattctgtctcgcaggccagagtgcagtggtgtgatcatagctcactgcagctttgacttcctgggctcaagcaatcctccctcctcagcctcctgagtacctgagactacagatgtgcaccaccacactggctcattgttttcattttttgtagagacaggatctcactatgttgcccagggtggtctc

SEQ ID NO: 6922 - DNA, 427 bp, Homo sapiens
  III.550 (W92262)
  misc_feature (28)..(28): n is a, c, g, or t
  misc_feature (137)..(137): n is a, c, g, or t
  misc_feature (221)..(221): n is a, c, g, or t
  misc_feature (261)..(261): n is a, c, g, or t
  misc_feature (270)..(270): n is a, c, g, or t
  misc_feature (292)..(292): n is a, c, g, or t
  misc_feature (314)..(314): n is a, c, g, or t
  misc_feature (375)..(375): n is a, c, g, or t
gtgtttttccttcagtataaaaccactntagaaaataacttctcttagaaaaaaaaatacagaagaaaaaaaccaaagggttatttttctttggcttcaagcccctcccatgacgtgcagggcagggggtgggcatnaggtgaggaggacgcaggaagcctccacccccacccctgcctggcagtcccagattacatgatgctgcagttctgggggctctnggttcgggggctggagttgcccaggaggtaggagcgggtnaccagattntccccgaagctgccacccccantgccccccacactgcggtactncgaagtgaccgtgacactggaggcagaagagccagaggagatgggtccgcccacctgggtncctgagccgctggcagatgccttgtcggcaggctgccgcaggtcccgcacat

SEQ ID NO: 6923 - DNA, 394 bp, Homo sapiens
  III.551 (W92263)
  misc_feature (167)..(167): n is a, c, g, or t
  misc_feature (260)..(260): n is a, c, g, or t
  misc_feature (280)..(280): n is a, c, g, or t
  misc_feature (303)..(303): n is a, c, g, or t
  misc_feature (350)..(350): n is a, c, g, or t
  misc_feature (358)..(358): n is a, c, g, or t
  misc_feature (386)..(386): n is a, c, g, or t
tccgctgcatcatttattgaaccaacgtggcctacaaagtaaaccgcatttctgtacacctgagagctggaaatgttggtttgggttccggggcgtcctgcgcagagaggagggaacgggccgccctatcgcagtgcgggaaccctacagatcccccggagacgganggcctggaccgcacccccggcggcctcagggagcagctgggaccttgggccactgcggcctaggaggtggctcttaccctggggccggcaagngagtggtggactcgcagctncagcccctgcccctcggccatgnccaattctagcagtagaggcctctcacaggcctgctcgggtgaccancccccatncccgtggccgcgggaaagccttgccctnaaggaagg

SEQ ID NO: 6924 - DNA, 177 bp, Homo sapiens
  III.552 (AA026768)
  misc_feature (156)..(156): n is a, c, g, or t
gatatgttactcctgtcaaaaatcagggtcagtgtggttcctgttgggcttttagctctgtgggtgccctggagccaactcaagaagaaaactggcaaactcttaaatctgagtccccagaacctagtggattgtgtgtctgagaatgatggctgnggagggggctacatgaccaat

SEQ ID NO: 6925 - DNA, 391 bp, Homo sapiens
  III.553 (AA026805)
  misc_feature (9)..(9): n is a, c, g, or t
  misc_feature (22)..(22): n is a, c, g, or t
  misc_feature (30)..(30): n is a, c, g, or t
  misc_feature (33)..(33): n is a, c, g, or t
  misc_feature (35)..(35): n is a, c, g, or t
  misc_feature (36)..(36): n is a, c, g, or t
  misc_feature (37)..(37): n is a, c, g, or t
  misc_feature (88)..(88): n is a, c, g, or t
  misc_feature (96)..(96): n is a, c, g, or t
  misc_feature (301)..(301): n is a, c, g, or t
  misc_feature (332)..(332): n is a, c, g, or t
  misc_feature (347)..(347): n is a, c, g, or t
  misc_feature (358)..(358): n is a, c, g, or t
  misc_feature (370)..(370): n is a, c, g, or t
agataaatnctttatttcaaangtgcaaanaangnnngacaaatcacatttctttttatcatgtatacttgtaccaaagacttatgantagatttntgaattggagtagaaaacatagacatttctaccttgaggatatagaagggaacttaggaagtgagaagtcagattaccctagtcctctagggtgcttaaagctaactagtcccgtgaatgagaatctaacctatgtgaaaatctccagcctgtacctgtacagcatcagccctgggacaacacagtcagggggcaggctggtagncacatcccttagcctaagagtacccagctgncagggaaaagtcccnatggccacagngaaaaaagggtnctggggtgggaagagaacgca

SEQ ID NO: 6926 - DNA, 343 bp, Homo sapiens
  III.554 (R99293)
  misc_feature (65)..(65): n is a, c, g, or t
attgcatatttggcaggtttttaaaaattgtttgcagcaatagaagtaattgtttacaattggtncctgtttctgactggataaaactcatagtagcaaaaaaactttcacaataacagctcctgaaaagttgaagttggtcataaaataaattactaattttaaattcataaaagaagtacctgactataactgccaaacatgaaggtatcaaagtactaatgtactcatgtccttgtacaactgacctgtatcagagtgcctcattttcaaaattaggactctctcatatttctacaatttccaaatgcattatcaattttttcattgtttttgaaatccg

SEQ ID NO: 6927 - DNA, 422 bp, Homo sapiens
  III.555 (R99381)
gactttactgattgagaaaacagttttagtttagctgaggttgggaaagactacacaaatcataatgatgaagaactgtagcatgcatccagtgtgccagttttgaaaaagggacaggtgggaggtcattgaatgatgggggcaagtcttttctgtactgttcttgtgatagtgaataagtctcatgagatctgatggttttaaaaagaggagtttccctgctcaagctctctctctttgcctgctgccatccatgtaagatgtgacttgctcctccttgccatctgccatgatgtgaggcttccccagccacgtggaactgtaagtccaattaaacctcttttctttgtaaattattccagttctttggggtacgtcttttattcagcagcgtggaaaaccagacttaatggcaatttgcc

SEQ ID NO: 6928 - DNA, 451 bp, Homo sapiens
  III.556 (AA016037)
  misc_feature (319)..(319): n is a, c, g, or t
  misc_feature (329)..(329): n is a, c, g, or t
  misc_feature (345)..(345): n is a, c, g, or t
  misc_feature (394)..(394): n is a, c, g, or t
  misc_feature (434)..(434): n is a, c, g, or t
  misc_feature (446)..(446): n is a, c, g, or t
gggaggggggcaagatttgtaagaaataatctttcaaggaaggaaggaagggagaaacgaaggaaaggaggtagaggggtaatagaggggaaggaaggcaattttttaaaaagatgtttgtttaaggattttcaagggagttttttttaaagatcccctgtaagtattgctgatataatttttaaaaggtgaacacttttaaatgacacctttctcatgatcatatttatcatctatcacaaaccagtggcttgttttgttcataagacagctttccagaaaggtctcagaacctgtggccatcgagtcaccttgggtnggtttaattncttggttcccaggaangggaagccatggaaaactcccgtggtcccagaagataattttaattaantttggggccaaaaattccgccaattatgggggaatttagncttttaagggcntttgg

SEQ ID NO: 6929 - DNA, 443 bp, Homo sapiens
  III.557 (AA016128)
  misc_feature (102)..(102): n is a, c, g, or t
  misc_feature (136)..(136): n is a, c, g, or t
  misc_feature (412)..(412): n is a, c, g, or t
  misc_feature (429)..(429): n is a, c, g, or t
ccagatcagcctgtgagaatgagggctccataagggtggctgccgttctacccccacccaaaccagagtaagccatccctggtttgggtgggggcagaacgnaactaccctcagggaagcttcaatcttcatggcncttagtaggtgctcaataaatatttgttgaatctgcaatatctactcagtttgcacactgtgtagtcagtagcagtcacctattcatctctgcaacctacttctaccattttctcttcatccagaacctcaaaagtcacacaactgtagagccaaaagagacctatgagagcatatgaggaacagagaagtcctaagcactttgatgtatttaggcatttcactgtgggcacctttcccaatcttggaaattaagtatctgttattcttctggatnaaatggattaaattatnctgggccccttttt

SEQ ID NO: 6930 - DNA, 417 bp, Homo sapiens
  III.558 (H63098)
  misc_feature (85)..(85): n is a, c, g, or t
  misc_feature (106)..(106): n is a, c, g, or t
  misc_feature (136)..(136): n is a, c, g, or t
  misc_feature (176)..(176): n is a, c, g, or t
  misc_feature (191)..(191): n is a, c, g, or t
  misc_feature (228)..(228): n is a, c, g, or t
  misc_feature (375)..(375): n is a, c, g, or t
  misc_feature (395)..(395): n is a, c, g, or t
  misc_feature (402)..(402): n is a, c, g, or t
  misc_feature (411)..(411): n is a, c, g, or t
gatgtgtgcagcagactaaaacattaatgagataattgatttttgtcccataacattacaaagctgattcgactaagccccagangaaaacagccagggtgctatngtcaccttagcttagcatcttggcttcttngtatctgtagttgttggaacattgaagagacgcttcaagnattacagttgcaggntcccagaaagcctaataacaaggctctgggctgtcgnccaccagttcacgtagttatagtttgattggataaggaaaaagtcagccattttcctcatccgggcaaagttgtagtatcgccacatgtgaaaggatattgttctgcaccttttgtgtgccgtcctcaattggcatccagagtttcnttcagttgttttctttcccnctgtttngtgatcagnctcagg

SEQ ID NO: 6931 - DNA, 372 bp, Homo sapiens
  III.559 (H63184)
  misc_feature (28)..(28): n is a, c, g, or t
  misc_feature (43)..(43): n is a, c, g, or t
  misc_feature (46)..(46): n is a, c, g, or t
  misc_feature (48)..(48): n is a, c, g, or t
  misc_feature (71)..(71): n is a, c, g, or t
  misc_feature (101)..(101): n is a, c, g, or t
  misc_feature (334)..(334): n is a, c, g, or t
  misc_feature (342)..(342): n is a, c, g, or t
  misc_feature (347)..(347): n is a, c, g, or t
  misc_feature (365)..(365): n is a, c, g, or t
ggctccagaaagcggcatgtcccatttnctctttggggctggnatngncgttctgaatctagtgacgtctnccaggagccagaagacagaacctctaagtngctctggggaccagccactcttccgtggagctgatcgatatgactttgccatcatgatacctccaggaggcacggaatgcttttggcaatttgcccaccagactggatacttctatttcagttacgaggttcagcggacagtggggatgtcacatgaccggcatgttgctgccacggcacataacccacagggatttcttcatagacacctcccagggtgttcggggccaganttaacttntctanccaaggagacaggttttntattcag

SEQ ID NO: 6932 - DNA, 457 bp, Homo sapiens
  III.560 (H99213)
ctcatttaaaattatttatttaatataaatatagcagaggagagagttacaaggaccctaggaacagggaataaaactattttaaattaaatgtgtaaccccagaatgcaagtgacttttactgtcttcaaggtacaatccttcttgtcatcttgatattctaatcttggttccattatatgcgttttcacaatgtcagatagagaatgcctaacactaagatatttaaatcagatcagcctgacctgagatacacattttacgtcaagttgccataaaccggcagatccaatttctaagatgtagcatgtttgatcattgcaagtgtggggaggggtctcctcagggtccctggccttgcttggttactgtcaactccaaagtgcatttatttcagtgaagcaccacctcagcccatgacctttcctggaaatggatatagatgaactcacaaggc

SEQ ID NO: 6933 - DNA, 452 bp, Homo sapiens
  III.561 (N24495)
  misc_feature (3)..(3): n is a, c, g, or t
  misc_feature (21)..(21): n is a, c, g, or t
  misc_feature (112)..(112): n is a, c, g, or t
  misc_feature (352)..(352): n is a, c, g, or t
  misc_feature (369)..(369): n is a, c, g, or t
  misc_feature (413)..(413): n is a, c, g, or t
  misc_feature (431)..(431): n is a, c, g, or t
  misc_feature (445)..(445): n is a, c, g, or t
tgntgcttccagctttttgancaagaagaagtttggcctccagttattacaccttgaggtcagcgggtatctcaagtctgagtagttataaaagtgagctgatgtagaaacnccaccaaagcaacgttttatctaaatatttcagatcccccattataaatcatttattatgattacccttttggtgtcatggaatgagatgatgagcttttcttaatgaagtatttcatagacatattttttccatttatcttggtgttggatgctatgtgacctgaatggcaaatgaggaaatatttgtgcaactcctgaaatgcacacatctccccatgccaggagtgccagggagcgngacagggctttccctgngcagccaaatagggaggcccgggtccctggagtagggccctctnccagccctggactggcanccataggcaggtgnacatctg

SEQ ID NO: 6934 - DNA, 440 bp, Homo sapiens
  III.562 (AA069128)
  misc_feature (1)..(1): n is a, c, g, or t
  misc_feature (3)..(3): n is a, c, g, or t
  misc_feature (4)..(4): n is a, c, g, or t
  misc_feature (5)..(5): n is a, c, g, or t
  misc_feature (6)..(6): n is a, c, g, or t
  misc_feature (43)..(43): n is a, c, g, or t
  misc_feature (44)..(44): n is a, c, g, or t
  misc_feature (211)..(211): n is a, c, g, or t
  misc_feature (433)..(433): n is a, c, g, or t
ntnnnnagaggggagaaactgctcccagtggagaaccacttanngtagagaaaggcttcagcaaatccagatgttctggcaaagatgggaaccaggttcctcggactcagaagactgttggtctccacaaggcaagagtgccctctggtggccagagtcagtaccggcggtcgagaggagctcagagccccggcctaggctgggtgcaganccacagccgactctgaggtgaaggggtgatgcccaccttggaatcctctgagaggaggaagagagttgcagaataaaagcattttgtgagaaccttcccatttcaaacccccttagcaaatcatggactatccaccaaaggcgtacaggtctaaacgtagcaacacactcttgcagcctgtttgtttcttggtgcaaccaggttgacagcacatcctctggncatctgt

SEQ ID NO: 6935 - DNA, 430 bp, Homo sapiens
  III.563 (AA069365)
  misc_feature (294)..(294): n is a, c, g, or t
  misc_feature (295)..(295): n is a, c, g, or t
atttttatatatttaattgggaagacatccatgaaatattgtgttatggagcagcatgtatagtattatccatgtctatttgggcacaatcaggattgcctcaggaggtcattcacgaggtattccagaagaaggcgttgttatagcagatgacagctccatgcatgttatggcccctgaagactttcccgtgggacaagatgtggagcactgaaatcttatgtataaaatatttatatggtgcttgaatttttttcttccccctgggtcagggtcttcattagggaatgaaanntcggaggacggggattgtcctcactctcaccaacaactcaggacagcaaatacttttgctttttgtttttgtttttaaatctccaaggcggggcggggcacggtggctcacgcctgtaatcccagcactttggga

SEQ ID NO: 6936 - DNA, 321 bp, Homo sapiens
  III.564 (R17853)
  misc_feature (37)..(37): n is a, c, g, or t
  misc_feature (43)..(43): n is a, c, g, or t
  misc_feature (75)..(75): n is a, c, g, or t
  misc_feature (298)..(298): n is a, c, g, or t
  misc_feature (304)..(304): n is a, c, g, or t
  misc_feature (309)..(309): n is a, c, g, or t
actctgggagcagagtgccaaactgtggggcactggnggcggncctgggagccccagctgaggagctgccgcacnagcaggcccaccatatggggccttggaggaggggctggaacctgaaccttccgccttctccttcctctctctgcgccgtgagctgagtaggcctggggacctggccacccctgaaagctctgcagcggccagcccgaggcgttattcgggcagagggggtaccagcctcagcctattaggtcttgtcttcggagcccccagggtaaccagggcacaaagttgnctgttnccctnggtgcccttgcc

SEQ ID NO: 6937 - DNA, 348 bp, Homo sapiens
  III.565 (R43104)
  misc_feature (145)..(145): n is a, c, g, or t
  misc_feature (236)..(236): n is a, c, g, or t
  misc_feature (325)..(325): n is a, c, g, or t
ttttttttttttggtttcaccagcgtttaatgtgctctgatgttgaccgtccctctgagtgttctggggaggagggggtggggcggagggtcaggaaagcagactcagcttccagggtcagggagttgtgggcccagagggctgntcacagtggatgcaccctgccccctccctcgccagacccgagggtagggcagaggcacctcctcgccagcctgtgggttgcacccacaggnaatggaggggaggggcaccattaccactggacccaccaagaccccgccgcctggggtgggctgtccacaggccctttccgcccagcagnagtgacgtttagggccttcccag

SEQ ID NO: 6938 - DNA, 456 bp, Homo sapiens
  III.566 (R19959)
  misc_feature (385)..(385): n is a, c, g, or t
  misc_feature (398)..(398): n is a, c, g, or t
  misc_feature (433)..(433): n is a, c, g, or t
  misc_feature (440)..(440): n is a, c, g, or t
catagacagatggtccaggatcgtgtttccattcactttttctcttttcaacttagtttactggctgtactatgttaactgagtgactgtacttgatttttcaaagacttcatttaacactgagtgaaatattactctgcctgtcaagtttttatacctgtacacacacagacacacaagcagacacacacatatatacatacgcaattgtatatatatgtgaactttctcagcatatatataaaatacacgtgtatatgaggatgtatgtgtatatgtttatacacacaggagtcagtgcccatgtgtatgggaaggacaaatacacatacatatatacattttgcagctatgggacaatttatccacagggatggcattattnaaaggaaagtccntaggtttttttctttggttaattggaaggggacangtattcntctaatgttatggcct

SEQ ID NO: 6939 - DNA, 475 bp, Homo sapiens
  III.567 (R45062)
  misc_feature (294)..(294): n is a, c, g, or t
  misc_feature (319)..(319): n is a, c, g, or t
  misc_feature (357)..(357): n is a, c, g, or t
  misc_feature (363)..(363): n is a, c, g, or t
  misc_feature (393)..(393): n is a, c, g, or t
  misc_feature (406)..(406): n is a, c, g, or t
  misc_feature (425)..(425): n is a, c, g, or t
  misc_feature (453)..(453): n is a, c, g, or t
  misc_feature (461)..(461): n is a, c, g, or t
tttttttttagaaagatctcatctaaatagtaagttaaggttgcgtctatgaaaccggtgcaccttgtcttgtttctacgagctttaaaaagtccaaatactgatgaggctgtggatcagaaggaaccaacagtgactgtgtttgctgtcaggttgccctcctttgcctcagagaacggtcatgggtcgttgggtgacgcgtggtgtgtacgggtcatgttcctgcagaatcctagttcagtctaggagtagttggatgtgcttatgaaatatgtcagatacagaaataaaggncatgaggatgattcttagtttctgnaaattgaacagtagaagtgttttaggctttcaatcttnaatttnctaggattaacaggaaagtaggtttacatncacattaaagggnaaatatggacatcggcttnctggccatgattaggcaagcgttaggtnacaaattnttgggtaattttac

SEQ ID NO: 6940 - DNA, 313 bp, Homo sapiens
  III.568 (R50823)
  misc_feature (199)..(199): n is a, c, g, or t
  misc_feature (207)..(207): n is a, c, g, or t
  misc_feature (214)..(214): n is a, c, g, or t
  misc_feature (231)..(231): n is a, c, g, or t
  misc_feature (251)..(251): n is a, c, g, or t
  misc_feature (293)..(293): n is a, c, g, or t
  misc_feature (306)..(306): n is a, c, g, or t
tttttttttcaggaatgaatactattaatttattcagaaatatgaactttcctgatataaaatatttataataatacaataatttgaaaactaacaatcagacaaaggaaatgagtaacattactaaagacaacagtagaaatttaaaaaaaagtagaattcaagattactaaagggttaaaaaaaactaaggtgaaangtgaggangacaaanttaacagacggtcgganagctacagatacctacattnttctagaatttctgatttcctcctagagtcctgggcttacantatttggggattntaggctt

SEQ ID NO: 6941 - DNA, 403 bp, Homo sapiens
  III.569 (N33032)
  misc_feature (160)..(160): n is a, c, g, or t
  misc_feature (170)..(170): n is a, c, g, or t
  misc_feature (249)..(249): n is a, c, g, or t
  misc_feature (258)..(258): n is a, c, g, or t
  misc_feature (312)..(312): n is a, c, g, or t
  misc_feature (323)..(323): n is a, c, g, or t
  misc_feature (347)..(347): n is a, c, g, or t
  misc_feature (370)..(370): n is a, c, g, or t
  misc_feature (384)..(384): n is a, c, g, or t
agagtgctaactattacacaatggggcctagactagatattttaaaatcagtgtctttaggaattgtttgagatgattagaatacaaattcttgaacttcatcaccaagtttctatttcagtaggtcagggaagcacattttgaagaacactaaaatagnccttcaatgnttgaatccaattatgcataaggtattaatataagaattatacctaagatattgatataatactacactaatataaaggnaccatttgnagagttatacactgctgaataatacctgtgctaaattaccaaagtattttatgnccccctgtganggacccccttggccaagggttgcnaatatatatggtaaaaaaacccncctggcacttcccnccatttggacttactactg

SEQ ID NO: 6942 - DNA, 337 bp, Homo sapiens
  III.570 (N42093)
  misc_feature (30)..(30): n is a, c, g, or t
  misc_feature (33)..(33): n is a, c, g, or t
ttgtcctgtgtatgtgaatgcacacatgtnacnttagttcaaatactaaaagtagcttttattaaatataatcagccaaaaacacacacaaaataaaaaaaacaaatataagtagtcagtttttcaatgttatcctactagttctacattctattttaatttttatacaatttccattttatagttaagaaccatcacttacttggattggatgtctttcattcctagcactaatagttggctttctttttttttgtttacatagaagcagggtttttttttatcttttttctttttttttgtttaagctatataaaaaggtgagggaagcagtttt

SEQ ID NO: 6943 - DNA, 368 bp, Homo sapiens
  III.571 (R14508)
tagtcacaaaccaaacaaaacttttgaaaatgagctatattttgttcaaagataattgatttgatcttatatttatttgtttttaggataatttttgatctttttgtaaactgctttgcttgttaatatctgtgaaaaataaatgagttcattttgttcactttccaattttcccgagtatcctagtcatcaaagataacagttcatcagaattacagtcagaaaatcctttttctactgaatagttaggcaggggaaaaataattctgatatttaactgtcataattctgtaggtgctattataggtggaaaaactcagttctataaggctaggctgtgttgtcacagttttatcataggttccata

SEQ ID NO: 6944 - DNA, 353 bp, Homo sapiens
  III.572 (R41168)
  misc_feature (334)..(334): n is a, c, g, or t
tttttttttttaagggatatataaatacatttattggtggtattcctgaatgatgaatgcagagaacagaatacaaagaaatcagcacataaaaggaaccattaatctttaaaaatgctatatacttacattttgaccaattttgcatatttgtttagatttacaaacaaatgtaaagctaattccaaagttttcttctgaatatacttcaaatttgaattgtagtgttctccattccaaaggccaggctgttttttgctgggatttacaccaactatggatttactttgtttgtatctaacctaaaggcaggactctggcaggctggattccngaggcggccagtttactcg

SEQ ID NO: 6945 - DNA, 443 bp, Homo sapiens
  III.573 (R31092)
  misc_feature (7)..(7): n is a, c, g, or t
  misc_feature (12)..(12): n is a, c, g, or t
  misc_feature (400)..(400): n is a, c, g, or t
  misc_feature (412)..(412): n is a, c, g, or t
  misc_feature (417)..(417): n is a, c, g, or t
caatatnttttnttatttgacaattatttattcatttgacaattattcaatgtttactgcataagcaaaaaactgaataagacggttttctgcttttataaaacttacagttaagtagaagggacactgcataagaagtaacatgggagaaggctcaagtgttgacaactgtgatgaagagagatgggagggtccagaaggaaattcaactgtgggcgagagggcaactaaaaggttcctgcagtccgggagttcaggcaacctatgggctcattaaggctattcagggataggaggacagctgtgggctcatatgggctaggtgaggacaactttcccaacaggaggtttaggttcaacaatggataagggagggaacagtttttcactacagggaggnggctactgcggnaactncccgggggcattcggcccgggggctt

SEQ ID NO: 6946 - DNA, 407 bp, Homo sapiens
  III.574 (R31140)
  misc_feature (261)..(261): n is a, c, g, or t
  misc_feature (362)..(362): n is a, c, g, or t
  misc_feature (399)..(399): n is a, c, g, or t
gattttaggagttgtatgccaggaagggagttgaagaccaactatatatttcacaatatcacagctgcccagagtgagatcggcagcctttaaggtattcatccagctgaatgttcccacatgccctcaagtacttaccacccaactctgtagcagtgcacagtggacataaggtggtgttggcagtctcagtcctatttaatgatggccagagatacctcctgggtcagccaaagccctggctgaactgccaggcagttngcggcagtagctcttcctgttagtgaaactgttcttcttatcattgttggactaaactctgttgggaagttgtctcactaggccattatggaggccacagntgttctctattcctggaataggctttaatggaggccntaggtttg

SEQ ID NO: 6947 - DNA, 442 bp, Homo sapiens
  III.575 (H00128)
  misc_feature (380)..(380): n is a, c, g, or t
  misc_feature (388)..(388): n is a, c, g, or t
  misc_feature (424)..(424): n is a, c, g, or t
  misc_feature (431)..(431): n is a, c, g, or t
  misc_feature (437)..(437): n is a, c, g, or t
acccagagtcacaaccaaattgatttaagaccggacccaagacacctttaacaataggactgaaaggaaaaaggatagggaaaaagcttattaaagaaatgtgtcaacaccaaatgtagaggggaagaaccacaaccaggcataataccaaaccggttccagggggaaacaaggctttggtattccgctggctccagcgctttttctgaaacccgaggctggccagggtgctgtcaccatgcggtctttgattgcagccattcaatgcccacatgcttttccttcttgtttcagaacagcacatggtcacaacaagatattttctttccctccaaagccttttgtctccttgtgcctctttttatccttagggaaaaggnccaggtgnttgtggaaaagattcatgaatgcaacaagggagggngggtccngtttgncgttc

SEQ ID NO: 6948 - DNA, 373 bp, Homo sapiens
  III.576 (H05058)
  misc_feature (120)..(120): n is a, c, g, or t
  misc_feature (296)..(296): n is a, c, g, or t
tttttttttttttgaagtatatgcctttcatttaattttgcaaagagctaaacactttcaagtcttacataaagagatcgtctccttgatgaaaagataaaaacaaaatacaaatcagantaccagtgtggtttccatcatttgaacttattttattgatactcattagtgaataaaattgtgttgatttttgatgcattacaacacactttttggtagtggttgcacaatgttgaccgtttatttatttactatactaagtattgcaacctctgaactgccaatttttacatggnatttctggcaatgtatgagtggcttctctctctggaatacataaaatggtccatttcagtccatgggttttcatatt

SEQ ID NO: 6949 - DNA, 421 bp, Homo sapiens
  III.577 (H46002)
  misc_feature (9)..(9): n is a, c, g, or t
  misc_feature (10)..(10): n is a, c, g, or t
  misc_feature (12)..(12): n is a, c, g, or t
  misc_feature (92)..(92): n is a, c, g, or t
  misc_feature (333)..(333): n is a, c, g, or t
  misc_feature (391)..(391): n is a, c, g, or t
  misc_feature (411)..(411): n is a, c, g, or t
gaaagaatnnanttaaggttttattgagtggtggagctggctcttggtgagatggatggggagctggaagggggatggagtgggaaaatganctttctccgcagtgtggccgtctagcagctaatctcctctctgaccatccccaaccaaagtcttgtcaatgttcagtcactccttctcttctctttgccactccattcttctgttcttctgctcttctctttgtctctcccttatttgcaggaggtcacagggaagtagagagggggatgaagaaatacatttccatcctgaggtggtctgccatctcacttgaagagggtgctacaggantaagaagtgttctttttctcgttgtaattcaaggggcaatattccgggttagggaatnccatctctatggagcaggtnttgacattgt

SEQ ID NO: 6950 - DNA, 510 bp, Homo sapiens
  III.578 (H46074)
  misc_feature (406)..(406): n is a, c, g, or t
  misc_feature (466)..(466): n is a, c, g, or t
  misc_feature (490)..(490): n is a, c, g, or t
gcggcacgagggtgtcagtcaagaggcaacactaggaggcaaggaatctgcatttctttcagaccttggcagagagcgccctgggaaatgcggatatagaaggtcaggagaacatctctcctggttatacagcattccaggactcctcatctgtttttaagagggaaatctgagttttcaaggaaagccgaatacagttgccaagttgccagtcaaagaaacaatgtcaacacctgctcatagagatggaattcctaacccggaatattgcccttgaattacaacgagaaaaagaacacttcttattcctgtagcacctcttcaagtgagatgggcagaccaccttcaggatgggaaatgtatttcttcatccccctctctaatttccctgtggacctcctgcaantaaggggagaggacaaagaggaggaggcagaaggaacagaagattggagttggccaaagnggaggaggagggagtgattgaacnttgacaagattttgggttgg

SEQ ID NO: 6951 - DNA, 349 bp, Homo sapiens
  III.579 (R84684)
  misc_feature (45)..(45): n is a, c, g, or t
ggactccagatttcatcagagccccagtgatgtcctttgactgtnacacatgttgaggctgtttgcaactgactgctctactgagataccccggacacagctggaggctgaagcatttcctcccagtcacagcagctcggagcctccctgagaattccctagttatatctgcctgtgtagtcacttgtgcactgatccatcctgggtttgacaaagcaattccaaaatgatgtcccgagttcacaccatacatggtttctgccagagacagtttacagatcttcagactggaagaaggccgtactatttagtacccacaaagacattaatcctcttttctgtattaggc

SEQ ID NO: 6952 - DNA, 376 bp, Homo sapiens
  III.580 (R85647)
  misc_feature (135)..(135): n is a, c, g, or t
  misc_feature (166)..(166): n is a, c, g, or t
  misc_feature (211)..(211): n is a, c, g, or t
  misc_feature (246)..(246): n is a, c, g, or t
  misc_feature (268)..(268): n is a, c, g, or t
  misc_feature (294)..(294): n is a, c, g, or t
  misc_feature (301)..(301): n is a, c, g, or t
  misc_feature (309)..(309): n is a, c, g, or t
  misc_feature (350)..(350): n is a, c, g, or t
  misc_feature (360)..(360): n is a, c, g, or t
  misc_feature (367)..(367): n is a, c, g, or t
  misc_feature (372)..(372): n is a, c, g, or t
gaaatgtgctttagaaagagatataactgctatctggtaaagcctcactcactgaaggataagacacaagataaatagggccaccagaaaatctcccgtttttttgatatctgcaatcactgattttcaagggantgtaagaggtaatgtggattacataactgantcactgaaaacattttactacagttttattactttcagatatganctagaataaattccttgccagctaagtatttcccnttctaagttctgctctaggtgnatgcaaacgtaactggggtataaacncaacatnttaatctnttaagggttgttaatgagcttgttctctttgggggaggtgnatccctcccnctggtcngctcngcca

SEQ ID NO: 6953 - DNA, 492 bp, Homo sapiens
  III.581 (AA019731)
  misc_feature (487)..(487): n is a, c, g, or t
ttcataatttgtcatttattgagtccaaatgtttatgcttgcaatactaaatattttgttttttctctcaagacaaaaaaaaaatccaaggcagtctgttttctcctcttaaatgtaaagtgatttcatcagtaatatttcagaaagtagaaaaaaactatgctttgattgcatcatcacaatatgggggggatacatggatcttgatccgggcattttaccataaggtagtaaacaactggtgacctctctattttgattgtgttgaaaaagggctaccaccttggcttgctgaaggtttgctagagctcaaaacaggaaaagtactagcttaaaaggcatgctggagattttaaaggtcctaaagctcaggtttaagtaacttttaaacaatccaaaaataggcattttgaattccaagtggtaagcccccgaattttccaaggagtttccatattaaattaccttttgggaccttgaattaccnacccc

SEQ ID NO: 6954 - DNA, 424 bp, Homo sapiens
  III.582 (AA019766)
gagaaatagtgatgggtctgttttgcagtaaagtttatgcagaatgacgttttgcagaaaataacagaagcatcactttaaaaaatatatcattaagagccatgacgttaactgatgaaaataagtgatataacatactttgaaagatttttaaacagaaaattctgaatccgtgaatgagccttctctaggttttaattttttttcttcaaattatttccaacaaagtttggctataaactaacaccatctatccacaggaattttaataggaaaggattagaattgtagactgattgttggtcctttaagtatgcttggaagaaaattcaatccgagtttcaaggctttttctaaatggggagggagaacaatattgattttaggattattttcctttccatttaggatttaggaacagtta

SEQ ID NO: 6955 - DNA, 451 bp, Homo sapiens
  III.583 (N73100)
  misc_feature (408)..(408): n is a, c, g, or t
  misc_feature (430)..(430): n is a, c, g, or t
tttgaggtaaaagtgcctttattgggagacttttgtcttccagcctgccaatcaaccctcctggtgtggccaccatatgtgtgtgcctaggtcctccttctgcacgatccaataggagacaccagttctgactgaaccatgcccccacctaagtcacaaaatgagggaagtggggacttagatttcagagtccaggccctaggttgggacccactccaaataatctcctcggtgtgggtggtggttctatagagggataaatgaataataaacattgttaaaatataccgataatgaataaagtaatcctttcatcaaatgtgggtaaatttcaagcatcaggagggggaaatggagtggaaacagctgggggcaaggaggcaaagaagccaggcctgttttacaacnaatattaattacttcaataatncaaacgagaggcccggtgcgg

SEQ ID NO: 6956 - DNA, 170 bp, Homo sapiens
  III.584 (W02105)
caaccgcacccaagcagacgtcgccactatcaatgtgacgcgggatcagggtcagactcggaatcttgctccagctcgccctccagttccagttccgaatcatcagaggatgatggcttcttcctaggagagcgcatccctctgcccccgcatttgtgcaggcccatgcc

SEQ ID NO: 6957 - DNA, 394 bp, Homo sapiens
  III.585 (H59840)
  misc_feature (1)..(1): n is a, c, g, or t
nctaacttacccatcgagagcggcccagctaggggtcaggctggcccttaacagagaccaaggagacttggttagacgacacaaacggggctgcgggtgggggtggatgggaaagggatttcatcacgaggtttctgccctaccctttagaagagtggtagagtggtcttagtttttccagaaataagcacctacacttgaaaatactctattccctttttctctctcacttttctcccccgccccccatagtctttcgtcattcacccactgagtgtttgggggtaggagacttgtcccaaagatgtcttctgggtctttgggcagagccccttaagggctttgagcccggggttgggagagggaaacagtaaggacttttgctgggagctcc

SEQ ID NO: 6958 - DNA, 356 bp, Homo sapiens
  III.586 (H60654)
  misc_feature (14)..(14): n is a, c, g, or t
  misc_feature (32)..(32): n is a, c, g, or t
  misc_feature (33)..(33): n is a, c, g, or t
  misc_feature (145)..(145): n is a, c, g, or t
  misc_feature (164)..(164): n is a, c, g, or t
  misc_feature (183)..(183): n is a, c, g, or t
  misc_feature (186)..(186): n is a, c, g, or t
  misc_feature (241)..(241): n is a, c, g, or t
  misc_feature (244)..(244): n is a, c, g, or t
  misc_feature (335)..(335): n is a, c, g, or t
cctccttccttccntccttcctcccctccttnncgggccttccctccttccttccttctcttcttcctcttcttccctctgcccattctcctggccctctgcaggtactacctgagtgactgtccggcatattttcagccccttntcatgggtcccatcatcgncattacgctctgtctcatnctnagagatgcgagagtcatcagcatgaagatccacaacagcctcctgccccgccagngtnttgatgtcggggatgaggctctttagtgattcagtggtgatactgatggaaggtttcttctgtgtggtgggctgtgctttgcttccccagngtgtgttttccgaccaggggt

SEQ ID NO: 6959 - DNA, 293 bp, Homo sapiens
  III.587 (R05497)
  misc_feature (109)..(109): n is a, c, g, or t
  misc_feature (244)..(244): n is a, c, g, or t
  misc_feature (261)..(261): n is a, c, g, or t
taaagtttattattaattgttaaagtaaataaatggttgttaactgctagcaaccacctatcaaaagagaatgatttcactcacatcgactatttaggtagaggaaganttgccactaggtcaacaagggagatttaaacaatcccatctatgggctggggaggggtagaagcgctgccagagatggctgcagtaggctgagccttgctctctgcgcatccacgtgtttagaaacaaggccccntcagcaaaaggtgagantgcattgctactccagcagggtgagtcagtca

SEQ ID NO: 6960 - DNA, 342 bp, Homo sapiens
  III.588 (R05604)
accagctgtgggttggctttactaggtgatgtgtgattgactgactcacctgctggagtagcaatgcattctcaccttttgctgatggggccttgtttctaaacacgtggatgcgcagagagcaaggctcagcctactgcagccatctctggcagcgcttctacccctccccagcccatagatgggattgtttaaatctcccttgttgacctagtgggcaattcttcctctacctaaatagtcgatgtgagtgaaatcattctcttttgataggtggttgctaggcagttaacaaccatttatttactttaacaattaattaattaaactttattaaactgt

SEQ ID NO: 6961 - DNA, 443 bp, Homo sapiens
  III.589 (H11425)
  misc_feature (51)..(51): n is a, c, g, or t
  misc_feature (159)..(159): n is a, c, g, or t
  misc_feature (399)..(399): n is a, c, g, or t
ttttttttttttgactgtacaaaccagttttattagggaactgccccaggngcacctctggttcatgctcttgtcacacctgtttctcagatcagcccaggctcagaggcaagttactagctaagcaaagaggaaaactgttctgcaaaatagcaactntcagcttaaggcattactaacattgcagaaggaagcaagatttactagggacatctggatagcccagggacaatgacttctgggaacaggaagctccctagggccagatcgtgctgccatccaacttgggagatgacattatcgtgctgggatggtgggtaactccttcaaaccaatccatgttcacaggaacactatctatttccttgagcttttgggatttagaatttagttattatnaaaaagtactcttgggcccagaagccccaacatgttgcgtgggg

SEQ ID NO: 6962 - DNA, 504 bp, Homo sapiens
  III.590 (H11532)
  misc_feature (340)..(340): n is a, c, g, or t
  misc_feature (441)..(441): n is a, c, g, or t
  misc_feature (471)..(471): n is a, c, g, or t
  misc_feature (479)..(479): n is a, c, g, or t
gctgtcacagcttctatagcaaacgctactcccgggccctctatttaggagccaaggccattcagctgaacagtaatagtgttcaagctctgctacttaagggagcagcacttaggaacatgggcagagtccaagaagcaataatccactttcgggaggccatacggctcgcaccttgtcgcttagattgttatgaaggtcttatcgaatgttacttagcctccaacagtattcgagaagcaatggtaatggctaacaacgtttacaaaactctgggagcaaatgcacagacccttacccttttagccaccgtttgtcttgaagacccagtgacacaggngaaagccaaaacattattaggtaaagccctgacccaaaggccaggttacatttaaggctgtggtgaaaaaagcaggaactactttggcaggggaacagaantatgaaggtgggatttgctttgctgagggnacgcactnggttattcagggttgactgttttct

SEQ ID NO: 6963 - DNA, 312 bp, Homo sapiens
  III.591 (R94281)
  misc_feature (256)..(256): n is a, c, g, or t
  misc_feature (262)..(262): n is a, c, g, or t
  misc_feature (301)..(301): n is a, c, g, or t
ctattattcccatctttaataaattgagatgtagtgtgatcaatttagtgagcattggcagcattttgtaaatggaacagacaaaaaaccctacttaagttagattgatgatcacaataactttgtagtgaataagtgatggaaagaaatgaaactactgatagaagtaaatgaaacaaggattatatgaaactttggcttcatctctgttaaaataccttcttttttcccaatattgcagtctaccatttcaatnttatanaaatatttattctggcttttcataggattccacactgtncatccataaag

SEQ ID NO: 6964 - DNA, 172 bp, Homo sapiens
  III.592 (R94633)
  misc_feature (142)..(142): n is a, c, g, or t
  misc_feature (155)..(155): n is a, c, g, or t
tgttcaagaacacttagttcaaagcatcttaatggacgagaaatctgtttccaaaaaatctaaacaaattcagtgtggaaaaggtaaatcaagtaagagtagtaaaaactgtaaactattctttacatgggaaaaataaatnataatcatatttncttaaagtggcaacact

SEQ ID NO: 6965 - DNA, 582 bp, Homo sapiens
  III.593 (H93123)
  misc_feature (447)..(447): n is a, c, g, or t
  misc_feature (492)..(492): n is a, c, g, or t
  misc_feature (551)..(551): n is a, c, g, or t
ttcatgtttataaacactttatttaggtgattacagtgggtaagttcccagctaagtgcacagatagaagcgaggtatttctaggttaatgcaggagccagtgggttacatgggtctgggcactgtggccaaggggcgagtaccaaggtttctgagtcagacccggccagagaccctgcgctgaaggtggactaatgtcctaacactgccagctgctttctcctcacagctggccacaccgcaaggcatctcttcaacagtaaatcatttcagcgatgttaagggaacagacgttaaagaaatggaagctgtgtcctggtgcgcctcagctgttgctgctttataagtcataatagcatgtgaacaagagttttagaatattcccagtaacaatggagccacagagcgataaagtctgtgtctttctccctcagtgcctccttgccntgttttcctttcatacctgaattccctctttaagctggggatccngatgttgagtcccagcatacaagaaaagtttttcccgatgacaagtttctgcttccagnatccccatcaacaggcattgtctgcagttga

SEQ ID NO: 6966 - DNA, 383 bp, Homo sapiens
  III.594 (H93251)
agatttccaacttatgccttccagaaaaaaacactactgcctaacacaaatctgtgataacaacaggctgtgcttattttgataattttctgattccctagaagagaaccctctactttttgtaagcactaccgactctcgctgtatttaagatgctggtgaagagcttttgctcttgcattagatttgaagatgtttacattgttgttattgttatgtatcacttgctaaaaatattgttttaatcagagataacctctttaaaaaaatttttaaagaactatggctatgaccaaagcttctattttgccaaaaagttaaataccgataaaatgggccttaagtgtattcctgacagttaaattcagaaacgtggccaaatg

SEQ ID NO: 6967 - DNA, 153 bp, Homo sapiens
  III.595 (R85604)
cattctaatgggtctctcattgtggttttaatttgtgtttccctgattattaatgatgttgagcatctttttatgcacttgtcagctatttgtatattttcttttacccagtttctgttcaaattttttgcccattttcattggatttttgtt

SEQ ID NO: 6968 - DNA, 388 bp, Homo sapiens
  III.596 (H17103)
  misc_feature (208)..(208): n is a, c, g, or t
  misc_feature (301)..(301): n is a, c, g, or t
  misc_feature (368)..(368): n is a, c, g, or t
ttttttttttttcactatttacacgtccgtttaacactgcagagacccggtacagaaacgtggggtggcggctaggggaatcagacagaccaggcgcgcgccatcagggctggaccggggcaacagatggggccgggtgaggtaatgctgtcggagctcgggaggaccatgccggtgggcacggcgccccgagttcagcacccacgtntggtcatgttgggggccagtggcggttcactgtccatcagcctcaggacacctccaccctccctgcgtcctcagaccctcagctccttaggantggccctgggagcattggggggcagacgagggaccccttttcaccctgggtgcagagaggccaggtngccagggcaggggccccggt

SEQ ID NO: 6969 - DNA, 446 bp, Homo sapiens
  III.597 (H17721)
  misc_feature (236)..(236): n is a, c, g, or t
  misc_feature (268)..(268): n is a, c, g, or t
  misc_feature (295)..(295): n is a, c, g, or t
  misc_feature (300)..(300): n is a, c, g, or t
  misc_feature (384)..(384): n is a, c, g, or t
  misc_feature (392)..(392): n is a, c, g, or t
  misc_feature (420)..(420): n is a, c, g, or t
  misc_feature (432)..(432): n is a, c, g, or t
  misc_feature (442)..(442): n is a, c, g, or t
ccccacccccagttaacactgctgcttctctgaatgcatgtcacgctgcaccccatgctccgggcccacaccctgcaggacaaggagctccagacaggacgtccataagtcaccgaggtgtgccacccagcaggtgctggaggtgcccaatgctccctcctaggacctcgcagccaggcaaggctgtcaggttgttttgggggaagaaggggtcatggatggctgagcagagagcngggaaaatgcaggcttgagttggggcgacctnctgcctgccaggagccccccttttcangacancagcgggggtctcacaatttgctgttccccattccattggccccgaagggggaaccttggttggtctttttcttgagctttttnggaatttnggggatttccaaaacaacgtggtttaanccttaaaaattnggcccccggncccg

SEQ ID NO: 6970 - DNA, 444 bp, Homo sapiens
  III.598 (H18983)
  misc_feature (5)..(5): n is a, c, g, or t
  misc_feature (16)..(16): n is a, c, g, or t
  misc_feature (17)..(17): n is a, c, g, or t
  misc_feature (19)..(19): n is a, c, g, or t
  misc_feature (139)..(139): n is a, c, g, or t
  misc_feature (177)..(177): n is a, c, g, or t
  misc_feature (237)..(237): n is a, c, g, or t
  misc_feature (267)..(267): n is a, c, g, or t
  misc_feature (317)..(317): n is a, c, g, or t
  misc_feature (332)..(332): n is a, c, g, or t
  misc_feature (412)..(412): n is a, c, g, or t
  misc_feature (417)..(417): n is a, c, g, or t
  misc_feature (431)..(431): n is a, c, g, or t
  misc_feature (436)..(436): n is a, c, g, or t
  misc_feature (442)..(442): n is a, c, g, or t
gctgnggtcaccaagnntntgccagcgattggcagcccaggggcgcacggcctgaggccccaaacggaaatgggccgaggatggtggggatgccccttcacccagcaaacggccctgggcagggcaagagaaccaggangcagagcgggagggtggcatgagctgcagctgcacagntggcagtggtgaggccagtgctgggctgatggaggaggcgctgccctctgcgcccgagcnctggccctggactatatcgtgccctgcatncggtactacggcatctgcgtcaaggacagcttcctggggggcagcacttnggcggtcgcgtgctngccgaggtggaggccctcaaacggggtgggcgcctgcgagaacgggcagttagttgagccagagggcattcccgccgcgnaattnccttggggaacagnttgcntggttnga

SEQ ID NO: 6971 - DNA, 388 bp, Homo sapiens
  III.599 (H19081)
  misc_feature (308)..(308): n is a, c, g, or t
gagcgttttccaaagatgatggagcagatgatgttggcggtaatggaatggaagaggaaggtggggtccacgagggctcccttggatttccgaagttcctctatcagacactgagcctcatcctgaatccgctcctccacactccgctttcccatcccgaagtccctcatggtggtcacagagaatcgccgaagcaccttccagcggtttccattggcaaagagcatgccatatccctggtagactgggtccatgatgacgatttttccccggccagagaaggcctcagcgttgtccaccagggcctnccgtatggcctctactccacacagcatgaccacgggcctcggtcccagggtgttaccgtggaagacgttccccatatttc

SEQ ID NO: 6972 - DNA, 430 bp, Homo sapiens
  III.600 (AA708023)
tatcatgcaaatgctgtttattgattttcagattgtagaatcaacctatggacaaagcacagaagatttagttttgcttacagagcagaaggtagatgttaacaacaaggaagatggaaaagtaaagtacatcagaactttagggatacagttagcgctgggggaaccctgctgggtggagacaagctctggggcagaagagaagcccaggaagcccttggcagttgactacgtggccctgggctggatacttcgtcgcccccctgccccaccccacacacctgggtggtgctagaggatgtcgctggcgtgatagcccctcctcgtacccgtcctttagggaggacgaagaggagggagagagttggaaggggaaggtcccaacgctgccatgctcatcagacacagaaggaggtcaccagactgaggc

SEQ ID NO: 6973 - DNA, 429 bp, Homo sapiens
  III.601 (R08895)
  misc_feature (7)..(7): n is a, c, g, or t
  misc_feature (9)..(9): n is a, c, g, or t
  misc_feature (139)..(139): n is a, c, g, or t
  misc_feature (141)..(141): n is a, c, g, or t
  misc_feature (364)..(364): n is a, c, g, or t
  misc_feature (394)..(394): n is a, c, g, or t
  misc_feature (419)..(419): n is a, c, g, or t
  misc_feature (425)..(425): n is a, c, g, or t
ttaagtntnaaatcacctatgttttattataaaaaacatgtgacacttataataaacccagtaaggagcacatacaatttgccctgggttcccattttctgagcgatctgtgtttgcttggggtggaggcaccgggagntnggccacgtggcttcataaagctcagctgcggttctccgtggccacagtgactctgctccgggtacccagtccccgactccttggcctcccaggggccatcccgggggtctcggaaggcacagctcggttagctttgacttcttgggtgtggctgaaactcagcctgtacaggagagctgccattgctgccgcggggcctgccagggtgtgagcacacaagctnacccgggcccaccctgtgccctgggagggnggctctgggcggctgcacccatgtncaagtnacag

SEQ ID NO: 6974 - DNA, 421 bp, Homo sapiens
  III.602 (R10042)
  misc_feature (64)..(64): n is a, c, g, or t
  misc_feature (385)..(385): n is a, c, g, or t
  misc_feature (396)..(396): n is a, c, g, or t
  misc_feature (411)..(411): n is a, c, g, or t
cagaactgaatcagccagtgcccgagcctgctgcaaccccgacccggcagagcaagcggctctntacctcagccacgtagctgatggcatccttcaggttcagctcgtggaagacattcaggatccggtctcgagacttctgggccgaccgtctcatgaggaccctgctgaggaacttcctgtcgaagtgggaccacctgtagggacagaccttgggtgtgagcctcaggtgacaggcgccctagagcccgccggacgcgtggcccggcccctttcttttcctgaattttgttttgttatagtggaccctgttagggcggcgtttaaaaattgaggggaaggcaggcccttgccaacacggcccagggccgttccgcctttcttnccgcttgttcntgtttgggatggganggcctttaga

SEQ ID NO: 6975 - DNA, 335 bp, Homo sapiens
  III.603 (R94934)
  misc_feature (5)..(5): n is a, c, g, or t
  misc_feature (12)..(12): n is a, c, g, or t
  misc_feature (27)..(27): n is a, c, g, or t
  misc_feature (66)..(66): n is a, c, g, or t
  misc_feature (141)..(141): n is a, c, g, or t
  misc_feature (160)..(160): n is a, c, g, or t
  misc_feature (176)..(176): n is a, c, g, or t
  misc_feature (219)..(219): n is a, c, g, or t
  misc_feature (274)..(274): n is a, c, g, or t
  misc_feature (303)..(303): n is a, c, g, or t
  misc_feature (325)..(325): n is a, c, g, or t
taggnttttgancacaaaaatgctggngattcaaacctttaaaacagaagagcatacaacctaagnaaaatgcaaaacaggctacaaacctgtacatcatgttactgcactgaatactgtaggcaactgtaacataatggnatttgtatctaaacatagnaaaggtatagtaaaantacagtattataatcttatgagactgccaacatatacgtgggnctgtcattgaccaaaacatcattatgtaggtgcatgactattaaaattgtgcaanacaaacccctgtatccctaggtgtttaanccctaaaaccaatacccggggntatacctgga

SEQ ID NO: 6976 - DNA, 408 bp, Homo sapiens
  III.604 (R95018)
  misc_feature (237)..(237): n is a, c, g, or t
  misc_feature (243)..(243): n is a, c, g, or t
  misc_feature (348)..(348): n is a, c, g, or t
  misc_feature (357)..(357): n is a, c, g, or t
  misc_feature (377)..(377): n is a, c, g, or t
  misc_feature (384)..(384): n is a, c, g, or t
  misc_feature (392)..(392): n is a, c, g, or t
tgaggaagactacttcagcagccacagggacgagctccagagcagaaaggccattgacgctgccactcaaacagagccaggagaggagatgccagggctgagtgtgagtgaggtgggaacacaaaccagcatcaccacagcatgtgctggtacccagactgcagtcatcaccaggatagcaagctctcaaaccacgatttggtccagatcgaccactactcagactgacatggatgngaacantctctttcctcgaggaactcaatctacagaagggtcaccagtctcaaaaatgtctgtatcgagatcttccagtttgaagttcttcctcctctgtgtctttcccangggtttgtngcaagcttccatggttcttnccgcttncatcaganccactggactttccac

SEQ ID NO: 6977 - DNA, 503 bp, Homo sapiens
  III.605 (N94362)
tttttttttttttgtcttacagtcatctttattatactttataaatcgagatttcatttatataaatcaggaagctaaactaaaatagaaacactagatttaaattctgatttgaatactctgatcaaaataacaaatctcacactgggaaaccatctatcagcaagcagagagctactgtgtgtccttccttagaagagtttgaacaccgagaacccacagcatatttgcagtacagtaacagcaattcctttgtcattatcacagaactttaattttcatatactttgctgggaccaaccaaaccatcccatatatataaccatatccatatatatatatatatatatcccacatatatatgggatggtatatatatacacatgtatatgtatgtgtgtgtgtatatatgtggatacatggtatacacacacccacacacatacatatatatatacacacacacacacacatatatatggagagagagagagagacagtgt

SEQ ID NO: 6978 - DNA, 390 bp, Homo sapiens
  III.606 (H82531)
aaaatatgtaaattcactttcagtatcttttacccaaagaatcattctatacttctgcacaaggtgagaataaaaaaggttactttataaaatgactgtaaaaatagtgagtacaaatattcttttggtcgttatgatgctgtaacattctctgctggtttcaacaatattccttttttttagtcttcctgtttgtctttggacttccaaacagtgagtttaaatatcatagcaacagtgaaccaggttttgtactatttgatttattttttaatctatcttatttgccgtataaaattattaatcttcatcttttaacttacatatcttttctccaggcctaggcattatatattgagggggaaatccactaaaagtaggtccaccaaa

SEQ ID NO: 6979 - DNA, 344 bp, Homo sapiens
  III.607 (H82532)
  misc_feature (227)..(227): n is a, c, g, or t
ggaatctggtgaacagtaacaaactttggtgaaatttcaggaaccatagccattgaagtggatgagggaacctatatacatgcactcaacaatggtctttttaccctgggagctccacacaaagaaggtttgtgtctggaacggaagatcctgccacaagtgtagattttaggacattcattcacttaggccaaactctaactagtctcaaacattttccaaaggantggaaccattgcatttgactcttccatttttttaaattccttaatatgtaccaggccattggcaaggtccctctttctaatataaggcatttggaaaacattccggtataggttcca

SEQ ID NO: 6980 - DNA, 311 bp, Homo sapiens
  III.608 (R34132)
caccacaaagccctccaggcacagctcagcattttgtagaccagcattaaatcttaaaagaagtaaaatgctgccttctcgtggcccatgtacaaaactgatgaaaacagtattgttccttcctgttattgaaaagcagccaagtccaaagcagagagcagcagtatttagattttaaatgagtttgcaaataaaaagacaagagtaccttaatatgacatgaggcaaacctttcagggaaattaaaatttttggaatcagatcagatccaaagtgttcccaaatggggggctttaatactgttaatttac

SEQ ID NO: 6981 - DNA, 410 bp, Homo sapiens
  III.609 (R34133)
  misc_feature (312)..(312): n is a, c, g, or t
  misc_feature (327)..(327): n is a, c, g, or t
  misc_feature (339)..(339): n is a, c, g, or t
taatagggaatatttatcacagctatacatttattcatcatttaattcccatttatttattcattaatttattcaaacacttcttaagcatgcaccatgtgtcatgcccatcttagaggccacaaaggttctaaaactattacttgtggacagaaaaagagacccatatacatgtaggcattatgtcttattgggaattcagagcaggaagagaacacatctgggctgggggcaggatgagggaaggacctgataaattttctattgaacaattactctaaataagtgtgctttctttaggatgggtagggntttggaccccggggnttcaagattacnggggattttgagtccaaagttttgggcccccttgggggggaaatcctgccatttttgccggggtcctgggg

SEQ ID NO: 6982 - DNA, 436 bp, Homo sapiens
  III.610 (R69129)
  misc_feature (229)..(229): n is a, c, g, or t
  misc_feature (337)..(337): n is a, c, g, or t
  misc_feature (357)..(357): n is a, c, g, or t
  misc_feature (392)..(392): n is a, c, g, or t
  misc_feature (409)..(409): n is a, c, g, or t
  misc_feature (433)..(433): n is a, c, g, or t
cacttttactctatcccttggaagttaattgggaataaaaagatttatcaatttagtcactataatttaaggccaggcatctgcttggaaatacaataaccacaattaatacttagagaaaattgtttcaacagattaactctgctattttaaaaactatagtagtgttctttgaggatgcatttacttttccccaaatttgatagatagttatttttatatatttttnctggccacttgggcttctaactgattaacatgaaaaacgcacgtgtgccctgtttcactcaaatcctattttacaactttttaaaagctgctaccagttatagggttntggaaaggagggggaagggnggatttgccaccggggggggaattacccgttaccngtggtcccatatggggncccgttgccttttgggccgggtanttt

SEQ ID NO: 6983 - DNA, 326 bp, Homo sapiens
  III.611 (R69247)
acacagacaaatatgaagcaaaaacagtgagtcgacaaagatgagaacatcttagtgtaaaaaatcagtgagcagcaaaataaagatgagagtactcttaacaaaaaattctgttattacaaatattgacaggcagcagattatctgaccaaaagcatcagtcacatattgacacagtaacagtaatttccctctgttgcaattcacctttctcctctttcacaaactataactgtagcagcttttaaaaagttgtaaaatatgatttgagtgaaacagggcacacgtgcgtttttcatgttaatcagttaggaagcccagtggcc

SEQ ID NO: 6984 - DNA, 419 bp, Homo sapiens
  III.612 (H00662)
  misc_feature (1)..(1): n is a, c, g, or t
  misc_feature (376)..(376): n is a, c, g, or t
  misc_feature (383)..(383): n is a, c, g, or t
  misc_feature (406)..(406): n is a, c, g, or t
  misc_feature (415)..(415): n is a, c, g, or t
ntcaggctttattcaaatgcaaaattgcatgttacagggtaacctttcagtaagaagccaggaagaggagctcatcatgggttggattagtaaaggactagttataaaagaagtggtggggttgagggaggcctgagatgaaatttaaagaatatgtagaatctaggtaagtggataaaaggtctgggggcaggggaaaggagagcatttcattgtgaatcaaggaatttctccacctgttttaactcttccatatgacatcaaagagatgtcacttgcagctagcatttcagtgatgttttcttactaataatatcgtgataaaaggaaacattgactataaggaaataggggatggggtctccttaaaaggggnaccggcnaaaccccccaaacttaaaaaacngcgcggctntttt

SEQ ID NO: 6985 - DNA, 453 bp, Homo sapiens
  III.613 (H00756)
  misc_feature (410)..(410): n is a, c, g, or t
  misc_feature (416)..(416): n is a, c, g, or t
  misc_feature (424)..(424): n is a, c, g, or t
  misc_feature (439)..(439): n is a, c, g, or t
caaaaattggacaaaagtttctcaatgattaaggagggtgattataaccccctcttcattccagtggcagtcatggttactgcattctctgggttggcatttatcatttggctggcaaggagattaaaaaaaggcaaggaatccaagagaagtatgaatgacccatattaaatcgcccttggtgaaagaaaattcttggaatactaaaaatcatgagatcctttaaatccttccatgaaacgttttgtgtggtggcacctcctacgtcaaacatggaagtgtgtttccttcagtgcatctggggaaggtttcttacctggacccaacagtttcctttcagctttccattttcggccccttcattttattcccttcaaccccccaggccccacaggtgttttattacaggntcaggntttttgtnttttttctgaggggnggaaaccaattaag

SEQ ID NO: 6986 - DNA, 439 bp, Homo sapiens
  III.614 (H57309)
  misc_feature (92)..(92): n is a, c, g, or t
  misc_feature (286)..(286): n is a, c, g, or t
  misc_feature (356)..(356): n is a, c, g, or t
  misc_feature (373)..(373): n is a, c, g, or t
  misc_feature (383)..(383): n is a, c, g, or t
  misc_feature (388)..(388): n is a, c, g, or t
  misc_feature (401)..(401): n is a, c, g, or t
  misc_feature (421)..(421): n is a, c, g, or t
ccattgaagctgaaaagtttcagtgcaatttatgcaataagacctattcaactttttctgggctggccaaacataagcagctgcactgcgantgcccagtctagaaaatctttcagctgtaaatactgtgacaaggaatatgtgagcctgggcgccctgaagatgcatattcggacccacacattaccttgtgtttgcaagatctgcggcaaggcgttttccagaccctggttgcttcaaggacacattagaactcacacgggggagaagcctttttcttgccctnactgcaacagagcatttgcagacaggtcaaatctgagggctcatctgcagacccattctgatgttaaagnaaataccagtggcaaanaaactgcttncaaanccttcttcccagnatgttctcttcctgtcacanatcatgtagggatttttg

SEQ ID NO: 6987 - DNA, 423 bp, Homo sapiens
  III.615 (H57310)
  misc_feature (417)..(417): n is a, c, g, or t
aaatagtaagacaatggagcatgcgccaggaatgttcaaagctaatctttccctcctcccccaaggcacatactgttaattggcaaaaacaaaacaaaacaaaaatacttttaatacattctcctgtgttttgttcttgttatttttttcctcccttttaaaaatatactttaaagcactacaggtaatcaaaaaaaggctttagttcaacaatgggcaaccagacaaccgacatgtaatgggagtaaacttgggaatactttttaagggcacctgagttcgcgtctgggcaggatctcttcctatggggaaatcctattacagactctattacaaaggcaatactgttcttttcagttgaaatggatttgggcagcaatgtaaaatctttggcatttttttaggggaggaaagggngccatg

SEQ ID NO: 6988 - DNA, 413 bp, Homo sapiens
  III.616 (H75797)
  misc_feature (262)..(262): n is a, c, g, or t
  misc_feature (368)..(368): n is a, c, g, or t
  misc_feature (391)..(391): n is a, c, g, or t
  misc_feature (402)..(402): n is a, c, g, or t
ttcctccagacaggtgatcaggtctggcttagagacagcaatatactcaggaagaccaggtttctgtagttccctaacatcacattcctatataaattctgctgtgcaatgttccaggcattgccattcctccagagataattctatggccacctccctaaatgtcaatgatctcatttctaggcttccagggggtcctgggcatcttagcagtggatctcccaatacctgcaggtcacagggccacagaggctgggctctnaggaagcagaagaaacagagaagtaaacacaagactgggagctctggctgcagtgagagacaaaggcctgtgtttgttctttttgacagtttgattataatatgtnctcaatgtgggctattctttggntttcatcatanttgggagtttt

SEQ ID NO: 6989 - DNA, 305 bp, Homo sapiens
  III.617 (H75798)
  misc_feature (226)..(226): n is a, c, g, or t
  misc_feature (297)..(297): n is a, c, g, or t
atggagaaagttaagaaaactatgtagaaacaaaataggaatattaagagaaaacctagaaaggaaaaagaaattctgaagctgaaaagttcaataattgaaataagaaatttactagagggattcaaaggcagatttgagcaagcagaagaaaatcagcaaactcaaagataggacaatggaaattagccaagtctgaggaacagaaaggaaaaagattgaaganaagtaaggcacagcctagggagtcccatggggccaatatccaaggcagaccaatattatacattgtagggngttcccgg

SEQ ID NO: 6990 - DNA, 453 bp, Homo sapiens
  III.618 (N63991)
  misc_feature (347)..(347): n is a, c, g, or t
tggaaaaaaggtaaatgtcttatcataagccaccaaaaacctattttaccagcttcttttttcttccctttccagattgagatgctaccagatgggctgtttcagtgcaaaaagctgcagtgtttacttttggggaaaaatagcttgatgaatttgtcccctcatgtgggtgagctgtcaaaccttactcatctggagctcattggtaattacctggaaacacttcctcctgaactagaaggatgtcagtccctaaaacggaactgtctgattgttgaggagaacttgctcaatactcttcctctccctgtaacagaacgtttacagacgtgcttagacaaatgttngacttaaagaaaagagacccgtgtttcaaaatcatttttaaaagtatgctcggccgggcgtggtggctcatgcctataatcccagcactttgggaggccaagatgg

SEQ ID NO: 6991 - DNA, 425 bp, Homo sapiens
  III.619 (N79669)
  misc_feature (215)..(215): n is a, c, g, or t
  misc_feature (247)..(247): n is a, c, g, or t
  misc_feature (365)..(365): n is a, c, g, or t
  misc_feature (386)..(386): n is a, c, g, or t
atccaaaagtaattagttgcagagtacaaaaacattttggagcagaatgtacataaacatgagtcataaacagccgaaaccaagaacactaacagtaagttcataaagaaatgcacaaattctatgtatcttacaaaaatgatcctcacagatgttgaatccaagattatacaatagaaaatatttatatgttttacatttaatataaaaattcntaacaaataaaaaaaggccttgatgatagacnagaagaaattttagggaatacattaattttcaggatgcccccgaggataatacatcttaaatactcagctcctgttctaggcaaaggccaaatgcaggcattttctcagggttcatcnttggtgttaagagaaaacccnggtttaaggggagactccaagcaagctgggggaagggag

SEQ ID NO: 6992 - DNA, 388 bp, Homo sapiens
  III.620 (N75450)
  misc_feature (175)..(175): n is a, c, g, or t
  misc_feature (177)..(177): n is a, c, g, or t
  misc_feature (178)..(178): n is a, c, g, or t
  misc_feature (190)..(190): n is a, c, g, or t
  misc_feature (354)..(354): n is a, c, g, or t
  misc_feature (385)..(385): n is a, c, g, or t
tcacgtgtccttcgttcactagattctgaacgagtcttctggggactaggatatttcttttttctgccatctcgttcttcctctgctggctcctgaaatacctcttctttaatttcttctttttcttggactagtggttttggctcaggctttactggttccaaaagtggaaggnanntctcaaagtatngagactttcaaatagtttgtccacaaaacctgaagtttctttttgtaaaaagacatcaagttgatcagcacaaaaggcttttaattctttctcaggtttgtccttcttgaccagtgctacaacatagttgggtaaggctgaaggatcagcatcacatatcgggnccagtaacttgggcagccaggacttgagggnatc

SEQ ID NO: 6993 - DNA, 473 bp, Homo sapiens
  III.621 (W05248)
  misc_feature (11)..(11): n is a, c, g, or t
  misc_feature (55)..(55): n is a, c, g, or t
attcggcacgngggagggctcttgggttagttcctgttaggccccggcggcggangtaggttgaagtctcctaagatgcccggtgctgcgggcaccgggagctgtgaagggaacgtgagggggcggcgtagtggagacccacggcaggcctgaagaagagcggcggccgagccgcattccctgcaccatgctcatagaggatgtggatgccctcaagtcctggctggccaagttactggagccgatatgtgatgctgatccttcagccttagccaactatgttgtagcactggtcaagaaggacaaacctgagaaagaattaaaagccttttgtgctgatcaacttgatgtctttttacaaaaagaaacttcaggttttgtggacaaactatttgaaagtctctatactaagaactaccttccacttttggaaccagtaaaagcctgagccaaaaccactagttccaagaaaa

SEQ ID NO: 6994 - DNA, 401 bp, Homo sapiens
  III.622 (T69747)
  misc_feature (393)..(393): n is a, c, g, or t
gcttttgcttccaaagacccttctgagtaaggactgtcctcagactactggagtcatttagtcacaagcttgcctgaggtcagagctggcaatacctgggagtttatgtcaatcccacagcacccagcaaccttgcctgcaaattatttacccatgattgacaggtgcaggtgtatgaaagtccagctccttgacttgaggggtgcctttgtgggtgaattagctttgggggaaaaggggaatccagagggccaactttgttaaaactccaggataggataaaggggaaaggaaatctttgccttgggaaggtcccaggttgaggaaaggataggtggatttaccttcagactgtgggggaaaggaggaggccttaaaatcctttacttttcncagggggg

SEQ ID NO: 6995 - DNA, 379 bp, Homo sapiens
  III.623 (T70731)
gaaaattccatcaatgggtggtgttaagccttttctatgaggtagctgtacatttgggacacttctatgttggcgacttgacattctaatagatagatggtccttttcatctctagccacatgtgaaaattacttgggagctttttaagactactagtggcttccacccacctgggaagcatttaaatcagaatctctaggtgtagagtccagggcacttgtgttaaaacctcaccagggctttataatatgacagaatggtttaaagctactgagtagacccaccctatttcccaccattctctttgtttctctttcaccataggcttctttcccatgagaaagtaaagatttagtctctctttccacagtctggaag

SEQ ID NO: 6996 - DNA, 154 bp, Homo sapiens
  III.624 (T87192)
aaggaacttgtgttataattttggtaaaagtataaacccactccctctggacaatacttagcgacagttgctaaagggggctcctttttaaatgtaaggactgaaatggatatacttctaataagtaaatttccaacacttatttgctcccccc

SEQ ID NO: 6997 - DNA, 215 bp, Homo sapiens
  III.625 (T87279)
  misc_feature (6)..(6): n is a, c, g, or t
  misc_feature (9)..(9): n is a, c, g, or t
  misc_feature (30)..(30): n is a, c, g, or t
  misc_feature (55)..(55): n is a, c, g, or t
  misc_feature (57)..(57): n is a, c, g, or t
  misc_feature (61)..(61): n is a, c, g, or t
  misc_feature (70)..(70): n is a, c, g, or t
  misc_feature (87)..(87): n is a, c, g, or t
  misc_feature (167)..(167): n is a, c, g, or t
  misc_feature (203)..(203): n is a, c, g, or t
actggnttntttttaaagtaaattagttgntcagcacgttgctaaaacaaaacananaaanattctaaanatgaattaaatcacttncatccacttcatcccacaacttttggatacactgtgcatcatttccagatttctccacaaagaaggagggacaacccaantgaggcacaatgactgaaggcagcagcgcaggtctntctactttctgg

SEQ ID NO: 6998 - DNA, 433 bp, Homo sapiens
  III.626 (R34139)
  misc_feature (275)..(275): n is a, c, g, or t
  misc_feature (325)..(325): n is a, c, g, or t
  misc_feature (356)..(356): n is a, c, g, or t
  misc_feature (389)..(389): n is a, c, g, or t
  misc_feature (417)..(417): n is a, c, g, or t
  misc_feature (422)..(422): n is a, c, g, or t
  misc_feature (430)..(430): n is a, c, g, or t
gagctcttgatcgttcacaaagccccttcataactgttaccccagaaaaattccacccattttgcagatgagaaaactggagctttgaggtcactttctcagggtcacaagctagtacgaggcaaagctgagtctcaaaagccttttcccctgactccagagctcccacccactgatgaagcttttcccctgacagagctggggcttgaggtgtgacccgggatgaacctcttctctctctccccgttgtactcatcagttcttgccagtaaaanttctcctctatggaccgggggaagcggggttgttgggcctttctttaggnagtgagttggtgtttttggggtttgcttttnattttttgaaatcagtgaccaaataaccctttntgggccgggttgaatgggcttcaggttncgggnattcttgnctt

SEQ ID NO: 6999 - DNA, 285 bp, Homo sapiens
  III.627 (R34140)
aattctctgtttttgaactgcctgtgtgtttttgctattattatttatattgtattatttattattaatatttctgctatactattgacatttagaacaaagcaagaattccagaacctgaagccattcaaccagccagaaaggttatttgtcactgattcaaaaataaaaagcaaacccaaaacaccaactcactacctaaagaaaggccacaaccccgctttccgggtcatagagggaggaatttttactgggcggaactgatgaggtacaacgggggagagg

SEQ ID NO: 7000 - DNA, 522 bp, Homo sapiens
  III.628 (T71134)
  misc_feature (6)..(6): n is a, c, g, or t
  misc_feature (7)..(7): n is a, c, g, or t
  misc_feature (8)..(8): n is a, c, g, or t
  misc_feature (54)..(54): n is a, c, g, or t
  misc_feature (70)..(70): n is a, c, g, or t
  misc_feature (79)..(79): n is a, c, g, or t
  misc_feature (82)..(82): n is a, c, g, or t
  misc_feature (92)..(92): n is a, c, g, or t
  misc_feature (98)..(98): n is a, c, g, or t
  misc_feature (102)..(102): n is a, c, g, or t
  misc_feature (111)..(111): n is a, c, g, or t
  misc_feature (123)..(123): n is a, c, g, or t
  misc_feature (125)..(125): n is a, c, g, or t
  misc_feature (142)..(142): n is a, c, g, or t
  misc_feature (143)..(143): n is a, c, g, or t
  misc_feature (144)..(144): n is a, c, g, or t
  misc_feature (147)..(147): n is a, c, g, or t
  misc_feature (148)..(148): n is a, c, g, or t
  misc_feature (155)..(155): n is a, c, g, or t
  misc_feature (156)..(156): n is a, c, g, or t
  misc_feature (162)..(162): n is a, c, g, or t
  misc_feature (170)..(170): n is a, c, g, or t
  misc_feature (174)..(174): n is a, c, g, or t
  misc_feature (188)..(188): n is a, c, g, or t
  misc_feature (203)..(203): n is a, c, g, or t
  misc_feature (234)..(234): n is a, c, g, or t
  misc_feature (235)..(235): n is a, c, g, or t
  misc_feature (237)..(237): n is a, c, g, or t
  misc_feature (409)..(409): n is a, c, g, or t
  misc_feature (476)..(476): n is a, c, g, or t
  misc_feature (496)..(496): n is a, c, g, or t
ttttcnnnaccttttaatatatggtatgatttatttagtttactgtctcttcantattagaatataaganccttcaggncanggattggtgnctattnaccnccgtatctncagcatcaagantncttggcagcaagtaggnnnttnnttgaggnnacaacntaaagaanaaangaacaggtacaganctggttgcctcactnggaggatcccccaattattggttcctggacnncntttcttttgagccattcagtctctccagcttcacagctggggggttgggcctcatcctcagggttctggctgccaagcaggggaaaagggacttggcagcttcctgggccagtgtgtagactctcatgtaacctcctgttttctgccctgctccttgctgagtaattcccgngtgatctgcaaggatagaaagaatgatctttcaaagaacatgggagagagattggcaataggggctngcagaaaaaaacagcaaaantaaccacccaaaaaattcacagccca

SEQ ID NO: 7001 - DNA, 425 bp, Homo sapiens
  III.629 (T81627)
  misc_feature (368)..(368): n is a, c, g, or t
  misc_feature (380)..(380): n is a, c, g, or t
  misc_feature (390)..(390): n is a, c, g, or t
  misc_feature (395)..(395): n is a, c, g, or t
  misc_feature (400)..(400): n is a, c, g, or t
  misc_feature (408)..(408): n is a, c, g, or t
  misc_feature (417)..(417): n is a, c, g, or t
ccaaatgtcaagataacgacctaataatactcactggggatataaatagtgtggtctgggccacatagatccatttaccaccagtttaggaatttaccatcagtttaagaatttaccagttctttctccttaaggggcatctttggacagccttgaattggaagaaatggctgtctggagtctagcccaaaggcagggttggaggaagcagagaaggtggttattaaaatcaacaacattcgcaggagattggatcacttgctttcttcagtaaacagaaagagtaggagctttggctgtggaattttttgggtggttaatttttggctgtttttttctggccagcccctatttgcccaatctctctnccatgtttcttntggaaaggtncattnctttnctattccntggcaggtncacacggg

SEQ ID NO: 7002 - DNA, 407 bp, Homo sapiens
  III.630 (R98868)
  misc_feature (191)..(191): n is a, c, g, or t
  misc_feature (200)..(200): n is a, c, g, or t
  misc_feature (360)..(360): n is a, c, g, or t
  misc_feature (379)..(379): n is a, c, g, or t
  misc_feature (399)..(399): n is a, c, g, or t
agctctgcctcctccctgcaacacctgcacatcccgtttcctttgctgtttcctcctcatttccctggcccctcaatgtcacaggttttagtactcagagtctgcacctcttttcttctctgtgctcacttatttggtgatctcatccagtctcatagctttaaattatcttagtttgggttctcccagangcagagctnaaaacaatgcttcacgtgaaagtaatcagtaggaaattggggaaattgtgtatgaaagagaaagcagccaatgaaaagtttactattaagccagctacggtaagtggggcaattagagtttggtgccccggggagtacttctggggagtttgggcaaaanatataccttcagtatttancccacctaaggggggcaagnggaccggg

SEQ ID NO: 7003 - DNA, 298 bp, Homo sapiens
  III.631 (R98957)
  misc_feature (245)..(245): n is a, c, g, or t
  misc_feature (263)..(263): n is a, c, g, or t
gttttagacgtttattagatattcaagtgcagatagatgcccagttatccacaggcagctgaatatatcagtcaagcatttaggagagatctggattggacacaaacatttatgagttatcagtgtatagatggtggttgtaggagtggtcagtgccctgcctatatcctatgatcctaggaactgccagtgtgctcctgccaactttcagctgctgctgctttttttttttttttttttttttngtctttttagacagggtntcactctgccacccacccagggtggggtgcagtgg

SEQ ID NO: 7004 - DNA, 637 bp, Homo sapiens
  III.632 (AA069788)
  misc_feature (8)..(8): n is a, c, g, or t
  misc_feature (554)..(554): n is a, c, g, or t
  misc_feature (614)..(614): n is a, c, g, or t
  misc_feature (624)..(624): n is a, c, g, or t
aaatttancattactcacctacaaacatatccaatgcaatgggatataaaggttttagtaatataatcctagcagagtttttatgattgtctcatggaaaaattaaattgtggaaatacggttctgatttgtggttcgagtcagttcaaggcaaattcctggtgactgctaagtacttttccagatcaaacattaggcccaattaattaacatttctaaatttacagtcacatgagtatttatgagcttcaaaaaagtgcgctcacttttactttccctgttaaagaacataaacgcatatgccactgattcctaaggaagatctctttgccagggtcttgggaagatttttgttcaaacagtactacccccctgccttctctgtatcccagggaatcgtggaattatgagtcactactaatagcagtgtgtcaaacccctccaagaatgttttgagacccactgggccttttgcactagaaatatataggcttcatggataaacaacagaacaaggattcagtccctcaccaactttttccactgactgcaanggtgaacctgtgtcctcattcacttagaattccccgatgctatccctgacacctgctaangccaggatgnccagggtgggaaa

SEQ ID NO: 7005 - DNA, 631 bp, Homo sapiens
  III.633 (AA069838)
  misc_feature (549)..(549): n is a, c, g, or t
  misc_feature (581)..(581): n is a, c, g, or t
  misc_feature (596)..(596): n is a, c, g, or t
aattcgggacgagggaagagcaggcgtgctgaatgagagtggcgtcgcagcgatggccagcgctgaggggtatcaaggtcttattcatgcattctcatgtcttttgactccaagatgccttggaagcattcctttgctcttttcattttcaatttttgaaaaatatacacaacacctgggcaattctgtgttgctcttttgaatctctacatggcctctccatctgcccacttttccaaagggtcatcttgggttttcccctctcctgcagtggactcagtgtcgcctgccaggagaagtgccactgctgctcctctcttctggcccacaattgtccgtgcctgggctatagtgacagccacctgattcatttccctacctctccagtctagtctccacaccacagcgaaggcaatctttagaaaatctttataaaacctccagctcaaaattttctctggctcttcactgtccttcgagcaaaatctgaaaccctgagcataatttatggaagacctgtgaccgggctcagtgacctcttcagctcantctcttccaccctcctgcctggtaaggtccantgcacagagacttcnattccgattgcgggcttggtaagtgactcccacag

SEQ ID NO: 7006 - DNA, 435 bp, Homo sapiens
  III.634 (R67618)
  misc_feature (332)..(332): n is a, c, g, or t
  misc_feature (344)..(344): n is a, c, g, or t
  misc_feature (418)..(418): n is a, c, g, or t
  misc_feature (431)..(431): n is a, c, g, or t
ctgaggaccaagggatggcccgactcggcggtttgcggaggatgcagggatatgctcacagcgcccgacacaaccccctcccgccgcccccaaccacccagggccaccatcagacaactccctgcatgcaaacccctagtaccctctcacacccgcacccgcgcctcacgatccctcacccagagcacacggccgcggagatgacgtcacgcaagcaacggcgctgacgtcacatatcaccgtggtgatgggcgtcacgtggccatgtagacgtcacgaagagatatagcgatggcgttcgtgcagattgcaggcacgttcgcacacagacntgggggaatttnggcttgacgttcacaccgaggttgcaggcattgacgttcacggggccttttcggacgttcacacttttttattnttcaacacaggangcgg

SEQ ID NO: 7007 - DNA, 252 bp, Homo sapiens
  III.635 (R67619)
  misc_feature (54)..(54): n is a, c, g, or t
taaggatttactaattttttattaagtgccaccaacatttcaacgggccacagnagggctgggagttgggggagaaggagtggctcccctcccgacaacaggtgaccctcacccccggctcagggccccgaggggtcctgggaaacactcacgctcaaggagcgaggtgaatggcttcctgttctcacctccgggtccaggcactgggggtgaggaagtggctgggaggccaggaagctggaggaggggagg

SEQ ID NO: 7008 - DNA, 337 bp, Homo sapiens
  III.636 (R99466)
  misc_feature (315)..(315): n is a, c, g, or t
  misc_feature (323)..(323): n is a, c, g, or t
aggaaattgttaaggaagtcagcacttacattaagaaaattggctacaaccccgacacagtagcatttgtgccaatttctggttggaatggtgacaacatgctggagccaagtgctaacatgccttggttcaagggatggaaagtcacccgtaagatggcaatgcagtggaaccacgctgcttgaggctctggactgcatcctaccaccaactcgtccaactgacaagcccttgcgcctgcctctccaggatgtctacaaaattggtggtattggtactgttcctgttggcccgagtggagactggtgtttttcnaaacccgntattggtgggtaac

SEQ ID NO: 7009 - DNA, 447 bp, Homo sapiens
  III.637 (R99467)
  misc_feature (3)..(3): n is a, c, g, or t
  misc_feature (304)..(304): n is a, c, g, or t
  misc_feature (336)..(336): n is a, c, g, or t
  misc_feature (345)..(345): n is a, c, g, or t
  misc_feature (352)..(352): n is a, c, g, or t
  misc_feature (402)..(402): n is a, c, g, or t
  misc_feature (432)..(432): n is a, c, g, or t
aanatttaacttttttaatgggtctcaaaattctgtgacaaatttttggtcaagttgtttccattaaaaagtactgattttaaaaactaataacttaaaactgccacacgcaaaaaagaaaaccaaagtggtccacaaaacattctcctttccttctgaaggttttacgatgcattgttatcattaaccagtcttttactactaaacttaaatggccaattgaaacaaacagttctgagaccgttcttccaccactgattaagagtggggtggcaggtattaggggataatattcaatttaggnccttctgaggctttctgggggcagacttgggngacccttgnccagctnccggcaggcccttcttggtcccactggctttggatggacaccccacccgnaactggtctggtccccatattcacggaccngcaaagggggcccca

SEQ ID NO: 7010 - DNA, 420 bp, Homo sapiens
  III.638 (W61180)
  misc_feature (1)..(1): n is a, c, g, or t
  misc_feature (176)..(176): n is a, c, g, or t
  misc_feature (414)..(414): n is a, c, g, or t
ngtggtgtgaggccatcacggaagatgctgctgcttctgctgcttctggggccaggctccgggcttggtgctgtcgtctctcaacatccgagcagggttatctgtaagagtggaacctctgtgaagatcgagtgccgttccctggactttcaggccacaactatgttttggtatcngtcagttcccgaaacagagtctcatgctgatggcaacttccaatgagggctccaaggccacatacgagcaaggcgtcgagaaggacaagtttctcatcaaccatgcaagcctgaccttgtccactctgacagtgaccagtgcccatcctgaagacagcagcttctacatctgcagtgctaaggacaggggcagatacgcagtattttgggcccaggcacccggctgacagtgctcgangacctg

SEQ ID NO: 7011 - DNA, 225 bp, Homo sapiens
  III.639 (W61181)
  misc_feature (134)..(134): n is a, c, g, or t
tgaaatgcaaccaggcccaacacacaattttttattggtttagcctatttcgtacttgggggttgggagctcaatcttcagggaaaaaaaaaaaaaagagaagtattcatgtaagtaggagatgagaagcagantgagaatcacttttaggaacacagattgggagcaggtacaggagaatcctgggtgaggatgaagaatgacctgggatggttttggagctag

SEQ ID NO: 7012 - DNA, 320 bp, Homo sapiens
  III.640 (T84950)
  misc_feature (290)..(290): n is a, c, g, or t
  misc_feature (319)..(319): n is a, c, g, or t
atagctgcaaaataataataataataataaaatacttaggaatatacctaaccaagtaggcgaaagacctctacaaggaaaacaacaaaacactgctgaaagaaatcatagatgactcaaacaaatggaaacacatcccatgctcatggatgggtagaatcagcatcgtgaaaaaattgtagactgcaaaaagcgatctacaaattaaatgcaattctcatcaaaataccaccattattgttcacagaactagagaaaacaatcctaaaattcatatggaaatcaaacangagcctgcatagccaaagtaattacttang

SEQ ID NO: 7013 - DNA, 470 bp, Homo sapiens
  III.641 (T92059)
  misc_feature (1)..(1): n is a, c, g, or t
  misc_feature (340)..(340): n is a, c, g, or t
  misc_feature (363)..(363): n is a, c, g, or t
ngggataaaggaacttaataaatgtttatttaaaaaatgaatggaaagatgagtgaacaatcaaggactctagaatgtcttagtccttttgaaacatagtgcttatgaactaatacataaaaggaaatagaagagaacagtgaccacaaaaatgaaaatactggaaagtttctcatactaatgacagattgggaccattgcccaggccaaagctgtttgccaaggagaagcaattttcttcccattcagaggatggatatgaataggttcccaggtatttgaagtgtatttgaagagccagttgtcagaagtaaggaagaatgggccattccccccaccnatgcaggtaggagctgggggccnagagcttttggtttatatgagctcaactttgctgtctttcccagaaggccttcgaagtgaggaaggagaagggtttagtaaaatctcatttcccttttctacttact

SEQ ID NO: 7014 - DNA, 285 bp, Homo sapiens
  III.642 (N53777)
  misc_feature (256)..(256): n is a, c, g, or t
  misc_feature (275)..(275): n is a, c, g, or t
  misc_feature (283)..(283): n is a, c, g, or t
gtagagacggggttttgccatgttgcctaggctggtcttgagctcctgaactcaagtgatctgcccaccttggcctccaaaaatgctaggattacaggcgtgacacccgtgcctggacaggaacgtttattataacatcaaatttgttaacccccaaaagtttgcttataaaaaatgttaactattctcatgatttctagggaaaaaaaaatcaaactcactcttcagtagaggccaaaagaaatatgaatttccncaacagactttgggggctngggagtgnga

SEQ ID NO: 7015 - DNA, 154 bp, Homo sapiens
  III.643 (N73138)
atgaatgaatactatgtgataagtgttggacacagcatttacataaaatatctaacttaatatttacagtgattctaggaggttttcattattatttttgtctctagtttacatatggctaaatgaagctataaagtggctaagtcacctcttg

SEQ ID NO: 7016 - DNA, 216 bp, Homo sapiens
  III.644 (N79841)
  misc_feature (177)..(177): n is a, c, g, or t
  misc_feature (198)..(198): n is a, c, g, or t
  misc_feature (204)..(204): n is a, c, g, or t
  misc_feature (212)..(212): n is a, c, g, or t
ggaaatctgcctattttatttccattagaaaaatattatctatataacattttgttccactatcttctccttgatctcaaatttaaacactttaattttactcaagtaaaagcagaatcacataacggacatcaaaactaaatagttcacatcattagtttaaattaaatatgttcntgattatttctcaggaatagnaactcntctttccnacct

SEQ ID NO: 7017 - DNA, 242 bp, Homo sapiens
  III.645 (W38455)
  misc_feature (111)..(111): n is a, c, g, or t
  misc_feature (112)..(112): n is a, c, g, or t
  misc_feature (207)..(207): n is a, c, g, or t
gaagccagcagggctggtgctggggcttcttctcctgaaggggctgcaagagggaaggcttagccatgtcgtccttgatcagaagggtgatcagcaccgcgatatctccannggccattgaccctacagtcaagctgtattagtcgacaggaccatttacatttcaggacagataggcatggacccttcaagtggacagcttgtgtnaggaggggtagcagaagaagctaaacaagctcttg

SEQ ID NO: 7018 - DNA, 114 bp, Homo sapiens
  III.646 (R01577)
  misc_feature (1)..(1): n is a, c, g, or t
  misc_feature (107)..(107): n is a, c, g, or t
  misc_feature (110)..(110): n is a, c, g, or t
nttcggcacaggcttaatgaaagcagattcaaagcaacaccaccaccactgaagtatttttagttatataagattggaactaccaagcatgtggctcctggtcagtntanttct

SEQ ID NO: 7019 - DNA, 78 bp, Homo sapiens
  III.647 (R01578)
  misc_feature (27)..(27): n is a, c, g, or t
  misc_feature (69)..(69): n is a, c, g, or t
  misc_feature (70)..(70): n is a, c, g, or t
ttttagttttccaagttttaatatggngcttttaagaagagagccaccggtctcagcttataattacannttcacaaa

SEQ ID NO: 7020 - DNA, 405 bp, Homo sapiens
  III.648 (H47554)
  misc_feature (39)..(39): n is a, c, g, or t
  misc_feature (84)..(84): n is a, c, g, or t
  misc_feature (393)..(393): n is a, c, g, or t
  misc_feature (400)..(400): n is a, c, g, or t
tcactaaaaattagacttgtaaaagtgttaaaaaaatanggcttggcagatggggtggttcacgcctgtaatctcagcactttngaaggctgaggcgggcagatcccctgagtttgggagtttgagaccagcctgaccaacatggagaaaccccatctctactgaaaatacaaaattacccgggtgtggtggcgcatgctgttaatctcagctactcgggaggctgaggcaaaagaattgcttgaatctgggaggcggaggttgtggtgagccaagatcgtgccattgcacttccagcctggggcaacaagagcgaaactccgtcttcaaaaaatttaaattaaattaaggcttatgtgcagttatttcttcaatgagctaaaaagctttccntgagggntagga

SEQ ID NO: 7021 - DNA, 426 bp, Homo sapiens
  III.649 (H47555)
  misc_feature (30)..(30): n is a, c, g, or t
  misc_feature (35)..(35): n is a, c, g, or t
  misc_feature (67)..(67): n is a, c, g, or t
  misc_feature (108)..(108): n is a, c, g, or t
  misc_feature (209)..(209): n is a, c, g, or t
  misc_feature (285)..(285): n is a, c, g, or t
  misc_feature (348)..(348): n is a, c, g, or t
  misc_feature (403)..(403): n is a, c, g, or t
  misc_feature (422)..(422): n is a, c, g, or t
ggctgtgttgccagaatggagtgcagtggngtganctcggctcactgcaactgccacctcccgggtncaagcgattctcctgcctcagcttcccgagtagctgggatnacaggcgcccacggccatgcccggctaatttttgtattttttagtagagacggggtttcaccatgttggccagggctggtctcaaatccctgacctcaggngatctgcccgcctcgacctcccaaaatgctgaaactacaggtgtaagccactgctcccagccaaaaatgacaagantttctaggcctcagggaaggctttttaggctcattgaggaataactgcacataagccttattnatttaattttttgaggacggagtttccggtcttgttgcccggggtgggagtgcangggcacggttcttggggtnacca

SEQ ID NO: 7022 - DNA, 141 bp, Homo sapiens
  III.650 (R13257)
  misc_feature (2)..(2): n is a, c, g, or t
  misc_feature (9)..(9): n is a, c, g, or t
  misc_feature (10)..(10): n is a, c, g, or t
  misc_feature (14)..(14): n is a, c, g, or t
gncaagtgnnggantactttcatcccaagccaggcctttctggaggccgagagagctcaatccattgcctatcacctcaaaatttgaggagcaaagagaaaaagtacattgaaaatgaaaatataggtaccactgagcctg

SEQ ID NO: 7023 - DNA, 295 bp, Homo sapiens
  III.651 (R40691)
  misc_feature (11)..(11): n is a, c, g, or t
  misc_feature (205)..(205): n is a, c, g, or t
ttttttttttntttggatttttatggactctttattagggtattaagatattgaaaataatacacgtaaaccacaaaagagtagcattccattttcttgaagtgcacatgatattatgaacaatacaaatgcattatttttatcattaatagtttaatcattaattatctcataagtcaatgcagagagtgaaattactatgganttaaacttctgttcacaatgtacagtattttgcatatgttgactttacttaattgtacatttttgtttccaaagttaatgttaaataccg

SEQ ID NO: 7024 - DNA, 426 bp, Homo sapiens
  III.652 (R32711)
  misc_feature (160)..(160): n is a, c, g, or t
  misc_feature (236)..(236): n is a, c, g, or t
  misc_feature (311)..(311): n is a, c, g, or t
  misc_feature (367)..(367): n is a, c, g, or t
  misc_feature (387)..(387): n is a, c, g, or t
  misc_feature (402)..(402): n is a, c, g, or t
aattcggcatgagggggaatggcaggaaccggacagactgtgaacttgccaagagatgcaatacccttccacacctttgggtgtctgtctggcatcagattggcagctgcaccaaccagaggaacagaagagaagagagatgccactgggcactgcctgnccagtagtggccttcagggggctccttccggggctccgcctgttttccagagagagtggcagtagccccatgggcncggagctgctgtggcctccactggcatccgtgtttccaaaagtgcctttggcccagggttccacggcgacagttngggcccaaatcagaaagggagagaggggggccaatgaggggcagggcttcctgttnggggtttgggaaaaccattnggttgcttttttttntttgggttttgccttgggacttta

SEQ ID NO: 7025 - DNA, 361 bp, Homo sapiens
  III.653 (R32712)
  misc_feature (345)..(345): n is a, c, g, or t
agtggaatttccaacacactgccctgagtgccccagttaggcctggcacccttggctggtgggaggggcaggccctctgcctgtctgcttacagaagcccagggccagagggtggtggaagccgggtagacggacattcttgcccaaaggctaaggaccagagagccaggcctgcatacagtagttggaggcatggggcagaaagcactcccctccctcgagcacttcacctcacgtccaggggcaaaccccagcaagagacgcacccagtggttttccagcccacaggagggccctgcccttcatttggccccctctctcctttcttgattttgggcccaactnttcgccgttggagcct

SEQ ID NO: 7026 - DNA, 430 bp, Homo sapiens
  III.654 (H04157)
  misc_feature (56)..(56): n is a, c, g, or t
  misc_feature (281)..(281): n is a, c, g, or t
  misc_feature (396)..(396): n is a, c, g, or t
ggtcccccaaagccagaatctgctcatggaggaaggaaggctaagaactgtccttncaggaacttcatcagtaactctggtaaagcatcctgtggagggagaggagagcccagtcatttgcttagatggtgtttgtgggatcacctgcagatttaaagcctactctgccacagactcgagtaagaaaatgttctcttgatgacacagtgctcctactctatccacattaagtagcacttttgtggtagaactgattcttaaggcaggcctgaaacgatttnacttaataggaaacacagcctttccaatcctctgggaacatattctgtctggggtttttaaatgtctgtggggaaaaaaactaaacaagtcttctgtcttcagttaaggaggaantctatttgggtcttgaaggttttctggaacctct

SEQ ID NO: 7027 - DNA, 207 bp, Homo sapiens
  III.655 (H04158)
  misc_feature (58)..(58): n is a, c, g, or t
  misc_feature (88)..(88): n is a, c, g, or t
  misc_feature (100)..(100): n is a, c, g, or t
  misc_feature (107)..(107): n is a, c, g, or t
  misc_feature (119)..(119): n is a, c, g, or t
  misc_feature (122)..(122): n is a, c, g, or t
  misc_feature (135)..(135): n is a, c, g, or t
  misc_feature (180)..(180): n is a, c, g, or t
caggcatcaataattattaacacaagacaaaggaaacacattcaatgagttaatagancactgtccagccagatgttaaatttaaaancgtatatctagnctaactncaaataaataanacncctttatacatanttccacagtactgtagtttgactttgacacgggtaaatatcttgncagacagtaaacaaaacagcatttagg

SEQ ID NO: 7028 - DNA, 273 bp, Homo sapiens
  III.656 (H29183)
  misc_feature (8)..(8): n is a, c, g, or t
  misc_feature (50)..(50): n is a, c, g, or t
  misc_feature (60)..(60): n is a, c, g, or t
  misc_feature (81)..(81): n is a, c, g, or t
  misc_feature (96)..(96): n is a, c, g, or t
  misc_feature (119)..(119): n is a, c, g, or t
  misc_feature (141)..(141): n is a, c, g, or t
  misc_feature (166)..(166): n is a, c, g, or t
gtcatggnctctggagacggggtcaccacacggtgcccatctacgaggcntacgctcacnccacgccatcctgcgtctggncctggctggccgggncctgaccgactacctcatgaagntcctcactgagcgaggctacancttcaccaccacggccgagcggganatcgtgcgcgacatcaaggagaagctgtctacgtcgccctggacttcgagcaggagatggccaccgcgcatcctcctcttctctggagaagagctacgagctgcccg

SEQ ID NO: 7029 - DNA, 495 bp, Homo sapiens
  III.657 (H29184)
  misc_feature (23)..(23): n is a, c, g, or t
  misc_feature (279)..(279): n is a, c, g, or t
  misc_feature (337)..(337): n is a, c, g, or t
  misc_feature (376)..(376): n is a, c, g, or t
  misc_feature (404)..(404): n is a, c, g, or t
  misc_feature (416)..(416): n is a, c, g, or t
  misc_feature (461)..(461): n is a, c, g, or t
ttttttttcattggttacggcancacttttatttttccttacacaatgacgtgttgctggggcctaatgttctcacataacagtagaaaaccaaaatttgttgtcatctcttcaaaggaatcgagaattgcgtacaaaaaaaaccttacataaattaaggaatgaatacatttacaggcgtaaatgcaaaccgcttccaactcaaggcaagtaacagcccacggtgttctggccaagacatcagctaggaaggaactgggtcctacggcttggactttncaaccctgacagacccgcaagacaaaacaactgggttttgccagcctctagagaaatnccagaacactcaggcctgacacgttaatacctgcacagntcagaggctgctgggcacacaggcttanccaggcacaganttgtttttcacaggacggttttaccttaggcaggagtacccaggncacaggtattaaggttgacttaaggtttgtacgg

SEQ ID NO: 7030 - DNA, 338 bp, Homo sapiens
  III.658 (H69652)
  misc_feature (282)..(282): n is a, c, g, or t
  misc_feature (298)..(298): n is a, c, g, or t
  misc_feature (305)..(305): n is a, c, g, or t
  misc_feature (320)..(320): n is a, c, g, or t
  misc_feature (328)..(328): n is a, c, g, or t
  misc_feature (336)..(336): n is a, c, g, or t
gtggtcaggagtggtgtgggcacgccactgcagcacgtcagccaggaacaggaacttccgtgcctggtcgctgtcctccaggtgggcgagctctctcccggaagcctgagccctcgaaactgttcctactctgcctgttacccagatccaaagtcactcccacatttttgggtatcttaatatcagcaccccactctaccagtgccaatttactgtattagtctgttctcatgctgctataaaagtacttgcctgagatggagtaaatttataaaaggaaangaaggtttaatttganttcaaangtttcaatatgggcntgaggganggcctcangg

SEQ ID NO: 7031 - DNA, 376 bp, Homo sapiens
  III.659 (H70498)
  misc_feature (80)..(80): n is a, c, g, or t
  misc_feature (355)..(355): n is a, c, g, or t
  misc_feature (360)..(360): n is a, c, g, or t
  misc_feature (365)..(365): n is a, c, g, or t
aatttgagtttgcatattgcatatacctcataactgtatttgatttctgaatttcacttttatttcaatcgtattatttncttacgggaaaaaaatttcaataatttcttacagccaactaagttaaaagtaaacctttctggctagttttcaatgctctctaaataacaggcttactccaagcagatatgccatatggtttggctgtgacccacccaaatctcattttgaattgaagtttctataatccccctatgtgtcgtggggagggacctagtggggagggtaattaaatcatggggggacagttaactccatggctgcgggttctcttggatagtgagttctcacaagnggttntgggnttataaggggg

SEQ ID NO: 7032 - DNA, 261 bp, Homo sapiens
  III.660 (H98200)
  misc_feature (18)..(18): n is a, c, g, or t
  misc_feature (39)..(39): n is a, c, g, or t
  misc_feature (228)..(228): n is a, c, g, or t
  misc_feature (243)..(243): n is a, c, g, or t
  misc_feature (248)..(248): n is a, c, g, or t
ataacaatgccacatgtngcttgtgtgataaataatctntgtttactgtggacacttcggcaatttggttcatcttggtacagaaaatacaaagacaggactaatattttattcattttttatacttagtaactaggacagggatctgtatttagactatattcaagcctcgctctgtcacccatgcttgagtgcaacctctgcccactgtgttcaagcgattctccngcctcagcctcctgnagtanctgggagtacagg

SEQ ID NO: 7033 - DNA, 448 bp, Homo sapiens
  III.661 (H98201)
  misc_feature (184)..(184): n is a, c, g, or t
  misc_feature (187)..(187): n is a, c, g, or t
  misc_feature (280)..(280): n is a, c, g, or t
  misc_feature (340)..(340): n is a, c, g, or t
ttttttagtttatcatgtcaccaagcaactatttattttaaaagtctgaactagttttgattacctaaagtgattaccagtggatgaaaatactgcgggcacaacatgaaaccttctaaacaatcagagagcctattacaatacattttttaaaatcttatgtaactggccgggcgcggagacnacnacctgtaatcccagcactttgggaggccgaggtgggcggatcacccgaggtcaggagtttgagaccagcctggtcaacatggcaaaaccttgnctctactaaaaatacaaaaattagccgggtgtggtgattgcacgcctgtactcccagctnactcaggaggctgaggcaggagaatcgcttgaacacagtgggcagaggttgcactcaagcatgggtgacagagcgaggcttgaatatagtctaaatacagatccccgt

SEQ ID NO: 7034 - DNA, 390 bp, Homo sapiens
  III.662 (R14080)
  misc_feature (374)..(374): n is a, c, g, or t
tgtctctaaaggaggcaaattggtttacaccttcatgtaattcttttactttaggggttgtaaagctactttattagatatagaatggcagattctctgatttaaaagggctgagtttgtattattactgatatgaagaatagagtaccaatgtcattaattgatttttcttgttaatcagaattcctattctgtacctttcctctaacttctcagatttgtaattcttcttttgggagctgagctagtgcttttaggagaacagataaatgtgggtctcagccagccctaggaggactgcttcttgtgtttgtgtcattctgtccccgaggaaatggaaggtcatctggaaaaataaaaatggaaaggaaacnggaatttgtcctaaat

SEQ ID NO: 7035 - DNA, 418 bp, Homo sapiens
  III.663 (R40208)
  misc_feature (337)..(337): n is a, c, g, or t
  misc_feature (356)..(356): n is a, c, g, or t
  misc_feature (361)..(361): n is a, c, g, or t
  misc_feature (388)..(388): n is a, c, g, or t
  misc_feature (393)..(393): n is a, c, g, or t
  misc_feature (413)..(413): n is a, c, g, or t
tttttttttttaattttttaaaaagtgtatgtgtttttaatgtcacaaggattaaccaaattagactatacaaaaatctgtaaggaaatgtaacaccaagtgacattaacactttagtcttatattcttttaagaagacaacccaacaaaatatggcagttactgagttagttaaaaggatatttataaggccagggtgcagtggctcacgcctgtaatcccaggcactttggggaggccgaggtgggcagatcacctgaggttcaggaagttcgaggaccaggcctggaccaacatgggaggaaaccctgtcttttacttaaaggaatattaaaanttaggctggggcgtgggtnggtgncatggcctgttaattcccagctacttnggggngggctgagggccgggaggantccct

SEQ ID NO: 7036 - DNA, 351 bp, Homo sapiens
  III.664 (W93782)
  misc_feature (326)..(326): n is a, c, g, or t
  misc_feature (332)..(332): n is a, c, g, or t
tttctttccatctttagaaacatcagtttttgtatggaagccaccgggagatttctggatggtggtgcatccgtgaatgcgctgatcgtttcttccagttagagtcttcatctgtccgacaagttcactcgcctcggttgcggacctaggaccatttctctgcaggccacttaccttcccctgagtcaggcttactaatgctgccctcactgcctctttgcagtaggggagagagcagagaagtacaggtcatctgctgggatctagttttccaagtaacattttgtggtgacagaagcctaaaaaaagctaaaatcaggaaaganaagganaaatacgagttgaaaatta

SEQ ID NO: 7037 - DNA, 489 bp, Homo sapiens
  III.665 (W93783)
  misc_feature (468)..(468): n is a, c, g, or t
  misc_feature (478)..(478): n is a, c, g, or t
  misc_feature (489)..(489): n is a, c, g, or t
agataaatgctttattattttctcaaaatgttataaaagtcatttctccttagtacagagagctttatacattttatctagtaatgaatacaatctagtttaacactgatctattttactaacatttccttaattttcaattcgtatttttccttttctttcctgattttagctttttttaggcttctgtcaccacaaaatgttacttggaaaactagatcccagcagatgacctgtacttctctgctctctcccctactgcaaagaggcagtgagggcagcattagtaagcctgactcaggggaaggtaagtggcctgcagagaaatggtcctaggtccgcaaccgaggcgagtgaacttgtcggacagatgaagactctaactggaagaaacgatcagcgcattcacggatgcaccaccatccagaatctcccggtggcttccatacaaaactggatggttccaangatgggaagnacctcgtggcn

SEQ ID NO: 7038 - DNA, 483 bp, Homo sapiens
  III.666 (R54033)
  misc_feature (452)..(452): n is a, c, g, or t
  misc_feature (477)..(477): n is a, c, g, or t
aatagcttaatgacttataaatgaagatctgtatacttcccactcgaaaaacggaatattgcaggatttgagtacacaacccgtacctttccaacgacagcctccctcccaccagagcttctgctgagttcacttgaaatcacttccttgcatttatttatacttttattaccttgaggtgcatccctaaccattctagttcgattttgcctggtgtttgaactttatattaatggaatcataggacataattcttatatctctggtttctttcattcaactttgtgtctgcgaaatgtatccatgttgcatgcaacgggggctcattcatcgctggttactgattcactggcatgagtatggacacagtttattaaccattttcactggctggatggaacatttgatccatttctagtttgggggattattatttataatttttggaaccntcttatttgtgtggcccggtgtacnggggcc

SEQ ID NO: 7039 - DNA, 487 bp, Homo sapiens
  III.667 (R54034)
  misc_feature (424)..(424): n is a, c, g, or t
  misc_feature (436)..(436): n is a, c, g, or t
  misc_feature (456)..(456): n is a, c, g, or t
  misc_feature (478)..(478): n is a, c, g, or t
  misc_feature (483)..(483): n is a, c, g, or t
ttttttttacttgcgaaacatttatccaataaataacatgttcagaacgtataaagaattcttacaactcaattacaagaagacaacccaatttttaaaaaatcggcagaggatttggaaggactctttactaaagatatatgaaagtctcaacgccattagttgtcaaggtaatgcaaattaaaacacaatgagatacactgcaaacccaccagaatggtcagcactattaaggctgacaacaccgtgggctggtgagggcgtggggcatctggagctttcacacttcggtctgggaatgcaaaatggtacagccactctgggaaaacagtttgtaagtttcctggaaagttaaatattaacttttgatacagtccagcattaccacttctaagggatgtacccaaggggaagtgaaaacagntgtttcacaganggtttgttccctggattggncattaggcggcttttttcttanccttntcat

SEQ ID NO: 7040 - DNA, 447 bp, Homo sapiens
  III.668 (R51602)
  misc_feature (159)..(159): n is a, c, g, or t
  misc_feature (229)..(229): n is a, c, g, or t
  misc_feature (237)..(237): n is a, c, g, or t
  misc_feature (302)..(302): n is a, c, g, or t
  misc_feature (329)..(329): n is a, c, g, or t
  misc_feature (395)..(395): n is a, c, g, or t
  misc_feature (417)..(417): n is a, c, g, or t
  misc_feature (422)..(422): n is a, c, g, or t
  misc_feature (428)..(428): n is a, c, g, or t
tttttttttcactgttaaaatgttttaatatcaatgtaaaatgagatgagagttttacaagcagatttcagaacaccaacactgatttccaatatgatttctctccctttcagaagcctaaagatgaacatatacaaatcttaggggtttttacaaaangcatgttttttttctattttcatacatatacagttgacaaacatgcaaaataactaatttccaaatcaanggtctctngcagaaacatccaatttaaaaatgaggcatttaaatttacttactggccatggaattccaggcanggaaaccaccctttcccccacacttcnggaaaaaccaccatttccttcctagggggttgttgggctttaacagtacttgggctttcccttgtncggcatccggacttcccggttncattntgttanttatgttacgttccatttc

SEQ ID NO: 7041 - DNA, 471 bp, Homo sapiens
  III.669 (R51690)
  misc_feature (39)..(39): n is a, c, g, or t
  misc_feature (388)..(388): n is a, c, g, or t
  misc_feature (423)..(423): n is a, c, g, or t
  misc_feature (429)..(429): n is a, c, g, or t
  misc_feature (446)..(446): n is a, c, g, or t
  misc_feature (451)..(451): n is a, c, g, or t
  misc_feature (466)..(466): n is a, c, g, or t
ttcatgttttctgcggatcgtttggttttgcctgagganttattccaaaagagcatagacaactcctgttctgcttttcatcatcagacttgttgtggaagagggattgaatcagctgccatataaagaatgcatggtgaccactccaacagggtacaagtatgaaggagtgaaatttgagaagggaaattgtggggtcagcataatgagaagcggtgaggcaatggaacaaggtttacgagactgctgtcgatccatacgaattggaaagatcctgattcagagtgatgaggagacacaaagagccaaagtatattatgccaaattccccccagacatttaccggaggaaaagtccttctggatgtatcccattctcagcactgggnatactgtaattggagctgtaaggttcttatagganctgggntttcaccccgtgttatnctccnactcagtctgttctnccctt

SEQ ID NO: 7042 - DNA, 426 bp, Homo sapiens
  III.670 (R56213)
  misc_feature (385)..(385): n is a, c, g, or t
ttttttttagtatttcaaatcactctatttacaagtttatcttttcaaaaaaaaaaagtaaaagatacagtaattcaacacaattcaagtttttcttttcttctttaaagttccctaacaaggaattccagaaacaggaaacactctgaagcaacgctgccatccaaggggctcctggggacttgacggtccatcggtttgtagtttgtctagagtcacccttgcaatgacattcacatgtggaagatacggataactctgttgtttgcaggccaagtgaatttgaaatctccagggtagtacttccccatccaagcacagtcttccacaagatccaggcctcttttcaccaggcaaattccctttttcaggaggggtactcatncccaccctccaaccttggggtttctttcctgaatcacaatg

SEQ ID NO: 7043 - DNA, 469 bp, Homo sapiens
  III.671 (R56296)
  misc_feature (364)..(364): n is a, c, g, or t
  misc_feature (376)..(376): n is a, c, g, or t
  misc_feature (419)..(419): n is a, c, g, or t
  misc_feature (438)..(438): n is a, c, g, or t
  misc_feature (447)..(447): n is a, c, g, or t
cagtgtcgaggccatttctctttgccactgagaaatgcagcgtgactgactctgttgctacctgtcaacatgaatgtttctgtgagctctggtgtcactcatctccatgatcatctcagccaacatgcatcagtactgcaagaaaagaagtcaatcagcagaggagagcatttgataactaagaggaagacttgcaaagccgttttctcatgagtaccctgaatagggggcactcattttgtttcaacggtccaaacgcccaaccttcagaaagaggaagtcagatagaaatagtccctgagagcacactgtgtaggctaagcctgctgggggctggggtgaagaaattgggcgctgagatccngggctggatccntttgcttttgtttacaatagggcactcttttctaccccacctnttcagggacttggaggacntaaagtggntacaggcagctgggatctgttt

SEQ ID NO: 7044 - DNA, 448 bp, Homo sapiens
  III.672 (N30222)
tcgtttctatgaaattactcgtatttatttagtttttctccttcaacaaaaatggaatcaactataaaaactcttgcatcctactttttttcacttactaaatcttagagagttttctgtcaaaacatattgccctagctcatttaaaaaaataacatatatcttatcagtttcctgtgaatagccatttagtctgtttcccatttttattaaaacaatcagtgcccatgtttacttttttttttttgagagggatttttgctcttgttgcccaggctggagtgcagtggcacgaatctcagctcaccgcaacctccacctcccaggttcaagtgattctcctgtctcagcctcctgagtagctgggattacaggcatgtaccaccatacccggctagttttggtatttttagtagagatggggtttctccattttggtcaggctggg

SEQ ID NO: 7045 - DNA, 387 bp, Homo sapiens
  III.673 (N57113)
  misc_feature (51)..(51): n is a, c, g, or t
  misc_feature (53)..(53): n is a, c, g, or t
  misc_feature (221)..(221): n is a, c, g, or t
  misc_feature (223)..(223): n is a, c, g, or t
  misc_feature (227)..(227): n is a, c, g, or t
  misc_feature (228)..(228): n is a, c, g, or t
  misc_feature (231)..(231): n is a, c, g, or t
  misc_feature (233)..(233): n is a, c, g, or t
  misc_feature (237)..(237): n is a, c, g, or t
  misc_feature (347)..(347): n is a, c, g, or t
cttctgccaccccagcagaagccttcatacaacatgacgaaacaagggatnangttgaagtgtgtcctgatgctggtgttatcatcgaggaactttctcaacgcattgcattaactggaggtgctgcactggttgctgattatggtcatgatggaacaaagacagataccttcagagggttttgcgaccacaagcttcatgatgtcttaattgccccaggnanagcnnatntntaanagctgatgtggacttcagttatttgcgaagaatggcacagggaaaagtagcctctctgggcccaataaaacaacacacatttttaaaaaatatgggtattgatgtccggngtgaaggttcttttagataaatcaaatgaggccatcagtg

SEQ ID NO: 7046 - DNA, 447 bp, Homo sapiens
  III.674 (T98420)
  misc_feature (344)..(344): n is a, c, g, or t
  misc_feature (379)..(379): n is a, c, g, or t
  misc_feature (407)..(407): n is a, c, g, or t
  misc_feature (424)..(424): n is a, c, g, or t
  misc_feature (441)..(441): n is a, c, g, or t
aacagtaacaatcaaactactgcccagtttccctggactagccgaggagcaggggttttgagactcctgttgggacacagttggtctgcagtcggcccaggacggtctactcagcacaactgactgcttcagtgctgctatcagaagatgtcttctatcttttgtgaatgattgggaacttttaaacctcccctcctctcctccttttcacctctggcacctagttttttcccattgggttccaggacaaagggtgacttattaaatatatttaggtgttttttgccaggaatcttctctttgcttttgcccatttaaggcaggaagggaactaggttttcccnggtatagggcctgctgggggggaggaggaccccantttctagggggggtatgggggggggggntggcaggctttcaaggncccagttggccccagtngttctt

SEQ ID NO: 7047 - DNA, 383 bp, Homo sapiens
  III.675 (T98478)
  misc_feature (21)..(21): n is a, c, g, or t
  misc_feature (139)..(139): n is a, c, g, or t
  misc_feature (319)..(319): n is a, c, g, or t
  misc_feature (341)..(341): n is a, c, g, or t
  misc_feature (356)..(356): n is a, c, g, or t
  misc_feature (369)..(369): n is a, c, g, or t
  misc_feature (375)..(375): n is a, c, g, or t
agatgaagtacaatgcttttnattacacacccaattgttaatgagaggaaatgcaatcagcaactcctttccacactctacatggaatcaaggagactgctgagtccagaaaagatgcagccattgatggagcccaggnaacttctccccaccccctctgcctgccccctaccaccaatcctcctcttggggtgtgggggaaggaaagagagagaagagttgcaaatatgatgagagtatcatgtctgaggaatccacttgtttgccacaggggtcactttgcaggcaaaggcctggggggcttgaaatctttcacttnaacaggcatttttaactttttncccaggtgtttgcanttttctggggctnatcttnggccccat

SEQ ID NO: 7048 - DNA, 229 bp, Homo sapiens
  III.676 (N92301)
  misc_feature (216)..(216): n is a, c, g, or t
acaaaaagctgagaagtatttattgctgaaaataattgatctttaggaaagaacagtgcaaatctatggcaggttcctgtcacagctaacatagcctaagcaggcacccttgggattagccctatcctcccaggccctggaagaaggaatctccaccagaatcatgaatccctagagttggaagctggaagtaccagggagtgatatttgattgtngggaagattgtga

SEQ ID NO: 7049 - DNA, 288 bp, Homo sapiens
  III.677 (W24696)
  misc_feature (231)..(231): n is a, c, g, or t
  misc_feature (247)..(247): n is a, c, g, or t
  misc_feature (279)..(279): n is a, c, g, or t
gtcaaacaaatgtgacttatgctggtgccctcgccctgctgatcagattctggttcaaattctgccactccagctcctgggttaggggctttgctgtaagtttctttttctggactttagatcctgaacctgtccttgcttctcagtttctctcactgtacccctttccctcagtctcttcctctctctttcccctgtcactatttgtctttctaatctccttctgtttcnctgaacagaatacctncatttcaatctctgggttccgggtcaattccncggttaatc

SEQ ID NO: 7050 - DNA, 127 bp, Homo sapiens
  III.678 (AA017547)
cagatttaaaccgtctttatttctacagcaacatcttgaaaatagagagcagccgcctcacccgcaacagggggagcccctcctgccaccaggggaccgtcgccgcccctcgcgagaagctgcaggc

SEQ ID NO: 7051 - DNA, 535 bp, Homo sapiens
  III.679 (H11720)
  misc_feature (336)..(336): n is a, c, g, or t
  misc_feature (449)..(449): n is a, c, g, or t
  misc_feature (475)..(475): n is a, c, g, or t
  misc_feature (481)..(481): n is a, c, g, or t
  misc_feature (496)..(496): n is a, c, g, or t
  misc_feature (505)..(505): n is a, c, g, or t
ttttttttcttttcatttgcgtttatttaaacacagttctcaaaacatttgagtgaaattgggcctcctttggtaagcaaaggacctgaaaataatatttaaaaaatgaacaggcaaagtcttcagttcatccatgacaggtatagtgttcccttatcatgtactttgaagcacccggttttttcatatagtctaaaagctagaagaacaagagtgtatttgtggtggaatgtattgtcacttgctgataactagttgaaataccattatccccttgtaacacctttaaggaaacagccttttaaggcatacactgtgtaactcttcgtatttccngctatacatattacaggtttacataaaagccgacaaatccacattggatataaggcttaaggcactgggctgtatttttaaggttttttagttctaatgactagcagtacagngtttaccggggccttaatttttaaancacttnggttgccgggatttnaggttgggnttgtttcctggggctcggagggaaacggtt

SEQ ID NO: 7052 - DNA, 514 bp, Homo sapiens
  III.680 (H11792)
  misc_feature (443)..(443): n is a, c, g, or t
  misc_feature (459)..(459): n is a, c, g, or t
  misc_feature (489)..(489): n is a, c, g, or t
  misc_feature (505)..(505): n is a, c, g, or t
ccgttctgcttccagaagtggaagtgctcacggatcggggaaatctgcaaggcatacccctgcaaggtctcgctccaaggaagattccaggcgttccagatcaaagtccaggtcccgatctgaatctaggtctagatccagaagaagctcccgaagcattatacccggtcacgttctcgctcccgctcccatagacgatcacgtagcaggtcttacagtcgagattatcgtagacggcacagccacagccattctcccatgtctactcgcaggcgtcatgttgggaatcgggcaaatcctgatcctaactgttgtcttggagtatttgggctgagcttgtacaccacagaaagagatctaagagaagtgttctctaaatatggtcccattgccgatgtgtctattgtatatgaccagcagttttagggcgtttcaaggagggntttgcctttggtatantttggaaaatgttaggtggatggccaaggnaggttaaagaacgtgnccatgggat

SEQ ID NO: 7053 - DNA, 353 bp, Homo sapiens
  III.681 (T84764)
  misc_feature (33)..(33): n is a, c, g, or t
  misc_feature (53)..(53): n is a, c, g, or t
  misc_feature (249)..(249): n is a, c, g, or t
agaggctggggtccccactgtgagatctgcccnttccaggggactgtggcttncaagaaactctgtccccatggccgaggattcatgaccaatggagcagatatcgatgaatgcaaggttattcacgatgtttgccgaaatggggaatgtgtcaatgacagaggatcatatcattgcatttgtaaaactgggtacactccagatataactgggacttcctgtgtagatctgaacgagtgcaaccagggntcccaaaccctgcaattttatctgcaaaaacacagaagggagttaccagtgttcatgcccgaaaggcttacatttttgcaagaggatgggaagggagctgcaaa

SEQ ID NO: 7054 - DNA, 329 bp, Homo sapiens
  III.682 (T91093)
  misc_feature (20)..(20): n is a, c, g, or t
  misc_feature (49)..(49): n is a, c, g, or t
tataaagtggagtactactnatttgtaatgaataggttccagccactgnttccttctttgtgaagtggaggtagctgatcccttccttttggttgattttaaagaagccatcttcatttccagattcgatcaagtatctgttgtgattcgtcagagttgtaagagctggaaggagttctaggattcgaaccttgttactgacgtgggaaatattgaaagcaaagatggctgtcttctcaacatcccaacttgcaagactcacattggcttctgtctcagactgatcctcgatattgggagggcatcagtttcgtttgtgcttctccgtt

SEQ ID NO: 7055 - DNA, 581 bp, Homo sapiens
  III.683 (AF086556)
ggtgaaggcaaaaagacgctgctttggcattctctttgcagcacagagaagtttacatgaagtagaagaaatccttgcagtggtgaaaactgacatggcaagtggcagaaaccaggtctaactaccagctgattgcagtagccggtcacaactgcccagagtgtaattcccaccgataagcgcggatccttatctttgaaacacaaagcgacggcggcacggattcatcaagccattggacagcttcgcagtgcagcagcccaggctgcccggccgagcaccgcagtcctatcaaggtttgctgtagctcagaaggctctgcctacatgactactgcataccctactgggagaattggaagaatgtgatgatggtaggagtcacccagcatagaagcatgagtgaatgacatcccagagatctgcaaaggatcctggtagccacttcaaagactttttctcccttcctcagacaatcatggcacatggacatcagaggaagaaatggcgaagtttgtatgactcctccagcagagtccttggaaacaataaagcttcctttccaaattctgaaaaaaaaaa

SEQ ID NO: 7056 - DNA, 409 bp, Homo sapiens
  III.684 (W92218)
  misc_feature (9)..(9): n is a, c, g, or t
  misc_feature (319)..(319): n is a, c, g, or t
  misc_feature (336)..(336): n is a, c, g, or t
cagaatttnggaaaggaagctttattgtttccaaggactctgctggaggagtcatacaaacttcgccatttcttcctctgatgtccatgtgccatgattgtctgaggaagggagaaaaagtctttgaagtggctaccaggatcctttgcagatctctcgggatgtcattcactcatgcttctatgctgggtgactcctaccatcatcacattcttccaattctcccagtagggtatgcagtagtcatgtacggcagagcttcctgagctacagcaaaccttgataggactgcggtgctcggccgggcagcctcgggctntcgcactgcgaactgtnccaatcggcttgatggaatccgtgccgccgtcgctttgtgtttcaaagataaggatccgcgcttatcggtggg

SEQ ID NO: 7057 - DNA, 449 bp, Homo sapiens
  III.685 (W92340)
  misc_feature (1)..(1): n is a, c, g, or t
  misc_feature (266)..(266): n is a, c, g, or t
  misc_feature (274)..(274): n is a, c, g, or t
ngcgtgaaggcaaaaagacgctgctttggcattctctttgcagcacagagaagtttacatgaagtagaagaaatccttgcagtggtgaaaactgacatggcaagtggcagaaaccaggtctaactaccagctgattgcagtagccggtcacaactgcccagagtgtaattcccaccgataagcgcggatccttatctttgaaacacaaagcgacggcggcacggattcatcaagccattggacagcttcgcagtgcagcagcccanggctgccnggccgagcaccgcagtcctatcaaggtttgctgtagctcagaaggctctgcctaccactgactactcgcataccctactgggagaattggaagaatgtgatgatgggtaggagtcacccagcatagaagcatggagtgaatgacatcccagagatctgcaaaggatcctgggtag

SEQ ID NO: 7058 - DNA, 331 bp, Homo sapiens
  III.686 (R07024)
  misc_feature (155)..(155): n is a, c, g, or t
  misc_feature (156)..(156): n is a, c, g, or t
  misc_feature (224)..(224): n is a, c, g, or t
  misc_feature (247)..(247): n is a, c, g, or t
  misc_feature (281)..(281): n is a, c, g, or t
  misc_feature (305)..(305): n is a, c, g, or t
  misc_feature (314)..(314): n is a, c, g, or t
tccaaactttaatatgataagaatcacctaaagtgcttaataaaatgcagatgctttggatttactctcagagagtttgctcaatttaagaggtctaaaaaggtagagtttaggaatctacattttaacaagcatccccgataattctgatggcnngtgagaagccctcccctagaatgcaaagcaaataatttgggaaaaaaaaaaaaaggacatttgttccncatgatgggcacacattgaaggnatgtgcttattcttcacattcatatgtaaggggnggtctcttgggggtcgttgttccnggggggctncgggcatgggggatctt

SEQ ID NO: 7059 - DNA, 378 bp, Homo sapiens
  III.687 (R07066)
  misc_feature (1)..(1): n is a, c, g, or t
  misc_feature (21)..(21): n is a, c, g, or t
  misc_feature (311)..(311): n is a, c, g, or t
  misc_feature (335)..(335): n is a, c, g, or t
  misc_feature (363)..(363): n is a, c, g, or t
  misc_feature (370)..(370): n is a, c, g, or t
  misc_feature (375)..(375): n is a, c, g, or t
ngacctgccgggcctcgtcgncctctccatcgcgctggcagtccagcctaatgacggcccggtcttttacaaggtggacgggcagcgcttcggccagaaccgcaccatcaagctgctcaccggctcctcctacaaggttgaggtgaagattaaacccagcacgctgcaggtcgagaatatttccattggtggtgtgcttgtcccactggaactgaagtctaaagagcctgatggggacagagttgtttatacgggtacatatgacacagaaggtgttgaccccaacgaagagtgggagaacgggcaacccntccagattcaccattgccggagtncctgggggaacaacggaccccaaggagnttttttntttancat

SEQ ID NO: 7060 - DNA, 278 bp, Homo sapiens
  III.688 (N95155)
  misc_feature (2)..(2): n is a, c, g, or t
  misc_feature (14)..(14): n is a, c, g, or t
  misc_feature (50)..(50): n is a, c, g, or t
  misc_feature (60)..(60): n is a, c, g, or t
  misc_feature (63)..(63): n is a, c, g, or t
  misc_feature (64)..(64): n is a, c, g, or t
  misc_feature (73)..(73): n is a, c, g, or t
  misc_feature (75)..(75): n is a, c, g, or t
  misc_feature (79)..(79): n is a, c, g, or t
  misc_feature (90)..(90): n is a, c, g, or t
  misc_feature (91)..(91): n is a, c, g, or t
  misc_feature (95)..(95): n is a, c, g, or t
  misc_feature (98)..(98): n is a, c, g, or t
  misc_feature (103)..(103): n is a, c, g, or t
  misc_feature (104)..(104): n is a, c, g, or t
  misc_feature (105)..(105): n is a, c, g, or t
  misc_feature (106)..(106): n is a, c, g, or t
  misc_feature (114)..(114): n is a, c, g, or t
  misc_feature (118)..(118): n is a, c, g, or t
  misc_feature (128)..(128): n is a, c, g, or t
  misc_feature (132)..(132): n is a, c, g, or t
  misc_feature (133)..(133): n is a, c, g, or t
  misc_feature (137)..(137): n is a, c, g, or t
  misc_feature (143)..(143): n is a, c, g, or t
  misc_feature (168)..(168): n is a, c, g, or t
  misc_feature (179)..(179): n is a, c, g, or t
  misc_feature (180)..(180): n is a, c, g, or t
  misc_feature (185)..(185): n is a, c, g, or t
  misc_feature (204)..(204): n is a, c, g, or t
  misc_feature (213)..(213): n is a, c, g, or t
  misc_feature (218)..(218): n is a, c, g, or t
  misc_feature (222)..(222): n is a, c, g, or t
  misc_feature (225)..(225): n is a, c, g, or t
  misc_feature (232)..(232): n is a, c, g, or t
  misc_feature (251)..(251): n is a, c, g, or t
  misc_feature (275)..(275): n is a, c, g, or t
tngttatcataaanagtgttgaaatttatttattatagcaccattgaganattttgaatnggnnttggtaaanantaanacaaaaagcanntganttntattnnnnggaacagnaaantaagagaagnatcnnttanctttgncagattgtactgtttccaaacattntggaataatanntgganttttgtcggtcacttgcantggttgacnagatngagncangagggcncatatggagttaatttttnttgttgggatttcagatagagttnggt

SEQ ID NO: 7061 - DNA, 244 bp, Homo sapiens
  III.689 (W21531)
caccgatgagattatgacttcactcaagtctgttaatggacaaatagaaagcctcattagtcctgatggttctcgtaaaaaccccgctagaaactgcagagacctgaaattctgccatcctgaactcaagagtggagaatactgggttgaccctaaccaaggatgcaaattggatgctatcaaggtattctgtaatatggaaactggggaaacatgcataagtgccaatcctttgaatgttcca

SEQ ID NO: 7062 - DNA, 486 bp, Homo sapiens
  III.690 (H71314)
  misc_feature (1)..(1): n is a, c, g, or t
  misc_feature (293)..(293): n is a, c, g, or t
  misc_feature (324)..(324): n is a, c, g, or t
  misc_feature (340)..(340): n is a, c, g, or t
  misc_feature (357)..(357): n is a, c, g, or t
  misc_feature (408)..(408): n is a, c, g, or t
  misc_feature (428)..(428): n is a, c, g, or t
  misc_feature (446)..(446): n is a, c, g, or t
  misc_feature (465)..(465): n is a, c, g, or t
  misc_feature (470)..(470): n is a, c, g, or t
ntagtttaaaatgttgctgattctttgttttatttttcagagtcaagaaaacttcttttgagctgttgtgagcttttctttgagctgtttaacaattgagtaaagtatatcactgtgaataaaatttggagcatatttgtttctgatttctccagaatttggaacctatttatgaatattcttaacttacagcaatatagttatttgcataagtgcaatacgaatgttttcttttgcaacaggacacaactgggagaaactgggttattttaccaagggctttgggctgggantagtgtgctttcctttaagggaatcaaactngacttataaaggccantaaaggcccttgggggnaaacttgcctcataccttgtttatgcagtccctgtacagggttccttaccngtgggggaaataaagggtgntcactttccgacgggccngggggcccccaggtatctnggggnccccaggggggagggg

SEQ ID NO: 7063 - DNA, 464 bp, Homo sapiens
  III.691 (H71361)
  misc_feature (402)..(402): n is a, c, g, or t
  misc_feature (412)..(412): n is a, c, g, or t
  misc_feature (441)..(441): n is a, c, g, or t
cagtatattctacaacagtaaagcaaaataagtaaaattatcccaagtaaactaaataagaaggctttccatgaacgggcaactgttggaaaccaagctgattccagtatgggcccagaattagaatactgatccagattttcacattaccatctctcttgtttcttctgagcagcagccagagatcactggttggttcacaggaataagcagggttagtctaaattgcagaaaaaaccctcaagaacaactgatgagaaaaacactcaaaaacacctaataacaagtgtaccatagtttttgaaacataatttttttctctctccagtctccctttttactaaaggcaaatcatgataagactggatttgcttttttattacttgggtctggttatctggnataaagtacnggcaggattaattatttttgcactggggnttttttaaattgggctttgatgg

SEQ ID NO: 7064 - DNA, 232 bp, Homo sapiens
  III.692 (R07020)
  misc_feature (20)..(20): n is a, c, g, or t
  misc_feature (87)..(87): n is a, c, g, or t
  misc_feature (102)..(102): n is a, c, g, or t
  misc_feature (186)..(186): n is a, c, g, or t
  misc_feature (230)..(230): n is a, c, g, or t
tgatatttgtttagttacgntcttgcaatgccagcagaaaaagaaaaatccaaatctgaagcatgcgtgtgttatgagaagcctggnaaaggcgatttgggnccattatataactgccactttttgtttttattcaaggtgtcataaaaactgagttctgcagttgaaggtatgtttttacaaccnccaaaatcaataatgttttgcttaaaggttgcatagcgtggctngt

SEQ ID NO: 7065 - DNA, 361 bp, Homo sapiens
  III.693 (R07058)
  misc_feature (318)..(318): n is a, c, g, or t
  misc_feature (339)..(339): n is a, c, g, or t
tgaaactcctatggggctaaggagatcaattttataccaataaatcatttcagaaaatgaggtcattttaatattcttggggttactcagcaaaacactttgcttggacgtctcttttgtactttccttaaattcttcttccttttcttctcggctttttgaatgtatgactgaagggaactgccactcactgacacggacaacagtaaagggaacttgggtcttcactatgcctcatagtgggtggggtcacactgcccgggggggaacccgcaatgaggaccgggcaaatgcctttaaccatcttcattgtcttcntcagggaggaaggcttaaatngactctttcttggcttcacata

SEQ ID NO: 7066 - DNA, 313 bp, Homo sapiens
  III.694 (R35979)
  misc_feature (232)..(232): n is a, c, g, or t
tgatttttaaattttctttatttttgtagagatgggggtctcactgtgcatgtgtatttaaatattgattatactgcattgaggaaagaaaagtaataaactcttggattcaaatatattcagcaaatgaaatccattcccttcctgtctatatatttatttcttgggagcaaagagagtaccatacaaagtgggtgattctcttgcttgcctggaatactggggatcaccnggggggaactttaggaaaaaggactaatgtttaaggtccccaaggggcagaggatttttgatggtaggttgctctgcaggt

SEQ ID NO: 7067 - DNA, 401 bp, Homo sapiens
  III.695 (R36348)
  misc_feature (327)..(327): n is a, c, g, or t
  misc_feature (334)..(334): n is a, c, g, or t
  misc_feature (363)..(363): n is a, c, g, or t
  misc_feature (380)..(380): n is a, c, g, or t
gcacccatgtaacaaatctgcacatatacccccaaacctaaaataaaagttggaaggaaataaataaataaatatgtaactatttaattttaaaagatgggcctcatgctatttacctttcagtgtccttatgatgattagagatgacagatgtaaaattgccaggcacgtatgaagtagcgggagtcattattatttttaataagttatttaaattctggagcatttttcgttcttgaactgcaaaacaaggtaggttgtatctataaagttactctcttaggatgctttattctggatggaattctcagtgggtgttccattccngttttcnttttttaaatcagggggttttcgaccctncaatggcaaattaccanttacctggggggggcctttaa

SEQ ID NO: 7068 - DNA, 495 bp, Homo sapiens
  III.696 (H18426)
  misc_feature (214)..(214): n is a, c, g, or t
  misc_feature (440)..(440): n is a, c, g, or t
  misc_feature (460)..(460): n is a, c, g, or t
  misc_feature (472)..(472): n is a, c, g, or t
  misc_feature (495)..(495): n is a, c, g, or t
ttttttttttttttacattaaagtatttaattagtgaaataattattatcaatgtaacaagctgaaaaatacagcaacttgatacaagactgaggtaacaaaatacttcaccaaaaatcgaaagaaccccatggagggctgattgacgttcagtggttactgcgggtgagacgattcacaagaattagagaaagtccttacacaactgcatgcnggggtctgctggagaaaaagacagcccagggagagtgcaacagatttaacaggaaacgaattaaaatgtaggaaactgattttcaacttacttcgaagagtacataaggaaattggaaaactactctctatggcaacattttggaatggctaagtgggaaaaccatggcattttgggcacgaaaatttatttaaaggttattaccatactaatttaattactattnacttacgttactgattagtncacagtacgttncggcattgggataaagggatttn

SEQ ID NO: 7069 - DNA, 506 bp, Homo sapiens
  III.697 (H18534)
  misc_feature (41)..(41): n is a, c, g, or t
  misc_feature (433)..(433): n is a, c, g, or t
  misc_feature (496)..(496): n is a, c, g, or t
  misc_feature (506)..(506): n is a, c, g, or t
ttcataacgccattgaagggattatttcttgcatgcatatntggaatttttttaagcaaatggatcatggcaccccaaaatgaaagttatagaaagctgtctacaactgtggagttggtagctggtaacattgttgtctcaagaacaactcacctctctccctaggactaatttttgtctctctcagttgaacatgttttgtcattcaagatcagtcaggtgcattctggcaactgacatacttgatggaggattgattcggtagagagcagtagaaatcttgttctaactgtgcctggtgagagactttggccccctccctccctataaaggctgtggaacctgaggaagtagatacttgaagagattctgtttaggaagaaactcactctcttttggccagttggaatttattaggagccattttttttcnttaaccaagatgggccagtatcattttaacccccacctcccaagccccaaggaggtgttaccntttcagatgn

SEQ ID NO: 7070 - DNA, 489 bp, Homo sapiens
  III.698 (R91146)
  misc_feature (6)..(6): n is a, c, g, or t
  misc_feature (8)..(8): n is a, c, g, or t
  misc_feature (143)..(143): n is a, c, g, or t
  misc_feature (147)..(147): n is a, c, g, or t
  misc_feature (167)..(167): n is a, c, g, or t
  misc_feature (368)..(368): n is a, c, g, or t
  misc_feature (395)..(395): n is a, c, g, or t
  misc_feature (434)..(434): n is a, c, g, or t
  misc_feature (440)..(440): n is a, c, g, or t
taactncnaagacttcagttcctttatgataactgggctttatttctgttaatggcaactttagttatactcttgtcagtaaaaagtacatcattctccttgcccaaaaatactgaaagaaaatatgtaccaaagaggttttntttnctttgtgttctctacgaaantgtgccccacgcaccagggctgtttcctcttcaaaattattaattcacagaaaacccccaaaacactcacttcaaccagcttttaactcccttgtaggctttagtttccttctacacgttcagggctattctctttttgggctcttaactgtggcatcctttactcattttgtttatcaagggctgtgttcatggccttgnttcccggggccgccctcaactgggggntttcaggttcagggggccacaggtaaataagggcccatncccatncaatccccagttttcagggggcctccggccggggtttcaaaggggttag

SEQ ID NO: 7071 - DNA, 324 bp, Homo sapiens
  III.699 (R91192)
tagaccacttgaagctgtttttgagaatacagattccaatacaaccacaaaaaccttaccacatctaagaaaattaatactgattctatcttatgtaatatctgttctttatttaagtttcccgaaatatccccaaaatatcttttatagctttcatttttttccaaaccaggcaaggtttatacattcattgcatgcggttatgtctctttcatctctttcaatctagaatagcccaccccatcatcttttcttctgttggacagttatactaatatgcagagatgatgtcatatttttcactacagaaaaaggcacttcata

SEQ ID NO: 7072 - DNA, 382 bp, Homo sapiens
  III.700 (R95740)
agtctagagctcacagtacagagttttgtgaaatacggtgcctatgagaattttcccatggtacacagaagccacagaggtgccctgaagcacagagccattgttggcatacacggtgctcaccctgggcttctcagacaaaacattctggatgcgaagtacttctgatcctggagggtcctcagggttatagttcagtagcttcataggattaggatggcatcctgccaaaatgtctcctgtggcaggatcgacagtcaggttatccactaaggtgcccaactgtatcaccttcagttgagttaaatcccagttatcatgtttttccattatgtgaatgttcttaggctgctacatcagctacataggacatacttctggt

SEQ ID NO: 7073 - DNA, 363 bp, Homo sapiens
  III.701 (R33422)
  misc_feature (20)..(20): n is a, c, g, or t
  misc_feature (193)..(193): n is a, c, g, or t
ggttgttccaatttaaactnagcactagcagtgaacgcaaattcttattgccctacttcttgggcagcttttaaattactgcaaatcttgtgagtgtgaaaggtacttaatctttctagacatctatttttcttcaacatagccaacatcatctagtatgtactgcttcctgtgaattcatagcgtaagattntcttcagctcattacaaaagttccataaatataattttaaagggtgcatgatattctatgtaccatggggtatttttaactattcccttaattgctggaatttttggggttgcttcctattttttctttataaaggtctggatttctcattaaactgctgaggttctaca

SEQ ID NO: 7074 - DNA, 264 bp, Homo sapiens
  III.702 (R33518)
  misc_feature (226)..(226): n is a, c, g, or t
  misc_feature (233)..(233): n is a, c, g, or t
  misc_feature (243)..(243): n is a, c, g, or t
  misc_feature (253)..(253): n is a, c, g, or t
agaactcagcagtttaatgagaaatcagacttttataaagaaaaaataggaagcaacctaaaaattcagcaattaagggaatagttaaaaatacccatggtacatagaatatcatgcaccctttaaaattatatttatggaacttttgtaatgagctgaagaaatgcttacgctatgaattcacaggaagcagtacatactagatgatgttggctatgttgaaganaaatagntgtctagganagattaagtncctttcacact

SEQ ID NO: 7075 - DNA, 425 bp, Homo sapiens
  III.703 (N26860)
  misc_feature (322)..(322): n is a, c, g, or t
  misc_feature (425)..(425): n is a, c, g, or t
cttttaaaaaataaatatttataaacttaaggaagattcaaagaatcagggtatcttttcctccaaaaacacaaatgtcccgtgtaagtcaaaccaaggtgcgaccaccaacccatgaatgaagtcccctccccctgcagctacagggttgaggggcaggtgggcaggggagctgctctctctcctgccttcagtcccccttggtgatgaggtcctcaatgtaggcgtccagctcatcatctgtgttgatgtctatgtccttttgcaggagtgccacgatgttggtcctcagcttctgcagcttctcctccgtctcgcggantttcctctcggaggttgcgcaggctttcctcggaggccttggccgggggagtcagcacggctctggtaggaattgcacaggttttggagccctacttcataan

SEQ ID NO: 7076 - DNA, 453 bp, Homo sapiens
  III.704 (N39969)
  misc_feature (48)..(48): n is a, c, g, or t
  misc_feature (49)..(49): n is a, c, g, or t
  misc_feature (330)..(330): n is a, c, g, or t
  misc_feature (356)..(356): n is a, c, g, or t
cccgaaagcttcctgtcatcagcagtaccccaaagctccctgctttgnnagcccgggagaggccagcacatctaggctgctccagcacctgaggcaccccgaaagcctgccaacactctcgtcaagactgcatcccgacctgcccctctggtgcagcaactgtcaccatctttactgcccaactccaagagccctcgggaggttccttctcccaaagtcatcaagactccagtggtgaagaagacagagtcacccatcaaaactctccccgggctacccctagtcggaagcggagtgtcgcagtttctgatgaggaaagaagttgaggangaagcttgagaggaggaaggagaggngcaagcggggcagatttgttgtgaaggaggaaaagaaggactcgaatgagctctcagacagtgctggggaagaggactcggctgacctcaagagagc

SEQ ID NO: 7077 - DNA, 421 bp, Homo sapiens
  III.705 (T96114)
  misc_feature (174)..(174): n is a, c, g, or t
  misc_feature (177)..(177): n is a, c, g, or t
  misc_feature (393)..(393): n is a, c, g, or t
  misc_feature (407)..(407): n is a, c, g, or t
ttgtcttaataaactgattttattagaaaaaggcactttaatgccaactgctggaaacacgcatagtaaatacatttgcacaaccaaacacagtgccctccagggggcaggggagaagaagagtaggagagggtgatagttgttggcttaacaaagaagagaagagcgagaccnggnccaggggaggtagttaggtcaagtggatggttctgtaccaaggacacagcaaaggtcctcaggcactgattcacattacccaaagtcaccagataatagagttgtttccgtggctgacatttcttagccttgccctcaaacttggcaggagggaggcaagctcgtttaaagaaggggagaggggaggagttccagggcaattggcctagggggttngctttgagagagantaggttgacccttc

SEQ ID NO: 7078 - DNA, 377 bp, Homo sapiens
  III.706 (T96195)
  misc_feature (44)..(44): n is a, c, g, or t
tagagctggaacgagtgcagagtaggaacgctttgatgcgcatnacattggggaagatgcgctcctcagggacacaaaggccgagtggggtaaaaccacgaagggagggaagggaagtcagctctgggagcagccctcactggctggaccaaggtactcttcctggagtttgccgtgttagcaaccacagtcaccttgcagtcaggctggaatcttgggccaccccaaagtgctttgctgaaggatttagacggggatgaagtgccctccagcctcagagctagccacaaagcccccagagcttgaattcattgagtatttgtggcctagggtttgggctgttttgtgtgataccggccccccgccagacaatagcc

SEQ ID NO: 7079 - DNA, 423 bp, Homo sapiens
  III.707 (AA054087)
  misc_feature (422)..(422): n is a, c, g, or t
tcagtcaatcagcaagcatttattgagcacttgttgtattctcagagctccacttggctgtggagagatagcccatgatttaagcccaagttcttacttctacagagctaacttgtgcagagctactggctagaagtgcagtcataaaggagcagtggaaggcattggtctgaactatcacattcattctggccatctggacattggacatgatgcttctgattgtcagacactcatgctccagctccaggatctcccgagggacctgcaggacaaatttcaccaccttcagctccttggacaccttcttctgaatgacgctatcaaaatcacagtctagctggtcactggtgattggccctgttaggacagccaaggtgaactcaaggccatgaagcgtgtggctgaagggagtgaagaang

SEQ ID NO: 7080 - DNA, 207 bp, Homo sapiens
  III.708 (AA054201)
  misc_feature (206)..(206): n is a, c, g, or t
aagctctcgaggctgacctgaaacatcgatttacccgacagagtgggacttggctaagagcctacagaaaaccatccaagcagcgaggtctgagaattactctctgaccgacttctgggcctacatggttatctctaagcaaaccagagaactgccggagtctcatttgtccaatatgaagaagcccgtggaagaagggacactanc

SEQ ID NO: 7081 - DNA, 527 bp, Homo sapiens
  III.709 (N92697)
  misc_feature (362)..(362): n is a, c, g, or t
  misc_feature (370)..(370): n is a, c, g, or t
  misc_feature (397)..(397): n is a, c, g, or t
  misc_feature (438)..(438): n is a, c, g, or t
  misc_feature (457)..(457): n is a, c, g, or t
  misc_feature (508)..(508): n is a, c, g, or t
  misc_feature (513)..(513): n is a, c, g, or t
gtagatcaaaagtcatgtttatagacaacagaagcagacttaaaaacatttaccagtgtctaaatacacattaatgacaaagactccaatttagacaaagttgcttaatttttaaaatgttagtgtttatagttaattaaactataaagtgaaattaatcgccaactttgattcaataagtgatagagtcagcataagaacagttttaggccaggcacggtggctcatacctgtaatcccagcactttgggaggccgaggcgggcagatcacccgaggtcaggagttcgagaccagcccggccaacatggtgaaacccccgtcttcaccaaaaacccaaaaatcagccgggcatggtggcangcacctgnaattccagccattcaggaggctgaggncaggacaaccgcctaaacccggaaggcagaagccgcaagtnaagccgaaggtcgcgccantggaattccacctgggggacaagagcaagactccgtttcaaaaaaaaaaangaccnggtttaatatgggg

SEQ ID NO: 7082 - DNA, 364 bp, Homo sapiens
  III.710 (W20275)
  misc_feature (2)..(2): n is a, c, g, or t
  misc_feature (58)..(58): n is a, c, g, or t
  misc_feature (353)..(353): n is a, c, g, or t
anttcggcacagggtgggctgccaggagttaggctatggagagctgctgtcagtctcnctaggaggccatggtttcctgcatgtgggggagagccatccccagactctggaagtgagtttaatttcccaaggcaagtctgcctgattgtctctcctttccttaccttcagcaccaagaagtttccggtcccggtacagatcagtgaggaagaggctattgacaagtgtggatttgcccaggccagactctcctgagaggagagaggacagaggcaccaaatcagaagggacccttctctggggctgtctgatagtctgcaggagacacagctgcttccgtgctctaggaaganagggactccct

SEQ ID NO: 7083 - DNA, 426 bp, Homo sapiens
  III.711 (AA017425)
  misc_feature (269)..(269): n is a, c, g, or t
aatactcatgcattacttctataaataaaaagttttaaagtttgtttgcttttcactatccccatattggcattaaagagagccagtttatcaggcagcatttgaggtaaggaatgtccgtctctgggaccctatagatcctgggtaccagattacactcatctttctgacttaatttccagagtggatagcagcccctacctaagcacagccccctcattgggcaataagtcagcaacagcaatgctggccacacgggaggccctcanggtgtcctcaccccacccctaggtttactgacaggtaccctgcaggggatgagggtggggccctgagctggactccacccaacacttgccacctccccagcctgtgtcctccctaccacccgaggagctgaaagacccaacagcacaccctcagtgg

SEQ ID NO: 7084 - DNA, 319 bp, Homo sapiens
  III.712 (AA017553)
  misc_feature (279)..(279): n is a, c, g, or t
  misc_feature (288)..(288): n is a, c, g, or t
  misc_feature (313)..(313): n is a, c, g, or t
gctgggtctggttctgagctccgtctgcgtcgccctcggatccgaaacgcaggccaactcgaccacaggtgccgcccacgccctccctgccatctcttctcccttcctccctcccttccttcctccttccttctttccttccttctttgtttatatccattctttttacccttcctctctcctaccattccttctttcatccatcattcgttccctccctccatttttcactccttcctaccgtcccttcatccctcccttccctctttccatctattnatccaatcnatctcctatccctccgtggcttccnttcctc

SEQ ID NO: 7085 - DNA, 429 bp, Homo sapiens
  III.713 (H10054)
  misc_feature (207)..(207): n is a, c, g, or t
  misc_feature (224)..(224): n is a, c, g, or t
  misc_feature (230)..(230): n is a, c, g, or t
  misc_feature (344)..(344): n is a, c, g, or t
  misc_feature (385)..(385): n is a, c, g, or t
  misc_feature (421)..(421): n is a, c, g, or t
ttttttttagcgtttttaccaggtttattttacttgttatacacagacgatacaaacgagcaaaaaacaaaacgtttctcaatggagtgtgttcttgtataaattattcagttcacagacaaaacgaaacaaatataaaaatcacaacattagatttacagaagagccaaaatatacacacgtttagaccctgaattcctattaggnaaaaatccccccatggnactggnaatctagattgaatattgtgtatgatgcatatttcacattaatttttaaatacaaaaaagtataggtttgctacacaacattaggaaatcctacttaatctatttccggggggnttaatgctccttatccaaatattaacaggacttaggggggnaaatccggtcttacttgcctttaatgctagtgttcnccccaggg

SEQ ID NO: 7086 - DNA, 463 bp, Homo sapiens
  III.714 (H10108)
  misc_feature (401)..(401): n is a, c, g, or t
  misc_feature (434)..(434): n is a, c, g, or t
  misc_feature (439)..(439): n is a, c, g, or t
  misc_feature (456)..(456): n is a, c, g, or t
cccagctccgcctccccacactcctccttgcgcacccactcattttatttgaccctcgatggccgtctgcagcgaataagtgcaggtctccgagcgtgattttaaccttttttgcacagcagtctctgcaattagctcaccgaccttcaactttgctgtaaaccttttggttttcctacttactcttcttctgtggagttatcctcctacaattcccctccccctcgtctttctcttacctcctacttctctttcttgtaatgaaactcttcacctttagggagacctggggcagtcctgtcaggcagcagcgattccgaacccgccaagtctcgggcctccacattaaccatagggatgttgactctagaaccggggacccacccaggcgcgtccttttnttattccccgagtgggatgggatgggatgggangggangggtaggggatgttaantaatttt

SEQ ID NO: 7087 - DNA, 400 bp, Homo sapiens
  III.715 (H23012)
  misc_feature (233)..(233): n is a, c, g, or t
  misc_feature (264)..(264): n is a, c, g, or t
  misc_feature (328)..(328): n is a, c, g, or t
  misc_feature (334)..(334): n is a, c, g, or t
  misc_feature (370)..(370): n is a, c, g, or t
  misc_feature (394)..(394): n is a, c, g, or t
tttttttttttttttttttatggttatatgtatatgtttgtttaatctagaataagaatgaaacaggttatttcagttctactcatattttacaatttactacaagccatcttttattttgaaatttttataaatcatttggagcattccattgaaatattaaaaaaaatactttatcacagtattgccttgcttcagcatggcatgggatttcaagggacaagaggtaaggnccacccggggcaactgaaacagtgcacttgnaaataggtctggaatataattaggcttcaggattatctggttaatttcaggatcatttactccncagagngggccggggaattttaaccatccttatatatagggntatatatgggggatataatataanatgggg

SEQ ID NO: 7088 - DNA, 250 bp, Homo sapiens
  III.716 (H24199)
  misc_feature (51)..(51): n is a, c, g, or t
  misc_feature (80)..(80): n is a, c, g, or t
  misc_feature (91)..(91): n is a, c, g, or t
  misc_feature (110)..(110): n is a, c, g, or t
  misc_feature (121)..(121): n is a, c, g, or t
  misc_feature (122)..(122): n is a, c, g, or t
  misc_feature (127)..(127): n is a, c, g, or t
  misc_feature (130)..(130): n is a, c, g, or t
  misc_feature (148)..(148): n is a, c, g, or t
  misc_feature (151)..(151): n is a, c, g, or t
  misc_feature (169)..(169): n is a, c, g, or t
  misc_feature (186)..(186): n is a, c, g, or t
  misc_feature (237)..(237): n is a, c, g, or t
tctctataatggttccagtatagtctctagtattgaatttgaccgggattntgactattttgcgattgctggagttacanagaagattaangtctatgaatatgacactntcatccagganncagtnganattcattaccctgagaanganatgacctgcaattcgaanatcagctgtatcagttngagtagttaccataggaacctgttagctagcagtgattatgagggcactgntattttatgggat

SEQ ID NO: 7089 - DNA, 381 bp, Homo sapiens
  III.717 (H87256)
  misc_feature (7)..(7): n is a, c, g, or t
  misc_feature (184)..(184): n is a, c, g, or t
  misc_feature (303)..(303): n is a, c, g, or t
  misc_feature (309)..(309): n is a, c, g, or t
  misc_feature (311)..(311): n is a, c, g, or t
  misc_feature (319)..(319): n is a, c, g, or t
  misc_feature (326)..(326): n is a, c, g, or t
  misc_feature (331)..(331): n is a, c, g, or t
  misc_feature (335)..(335): n is a, c, g, or t
  misc_feature (357)..(357): n is a, c, g, or t
tcccggncctcagccctctgctgcagaccctcgggatcgtcgctggaaagattctgaagcttggcgcagaggggtgtgtgagtggacaccagtgaagtaacggtttttgtgttacgatgatttctgttttcctctgctgccctgtaatggcaggaactcggatagtctggtcttcagaccaggnaggactcccaggagagaacggagagccagtgtgctgtgtgtcacggtccctggatgaacgtttgtggaactggattgaattaaacaagacgtgcaaagcaagtggttcacgaggtagtntggggntntagggatngggactnacccnggangcaggacacagcccaagccctnccttggcctcacctctaaacttgc

SEQ ID NO: 7090 - DNA, 401 bp, Homo sapiens
  III.718 (H87307)
  misc_feature (66)..(66): n is a, c, g, or t
  misc_feature (340)..(340): n is a, c, g, or t
  misc_feature (390)..(390): n is a, c, g, or t
agacctggaggccacattgccaatctgcccattttacagatgagaaaacagaggcccaggatgganagggaatcatccaaggtcatcagcaagttagaggtgaggccaaggcagggcttgggctgtgtcctgcctcccgggtcagtccccatccctacacccccacactacctcgtgaaccacttgctttgcacgtcttgtttaattcaatccagttccacaaacgttcatccagggaccgtgacacacagcacactggctctccgttctctcctggggagtcctcctgggttttgaagaccagacttattccgagtttcctgccatttacaggggcagncagaggaaaacagaaatcattcgttaacacaaaaaccgtttatttcattngggttccattg

SEQ ID NO: 7091 - DNA, 442 bp, Homo sapiens
  III.719 (H90006)
  misc_feature (299)..(299): n is a, c, g, or t
  misc_feature (337)..(337): n is a, c, g, or t
  misc_feature (423)..(423): n is a, c, g, or t
  misc_feature (428)..(428): n is a, c, g, or t
  misc_feature (434)..(434): n is a, c, g, or t
ggaatatagcctttttattgactactttaagtagaacaaactaaatacatatttaacagttttggttcatttatacagtacattaaataagttatgcacagagttaggtaacaaaaattcctatcagagtaaaatgacaaagcacagaaaaaccagattctaatgcattctgtgggtggtgtcacattcatcatccccctttaaaaaccacgcgtggaggcttcgttttctatttatttacattattgggctttcttttgtgagcggaccttttgtaggcctcgtcagggaagttgggnaagccacggttaaggggactgaaggcctcttggcgcanaggccctttcaatcattcggcctaatggcttattgctggcttctctgccgactccagggtaggggtgggggctgtccccaacaggncaccnggcggnactggccc

SEQ ID NO: 7092 - DNA, 403 bp, Homo sapiens
  III.720 (H90096)
  misc_feature (195)..(195): n is a, c, g, or t
  misc_feature (348)..(348): n is a, c, g, or t
  misc_feature (388)..(388): n is a, c, g, or t
aggagttcatcactgcttagtgtcaacttgacatcttcagcttccagacagaaaacccatgctttactttgtacagccctgtcccagagttagtaagcctcggcttgtcacctgcttgcaaagggtatagacatcattctgggtagttctagaggatatcgcaacaagtgcgtttgaaggttcagcacagctggnaattgtacggtagtgagctcttcaaaatgaaaacagaatgaccggatgggccatctgtcctgggaaactgtaggaattgtataaatcactggaaaataggaacacttcttgggaggctttcttcagaacttgaactaggaaacaaggtttccngggctcccgggttcagtaggaccaaaccaactttcctttnggtttttttttttta

SEQ ID NO: 7093 - DNA, 449 bp, Homo sapiens
  III.721 (AA017540)
  misc_feature (43)..(43): n is a, c, g, or t
  misc_feature (349)..(349): n is a, c, g, or t
  misc_feature (397)..(397): n is a, c, g, or t
gcggccgcgcctccggtgcgtttcagctgagggcgcgcaccangctccgagcctggctccgggtgcagcaccggcctgggacctctgctgtcccgtgtaggggtgccctgcaaatatgtgatgaataagtgaagaaatacgttctatcttctaacttgccggatgttagaaggaaaccaagcttatgcttctcatttatagctaccgttaaggattggacagaagcttagctttttgggtgagacggacaacagtgtttttaagaacctttggcaaaggaagaagctggaaagaacattgtattttgaaaagtgacttgaccaggtcttcctggccctaagggggcacncttgaagcaaggttgcaccccagctttcccctcccaaagaccaggaanaattaaaattttaaagaaaggaagaagccaggaaaggggcccccgggccaga

SEQ ID NO: 7094 - DNA, 437 bp, Homo sapiens
  III.722 (AA017634)
  misc_feature (283)..(283): n is a, c, g, or t
  misc_feature (387)..(387): n is a, c, g, or t
  misc_feature (405)..(405): n is a, c, g, or t
  misc_feature (411)..(411): n is a, c, g, or t
taatctcaaaagtgtcttttttgtcttatttcatcttcacagtttcctgttcttattatataaatatatctccctaatctgagtctatggattggagttctatccaatccattcattccaatgattggaatgattggagtcattcacatttctcaatccatttattttccgtttctttgcctggtctttcttttatgtgatgcagctctccttgaatgtctgatacattttcatcctttaaaatgaagccgatgggtgacaggaagacgtgcttccatgaaanggcagtgtttcactccggaacctcagctcccgcaccgctgggattccagatccacaggcatccccagggacctcttctcccctctggggtcctggcccccaatnttcaactgggctcccatntcaganttccctggtaaggcctccaggcttgg

SEQ ID NO: 7095 - DNA, 379 bp, Homo sapiens
  III.723 (T73990)
  misc_feature (4)..(4): n is a, c, g, or t
  misc_feature (139)..(139): n is a, c, g, or t
  misc_feature (144)..(144): n is a, c, g, or t
  misc_feature (146)..(146): n is a, c, g, or t
agtnccctatatggtctaaaaaggggaggaaccctcaggttctgagaatttccttgaaaattcatgaataatccaccccttgtttagcatatgatcaagaaataatcattaaaaaatagccaaccagcagctcatgctnggacntngcctatggagtagccatcctttctttattaacctgctttcactttatggactcccctgaattcttctgcaggagatccaagaaccctctcttggagtcttaaccagggatccctttccagtaacttcagcaggatctgtgagtgccagtttccttctgtgggtgcaaaactagggtgctaagtacactttttcccccctttcctcttatttttaaaaaggaactttcaggccc

SEQ ID NO: 7096 - DNA, 468 bp, Homo sapiens
  III.724 (T82462)
tttttttttttactcatttatgaaacatttattgaattagacattctactaaccatttatttttacaaacagttaactaaacatcactggttttctttgataaatggtaatcttgcaaaggctcatttatagatacatcattatttcatgctgtataaaattgacataggagttaagaagaaatcacttaagcagaaagcaagggtatgggagtcctcggtaaggcttttttctttaatgaaaagaagctccaaatcatttgctaacaaagagcagcctgtaaagttgagctgcagacataggacaagctggcagcttgcatggggtggaatgccagcaggaaactaagggactaggacattttcaaggatgggtgggctttcatctttccctttctctggcccagccacggtgtttacacaagatggggaccccaattcaactggggaaaggcccattttgcataag

SEQ ID NO: 7097 - DNA, 396 bp, Homo sapiens
  III.725 (R71071)
  misc_feature (7)..(7): n is a, c, g, or t
  misc_feature (205)..(205): n is a, c, g, or t
  misc_feature (309)..(309): n is a, c, g, or t
  misc_feature (350)..(350): n is a, c, g, or t
  misc_feature (360)..(360): n is a, c, g, or t
  misc_feature (375)..(375): n is a, c, g, or t
  misc_feature (392)..(392): n is a, c, g, or t
ataaacnaaaaactttaatgcatatgaaacacagaaagtgtttcaacaaatttttattattattaacatattctgtactttgttcaagttatataacaaatttcatgtaaatagtattcaaatatgtgaacacagtttcaaaatataacattgtactagtgattctcatttccataattcactctgtaggccattagaaatttangcatttatgatctaatcaacgctatgtagggaacagaactacacatttgtgtaacttaaatgattctttcatttcttcttttttaggtttctcatatttgaaanggataatgttttatattcaaaggttggaaatgaaggctctnggaaaagtcnggcttttataatctnttttgctttttgggggnttat

SEQ ID NO: 7098 - DNA, 424 bp, Homo sapiens
  III.726 (R71410)
  misc_feature (2)..(2): n is a, c, g, or t
  misc_feature (375)..(375): n is a, c, g, or t
  misc_feature (384)..(384): n is a, c, g, or t
gngaaaagttagagggaaatatggaaaagacgtaaatgaggattaggggattaaaatcattctcctttgttttaatttacagattctttgattccaaaattaagcgtcaaaataaatattttgtatggcatctagaattttcaaattcttaaaaaatgcatgttttttgttgctgttttgttgatttagggaagcaggatagtcattatcagatttacgatggttatagtaataatcacatattaaaaaaccctcattttcctttttataaatttaagaaactcctatcatactgtgatttaggagaagccattgaatttcagttgtttcagagtaaggataatacccaaaaagcaaaattagattataaaagcnggacttttnctaggagcttccattttcaactttggaatattaaaacctt

SEQ ID NO: 7099 - DNA, 621 bp, Homo sapiens
  III.727 (AF086282)
gtcctcaagccggcacctgagcggcggagacggctgtagcacaaggatctgcatctccaatggatactgaggggtttggtgagctccttcagcaagctgaacagcttgctgctgagactgagggcatctcagagcttccccatgtggaacggaacttacaggagatccagcaggcgggagagcgcctgcgttcccgtaccctaacacgcacgtcccaggagacggcagatgtcaaggcgtcagttctcctcgggtctcggggacttgacatatcccacatctcccagcgattggagagtctgagtgcagccaccacctttgagcctcttgagcctgtgaaggacactgacattcagggcttcctgaagaatgagaaggacaatgccctgctgtctgccatcgaagagtcccggaagaggaccttcggcatggctgaggagtaccatcgggagtcaatgttggttgagtgggagcaagtgaaacagcgaattctgcacacactgctggcatcaggagaagacgcccttgactttactcaagaaagcgagccaagctacatcagtgatgtgggaccccctggtcgaagctctctggataacatcgagatggcctatgcgcggc

SEQ ID NO: 7100 - DNA, 437 bp, Homo sapiens
  III.728 (W69156)
  misc_feature (11)..(11): n is a, c, g, or t
  misc_feature (15)..(15): n is a, c, g, or t
  misc_feature (88)..(88): n is a, c, g, or t
  misc_feature (167)..(167): n is a, c, g, or t
  misc_feature (170)..(170): n is a, c, g, or t
gcggcggagangctngtagcacaaggatctgcatctccaatggatactgaggggtttggtgagctccttcagcaagctgaacagcttntgctcgagactgagggcatctcagagcttccccatgtggaacggaacttacaggagatccagcaggcgggagagcgctngtntcccgtaccctaacacgcacgtcccaggagacggcagatgtcaaggcgtcagttctcctcgggtctcggggacttgacatatcccacatctcccagcgattggagagtctgagtgcagccaccacctttgagcctcttgagcctgtgaaggacactgacattcagggcttcctgaagaattgagaaggacaatgccctgctgtctgccatcgaagagtcccggaagaggaccttcggcatggctgaggagtaccatcgggagtcaat

SEQ ID NO: 7101 - DNA, 473 bp, Homo sapiens
  III.729 (W69281)
gccgcgcataggccatctcgatgttatccagagagcttcgaccagggggtcccacatcactgatgtagcttggctcgctttcttgagtaaagtcaagggcgtcttctcctgatgccagcagtgtgtgcagaattcgctgtttcacttgctcccactcaaccaacattgactcccgatggtactcctcagccatgccgaagtcctcttccgggactcttcgatggcagacagcagggcattgtccttctcattcttcaggaagccctgaatgtcagtgtccttcacaggctcaagaggctcaaaggtggtggctgcactcagactctccaatcgctgggagatgtgggatatgtcaagtccccgagacccgaggagaactggacgccttggacatctggccgtctccctgggacgtgcgtgttaaggtacgggaacgcaggcgctcttccgcctgctggatctcctgtaagttc

SEQ ID NO: 7102 - DNA, 446 bp, Homo sapiens
  III.730 (R23390)
  misc_feature (418)..(418): n is a, c, g, or t
  misc_feature (433)..(433): n is a, c, g, or t
aagaaatgaaaggcatagtccctgactatattctaatttaggactgaatgtacccagatgcttgtggaataatatctaagcaagtgcaaattcatgtaataccgttttgtctgattacatattgtgttgaaatagtataaaggagaacagaactgggtggaattaattgggaaaaacttcttacaaaagcatcattaatcaaaatttgaaggagaccagactttggccaagtggaaggatgaccattgtcttggcctgtatctcttgtcctttgtcttgtttgaaaagtattttaaaacttaatggtgtattattttgtgctctgaaagctgaggtctgattacaattagtaaaattctatagaagaatctgctgacgtgaaagggaaaaatctttgtcaaatgataccaaataaatngaacataacagggangtaggggcctatg

SEQ ID NO: 7103 - DNA, 400 bp, Homo sapiens
  III.731 (R44174)
  misc_feature (288)..(288): n is a, c, g, or t
  misc_feature (336)..(336): n is a, c, g, or t
  misc_feature (346)..(346): n is a, c, g, or t
  misc_feature (356)..(356): n is a, c, g, or t
  misc_feature (387)..(387): n is a, c, g, or t
ttttttttttactcagaaaaataaattaatgaataagatttcctctattaaagttttttcttggtttttaaaaaagtgacttgcacatatacaaccttttcattagtaaaattgcttagttcatgcaatcaaattaattatataagtatttcatggcattctccaagctctactacttgaacaggtctgactgagcattactatgctaatgtactctgatcccaaatgattgtctacctaaaaataggaacaaatactgtattttctgggaataaaccaataattcgntatgggttttagtactgggtattaactgatgacccaagtcattaatanaatgttaaanttatattcancatctaattactgttagggcaaatttgttantacaattctaaaa

SEQ ID NO: 7104 - DNA, 417 bp, Homo sapiens
  III.732 (R32174)
  misc_feature (238)..(238): n is a, c, g, or t
  misc_feature (317)..(317): n is a, c, g, or t
  misc_feature (329)..(329): n is a, c, g, or t
  misc_feature (338)..(338): n is a, c, g, or t
  misc_feature (374)..(374): n is a, c, g, or t
  misc_feature (392)..(392): n is a, c, g, or t
  misc_feature (400)..(400): n is a, c, g, or t
  misc_feature (413)..(413): n is a, c, g, or t
aatctctggaagctggtggtgtgaagctcaagctccaattcgttctaaatctgcacagttcctttgaacagagacagctgcaaggagctgaatcaatgggcctacccacctatttgggggtgtctatacccgcactaatccagagagccagtttgtccccatttccccctaagtgttactttaccagggtttccaaaagtgtgtgcccgtgggttcgttagggattagggatggggantagaagggagcctctcaataaatacctattgaattatatgggataattgggatccattatctattcaaaaagggggagntgggggaggggntggggaaanaggggctttttttttttttttagggagggaaagccntaaattaccccctagggncccccaanttccccctttctnctgg

SEQ ID NO: 7105 - DNA, 355 bp, Homo sapiens
  III.733 (R32222)
  misc_feature (60)..(60): n is a, c, g, or t
  misc_feature (297)..(297): n is a, c, g, or t
  misc_feature (337)..(337): n is a, c, g, or t
  misc_feature (346)..(346): n is a, c, g, or t
catggactggacaccttcactccagctggacaaagactctggagagagagccattggtgngagttgagactgtccccagaacccttggtcttgccactcccccactccttcttccctctctccctttctcctctccctgctttcttgaaaaggactgaatcgccactacagcctggggtgcaaaatcagcaagaaacattgagtatttttttttctttgtatgcctttgggcttggcacaacccatttgtgaggcaaaagcagaagtgggaccaccatcagcttcccacccaacccngcgatttttcccttgggaggttaagcccctttaaccccantaactttgntttaaccaa

SEQ ID NO: 7106 - DNA, 468 bp, Homo sapiens
  III.734 (H53035)
  misc_feature (402)..(402): n is a, c, g, or t
  misc_feature (423)..(423): n is a, c, g, or t
  misc_feature (435)..(435): n is a, c, g, or t
  misc_feature (445)..(445): n is a, c, g, or t
  misc_feature (457)..(457): n is a, c, g, or t
atcttttggaggagaggcagactctgcttagaacaggtggtttgtgttccctggttctcttgagaagggggaccacccataccagtctgtcttaacattttcttcctttctttctttcccctaataacagccagttttgggactgttaccccaaaaaagtttactattaaagctcaatatgaagccagcgaggtgaaattttagggattttagatgtatctgaagctacttctcagcaatatctccccagcctcatccttttcctgttgtctctttatttccagaaggcactgggtgttattaaaattgtgtgttgggaaggtgtttttctgttttctggaatcttctttctctgggaaaatccatatgtaaattgctttgtggaagtcttactttgttttnctctcagagacgggtggaacnaggagaatggcnggagtccggnaggagacggagncagggagagga

SEQ ID NO: 7107 - DNA, 352 bp, Homo sapiens
  III.735 (H53036)
  misc_feature (215)..(215): n is a, c, g, or t
  misc_feature (298)..(298): n is a, c, g, or t
  misc_feature (349)..(349): n is a, c, g, or t
ctgaaaaaaatagaaaactacatttttacacgaaataaacttatgtctgcaatactcagccttaaattcacccctcacttcagaagaggtcccaggggcaggaataacacgcacagattgtttgttcacgacttccagccggtccaccagacctctggccaggtaatactgtacaaagtgcttccacgtgatttctcttccagggatcacgaaantagaggtagaaaaatcccatgggcaacgcctgacccccaaaagggccagactgcgggaaatcctcgtcatcccgggggaagtncccccttctggcatccgcctccaccagggggaacgtttatcctgctttccntcc

SEQ ID NO: 7108 - DNA, 376 bp, Homo sapiens
  III.736 (R31357)
  misc_feature (333)..(333): n is a, c, g, or t
aaaaaatatattcctcttcagtcattgttactgaaggtaatgaagcagttactttctgtggaagtcataaagttaatagatattaatcttgactcatctagctcagtggttctcatcaagggtcaatttgattgtcatagtgaccttgaaaaccactggcttttagtgagtggccagggaatgctaaatgttctgcagtgtcaggggtagtcccacatactaaagattgtctcacccgcagtgccaataacactcctaagaaatgttgatgggctattttgtgggtgctaacatgtagttggggcacctacaattgggttctcttaataaccnttctttggcagttaaggactgaaggctgttcaaagggggtaag

SEQ ID NO: 7109 - DNA, 394 bp, Homo sapiens
  III.737 (R32859)
  misc_feature (283)..(283): n is a, c, g, or t
  misc_feature (296)..(296): n is a, c, g, or t
  misc_feature (302)..(302): n is a, c, g, or t
  misc_feature (371)..(371): n is a, c, g, or t
  misc_feature (382)..(382): n is a, c, g, or t
  misc_feature (387)..(387): n is a, c, g, or t
tgaattaattttgttaaaagtgttttgaacagatatgcaagtaaaaacacacacattaagaaatgaacaaaaacgttcttgctctccataagtacttcttagaacagccatgattaagtcgaactttatatatagagtttaaaaaacaagtaacaaatttttgtaggagttaaacttgaggacacatacatttatatcctaatattgggatatactctcttgacatttaatttgttattcctattgggtgggtttgcctttttaaagttttaaagttttcccnggggggaaaggtntaaggnaaagggtatcccggattactttatcctttttggaaccttacttgggggttaaccggttttcaggtagcnccattgcgggnaaccntggccaa

SEQ ID NO: 7110 - DNA, 390 bp, Homo sapiens
  III.738 (H06610)
  misc_feature (224)..(224): n is a, c, g, or t
  misc_feature (233)..(233): n is a, c, g, or t
  misc_feature (300)..(300): n is a, c, g, or t
  misc_feature (333)..(333): n is a, c, g, or t
  misc_feature (340)..(340): n is a, c, g, or t
  misc_feature (359)..(359): n is a, c, g, or t
ataacaagtgattaagaaaggggagatatggttttatactcataacaatttcctgtgccattctctgtacacagaggtgattcatttactctcccattagtagaacttgcactttgggctgtctgttctagtatttgggaagtgtttatgcttccttccagggaccatcttatgatcagaggcaggatgtctgtgagatggttagctagagttagcagtgtccngggagagtngctttagaccagtcagtaccttgctctttgtgcatggtgcatgtcaagtcaggaagccaagaaaccnttggcattaaaatctagatgcataggagatccntgctatnagttgtgggatagggagtngctccatctatccttgtgggtgaaagagtcc

SEQ ID NO: 7111 - DNA, 523 bp, Homo sapiens
  III.739 (H07120)
  misc_feature (406)..(406): n is a, c, g, or t
  misc_feature (425)..(425): n is a, c, g, or t
  misc_feature (443)..(443): n is a, c, g, or t
  misc_feature (450)..(450): n is a, c, g, or t
  misc_feature (470)..(470): n is a, c, g, or t
  misc_feature (486)..(486): n is a, c, g, or t
  misc_feature (495)..(495): n is a, c, g, or t
  misc_feature (508)..(508): n is a, c, g, or t
  misc_feature (520)..(520): n is a, c, g, or t
tttttttttttgatatgaatacagtttattacagttttcagactcccattacgacacatatctaaagctgaacattgcaaactgaccttactagcagcaattctccctagacaggaagggtttcagttaatttagcaattaggagtaaagacaaacttacaagtcatggtttttcttgtagcagctggtatatgagcagtgaaactatagatacgtagagtcattcaggtttagccttgtctaaaaaaacattaataagttatggtgcagaggagtatccccagggttgccaaagagaaggctgatgtctttagatgtcagtatgaaacaagcaaatcactttcaaggacatgggcttactatttgctttactgtcagggacaacagaaaaaggaagtgggacagnctaccctaggtttctaggntcacacttatttcagccnggtaatncttcttttaattattacccntggaattttttcggcntttcacagntctaaaaacacancttcgggcttanctt

SEQ ID NO: 7112 - DNA, 459 bp, Homo sapiens
  III.740 (R95887)
  misc_feature (2)..(2): n is a, c, g, or t
  misc_feature (5)..(5): n is a, c, g, or t
  misc_feature (242)..(242): n is a, c, g, or t
  misc_feature (376)..(376): n is a, c, g, or t
anaanttcttggagtacttgttactttcaactgtagtgtctttatatgatgtcctgatttaagtctttcagtttccacttttattaagcacattttctttttttgcaggccatttttgggctcccagaatatgtattttgtgtttattcagctcctgtcaagtggttctgcttggtttgccataatcctcatggttgttacatgtctatttcttgatatcataaagaaggtctttgaccgancacctccaccctacaagtactgaaaagggcacagggtaaccactttttataataaattcaatatctttttaggttaggggatctttaataatggaataggctggtcattataatttggattatggtcaggaaanaggggaaattaggccattcccggtttcaactattttgtaaccttaaacattgttcagtgtggatatttttggaagggtatttc

SEQ ID NO: 7113 - DNA, 401 bp, Homo sapiens
  III.741 (H91827)
  misc_feature (34)..(34): n is a, c, g, or t
  misc_feature (70)..(70): n is a, c, g, or t
  misc_feature (123)..(123): n is a, c, g, or t
  misc_feature (124)..(124): n is a, c, g, or t
  misc_feature (140)..(140): n is a, c, g, or t
  misc_feature (150)..(150): n is a, c, g, or t
  misc_feature (153)..(153): n is a, c, g, or t
  misc_feature (154)..(154): n is a, c, g, or t
  misc_feature (155)..(155): n is a, c, g, or t
  misc_feature (165)..(165): n is a, c, g, or t
  misc_feature (279)..(279): n is a, c, g, or t
  misc_feature (282)..(282): n is a, c, g, or t
  misc_feature (315)..(315): n is a, c, g, or t
  misc_feature (398)..(398): n is a, c, g, or t
gtgataagtgtatctcatgacacactttaatatngctagtttattttcttattaggaatgaatgattgcnctcctcttcaattgcctttaacttatacaaaattacatgtttctactcatatnngttatttatctatgantatatcatanatnnngaaataattntatttaaactcagaaacataatataaataagaactactaaaatgtagccaccaattagcgtgcacacaaagacacaggctctgaactaggtcattaataaacaatatttctacncgncacaataatcctagaaatgtagatattaatatncttattttacagatgaaaatatttgcccaacatcacactattgggagcagaaaaagattcaaatcccgtcttgaccccaaagnccc

SEQ ID NO: 7114 - DNA, 444 bp, Homo sapiens
  III.742 (H91870)
  misc_feature (1)..(1): n is a, c, g, or t
  misc_feature (8)..(8): n is a, c, g, or t
  misc_feature (387)..(387): n is a, c, g, or t
  misc_feature (393)..(393): n is a, c, g, or t
  misc_feature (398)..(398): n is a, c, g, or t
  misc_feature (419)..(419): n is a, c, g, or t
  misc_feature (434)..(434): n is a, c, g, or t
nggtatanaaaaatatagatgtatataataaaatattattaaacgttactataatgtattttctgtatgtgtggttttgactagaccatgaacacctttctgtgtcatgggagatttcagttacctaaaacgaaggagatgtcaaacctagaagtggtagacagtgtttcaatagcttttttcaccaattattttactttatttttttttagataatgagcttcagtccccaagatctgcgaagacgtttgtgggtgatttttccaggagaagaaggtttagattatggaggtgtagcaaggtagtggataatatgaatactcagaacttagttcctttcctccaaaggtaccattggcacttcgcctggcaagtaattatttttcnccatcntatanttttagggaaaatgggaatanggtccaaattattanaccctttatt

SEQ ID NO: 7115 - DNA, 387 bp, Homo sapiens
  III.743 (H86764)
  misc_feature (88)..(88): n is a, c, g, or t
  misc_feature (274)..(274): n is a, c, g, or t
  misc_feature (312)..(312): n is a, c, g, or t
  misc_feature (329)..(329): n is a, c, g, or t
  misc_feature (346)..(346): n is a, c, g, or t
  misc_feature (377)..(377): n is a, c, g, or t
taataggaaagataatttatcttccttatgaaaaaaacatccaaaatcttattttatagtcctctaaatatacctattaatataaaancattattaaggatgcttccaaaactaaacattgtcatcacagtgagaattttagtggaagttagttgggcatcagtcagcttgtctttgtagtgagtatctgtataataaatagttatccgcttttttcttttgtattttaacagaatgcctgggtacccagtaaataaagttaagaacctgttangaactgcagtgatgattttgttctttacagattgcagncaagtctgagttgaggnagttctgacagatgcanaatgtacacctgttgcaggttgcacataccngcgtaaccgg

SEQ ID NO: 7116 - DNA, 312 bp, Homo sapiens
  III.744 (H86765)
  misc_feature (35)..(35): n is a, c, g, or t
  misc_feature (196)..(196): n is a, c, g, or t
  misc_feature (248)..(248): n is a, c, g, or t
  misc_feature (296)..(296): n is a, c, g, or t
  misc_feature (305)..(305): n is a, c, g, or t
  misc_feature (310)..(310): n is a, c, g, or t
tgttttacctttgctttaaaactctcatgtaagtnatctacagagaggatcattacagagacagactctcccgagacatgggccacactgatagaatagagaatttgagaaaaatctgggtctttctaaaaactgctttgtaagttactttttctttatgacttctgtgggattttgttgatattttcttagagantgaccaaatctcctttcttgccataattaacatttaggtaattatgtagganacggcactgcttgggtcagggcttcctgcctaggctatatattacggntgtcttccntactncc

SEQ ID NO: 7117 - DNA, 394 bp, Homo sapiens
  III.745 (N59090)
agggggaaaaaaccccaagtgaacatattactttttaattctcccaagagctttcattttcttgccttcaacacagttatgtattaatggaactttgtggagtccctcaactccatagtatagcttatactggcaatggggaaaccaagtgttatgagaaggaggtggtgattacttttccaaagtggggaagggacaaggatgagagaaagagatgatgacatctttcacagatgagatgacacaactgaacctttaaaaatagcagggttttgctggaggtaaagtccttcaaaggggctacatgtggatgaacatagggttacagagtgcagtgcctacttaaagacaagccctgaagcttttggaaaactattaaagattattgattaaa

SEQ ID NO: 7118 - DNA, 298 bp, Homo sapiens
  III.746 (N59494)
  misc_feature (15)..(15): n is a, c, g, or t
  misc_feature (16)..(16): n is a, c, g, or t
  misc_feature (255)..(255): n is a, c, g, or t
aactatattcagtannagcctcagtggtaagagtgaaagcatttccccccagtccaggggcttcatccttccttcagtgccttggcaggccctcagggaatgaggagacctttgctcttccctccaccttgtcctgactcctcaagcctccagccttgaggaggcttctctagatgaaagctcctcagtaattgtattagtctgttctcacaccgctatgaagaaaaacccaagactggggaattttataaaggnaaagaggtttaattggactcacagttccgcattgctgggggaa

SEQ ID NO: 7119 - DNA, 505 bp, Homo sapiens
  III.747 (H78002)
  misc_feature (412)..(412): n is a, c, g, or t
  misc_feature (473)..(473): n is a, c, g, or t
  misc_feature (505)..(505): n is a, c, g, or t
aagtaatgagaggtccagaagaaatgtggcttcagctctgctgctactgtgcctcccttctcctgccccactcagcccacaaaataggctggacactcaaaaaacgttgcgtttatctaccttttagagagggtgaatagcagagaactggaggtgggaatggtaaggaactcccagcagggtagtggagggaatgggctgacgcatctaaggctgatgccaggtctgctccctatctgggtggcctcagcaaatgacgtccagcacatccaggggcaggctcaagggagaacagcccccaaagctaagatcctgccaagctaaatacagtagttctaatgaaatgtgagaggctataatccctttgggaaattcctaaaaagtcatgagggcaggggattggtttatgttnttattcatggacctgagagttctgggttcagagccaaatgttcagggttgatttcaacagnctttaaatgtctttaggagcgggtggaatttn

SEQ ID NO: 7120 - DNA, 376 bp, Homo sapiens
  III.748 (H78003)
  misc_feature (69)..(69): n is a, c, g, or t
  misc_feature (254)..(254): n is a, c, g, or t
  misc_feature (277)..(277): n is a, c, g, or t
  misc_feature (298)..(298): n is a, c, g, or t
  misc_feature (355)..(355): n is a, c, g, or t
tataggctttgtttattaaaatcttttaaacattctaaacttcttgtgtaatttatcatatttaatttnctattttagcacttcaaatcattgatatgacaagattataaccaattaagacaaaacattctcatatatttaagcatctcttgtaaatctaatacattaaacttatagtaaatctagtctaatacttttcatgagctaagttaaatattcttatacctttcaacttcaaatcacaaacgtaaaancaatttcacatttcaaattgggnatcataaggctttttaaaggnttcaaatcacttaagggaggcatacacaaggattaggtccctaaacttaacatgganattatccaatattatggggtt

SEQ ID NO: 7121 - DNA, 215 bp, Homo sapiens
  III.749 (W31597)
gcagaggctgatttatattttagcaagtctctctatcggctatgatccccaagttttctttttagagaaactatgatgctgataatagcagtttttacgcaaaagatattaatattcaatcgatatttggtaatgcttcgttcaaatacaggttgaacattcctcatacaaaaatctaaaatctgaaataccccaaaatccaaaactttttgagt

SEQ ID NO: 7122 - DNA, 440 bp, Homo sapiens
  III.750 (W31850)
  misc_feature (1)..(1): n is a, c, g, or t
  misc_feature (259)..(259): n is a, c, g, or t
  misc_feature (419)..(419): n is a, c, g, or t
  misc_feature (440)..(440): n is a, c, g, or t
naaaaattagccaggcgtcggtagctgggattacaggaaaatgatgaagaagccaagaagattgcaaaagaaggacagttgatggctagggacctactacagccacacaggctttactgctactattaccaagtactgcagaaatatgccgagcgccagtccagcaaacccgaagtacgtgatggaatggaacttgttctcagccagaagatagcacagccatctgccagtgccacaggaaaaagccttcaagacgaangaactttgagtcagcccagaatcacactcctgtgtatccccggctacatctttaaggaaacgattgaatctaagctgtgaaggacagtatagaagactgcaccaagtggactaagttctcccggtggctttatatatgtagatgggatatagcagtactnggttgagtatccctcatctgn

SEQ ID NO: 7123 - DNA, 454 bp, Homo sapiens
  III.751 (R08020)
  misc_feature (293)..(293): n is a, c, g, or t
  misc_feature (298)..(298): n is a, c, g, or t
  misc_feature (305)..(305): n is a, c, g, or t
  misc_feature (339)..(339): n is a, c, g, or t
  misc_feature (377)..(377): n is a, c, g, or t
  misc_feature (382)..(382): n is a, c, g, or t
  misc_feature (388)..(388): n is a, c, g, or t
  misc_feature (414)..(414): n is a, c, g, or t
  misc_feature (436)..(436): n is a, c, g, or t
ctgtctccaaagctggagtgcagctccatcatggttcactgcagcctccgcctcccgggtttgagcgatcctcccatttcagtgtaaccaccattcttatctctatcaccatagattagctctgcatgtctttgaacttcatataaatggaatcatgcatagataggctcttttgtgtctggattctctctgttaacactgtgtctgtgagactcactcacgctgtgtgtagtattatgcttcatccttttttgttgttgcatagtattccactgtataaatataccacaatntattngtctgtnttccctattgctgtgcatttggggattgttttgnttttcactattttggaataaaggctggctatggaacanccctngtatanggtcttgggggaaacaggaggggccnggggggttaccaatgatggggnttaaaaatgtttgacttt

SEQ ID NO: 7124 - DNA, 305 bp, Homo sapiens
  III.752 (R08069)
  misc_feature (1)..(1): n is a, c, g, or t
  misc_feature (27)..(27): n is a, c, g, or t
  misc_feature (95)..(95): n is a, c, g, or t
  misc_feature (109)..(109): n is a, c, g, or t
  misc_feature (237)..(237): n is a, c, g, or t
  misc_feature (245)..(245): n is a, c, g, or t
nccctgagtggtcctcctgccctaagnctcctccctgaccggtcctcctgccctaagtttcctccctgaccggtcctcctgccctaagtctcctncctgactggtcctnctgccctaactcctccctgactggcctccatccaagcagagttgaggtattgctggttccctgctcaaacccaccactggttgctggttccctgctcaaacccaccactggcactggcttcccatcanatacagantaaaggctaaatgtctaaggtttggcacagaaagtcatcaacagccccagagcacgtttt

SEQ ID NO: 7125 - DNA, 530 bp, Homo sapiens
  III.753 (AA001043)
  misc_feature (61)..(61): n is a, c, g, or t
  misc_feature (191)..(191): n is a, c, g, or t
  misc_feature (270)..(270): n is a, c, g, or t
  misc_feature (383)..(383): n is a, c, g, or t
  misc_feature (398)..(398): n is a, c, g, or t
  misc_feature (405)..(405): n is a, c, g, or t
  misc_feature (416)..(416): n is a, c, g, or t
  misc_feature (438)..(438): n is a, c, g, or t
  misc_feature (446)..(446): n is a, c, g, or t
  misc_feature (455)..(455): n is a, c, g, or t
  misc_feature (462)..(462): n is a, c, g, or t
  misc_feature (474)..(474): n is a, c, g, or t
  misc_feature (491)..(491): n is a, c, g, or t
  misc_feature (498)..(498): n is a, c, g, or t
cagttttaggtttacagaaaaactgatcagaaagtacgaagagtttccatattgccctctnccccacccctacacatccagcttcccctcttatttacatcttgtgttactgtggtacatttgtttcaactgatgaaccaatattaatatatcaatattaaagtccattatttacattaaggttcactctnggtgtggtacatggggcttgaaaaatatataatgacatatatataccattacagtatcatacagaatacttctactgcnccccaaatcccctgtgctcctacctacctgtccctccctcctggtcccccagagcccctgacaacccggatctttttactggtcaccataggtttttcctttttccagaatgnccgaatagttggaantcatacnatatatggagnattttttcaaggttgggcttcnttcaggcnggcaaatanggctttncaaggtttcccnctaagggcttgttcaanggcttcnactggatcatgtcctttttaatggcgaaataa

SEQ ID NO: 7126 - DNA, 468 bp, Homo sapiens
  III.754 (AA001044)
  misc_feature (133)..(133): n is a, c, g, or t
  misc_feature (145)..(145): n is a, c, g, or t
  misc_feature (163)..(163): n is a, c, g, or t
  misc_feature (246)..(246): n is a, c, g, or t
  misc_feature (259)..(259): n is a, c, g, or t
  misc_feature (268)..(268): n is a, c, g, or t
  misc_feature (338)..(338): n is a, c, g, or t
  misc_feature (397)..(397): n is a, c, g, or t
  misc_feature (402)..(402): n is a, c, g, or t
  misc_feature (434)..(434): n is a, c, g, or t
  misc_feature (440)..(440): n is a, c, g, or t
  misc_feature (446)..(446): n is a, c, g, or t
  misc_feature (454)..(454): n is a, c, g, or t
agatcaatttagggacaattacctccttaaccatattgattcggacaatttgtgggcatgatatagcttcctatctagctccccttttatttagaccttcaatttctctaaaacctcgctttcggtagttttnatgcctgaagtntactcataagcattttanattatctgatactattataaatggtttttaaattttattttccaaatggttgctactaggatgtagaagtataattgattttngcatattgacctnatactttantgctttgctaaattttttaggtagagtattctataaatctcaatcagctcaagttggtcaatagcgttanttaaccttggacttgacagttttctccctctgtttgagtactttagaaagtaccagtancttcngggcctcggtagtcggattaaaaagtcaggtnagtganactatntttccccnctggctgccttaag

SEQ ID NO: 7127 - DNA, 144 bp, Homo sapiens
  III.755 (R05840)
  misc_feature (5)..(5): n is a, c, g, or t
  misc_feature (8)..(8): n is a, c, g, or t
  misc_feature (13)..(13): n is a, c, g, or t
  misc_feature (38)..(38): n is a, c, g, or t
  misc_feature (58)..(58): n is a, c, g, or t
  misc_feature (60)..(60): n is a, c, g, or t
  misc_feature (71)..(71): n is a, c, g, or t
  misc_feature (128)..(128): n is a, c, g, or t
  misc_feature (135)..(135): n is a, c, g, or t
ttttnggntgtangaaaaattatttaatccagtttccngatttcattatatatttctnanaaggttttcantaggcttttgtttttgtttttggttttaaataaaaacactttattgcacaaatcccncaaaggnctcaggccc

SEQ ID NO: 7128 - DNA, 322 bp, Homo sapiens
  III.756 (R91942)
  misc_feature (3)..(3): n is a, c, g, or t
  misc_feature (22)..(22): n is a, c, g, or t
  misc_feature (85)..(85): n is a, c, g, or t
  misc_feature (98)..(98): n is a, c, g, or t
  misc_feature (149)..(149): n is a, c, g, or t
  misc_feature (168)..(168): n is a, c, g, or t
  misc_feature (186)..(186): n is a, c, g, or t
  misc_feature (223)..(223): n is a, c, g, or t
  misc_feature (235)..(235): n is a, c, g, or t
  misc_feature (240)..(240): n is a, c, g, or t
  misc_feature (260)..(260): n is a, c, g, or t
  misc_feature (287)..(287): n is a, c, g, or t
  misc_feature (308)..(308): n is a, c, g, or t
aantaccattagaagtattttnttttaaagtacacttgaaattttaaatgtgtacaaattcagaggtttaaaaaacttcgaaagncacagacacagantttaggaagctgaaggctgagagtctcccttctcacttaatccatgctttnttttgcattcctcacaggntaaggaggcagtgcctgnttatgctgtggaccaaaaccagccccacggagctggntcttcaaaaaantgggntttactctgggcatactccnatgtatgatacctttccaagggccaantcccaaggggaccaggcaagntgcaactttggggc

SEQ ID NO: 7129 - DNA, 374 bp, Homo sapiens
  III.757 (R92271)
  misc_feature (26)..(26): n is a, c, g, or t
  misc_feature (36)..(36): n is a, c, g, or t
  misc_feature (240)..(240): n is a, c, g, or t
  misc_feature (294)..(294): n is a, c, g, or t
  misc_feature (360)..(360): n is a, c, g, or t
caagcacaaagtcatcatggcttcangtctgctcgnggaaaccaagataaagatgcccattttccaccaccaagcaagcagagcctgttgttttgtccaaaatcaaaactgcacatccacagagcagagatctcaaagattatgcgagaatgtcaggaagaaagtttctggaagagagctctgcctttttctcttgtaagcatgcttgtcacccagggactagtctaccaaggttatttngcagctaattctagatttggatcattgcccaaagttgcacttgctggtctcttnggatttggccttggaaaggtatcatacataggagtatgccagagtaaattccatttttttggaagntcagcttccgtggg

SEQ ID NO: 7130 - DNA, 319 bp, Homo sapiens
  III.758 (R67991)
  misc_feature (285)..(285): n is a, c, g, or t
tgtctactattatagaacctcaagcatttctctaaagaaaactcttacacatcttggtgttgtggtttcatgtccaccctaatgagaaaagttcttccttagtagggtcatgtttcctgaggaacccctaccctagatttatcccatagtaggtcttataaataatatccacatactaaaattatttgggcttctaatgttaagttttacacttaatattgtaaaagtaactctacagtcaaaaattgtaatatttaaataggaataatctgccctccgaggccnttaggcctttagcctctgtgttatatttttaaaa

SEQ ID NO: 7131 - DNA, 418 bp, Homo sapiens
  III.759 (R67992)
  misc_feature (400)..(400): n is a, c, g, or t
cacttagtattttttaccagtgtaatcttcttctttatattgagtcacataatggttacatctgtttttccctgaatggacaccagttataagtgggatgcttgctgttaccatgggtcccaacttatcaagtaaaaactgctatcctttaatccactttaaaagcctatctttcattcaaagactcaaataaaagtgcctatcactcgaatgctaaaggaccatgcctgaatatgaatgcatcacattttgatgggctataggattgcacccacttctaatagggtatcatcactttatttatcaggacttctgaaggtctcatgttatttttgtcatctggatataatctaggccactggataaaacgggttatggctaccccggatatggcaaggcnattctaattttcctggcc

SEQ ID NO: 7132 - DNA, 480 bp, Homo sapiens
  III.760 (R91863)
  misc_feature (232)..(232): n is a, c, g, or t
  misc_feature (308)..(308): n is a, c, g, or t
  misc_feature (404)..(404): n is a, c, g, or t
  misc_feature (421)..(421): n is a, c, g, or t
  misc_feature (435)..(435): n is a, c, g, or t
  misc_feature (440)..(440): n is a, c, g, or t
  misc_feature (449)..(449): n is a, c, g, or t
  misc_feature (468)..(468): n is a, c, g, or t
gaacttgtagtttgcatagtatccgacagatgtcaccgtatttaccttgaaaatttaaaatattttgcagcatccttgtgaatttgatgtgataccccaaggcacctgagcacacagtttgggaaccattgccttggaatattaatcatagttacctccagagagtgaaattttggataattaaaaaaatttcttttttcttgagatggagttttggtcttgttgcccaggntagagtgcaatggcgtgatctcggctcaccgcagactccgcctcccgctttcaagctattctcccgcctcatcctnccaagtagctggggattacagggcatgcaccaccacggccggctaaattttgtatttttagtaggagacggggtttctccatgttgggtcaggctnggtttcgaattcccganctcaggtgatcagnccgcnttgggcttncaaagtggttggggattanaagtgtggaggc

SEQ ID NO: 7133 - DNA, 441 bp, Homo sapiens
  III.761 (R92703)
  misc_feature (419)..(419): n is a, c, g, or t
  misc_feature (438)..(438): n is a, c, g, or t
gtggctcacacctgtaatcccagcactttgggaggccaaggcgggctgatcacctgaggtcgggaattcgagaccagcctgaccaacatggagaaaccccgtctctactaaaaatacaaaattagccgggcgtggtggtgcatgcctgtaatcccagctacttgggaggatgaggcgggagaatagcttgaaagcgggaggcggagtctgcggtgagccgagatcacgccattgcactctagcctgggcaacaagaccaaaactccatctcaagaaaaaagaaatttttttaattatccaaaatttcactctctgggagggtaactatgattaatattccaagggcaatgggttcccaaactgtgtgctcagggtgccttgggggtatcacatcaaatttcacaagggtgcttgcaaantttttaaatttttcaaggnaat

SEQ ID NO: 7134 - DNA, 508 bp, Homo sapiens
  III.762 (N53656)
  misc_feature (342)..(342): n is a, c, g, or t
tttaaccagaaaagaatctctttaatatcttgtagccgtaagactgatacaactgaaaacataaccctaaatttgattctgcaggttgcagtttacaacacaagttgaagtcacagccttgccggaactcttatgtaaagtttagggcattggatctggaaggagtgggaccctgagaatcgtaaagggatatttgggtggacttgagcaaatccaagaaccctgaactgaggaagagcagtgtgagtacatggtcaggggctccatgaatattcctgcctgcaaccccagcttcacaggcaattcagccttctccacactggcccggcactggctaagctngtcaccttatggctcgaggcaggacccccccgcagccttgcagctgagtgggaagttgctggaagttgtatctgtttattgcttttaaggctgtcatgagcagacataagacctcatatcacacaagcttgatgccaccaagaggaccggagctgggctgggtcct

SEQ ID NO: 7135 - DNA, 435 bp, Homo sapiens
  III.763 (N73021)
  misc_feature (201)..(201): n is a, c, g, or t
  misc_feature (328)..(328): n is a, c, g, or t
  misc_feature (375)..(375): n is a, c, g, or t
  misc_feature (382)..(382): n is a, c, g, or t
  misc_feature (404)..(404): n is a, c, g, or t
  misc_feature (425)..(425): n is a, c, g, or t
acctcccgggtcaagcaattctcctgcctcagcttcccgagtagctggaattacaggtgcccaccaccatgcctggctaatttttgtatttttagtagagacggggtttcaccatgttggccaggctggtcttgaacacctgacctcaaatgatccgcccacctcggcctcccaaagtgttgggattacaggcgtgacacnctcaccaggccccgttgcaatcttactccacttcgttttcacagcagtcccgggacatgcccattattaggcctatttgatagatgatactgaaggctgaagtcgggggtcacaagccaaaagccanaccggtaagaaagggctcaggacccaagcccaggtttccggtcctcnttgggtngggaatcaagcttggtgttgantatgaaggtccttaatgtctnggccatgaaa

SEQ ID NO: 7136 - DNA, 161 bp, Homo sapiens
  III.764 (N91499)
agatgtaatgaaaaggcatgaggttttattagaactgtgtaattcacatatcaaatttttacataaaagtaaacaaacacaaaattgaaaagcaaaatacgttattttactctccaagttaccaatttcagaaaactactcactggaaaaattaatattcc

SEQ ID NO: 7137 - DNA, 523 bp, Homo sapiens
  III.765 (W06950)
  misc_feature (17)..(17): n is a, c, g, or t
  misc_feature (364)..(364): n is a, c, g, or t
  misc_feature (457)..(457): n is a, c, g, or t
  misc_feature (498)..(498): n is a, c, g, or t
  misc_feature (503)..(503): n is a, c, g, or t
tctgagatttcagttcntaggttatggcttgtgactccagataaaagatggagaatacctcatgtactgtgacttgaaaatgaattcttaaaattcttaggctctctccatgtatctttcttaaggaaaagtttctgagtgtgatctctcttttgccatagtatcaagtggagggtagttccagaaaagttaaataggaaatcttttgtgacagcagactataatagaagtttgagtaatattttaataaatttatataattcaaatgataaaaatgtatcaatgttatccaatgatttttattaaaaaattaccttattattagaactgtgcctattacataaaaagtgctcatggtatttgnattttaaataatttatttaaatcaagaccactggctctaaattagtgccaggaaaatgccttttaatttctcccatggttaacttttaaaacnagtaatggtacccagttaagttttgatggggttaaattccnctaangaacatattcctccaataac

SEQ ID NO: 7138 - DNA, 393 bp, Homo sapiens
  III.766 (AA019598)
gctacaactcctcacaggacgctggccatgcttaccattcaggctcccacaaagaagagcaaccgagagaaggtggacccagttctcacagaggcagagactcatttaggaaagagaaagcaaggacacttcattctctgcatgaagcctgcggacagaagaccagcacggtctggaatgtgcccacagacttcagagagatcacggcaaagacattcccacaaaccacagatgattatatggcacatggctctggaatcaaaagcaccttaaagtcataacctcaactccttaatcacaaataatcacaaagagaacaaaaatgtgagtgtcccaaatggaagccctgtgactaaagagcaaaattacaaaatgagattattaccagggagc

SEQ ID NO: 7139 - DNA, 413 bp, Homo sapiens
  III.767 (R08836)
  misc_feature (13)..(13): n is a, c, g, or t
  misc_feature (200)..(200): n is a, c, g, or t
  misc_feature (370)..(370): n is a, c, g, or t
  misc_feature (390)..(390): n is a, c, g, or t
  misc_feature (397)..(397): n is a, c, g, or t
ctgtcgaccaggntggattatttatggtgtgctgatgaagaggcaactttccaatgaggaacagcttaacagaggaatagtcaagttaaactaggaagaggtccagtgagagagagagagagcaacaaaagcggacgtgaataaaaatgacaggtaataaaacaatacaaatctaaaaatgctgtaactttcagaaatantttagggccaaaagaagaggaaaaaaatctagttttgctggcgttgggacaattttccaagaaggcaaaagacatgaaggcaaaatgaatgtgctgaatttaaggaccaagtttgcctccatgcctttctagctacaagtttgggtttcttctaaggctgggttttttcnttaaaaagtttttacctttngcttttnttttagcccggtgtat

SEQ ID NO: 7140 - DNA, 258 bp, Homo sapiens
  III.768 (R08942)
  misc_feature (94)..(94): n is a, c, g, or t
  misc_feature (209)..(209): n is a, c, g, or t
  misc_feature (227)..(227): n is a, c, g, or t
  misc_feature (245)..(245): n is a, c, g, or t
ataaaaactagggtttggattgcatggaggtttggtaagtgtctattcaatcagaatagaaagcaacattcactaaattatttccatgccaggnttcactttgggggcctgtattcccttagggtctccagccccatgcagcaacctcattccctgccggttgtcccctctgccccttcccttgccccctgttatagctgttcatcatngccacccaccttgctgtnccagaaggctgaggggtnggacttgtccatc

SEQ ID NO: 7141 - DNA, 409 bp, Homo sapiens
  III.769 (R43683)
  misc_feature (350)..(350): n is a, c, g, or t
  misc_feature (384)..(384): n is a, c, g, or t
  misc_feature (390)..(390): n is a, c, g, or t
  misc_feature (401)..(401): n is a, c, g, or t
ttttttttaaagcattgcaatggtttattcaattttatgagtctaaaaggtaccaacacttactgatctgagttttaagtgtgtaaaacttttgagtagctatggtgtaacctgatttttaagatttcaaaataagcttgaaaaaaaatcacatccattttacatgcatccattcattacttctaattgattatactacagataacttaagccttagttctttctctttaaggttccccccagttttacgagaggcatggacataattagcttttttcctttagtaaaaatgtgttatgtgctgtagcatacaccagaggctttctactttccaatcagggcaacacagnctccgagctgctttttgtttttggtccctgggangtgtantatgacaagtngtacagta

SEQ ID NO: 7142 - DNA, 547 bp, Homo sapiens
  III.770 (T75227)
  misc_feature (247)..(247): n is a, c, g, or t
  misc_feature (438)..(438): n is a, c, g, or t
  misc_feature (489)..(489): n is a, c, g, or t
gcggcatcattcggccatggttttctcaaacaatgatgaaggccttattaacaaaaagttacccaaagaaccttctgttaagaatattttccttcttggatatagtaactttgtgccgatgtgcacagatttccaaggcttggaacatcttagccctggatggaagcaactggcaaagaatagatctttttaactttcaaatagatgtagagggtcgagtggtggaaaatatctcgaagcgatgcgntggattcctgaggaagctcagcttgcgaggctgcattggtgttggggattcctccttgaagacctttgcacagaactgccgaaacattgaacatttgaacctcaatggatgcacaaaaatcactggacagcacgtgttatagccttagcaggattctgttccaagctgaaacatctgggatctgacctccngtgtgtctattacaaacagctccttgaaggggatccagtgagggctgccgnaacctgggggttacctggaacctctcttgggtgttgatccagatcacggagggatggg

SEQ ID NO: 7143 - DNA, 451 bp, Homo sapiens
  III.771 (N78582)
aaaataaattccgtgaactcataaagctctcatctgcaatcaaatgcaaaagcagagcatcctactcagaggctctgaaacacacatatcagcctcaaagcaaatcagccttccagtctcaggtaagactggttcagtccagaaatgcaagggagatgcttctcctgaatccttagaggcaagaagggatcccttcaaatgggcttgtatagcagagtagtaacatacttcttcttgtaagcgatgggttgcgctaaggaccatcacactgtccttaatggacaatgcatagagatggttcagcataacatggttgggctcagggagtaaggctgggtcacaagaaatattagtgtctttgttaagaataacttgaagtagatgaggaggaaggatgggtggggatttgaatctttcctcagatcgaaacgcatacatttcttgaccataa

SEQ ID NO: 7144 - DNA, 651 bp, Homo sapiens
  III.772 (W07176)
  misc_feature (6)..(6): n is a, c, g, or t
  misc_feature (536)..(536): n is a, c, g, or t
ccactngttatccgctggtctgaaggaggcaaggaggtcttcatctctgggtccttcaacaattggagcaccaagattccactgattaagagccataatgactttgttgccatcctggacctccctgagggagagcaccaatacaagttctttgtggatggacagtgggttcatgatccatcagagcctgtggttaccagtcagcttggcacaattaacaatttgatccatgtcaagaaatctgattttgaggtgttcgatgctttaaagttagattctatggaaagttctgagacatcttgtagagacctttccagctcacccccagggccttatggtcaagaaatgtatgcgtttcgatctgaggaaagattcaaatccccacccatccttcctcctcatctacttcaagttattcttaacaaagacactaaatatttcttgtgacccagccttactccctgagccaaccatgttatgctggaccatctctatgcattggtccattaaggacagtgtgatggtcctagcgcaanccatcgctacaagaagaagtatgttactactctgctatacaagccattgaaggatccttctggctctaaggatcaggagagcatctcccttgcattctggactgaccagctacct

SEQ ID NO: 7145 - DNA, 458 bp, Homo sapiens
  III.773 (N93274)
  misc_feature (382)..(382): n is a, c, g, or t
  misc_feature (427)..(427): n is a, c, g, or t
ttgaaatggtggaatttttattccagggaacaattaagttaggggagaaacccagaccatctctattctgcagatggttgattgagcacccgaggcctggacgtgggccaaggcatgttaccagacctcgcagcctctctcccggctccagctggcaggaaaagccaaagtctgtgagcttgatgttcatgttgtcatccaagagaatgttctcgggcttcaggtcccggtgcacgatgttgagtttgtgcaaggtgcagatcacctccagcagagctccgcatgatctttctggtttccttctcactcaaggtgaccttctcagtgaggtaagtcaaagagctcccctctccttcaactggatgttggggtgccctgagancttgcgcaagatgtccacctccttcagcgtgggttctcgcagctnccggacctcctccggggctgaagctgcctca

SEQ ID NO: 7146 - DNA, 476 bp, Homo sapiens
  III.774 (W25084)
  misc_feature (122)..(122): n is a, c, g, or t
  misc_feature (190)..(190): n is a, c, g, or t
  misc_feature (194)..(194): n is a, c, g, or t
  misc_feature (278)..(278): n is a, c, g, or t
  misc_feature (336)..(336): n is a, c, g, or t
  misc_feature (376)..(376): n is a, c, g, or t
  misc_feature (428)..(428): n is a, c, g, or t
  misc_feature (439)..(439): n is a, c, g, or t
  misc_feature (451)..(451): n is a, c, g, or t
ccctctccccgggcgcctttgggattcttgtcaagctccttcaagagcctgcaagcacttaaccagccacccagagttccctcactgaagatctgagcatgacccgggacgaggcactgcgnacctctcattctgcacaggacttctatgagaattatgagcccaaagagatcctgggcaggggcgttanagtngtggtcaggcgatgcatccacaagcccacgagccaggagtacgccgtgaaggtcatcgacgtcaccggtggaggcagcttcaanccggagaaggtgcgggacttgccgagaagccacgctgaaaggaggtggacatcctgcngcaaggtcttcagggcaccccaacattcagattgaaaganaaggggaactcttttgacttaccttcacttgagaaaggtcacctttgagttnaagaagggaanccagaaagattnattgcgagctctgcttggaaggtga

SEQ ID NO: 7147 - DNA, 476 bp, Homo sapiens
  III.775 (H09318)
  misc_feature (258)..(258): n is a, c, g, or t
  misc_feature (427)..(427): n is a, c, g, or t
  misc_feature (448)..(448): n is a, c, g, or t
  misc_feature (453)..(453): n is a, c, g, or t
ttttttttttttttttttaacacacattgcgctttttatctccttcacagagctagtacccagggaaaaaaatccacctaataaacaaaaatgaaaaaccttgaaaaacaaaaaatcccaaacaaaaaatggccatgtgtttgtatcttcaagggaagatcagttcatgtctacagggctgaaaaaaggaatatatttatatatatatttatatgtatataacactgttaataaggagaattctaaccaagagcaggntttatacacccttcagtagagcagtgataaggaaggtggggagcattgggagatgggggagggagttggaagtgttctcttttgcttctctccccctgaatttcttccctttaacctccctactccaagtaaatacttaggggagcagaacttgggccacagttcaccngggttgaacattttcccttcnctggngaagagcaaagatttaggggaag

SEQ ID NO: 7148 - DNA, 560 bp, Homo sapiens
  III.776 (H09376)
  misc_feature (476)..(476): n is a, c, g, or t
  misc_feature (525)..(525): n is a, c, g, or t
  misc_feature (556)..(556): n is a, c, g, or t
tctgtattctcatcacttctcagaactatcattctaccgtcttcatttctaaacccaaaactgctagaatacagggactctggactgggtctgtaaattttttctgatcaaaactttatagcagtgtagagaagggacacattcaaattacactaaggacattgacatagctggggttgtttccttgtttatattataaaacctaaatgtggaactatattctaataatctttcataggaaggaaaatagccagactgggtattatgcatgtaacaaatgaggacattgtgcataagaaaggaaacattagttttctgtcatcctgggccaagtacctcattacagtaaatgtgtgtctttggaaactctttgcttgtgctgatggcggtaagcatggggtcccaggcaggttcaaaggcttgaactgttaagaaatggggcaagacaatacattttgttttgggaagggatttcntcatggggataagttttcccaaagctttgaattattagggctatggaantaaagccaataggtggggaggataccaagtntttt

SEQ ID NO: 7149 - DNA, 542 bp, Homo sapiens
  III.777 (T78079)
  misc_feature (363)..(363): n is a, c, g, or t
  misc_feature (447)..(447): n is a, c, g, or t
  misc_feature (475)..(475): n is a, c, g, or t
  misc_feature (522)..(522): n is a, c, g, or t
  misc_feature (537)..(537): n is a, c, g, or t
tttgcggtttatacagaagtttcattttttattctttttttaggctaaattcttatgaatggaataattgaaccaaagatacagatacttgtagggagattcttttattttgctttttctatcagtttttcacaaggaacagagagattactcatgctaactcaaaaagaggttttgttctgaggatataattgtggagctggaacaggcctgggacagtcctcagaaaccaagcctagagattggctgctctgcttttcttcaagacaccagttgtctctgcctagctctggccacacactcttacttggtacactgactgctagctcccctgaggtctactatattttatggctgcctccnggggccatgtggatggaacataggttactttacataaagggccatggtataaaaactggaccctttaggccttcagggggttgncttctctttcctcattcctaataggtgntggaatgtacccattacaggccactcggttacatggggaggtcgggncacatagggtggtgntttca

SEQ ID NO: 7150 - DNA, 390 bp, Homo sapiens
  III.778 (T78246)
  misc_feature (213)..(213): n is a, c, g, or t
ggcacgagaaagtgaggtttgcgtagaattagggaactgtaatgcaaataaaagagcaacagtgaacttaacagcccggttaaactgtctatagtggtagacctataatacgacacataaataagcactgtagtatgtaacttgataaaataaagcaaatacacaaaactccatcaaacgcatgtaatcatctaccaactaataacctggggnctatcaggcagcaaaaagtgtacttggctacctttggcccctgttggattcctactctgtgccacaaagtatgctctagaggagccaactacagacaccgtagtatcatgtgacacagtcttatcctaggcacagagaacagggtttcaacctttgggaaggggaaaggttgacatt

SEQ ID NO: 7151 - DNA, 449 bp, Homo sapiens
  III.779 (AA015939)
  misc_feature (55)..(55): n is a, c, g, or t
  misc_feature (387)..(387): n is a, c, g, or t
  misc_feature (395)..(395): n is a, c, g, or t
  misc_feature (403)..(403): n is a, c, g, or t
ggcgagagggtatcaagtatcgtcggaatgagctcttcctgggatgtgctggagngtgtgaacctgctcatgtccccacaagggcaggtgctgagtgcccatgtgtcgggccgggtggtgatgaagagctacctgagtggcatgcctgaatgcaagtttgggatgaatgacaagattgttattgaaaagcagggcaaaggcacagctgatgaaacaagcaagagcgggaagcaatcaattgccattgatgactgcaccttccaccagtgtgtgctgactcagcaagtttgactctgaacgcagcatcagctttatcccgccagatggagagtttgagcttatgaggtatcgcacaaccaaggacatcatccttcccttcccgggtgnatcccgcntagttgcngagaaagttggggacgccacccaaaacttgggaaggttccaaggtg

SEQ ID NO: 7152 - DNA, 270 bp, Homo sapiens
  III.780 (AA016048)
  misc_feature (6)..(6): n is a, c, g, or t
  misc_feature (46)..(46): n is a, c, g, or t
  misc_feature (141)..(141): n is a, c, g, or t
  misc_feature (203)..(203): n is a, c, g, or t
  misc_feature (219)..(219): n is a, c, g, or t
  misc_feature (230)..(230): n is a, c, g, or t
  misc_feature (237)..(237): n is a, c, g, or t
  misc_feature (261)..(261): n is a, c, g, or t
  misc_feature (267)..(267): n is a, c, g, or t
tttttnccactctacagagtttattgggtttgtaactggacgaagnacacgtgtacaaaatgaagctcacactatcccaaagcagagtagggactgaggccggggatccattactggcctttgggggagctctgaggtgangggcaaccaaccctcccactccagagctgtggccacaggggtgggaaggaaagggaacccanctggctttggtcacanaacttaggaancttgggnattagggccagggacagacaggtnggattnggg

SEQ ID NO: 7153 - DNA, 466 bp, Homo sapiens
  III.781 (H04808)
  misc_feature (384)..(384): n is a, c, g, or t
  misc_feature (393)..(393): n is a, c, g, or t
  misc_feature (451)..(451): n is a, c, g, or t
  misc_feature (457)..(457): n is a, c, g, or t
tttttttttcctttttctattttgggtagaaatattcctgggaagctagatagaaatgcattttcatttcccaataattcttaggcacaagttagaaaactgctgaccttcactaaaatatgtcagcacttcatgttataaaaaatgaaattcagaaccgcagcatgtgtatatacgtatatctaaatatacacacatatcggtgcagtacacaatgattattcaatgtatattgaaaactgagctttttgtaactaacctgaaattctgcagtgaaagttcattgctcaaggaacaattggcaagtgtctttcttttgggctctaactatgggtaaaacgtttggcacatcagacttttaccctttacacatttcctaggtgnccgacaccnggggccggtcttacacgggggatccgagggagggacgcggcctggggatgctttcgcngcttantgggggttg

SEQ ID NO: 7154 - DNA, 375 bp, Homo sapiens
  III.782 (H04911)
agttgcatcacaatcctgcaggatgaccacgaccacaaagtccaagaattgatgtccactcatgagcttgaaaagaaagaattggaagaaaattttgaaaaactgcggctgtcattgcaggaccaggtggacacgctgaccttccagagccagtctctgcgggacagagcccgccgcttcgaagaggccttgaggaagaacacagaggagcagctggagattgcattggctccttatcagcacttggaagaagacatgaagagtctgaagcaggtattagaaatgaagaatcagcaaatacacgagcaagaaaagaagattcttgagctgggaaaagctgggcagaaaaggaacatttttcctaggaaggaaaag

SEQ ID NO: 7155 - DNA, 270 bp, Homo sapiens
  III.783 (H94162)
  misc_feature (210)..(210): n is a, c, g, or t
  misc_feature (240)..(240): n is a, c, g, or t
  misc_feature (263)..(263): n is a, c, g, or t
gaaagcatataaggttttcttgaagttgtgccaaagcattctgtagagtaggatgagatggttgttgccctagtctgttggtagaaccagaaatcaatatgttgtcttttaggttaaagcttgtaccaaaatatttatttcccccatttcaagccctgagtcaaacatttttttctcttaataatagacctgaaatgttttattagtagntctgtgaaatcagttgattcttgtgccatntcttgtatatgtaatttgtaatnttgccca

SEQ ID NO: 7156 - DNA, 399 bp, Homo sapiens
  III.784 (H94262)
ttaagcagagaggtatttattagagggtattatatggcatacacaatttccaggagcccacagataagggtttggatgccttcctgccaggaagagcacaagtagccaggacaaacacgtacctttacaggactattactgaggaaatcccactgccaccacttctctctactcagcacctgtgacaggcaggacaaccttcaccagagttgccccagatgaagaaaggcatcagctgctgtgcctataagatccactcttgccaagagcagcctcattctaggatgatcttgctccacccacctaactgaatgctcaccttcagacttccaaaagccaactgttctgttaccaaggtcattcacaaatgagacttctgcatagcaacaagaatcaatt

SEQ ID NO: 7157 - DNA, 427 bp, Homo sapiens
  III.785 (H69679)
  misc_feature (87)..(87): n is a, c, g, or t
  misc_feature (114)..(114): n is a, c, g, or t
  misc_feature (130)..(130): n is a, c, g, or t
  misc_feature (157)..(157): n is a, c, g, or t
  misc_feature (160)..(160): n is a, c, g, or t
  misc_feature (257)..(257): n is a, c, g, or t
  misc_feature (398)..(398): n is a, c, g, or t
  misc_feature (416)..(416): n is a, c, g, or t
acataactttaaaactgccgtcttctgctttattgacaggtaaattgttcaaaaatgttctcacaattcaataattaattacaaagnctgagacttacattaaaaaagtaaaanccagaaccccccaggngcccatccagcagaaggcccaggaggnagntggggtggcagggctaggcggtgctgggccactcagtgccgacttggggaagtgcacgtcctgaacagccttgccaagcagccgaccggtgggaggncaggggaagcctggcccaagctgtgggacaagctgtgtctgccgccacagttaatcacaagcctctgacgacacagggccacagagctgggtcactcaacatctgggtacaaagggtgaggtgaaatccacgcggcggggnttgctgtgcctggggccngggcagtttgc

SEQ ID NO: 7158 - DNA, 385 bp, Homo sapiens
  III.786 (H70095)
  misc_feature (276)..(276): n is a, c, g, or t
atgccgcattgttcgtggcagtagaccacatctgttcgtctgcacagctgtgaggcgatgctgttccatctgcacatgaaggacccccatacagcctgtctcccacccctgacaacccgagaggcatatggggccctgccaacaccacttcctcagcagaaacccgtcatgacgcggctgcttcggaagcagacatctggggacacagcctcagtacccagtcttttccctagttcctgaaactttcctaggaccttaagagaatagtaggaggtnctatagcatttccagtgttcactaggattttgaagacaggaaagttggaggttagtctgtgggccttttttttcatttaggccatttgcaacagttcaggttgcaggaa

SEQ ID NO: 7159 - DNA, 324 bp, Homo sapiens
  III.787 (R14534)
  misc_feature (285)..(285): n is a, c, g, or t
  misc_feature (313)..(313): n is a, c, g, or t
  misc_feature (320)..(320): n is a, c, g, or t
ttaatatttattttctaaaaatattaaggctctcagttgtttcattaattctaaagggttaaaaagggctgaaatttgtttatagcactaaatgtttttaataggaaatttactcacataaaaaatttaagcagaagtagtagaatacagattatcataaaacatattttctatgaaaggcatttcttcctcatcttcaataaatatgaaggaagttagaggagaggaaaagcaatcactctaaggacaacttttcgtctttgaggggacattatggataaggcntgaaattaatacggcacaggctattgcntttttcngtga

SEQ ID NO: 7160 - DNA, 422 bp, Homo sapiens
  III.788 (R41194)
  misc_feature (270)..(270): n is a, c, g, or t
  misc_feature (309)..(309): n is a, c, g, or t
  misc_feature (348)..(348): n is a, c, g, or t
  misc_feature (357)..(357): n is a, c, g, or t
  misc_feature (379)..(379): n is a, c, g, or t
  misc_feature (413)..(413): n is a, c, g, or t
ttttttttttagtatctttagtatagtatatttataggaatgcataacatgtgagatgtacattttgaagtttcatccataacttataacatttactgtagcagtaacaagacagcaggtcatcactttacaacattacacatgagtgattttgacttacaaataaaatatttacaacctacctttacaaaacggacattgtgtggcatacaaaatggaacaacagcaggaaaaatttaaaaataataaaataaccaaaaacccggaggntacacttagggcggaccggcaggacactggaaataattngggctgtggggattcttctggcaccttggaaaatatggnggctatttnttcattactgtgggggggtggntttttaaattcattggttaccggcccgtgggggngggttgggt

SEQ ID NO: 7161 - DNA, 428 bp, Homo sapiens
  III.789 (R72346)
  misc_feature (67)..(67): n is a, c, g, or t
  misc_feature (265)..(265): n is a, c, g, or t
  misc_feature (387)..(387): n is a, c, g, or t
  misc_feature (404)..(404): n is a, c, g, or t
  misc_feature (414)..(414): n is a, c, g, or t
  misc_feature (423)..(423): n is a, c, g, or t
atttttctcatctataacagtagaccaaggatctacaggcaagatcaaacacagatgggaaaaacanaaacagtgaaggtatgaagtgagatgcagccgccagctcgtgggatgcagggaccctgaatttactactcctccactatcccccactactgccaccttgccctatggcaggcggcaaatctcagcgaccttattctaatatataggaaacaattttgcatcataattacttagaaaatacccgggagggttgggggangaggaccctttgtcatactccatgtaactcaccatcgcataactctgctcggcatccaggtactttttatactcatggttgagtttatcaaaaacagtgggctatcacgggcagcgatgctntgtctgacttcactttnacactggganagggcaccnttttt

SEQ ID NO: 7162 - DNA, 370 bp, Homo sapiens
  III.790 (H04809)
  misc_feature (73)..(73): n is a, c, g, or t
  misc_feature (83)..(83): n is a, c, g, or t
  misc_feature (128)..(128): n is a, c, g, or t
  misc_feature (132)..(132): n is a, c, g, or t
  misc_feature (239)..(239): n is a, c, g, or t
  misc_feature (254)..(254): n is a, c, g, or t
  misc_feature (263)..(263): n is a, c, g, or t
  misc_feature (275)..(275): n is a, c, g, or t
  misc_feature (296)..(296): n is a, c, g, or t
  misc_feature (321)..(321): n is a, c, g, or t
ttttttttttttttttttttttgagtgaacaatttttattgaaaccctcaaagattaaagaggaccaaatggngagtttgggnaccataacagaaaatctcacctaactgtaccatcattcacaggantgancaaacccaaacacgacaaaattcaaattctcatgtaattgctacaagtgaatgtaaatgaactaatcattttatcataaccttcctttaatcatacgaaaaagggantttacatgggcatancaaaagatntgcaaaacttantgaaaacacatttctcttaantttcttaaacttatttttaaagggntgcaggattgcacttggaaatgattaaatgactttaaggctgattcatt

SEQ ID NO: 7163 - DNA, 440 bp, Homo sapiens
  III.791 (H04912)
  misc_feature (415)..(415): n is a, c, g, or t
  misc_feature (434)..(434): n is a, c, g, or t
taagagtaagccatgaaatcttgtaacatgtctcttaactatttataatgaaaagtggcatttgggtatagtcaccacagcaatgttctacatccctaagattatctaggtaggacatgtcaaagatgactgttgtcattctggaggtcctattagagaatattataaaagggtgaccttgtaggaaggatctgagtcctccccctgaggttctctttttcttggtgctttattagcaactctgggatatttttataaaactagttacattataaacggtttcaaacatgtttaatttacattaggtttttatgtaagagtgtcatgggaagcacttcagccaagcagggctggattggcaataggacttcaggacatggcggaattaaatgttaattggaggagtcctatttcnggggtgagggggttacctnccccgt

SEQ ID NO: 7164 - DNA, 458 bp, Homo sapiens
  III.792 (N74646)
  misc_feature (366)..(366): n is a, c, g, or t
  misc_feature (415)..(415): n is a, c, g, or t
  misc_feature (424)..(424): n is a, c, g, or t
  misc_feature (435)..(435): n is a, c, g, or t
ttacgttttacttagtttattaagctaccttatatcttactttggaaagaatagttgggaaaatgggcattagacgtgatcctttttaaaaaatgaagtggtgacatactgttaatcatcacagagattgtttgtactacattgtatacattcacaatatgctttcagagattcttctggctgggactgaaggattgaagatagtatttgcactcttgccatccaccttttaattttatttacatcttgctcagagttccatgcagaagtttatggaggttcccttccatctttcttctatagatttcatcaaacctctcattctgggcaacagtgaagtggtttttccaatcccccacagttccntttctcatgaaggagggaattggactgggtccaaggataggatttgggnaactgttgnacggatttggncatggggattttccctttcattt

SEQ ID NO: 7165 - DNA, 389 bp, Homo sapiens
  III.793 (W00984)
ttgccgtctgcttcctgtgaaagtcctttccgtgcccactgacccttgagtgggcctttgagctgctgactttcagctggaacttgaagggaccccaaccctgagacactatggccctgacctcagacctggggaaacagataaaactgaaagaggtggaggggaccctcctgcagcctgcaactgtggacaactggagccagatccagagcttcgaggccaaaccagatgatctcctcatctgcacctaccctaaagcagggacaacgtggattcaggaaattgtggatatgattgaacagaatggggacgtggagaagtgccagcgaagccatcatccaacaccgccaatcctttcatttgagtgggctcggcaccccaaaccttct

SEQ ID NO: 7166 - DNA, 419 bp, Homo sapiens
  III.794 (T96141)
taaagttattatatttagtttggccactccctagattcttggtttaccagcttataaagagtacacctaagaggcagtataatatacgcactaaaaaccatttccccctttatcatctttggctagaagctcatgaaaggaaactgaggacggcagaggcaggcaggctccgtgcgcttctgcctcacacgtcactgaccggaagctcgcatcgtccaagtctactaggtcacaatctttttcctgagggccatttttactttgaggtcttaacagagcttgttcagtcactttggaagctggttctcttggagagacagtctggaccttgaagttccctgggcttgaccttgggcaagagactcgtaaaatcctcgcttctccatgggtaaaggttgagaccaaagagttgctgcgag

SEQ ID NO: 7167 - DNA, 376 bp, Homo sapiens
  III.795 (T96223)
  misc_feature (1)..(1): n is a, c, g, or t
  misc_feature (329)..(329): n is a, c, g, or t
ngaagtacttcctacaagccaatgatcagcaggacctagtggaatgggtaaatgtgttaaacaaagctataaaaattacagtaccaaagcagtcagactcacagcctaattctgataacctaagtcgccatggtgaatgtgggaaaaagcaagtgtcttacagaactgatattgttggtggcgtaccgatcattactcccactcagaaagaagaagtaaatgaatgtgggtgaaagtattgacagaaataatctgaaacggtcacaaagccatcttccttactttactcctaaaccacctcaaggtagtgcggttattcaaagctgggnatttgtgttaaaacagggagcagttgatggaaaaactggggagggga

SEQ ID NO: 7168 - DNA, 347 bp, Homo sapiens
  III.796 (R80969)
tataaattagttccctattcctaactttggagaacctggttttttcttacctttcaaggtccaaatataaaactataaactttcagtgttggacattcttgctttttgaaagcaaattcctcctcaattcatgacctgtgggccagctatcatgaataatacacccatagcacttgggttttatgaatgtgacttctaaatcctcctgcataatagctttaggtgacttgaagagttaaaagctgtcattgtcatcaatatttactgtacatcaaactcatttaaaatgctgttaggaaattgctgactgggcaaggactgtcactgacaaaaacaccagtttgggg

SEQ ID NO: 7169 - DNA, 451 bp, Homo sapiens
  III.797 (R81077)
  misc_feature (391)..(391): n is a, c, g, or t
  misc_feature (431)..(431): n is a, c, g, or t
  misc_feature (441)..(441): n is a, c, g, or t
attattcctcctttgaagctaatggcatttgtatatacacactgcagcagagcttgtagctggacagagtcaaaaagaagaaaatacggtttcaggctttcttgcagatatgaagtattcttggaatgcaataagtatgtattgaactgtactgtaaagtagctccaaaacttaattactctcctgttttaggggttatacatttgggactgtgcattctccaagagatgaagcggtgaagttggggatttacattgggaagtgctgtaggacttctttatgtgggctcagtgggagagaggggaaaggaatgttgcacctgcttctagtacccatagggtcaagagggcttctgggatccacaaagtccataactaggacaggtttgttncttgttaggtttcctatcccccattctttgcttccccagngggccgtagnttttagtagg

SEQ ID NO: 7170 - DNA, 382 bp, Homo sapiens
  III.798 (R91171)
  misc_feature (368)..(368): n is a, c, g, or t
atggttcaaaacaacgtgcacatactccactaaagccataacttactttatctactgctttccgtacaatttctttatattcttccttggtgatatctttattttggtaaaatggcttgatggccaattttacctcttgtgctgctttttcttgaatttgcaatttctgatgagaagaaaatgtataatttattatttgccagtcatactgctctcacaaaatcccaaacaagaaattgaaaatacttcatatttacaataagagactctccaactattaacgtgacaaatataaaacagtttatttactaaaacatatcaaacatttctaaaaacaattataagatattaccagtaatttactgggncatcaacacatcta

SEQ ID NO: 7171 - DNA, 505 bp, Homo sapiens
  III.799 (R91221)
  misc_feature (237)..(237): n is a, c, g, or t
  misc_feature (247)..(247): n is a, c, g, or t
  misc_feature (265)..(265): n is a, c, g, or t
  misc_feature (314)..(314): n is a, c, g, or t
  misc_feature (343)..(343): n is a, c, g, or t
  misc_feature (375)..(375): n is a, c, g, or t
  misc_feature (415)..(415): n is a, c, g, or t
  misc_feature (430)..(430): n is a, c, g, or t
  misc_feature (439)..(439): n is a, c, g, or t
  misc_feature (460)..(460): n is a, c, g, or t
  misc_feature (494)..(494): n is a, c, g, or t
ggcacagaaatgttacaatacatatatataatttaaaagtcatcttgacatatctaaataaggccccgtttaagaatgttactcatttttctttaaagggccctttagatataattacctgaaatatgcatttttctttagtactaaggttggtttgctttgtgttttttaatgttatttctattgcatcactaaaagacttctatcgagtacaagtaattcattaactgatgatanctctttaaancagggtattccctagttncttcctcatggtaagtaattaacatggagtacaccagttttgcctgctnccgacagcagcccccagggaaatacgggnatgggtttcagggaccaagttctggtaatacnttcgtcatcaagtcacagccaaaggcctctaatggctggntgttaaaattgggcnggaaggcanagtaaggtgtttgcagttggnaggccagcgcagttaggctcggaggtcagtccanggccagtttcc

SEQ ID NO: 7172 - DNA, 586 bp, Homo sapiens
  III.800 (H93068)
  misc_feature (459)..(459): n is a, c, g, or t
  misc_feature (505)..(505): n is a, c, g, or t
  misc_feature (524)..(524): n is a, c, g, or t
  misc_feature (547)..(547): n is a, c, g, or t
  misc_feature (575)..(575): n is a, c, g, or t
  misc_feature (580)..(580): n is a, c, g, or t
ttcctggatttataaaagacttaaataatgagcaaatccaatggaaaagctgcaatgcctttatcataaactaaatgacaggaaaaggtacattttaaatgtttagaacagtgtttaaaagcaaaactccatcattatggacgaaagccccttggacactgttctatgtctctccactgtcccctatgacctagtatcccaagctacccctgtgctagtcccacaatgtgtaagggggcctcactgggcctcatgacatggtttgtggtgactggtggagataggaaagcattaagtgacccaggctatgttaaccagcactgacttgtgctttagagggaaaagtgccaagactgtaatagtgactgaatatttgtttttgagatgctctgctggttgacacagagtccagtactcccctggcccctcccaaactggctggtgtgggcaggtcagtcntcatgggccatcccaatacagaatacaggggcctgggaccggggantcccagcggatgacagcangtgccttcctgtggttggtgccnaatgagaaggctgctaactggcatgcgnttgcnttaacc

SEQ ID NO: 7173 - DNA, 169 bp, Homo sapiens
  III.801 (H93932)
gaaatgtattcagccaccgtttgtctgtgtataggaaatacgacttaaagggctctacagtggctagagaagctagtgacaaagaaaaggccaaagaactgccaactctgaaagataatgatttcattaatgagggccaaaagatttatattgatgacaacaacaagaa

SEQ ID NO: 7174 - DNA, 376 bp, Homo sapiens
  III.802 (N59461)
taggaagtgataagaatatttttattgtattattaaataccatgtcatctttcccccccactgttacaaattatagatactacatgaatgatgatacataatttatattttacggtttgccagtatgatgtatttacacatgcagttagtaccaatgtcatgctacatttcctcaggagatgcccattcaaaacaaaatgtgagcagcttatctactgtaagaaaatacttctagagggtggaatgtataccaacctggacctgcaagttcagtattaacaatattagatttaacttagactcctgggttatgttcctttttcttttttaaataatactcataatttgaacaacatatttatatcagaaaattttc

SEQ ID NO: 7175 - DNA, 419 bp, Homo sapiens
  III.803 (N71851)
  misc_feature (131)..(131): n is a, c, g, or t
  misc_feature (371)..(371): n is a, c, g, or t
  misc_feature (419)..(419): n is a, c, g, or t
caaatgtaaaattttacatttaagcatttgtaaagttacagcaaaagatgtacctgttaatacacagaatgtgtacagattatttgttatgacaataaaacactcaaaataaatggtctttagcatctcanattccaactgaaatcattttagtattaactcttcttcccaaagcaatgtctcatttcttggctgtgcaggtgatgccatgttatatccaataactagaaaaatcactgtgctgaacttttatgtttagcttccaagtatttttctaatgttttgcatttcaagtggtatcactgttaaatggcatttgttttcagattgtgggcctttttattattggctggctagatcctggtgtttcnatggtcctttttaagcaccaaaaaggaagatgggggaagaaaaagaan

SEQ ID NO: 7176 - DNA, 458 bp, Homo sapiens
  III.804 (W04569)
  misc_feature (125)..(125): n is a, c, g, or t
  misc_feature (457)..(457): n is a, c, g, or t
ttttttagcagtaaaatgagtttatttcaaaaagaattaaacagctgaagggctccaagggaggcccagagacaaaagattagaggctagcagacaggaacagtgccccaacctgtgctgcaganctgctcagtgaagtcatcattgccccctgcttgggacagccaccagagctggccctatcactgctgctttaatgaacagaatgtctctgcctttatccttgccagatggactctgtgcaccatcactaagtgtaaggaggaaaaaattaattttttctctcccctttctgagctcttggttggaatggactgctcgtaacaaaatgagagaaaaaccaaagtttaattaacatgtatacctcatgtatgtacacatggggagatattccaggtgtaggggtcaaagaagggaaaggcttccccttcggccctccgaagggttcactgaaagng

SEQ ID NO: 7177 - DNA, 429 bp, Homo sapiens
  III.805 (W31488)
  misc_feature (13)..(13): n is a, c, g, or t
  misc_feature (14)..(14): n is a, c, g, or t
  misc_feature (15)..(15): n is a, c, g, or t
  misc_feature (17)..(17): n is a, c, g, or t
  misc_feature (18)..(18): n is a, c, g, or t
  misc_feature (53)..(53): n is a, c, g, or t
  misc_feature (54)..(54): n is a, c, g, or t
  misc_feature (71)..(71): n is a, c, g, or t
  misc_feature (72)..(72): n is a, c, g, or t
  misc_feature (73)..(73): n is a, c, g, or t
ccaaatctgaagnnngnncggaagggaagctggcacgtgcagaaatcacatgnngagggaggaagcaatgnnngtgggggaggtaccaggctctttttaacaaccagttctcgagggaactaatgagcaagaactcacttattatgacaaagatggcaccaagccattcatgagggatctaccccatgactcaaacacctcccattaatccctacctccaacattgggatcaaatttcaacatgaggtttggaggcaatacacattcaaactatagcattccccctgaaggatcccagggaatttcacaccacagtatggcattctgatatgctgatttgtaaaaaattaaagtaaaatgctgggagatacttcacactgatattgacttatttaccttaagaccagccctgccaaatagaatacaatt

SEQ ID NO: 7178 - DNA, 460 bp, Homo sapiens
  III.806 (AA034456)
ctttatgctacagaagaaaacttgcaagacagtgtaaggtttccctggaacttgttagaaatgtcatctagacgttgagccaggaacacaatcaagcaacctttcaggatatagccaggccccaagcctcttcagaactgggaataatgttttgaattgaaacagaggtgtaaagcagagaggtcagaacagatcaatactggttatgggtgatgagatccagacagaacagtccccagaaaaataactgtcttacaacgagggggtgtgatggatgtgttattttgttttttttgaagtctagtagtattacctgtctgaaactggtcagtttttaggggcaacttcaaaatgttatttgtgtctttcttgtaaatacctgccaagattaatacccaatcaaatgccatgacttgggaaataaaccaaatattccattcctaacccataataacctttg

SEQ ID NO: 7179 - DNA, 451 bp, Homo sapiens
  III.807 (AA053967)
  misc_feature (419)..(419): n is a, c, g, or t
  misc_feature (427)..(427): n is a, c, g, or t
tgcctatgatgtattcatatacttggttctgtttattataaacaatttttctcagaaacacactactgtcagagttataattaaatatgggcattttgggtttttcagtctatcttaaaacaactattggtgttattctgttatatcctatttacacaagttgaaaggattacaccaaaaggtaattatagataagaaatgaatatttgtttatttccaagtcatggcatttgattgggtattaatcttggcaggtatttacaagaaagacacaaataacattttgaagttgcccctaaaaactgaccagtttcagacagtaatactactagactcaaaaaaaacaaaataccacatccatcacaccccctccgtggtaagacagttatttttctggggactgttctggtctggatctnatcacccntaaccagtatggatctggctctga

SEQ ID NO: 7180 - DNA, 439 bp, Homo sapiens
  III.808 (H47627)
  misc_feature (33)..(33): n is a, c, g, or t
  misc_feature (73)..(73): n is a, c, g, or t
  misc_feature (367)..(367): n is a, c, g, or t
  misc_feature (426)..(426): n is a, c, g, or t
cactggcttgtgagtacgaggttattttctggntttcacatggcaggcccatcaaataattaacttttctggnataattcattatgagtgggctagtgaaggacaaaatatcagcaaacactttgaataaggcaacttgaatcaggatggatttaaaggtgttccacaatgcatagagtagagatggtttcttgatatgtgcctctttataacaagatacctttactttttgcctctcttgattccttaaaacttcctttctccattgtttttcaaagatgggacacggcagggcaggaagggaatcactttcctttagttcaaaaaggatcctctctttccaaaggtctcttataggcctaaaggnaattactctgctaaaccgggggtatgtcactttaccgaaaaatgagggcacttttctcngggactgcatttc

SEQ ID NO: 7181 - DNA, 350 bp, Homo sapiens
  III.809 (H47929)
  misc_feature (129)..(129): n is a, c, g, or t
  misc_feature (135)..(135): n is a, c, g, or t
  misc_feature (287)..(287): n is a, c, g, or t
  misc_feature (315)..(315): n is a, c, g, or t
gaaaggcagggactaaggtgacagctgactctgccggggcggagtgcgtgtcctcccaccgtgctggcgctgaactgactgtccgctgccaagggaagtgacagccgcagccgggctctcagccagcgncgggcnccccgcggaccatgctctccagtacgcagaacgcgggcggctcctatcagcgggtccgcgggccttgatacacagaaatgcagtccagagaaaagtgcctcatttttcagtaaagtgacatattcctgggttagcagagtaattacttttanggtataaggagacctttgggaaagaganggtcttttttgaacttaaagggaaagtgattccct

SEQ ID NO: 7182 - DNA, 335 bp, Homo sapiens
  III.810 (H53358)
  misc_feature (98)..(98): n is a, c, g, or t
  misc_feature (111)..(111): n is a, c, g, or t
  misc_feature (122)..(122): n is a, c, g, or t
  misc_feature (128)..(128): n is a, c, g, or t
  misc_feature (309)..(309): n is a, c, g, or t
  misc_feature (317)..(317): n is a, c, g, or t
  misc_feature (325)..(325): n is a, c, g, or t
  misc_feature (333)..(333): n is a, c, g, or t
aaaacctagggacattgttataaaaactactgtatataaagacaaaagcagagcaacagcgttcagtgaaaaacacatgattattcttacattctagnattattattaggnatattattggntttggntttcccggttatcagctctcagggagaccccatgcctgctcacatgaagtcagagtttacggggagagaaaaatatttccatccccctacccctgcgctgcatgcccttgtccagctggcccgggggacgacacatcagccttttgtggggagggtttcccgccttgttaagggggaccgnggcccctnacccttgnaggccccnac

SEQ ID NO: 7183 - DNA, 445 bp, Homo sapiens
  III.811 (H53406)
  misc_feature (370)..(370): n is a, c, g, or t
  misc_feature (386)..(386): n is a, c, g, or t
  misc_feature (417)..(417): n is a, c, g, or t
tcaaagccctgacagatttgcccttgacagactgaaatccggggctgctgcagggttcacctccaggaggcaccattcacgacactgtcccataaatggtaatgggctcccagggatactgtttacatagactgcactgagaacggtgacccttaggtttgtacaatgaggtaccctgttgaatgaccctaaaccagcctccaaaatgtgcaggatcccacattggtcagcgccaaccctgagcacaggatctaaaactatagatgatatggccaccctgggcacagctggaaccaagctggtggcccaagagagagcctcttcttggaattgcatgtcagtttctcatacgccgttttttttttttttntcccatttcccttttnaaagctagttgggcatacctcacagttcaantaaccaagtggttcagtgttttcggaca

SEQ ID NO: 7184 - DNA, 390 bp, Homo sapiens
  III.812 (N67807)
  misc_feature (1)..(1): n is a, c, g, or t
ngtttttttttttttttttttacaccaacctgcttccactttattcttgtttacacattctcctgctcccagatttggagtcagaacactatgtgagctcaacagtcctgctcagagccatgttccatatcccaccagtttcccttttcccaacccccacccacccccactcagtaagtccccttgcccaggttttgctcttggagggaagaaagcagaagaaaagatgcaggactgagatgattgtcctgaccccgctacccccaagtgtaagagaagtcctggatggaatgggtggtgattccaatgagggatgggaacctctttccaaggcacaaggggccatcttctcaacatgctgctttttcagatttgggtagtatgttggcc

SEQ ID NO: 7185 - DNA, 455 bp, Homo sapiens
  III.813 (W03391)
  misc_feature (16)..(16): n is a, c, g, or t
  misc_feature (40)..(40): n is a, c, g, or t
  misc_feature (57)..(57): n is a, c, g, or t
  misc_feature (311)..(311): n is a, c, g, or t
  misc_feature (431)..(431): n is a, c, g, or t
gcgcttctctctggcncgagccagcatgatccgctgggcncccagcgcatctcctgnaagagcccactcaccctggacgagctcttcggtagcctcagaccgtccttgaagaggatgactgagacattatgggccacgcgctgtgtgtctgctctcggggaactgtcatcattgacaataagcgctacctcttcatccagaaactgggggagggtgggttcagctatgtggacctagtggaagggttacatgatggacacttctacgccctgaagcgaatcctgtgtcacgagcagcaggaccgggagcangcccagcgagaagccgacatgcatcgcctcttcaatcacccccaacatcttcggctcgtgcttatgtctgagggaaggggttcttaagcatgagggcttggctgctgtaccaatctttcnagagaggtacctgttggaatgaga

SEQ ID NO: 7186 - DNA, 468 bp, Homo sapiens
  III.814 (R11781)
  misc_feature (394)..(394): n is a, c, g, or t
  misc_feature (404)..(404): n is a, c, g, or t
  misc_feature (426)..(426): n is a, c, g, or t
  misc_feature (458)..(458): n is a, c, g, or t
attagtatccaacaagacaagaatattggctattgtgaagaatgctgctgtgaacaggggagtactactataatcttgtcttattatgattcacaatagtcaagatatggaaacaccctaactgtccattgacagataaatggataaagaaattgttgtttctctctctctctctgtgtgtgtgtgtgtgtgtgtgtgtgtgtgtggaaaatatatatatatagggtgatggtatatacatatatatatatatatatatggtgatggtatcaaaaagataaaatgactgctctacaattattctcattttgaatttcattttaatttacagttttcaaaactaaatgccacctgtcttttgacactgtttttcattattgaagggtttataggntctaattttnatatttaattaaaatttaattntggtaaaccattgcctgcctttggggggccangcctagggcc

SEQ ID NO: 7187 - DNA, 324 bp, Homo sapiens
  III.815 (R37701)
  misc_feature (38)..(38): n is a, c, g, or t
  misc_feature (240)..(240): n is a, c, g, or t
  misc_feature (248)..(248): n is a, c, g, or t
  misc_feature (257)..(257): n is a, c, g, or t
  misc_feature (276)..(276): n is a, c, g, or t
  misc_feature (291)..(291): n is a, c, g, or t
  misc_feature (311)..(311): n is a, c, g, or t
ttttttttttatattcactcctgaggcttcttttatangttgagtaaaagctagtggcttccaaggtaaatacaagacaaatattccatcctagaacttcagctgattattctcactttgggctcatttgcattcattaaaattcaagttctgggcattacactttatctgggactttttgttttaattaagaaaatagatgtatatgtggtaagaattgaaattctgagtctcttaagnatataggngttattccntgttattatatcgttaccnaaccatcagttgccnctttgaaggttgcctaaggnaagtgtccgtttt

SEQ ID NO: 7188 - DNA, 230 bp, Homo sapiens
  III.816 (H40918)
  misc_feature (21)..(21): n is a, c, g, or t
  misc_feature (82)..(82): n is a, c, g, or t
  misc_feature (85)..(85): n is a, c, g, or t
  misc_feature (90)..(90): n is a, c, g, or t
  misc_feature (91)..(91): n is a, c, g, or t
  misc_feature (224)..(224): n is a, c, g, or t
gaacgcccagcgggccgggancgcctcctctcagatgatcagccagcgtcccaaaaccgctgtcgcgtccccttggtgtctnggntgggnngggagaaggcagtccaggaagaagatactcgtctttggccaaaagccgattgagcggaagtgagagagaccgggatttgatatcaactacccgcaagcccccccactccaggccccctgattgttatgaaatnggccgg

SEQ ID NO: 7189 - DNA, 503 bp, Homo sapiens
  III.817 (H40961)
  misc_feature (17)..(17): n is a, c, g, or t
  misc_feature (19)..(19): n is a, c, g, or t
  misc_feature (161)..(161): n is a, c, g, or t
  misc_feature (165)..(165): n is a, c, g, or t
  misc_feature (175)..(175): n is a, c, g, or t
  misc_feature (255)..(255): n is a, c, g, or t
  misc_feature (290)..(290): n is a, c, g, or t
  misc_feature (298)..(298): n is a, c, g, or t
  misc_feature (337)..(337): n is a, c, g, or t
  misc_feature (344)..(344): n is a, c, g, or t
  misc_feature (393)..(393): n is a, c, g, or t
  misc_feature (399)..(399): n is a, c, g, or t
  misc_feature (409)..(409): n is a, c, g, or t
  misc_feature (428)..(428): n is a, c, g, or t
  misc_feature (437)..(437): n is a, c, g, or t
  misc_feature (453)..(453): n is a, c, g, or t
  misc_feature (466)..(466): n is a, c, g, or t
  misc_feature (474)..(474): n is a, c, g, or t
  misc_feature (480)..(480): n is a, c, g, or t
  misc_feature (490)..(490): n is a, c, g, or t
gaaaacactgatgaggnanggtggaggagaaagcaagcaacattagtttactgcgcggccaaaggactactccaggcaccagtgaggaagggtaatttagatttctagtgggcaccctgccggcccatttcataacaatcagggggcctggagtggggggncttncgggtagttnatatcaaatcccggtctctctcacttccgctcaatcggcttttggccaaagacgagtatcttcttcctggactgccttgnaccaccccaacccagacaccaaggggacgcgacangttttttnggacgctggctgattcatcttgagaggaggcgattcccngccccgntggcgtttcaggatcccgattctgggatggccgtccaccccgtccccgnccgggntttgggggcnaaaaacgggaaacaaattngggcggggnttggtttggggccccngaactttccgggngcaacgtnggcccnaaaacaattncccctttcccggg

SEQ ID NO: 7190 - DNA, 150 bp, Homo sapiens
  III.818 (N73621)
  misc_feature (120)..(120): n is a, c, g, or t
  misc_feature (133)..(133): n is a, c, g, or t
  misc_feature (138)..(138): n is a, c, g, or t
  misc_feature (143)..(143): n is a, c, g, or t
aaaatatcaaaaggagtttattaaaatacatattttgttatacataaaacttagaaatatttcaagatttacatacatcaacttttgcaatcttcctgctggtaaaaatacaaaacagcngggcataggaacnagttnctcanatactca

SEQ ID NO: 7191 - DNA, 618 bp, Homo sapiens
  III.819 (W02608)
  misc_feature (113)..(113): n is a, c, g, or t
  misc_feature (115)..(115): n is a, c, g, or t
  misc_feature (178)..(178): n is a, c, g, or t
  misc_feature (617)..(617): n is a, c, g, or t
tgtatttttggtagagatggggtttcactgtgttggccaggatggtctctatctcctgacctcatgatccactcgcctcagcctcccaaaatgctgggattataggcgtgcgncnacagcccggcccaacaacttaatcttttattagctttgcttaagagggccaattaaagcaaancctttagttccctttaacagggactggagttatgatgcatgtgttacgacttttggcccactgtccatgcaactctaagtgcaggttgatttgctttccagaaatcccaaagggcctgctcttggatcaccgaagagccttacctatatcaaatcaaaaagacattctgggtcagattagactatgctcctggccctacagattgcacataaactatcataaatacagctttttcagggaactagttctaaaactcttacctactgagaataagtcttaacactaagatgactgtattatatcaatttattattagaatcagacttatacctagcacaattaactattgtgtgggcaaagaacatttaaagggcatagtagaggtaaggagagacacatactcagctagagataaaatactaagttgcactgatacttna

SEQ ID NO: 7192 - DNA, 359 bp, Homo sapiens
  III.820 (R66502)
  misc_feature (329)..(329): n is a, c, g, or t
ccattggtgtctcaccaatgctacccctataatgtttctgaataactgttttccaggaggtataaaccagtggagtttatcattgaatagagtgcagagaaaggaccgcaagaaagctgatcacctcagcaatgaatgatttcaatacgatttcacccaaatggtctcacacaccagcctagtaaaccagagataaggtgtaatgtcatccttccttccttctccctgcctcaactgtcaaagattgacaactttacatgttgtttactttttgggcttctatttctgttcataattattatcaggaagggcataggcaccccacaagncttaatcatactggcctttacaaccttatt

SEQ ID NO: 7193 - DNA, 416 bp, Homo sapiens
  III.821 (R67336)
  misc_feature (2)..(2): n is a, c, g, or t
  misc_feature (4)..(4): n is a, c, g, or t
  misc_feature (9)..(9): n is a, c, g, or t
  misc_feature (10)..(10): n is a, c, g, or t
  misc_feature (11)..(11): n is a, c, g, or t
  misc_feature (12)..(12): n is a, c, g, or t
  misc_feature (163)..(163): n is a, c, g, or t
  misc_feature (303)..(303): n is a, c, g, or t
  misc_feature (330)..(330): n is a, c, g, or t
  misc_feature (405)..(405): n is a, c, g, or t
ancntttannnnttccaagtcattagctttatttttactgaattcagcatgggatgacaaaaatgcattatatcactaccatccattattacatgtagacatttatccttgtattctttatatgtccattttctacgttaaatctgttaaccaatactaattnaaattacatgatttcctactaaaaatatgcagttcatataagcaagggcaaataaatcctccttaaaacattttattcctttataattgaggaacttaacagtcttaatgggctaggttcttaaaaaatgtttatagggnttaaggtttatttaaggggaggccggncaaacaaaacatattgtaaaactaggtattttcccggaggccatttcccttctcttcccttcttcccggcaaacngggggttttta

SEQ ID NO: 7194 - DNA, 480 bp, Homo sapiens
  III.822 (H09171)
  misc_feature (326)..(326): n is a, c, g, or t
  misc_feature (370)..(370): n is a, c, g, or t
  misc_feature (396)..(396): n is a, c, g, or t
  misc_feature (449)..(449): n is a, c, g, or t
  misc_feature (464)..(464): n is a, c, g, or t
  misc_feature (470)..(470): n is a, c, g, or t
  misc_feature (478)..(478): n is a, c, g, or t
ttttttttttgtttctcactgcctgtataatcaggtctttattcaaaagaagctgtccaaaatgatttgacctttatggaataatcaaatttaagagtttatgcagcaggcttcttctcctctgtagtaggtttcttctctgcaggcttcttttcaggggctggtttcttggtagctgctgccttttttcccaccagaggcttcttctgcttcttaacaccaacagcagccttctttcctttcttacctaccacaggcttcttgcctggcaaccgccgccttctcatctggatttgggcttgtagtgccgctgctgcagcagctgnccttatccacccgggaggcttgtgattccgggcctgggcgaagnaatgggtgtttccgggcgcatgggtntttggcatatggggtttaggtttcaacatggatttcttcaagttttttcagtnggggttttttctttnagggantctggcgntt

SEQ ID NO: 7195 - DNA, 440 bp, Homo sapiens
  III.823 (H09229)
  misc_feature (24)..(24): n is a, c, g, or t
ctgagtcttggggtactggcagantgtggctcgaattcccagagttcgaggtggtgggactcaccgctctggccagggtgcttttggaaacatgtgtcgtggaggccgaatgtttgcaccaaccaaaacctggcgccgttggatcgtagagtgaacacaacccaaaaacgatacgccatctgttctgccctggctgcctcagccctaccagcactggtcatgtctaaaggtcatcgtattgaggaagttcctgaacttcctttggtagttgaagataaagttgaaggctacaagaagaccaaggaagctgttttgctccttaagaaacttaaagcctgggaatgatatcaaaaaggtctatggcctcttcagcgaatgagagctgggcaaagggcaaaatgaggaaaccgttcgccgtttcccagcgcaggggcccgtgc

SEQ ID NO: 7196 - DNA, 364 bp, Homo sapiens
  III.824 (R09411)
  misc_feature (209)..(209): n is a, c, g, or t
  misc_feature (286)..(286): n is a, c, g, or t
tgttttgcttggttttatgttgtgcagcagcaatttgctaaccacagtcctgaagaaatatagccacgcagcaaaagaagcatttattttcagaaacacatttcttttctgacattacaggggagtgggagggaaggtccagattaactgtactttttaataagagatggagtgctattggaaaactattaaggaaattgtggctttanctcagattcaaggaagcccataagaagaatttactaccttcccagcttaatactgcagcagggcccagttctacagnccccactgctcccctgaatgattctgggagagtatttgccgagctggggggttgttctagggagagggccaatcagcc

SEQ ID NO: 7197 - DNA, 443 bp, Homo sapiens
  III.825 (N27086)
aacttaaaagatccttaatcgcatttattttaaaccacaaaatcaaaatacagcaatcttaaaatgaatcactataaaccatacattgtctcttcttttattatttaaatactgatatcattcttctcttcatgggacagttctgcacctagtttaaaccatcattactaatgccatgctgaatgcttgtctctgaaaaaatctagtaaaattggcagggatgtgataaccttaactacaaatgaaataacttcaaatttaaggggctgtcagaaaaatggaatttcacaactaattatttccaaaaaagtctcctgctcaccatttgttagaaggatataaaaacctagctgcatcacataggaatccttggtatccttggtcttatatttggttgcgaagttggatggtccccttaatgggtcatgtcctctacaagttgt

SEQ ID NO: 7198 - DNA, 341 bp, Homo sapiens
  III.826 (N40495)
  misc_feature (85)..(85): n is a, c, g, or t
  misc_feature (234)..(234): n is a, c, g, or t
  misc_feature (254)..(254): n is a, c, g, or t
ctttggcgtgaccttttattaagacaacagaaatttagaacattttacatgcttctttgttaaatggtgaagcaagggaatgaangtatttatttttagagctcatagttaactccatcaagacatggctacccacccctccagttatgaacttgtattacagctccacttggtgacttcctttctgtgtatcaggagcagagcagaggacaacttgtagaagacatgaccatnaagagacatcaacttcgcancaaatataagacaaggatacaaggattcctatgtgatgcagctagggtttttatatccttctaacaaatggtgagcaggagactttt

SEQ ID NO: 7199 - DNA, 387 bp, Homo sapiens
  III.827 (W32519)
acaaattttgtttaatcgggatcatattacttttacaatagaagattgttttcagaaatattcagagtttgtaagtttcttcacattcacaaaatttggagagtttagactgaaaagaagtatcaggggaggagaagataaataattttagagctttaaatagagatctactaaggaatataaggactgataagaaataaatatcaaggcatttatacctttatattttctatttaatacaattatttcatgtaatcaattgaaaaagagataaagccccaccctgttgggttcgtgacacatcagacttagccccagagtggtatcactgtcaatgaggcacaatccaaacaggcaaaaaaaggtttcagtggaatttcattcctt

SEQ ID NO: 7200 - DNA, 446 bp, Homo sapiens
  III.828 (W32635)
  misc_feature (52)..(52): n is a, c, g, or t
  misc_feature (357)..(357): n is a, c, g, or t
  misc_feature (382)..(382): n is a, c, g, or t
  misc_feature (388)..(388): n is a, c, g, or t
  misc_feature (393)..(393): n is a, c, g, or t
  misc_feature (404)..(404): n is a, c, g, or t
  misc_feature (411)..(411): n is a, c, g, or t
  misc_feature (429)..(429): n is a, c, g, or t
ggagaaggaccttcacgttgtgcacatgtaccctagaacttaaagtataatnataaaaaaaaagaaagtggacgttcactacaaattttgattttttgttgttgttgatgttgcagaaaatgatacagtgtatctgttatgattttgtgagtaaatgtttaatttttcacagattttataaagttaaagatgaagcaagatgattcaggaatcctgtaacttgcagcccactcccactctcccaatccaacccatatccatcaccagcttgagaaacgggaaagggaggaggacccagcaaagtggttgaatctcagcaaatcaatgagtttcggaaagaaacagtttcagacttgnagatttgcagagggaagtttttatnttattntatcnatttattttcntttttcntttcccttggtggcctcnttacccttggggttggg

SEQ ID NO: 7201 - DNA, 502 bp, Homo sapiens
  III.829 (W84514)
  misc_feature (426)..(426): n is a, c, g, or t
  misc_feature (435)..(435): n is a, c, g, or t
  misc_feature (437)..(437): n is a, c, g, or t
  misc_feature (441)..(441): n is a, c, g, or t
  misc_feature (445)..(445): n is a, c, g, or t
  misc_feature (453)..(453): n is a, c, g, or t
  misc_feature (454)..(454): n is a, c, g, or t
  misc_feature (455)..(455): n is a, c, g, or t
  misc_feature (462)..(462): n is a, c, g, or t
  misc_feature (463)..(463): n is a, c, g, or t
  misc_feature (474)..(474): n is a, c, g, or t
  misc_feature (476)..(476): n is a, c, g, or t
  misc_feature (478)..(478): n is a, c, g, or t
  misc_feature (487)..(487): n is a, c, g, or t
  misc_feature (491)..(491): n is a, c, g, or t
  misc_feature (500)..(500): n is a, c, g, or t
cggacgagagatgtacattatcaaggaaggcaaactcgctgtggtggcagatgatggagtcactcagtttgtggtattgagcgatggcagctacttcggtgagatcagcattcttaacattaaagggagcaaagctggcaatcgaagaacggccaatattaaaagtattggctactcagacctgttctgtctctcaaaagatgacctcatggaagctctaactgagtacccagatgccaaaactatgctggaagagaaagggaagcagattttaatgaaagatggtctactggatctaaacattgcaaatgctggcagtgatcctaaagatcttgaagagaaggttactcgaatggaggggtcagtagacctcctgcaaaccaggtttgcccgaatcttggctgagtatgagtccatgcagcaganctgaaacangnttanccanggttgagnnnttctgannccgcttttgcncngnttttcagtnttgngggcctggngc

SEQ ID NO: 7202 - DNA, 517 bp, Homo sapiens
  III.830 (W84526)
  misc_feature (443)..(443): n is a, c, g, or t
  misc_feature (460)..(460): n is a, c, g, or t
  misc_feature (478)..(478): n is a, c, g, or t
  misc_feature (483)..(483): n is a, c, g, or t
  misc_feature (496)..(496): n is a, c, g, or t
  misc_feature (499)..(499): n is a, c, g, or t
  misc_feature (501)..(501): n is a, c, g, or t
  misc_feature (508)..(508): n is a, c, g, or t
tttcataattaattttactttattgcagtctaatttttaaaaatgttatcccaaatatgatgtacatggtaattctcagttacttcaaatacgcttcactcaacaatggaaatggcatgaaagtgagggctacttattcatttttatgaagaatattacataaaatgagcgtatgtgaaaaaatcagaaaatacagacactgacaagttaatcagtttatatctttgcacattatcagttgtgaaaaatcccaagatataaagcttttttaatcatagtatctctcagagagggtgtgggccttgtaccttgcaccaaagcacattttcctcatggaaaaatttcccaactgagtcttcctcttcttttaaattttagttgatgtcagtcataggatccaaaggtcatgaggcaggccctgttaatgaccagctttcgggtcnatggagagccgatgggnccactttccgtccagggnccccnatacttgaaattnggngncataagnggttcagaa

SEQ ID NO: 7203 - DNA, 371 bp, Homo sapiens
  III.831 (AA074230)
  misc_feature (259)..(259): n is a, c, g, or t
aagggtttctaacgaattacctttactagcaagaataaaactgcaagaaaattaaacgtaaaaatgtcagtcctaaatcatgcacgagtttcagaatatttgaatatttccttttggggcccaccgctgccaaggtggccgcagtttcgggtttcgccggacagggctcactaaaacgtgcctacgccccagggatggacgacttggagacaggggccgggaagcctttgtctcaggtcaccctgcgccaggtttgtcngcctaagtttatgggatggacgggagacaacatttgtaagtttagagttttgggaacgttgtttcgtttaatcctccccacaccgtttttagggtggctgttcatatttccc

SEQ ID NO: 7204 - DNA, 275 bp, Homo sapiens
  III.832 (AA074262)
  misc_feature (11)..(11): n is a, c, g, or t
  misc_feature (13)..(13): n is a, c, g, or t
  misc_feature (72)..(72): n is a, c, g, or t
  misc_feature (75)..(75): n is a, c, g, or t
  misc_feature (189)..(189): n is a, c, g, or t
  misc_feature (244)..(244): n is a, c, g, or t
  misc_feature (259)..(259): n is a, c, g, or t
cctcgtctagnangattgaacttgacagctcgaccctaggtacccgccacgaatccagcccagcccgcgggnacncggggtttctccagacctcgcagggaacatttgcggatgggctggtagaggaggctcggacatcccagttccgcacccgcactcgaccaacgcgtggtagcggaacccctgtcngtagcgaggcacagactgggttcaagtcccgactctgccgatttcagcctgagtnactttgagccgagtnactttttcccgtctgg

SEQ ID NO: 7205 - DNA, 225 bp, Homo sapiens
  III.833 (R25901)
  misc_feature (198)..(198): n is a, c, g, or t
gtccaaggttttcttctaattgcaaaattttgcaaaaattttaagggcaatgaaaatttgttgtgcaaataattatgcatagtctgtagattaaaatggttcaagtataacaaataagttttgatttttaaaaacagttccatgcatcacataccactgataaaatcaactagtaaaataaagacagtctttcttggntaaattggaattttttaattaaggctg

SEQ ID NO: 7206 - DNA, 377 bp, Homo sapiens
  III.834 (R26700)
  misc_feature (294)..(294): n is a, c, g, or t
  misc_feature (313)..(313): n is a, c, g, or t
  misc_feature (350)..(350): n is a, c, g, or t
taaaagtcaataaaaagagaattatttattaaaaagatctaatgttacaagaacagtacacagaactattatttgactgtgccttccacacggtatatgccttatatatagtatatatacagatcgtacacaatatatttaacagtttgacatggggtccacagtaccttcatttgggtatgcaaaacttttgctttcatgaaatttctaattataaggactgttgctttcttcatattcaatggacattatacaaaaatacagtctctttaggtggatttaaggactgtgggntactatcccataggcgganaaaactcagtactgtaggctggaaaaataatgtaccntggataagggatggctcttctgggggt

SEQ ID NO: 7207 - DNA, 454 bp, Homo sapiens
  III.835 (N70209)
  misc_feature (353)..(353): n is a, c, g, or t
  misc_feature (401)..(401): n is a, c, g, or t
aaattaagacatttattaacaagtgcttgcagtttgttaacttttttgaaaaaagtcattataaaattttattacatattaaaaatgttcttaaaaatctcaacttgactggatataaaacatttaaaaatctttaaaggcatattcagtgaaaccaagcctacattcatggcatttaaaaaaataattagtgagcaggaattggtttattttccaactttcccactgatcttcaaatacgtcacttttgttcaaataatgcaaggtttctaacagtccaattgtaaagatttttactaaagtgggatttgaaatttagcctctaatctattgagaatgatgaggattttgcngggaacaaagatgactaataattatccaagaactgcaacagctaggcnggatgccaattgggcaactcacccacgtatttcccaaaagcggcccacatttg

SEQ ID NO: 7208 - DNA, 445 bp, Homo sapiens
  III.836 (W01060)
  misc_feature (321)..(321): n is a, c, g, or t
  misc_feature (410)..(410): n is a, c, g, or t
  misc_feature (421)..(421): n is a, c, g, or t
gagaatatatctcaagacatttttgtagatcaaattggcaaatccatgttatgtgtttagcatagtgcctgtcatctagcatacagaataatatatagtaataatataattatagtgatataattattatattagtgattataattattataactaataatatagcacagtaataatatatgaatataatatataatattgctaatattgtaatttttggtgaaatttattatagtaccacccaaagttagggactgtcatgaggaataaatgatgtgtgcatatacttttgtgtaaatacctatcacagtgattggaacntagcagggctaaatcgaatagttgttgaataagctaatgtattggggaagctacaaagggtagattgttatacaaatgcttgtacttcntatttttaacnaaaatagattgagcaatcagaatc

SEQ ID NO: 7209 - DNA, 485 bp, Homo sapiens
  III.837 (AA009935)
  misc_feature (314)..(314): n is a, c, g, or t
aaagtgttggcctcctaaagtgttgggattacaggtgtgagccacttccctggccaaggtgtttttgttctgttttttttatttttaaggcagtctccctgtatcgcccaggctggagtgcagtggtgcgattttggcttactgcaacctcagcctcccaggttcaagtgattcttctgcctcagcctcctgagtagctcgcactacaggtggcaccaccacacctggctaattttttttagtagagacagggtttcaccattttggccaggctggtctcagactcctgacctcaagcaatcagcctgccttgncctcctaacatgttggcctcccaaggtctcacactctacaggtgtgagccactgtgccgggccaaaattaaggttttgatgtttaataaaaatcaattgtggggtggtctttggcttacctccttttatatattcatcaacaaataattgttgatggggaactttagtgag

SEQ ID NO: 7210 - DNA, 460 bp, Homo sapiens
  III.838 (AA009936)
  misc_feature (405)..(405): n is a, c, g, or t
tgctataataaactataagtactggactttcttgagttttgtgagtcatcctaactgaattatcaaacttgagtgtgatggaaacctccacatttgtacttggtcagaaataaaagtaacatgggagcccccgaagtttgcagctggtatccaaagtgagggcagtcttgtgaaaacctattaactttgatctaagtcgaactgtatcgaaatcatacatccacaatgctcactaaagttccccatcaacaattatttgttgatgaatatataaaaggaggtaagccaaagaccaccccacaattgatttttattaaacatcaaaaccttaattttgggcccggcacagtggctcacacctgtagagtgtgagaccttgggaggccaacatgttaggaggccaangcaggctgattgcttgaggtcaggagtctgagaccagcctgggccaaaatggtga

SEQ ID NO: 7211 - DNA, 192 bp, Homo sapiens
  III.839 (AA069342)
  misc_feature (143)..(143): n is a, c, g, or t
  misc_feature (169)..(169): n is a, c, g, or t
gcacagagcgcagagatgtaccactaccagcaccaacggcaacagatgctgtgcctggagcggcataaagagccacccaaggagctggacacggcctcctcggatgaggagaatgaggacggagacttcacggtgtacgagtncccgggcctggcccgaccgggaaatngaggtgcgcaaccctctgttcgg

SEQ ID NO: 7212 - DNA, 453 bp, Homo sapiens
  III.840 (AA069343)
  misc_feature (161)..(161): n is a, c, g, or t
  misc_feature (188)..(188): n is a, c, g, or t
  misc_feature (256)..(256): n is a, c, g, or t
  misc_feature (442)..(442): n is a, c, g, or t
  misc_feature (448)..(448): n is a, c, g, or t
ttttttttttttctttttcttttcaggtctgaaatggactttaattggcttttgtctctagaattacccacccgttcctgcgctctacggttctccatgccccctccagtttgggggtctaaaccgaacaggagaggtgcaggggaccaggaagtgtcctnggcacaaaggttcgggggtctccctgngcaaggggtcccagggcctggagcccaaggcccagccaaaagcacacagcatcaaaacatgtttttangtgggaagctccaggccctgcccctccccgggggcctcgaggtcggggagcaggtgggcgtctgttctgcctccaggtcatggcagttgcaggcggtgagcttggcggccggcagaggcgcggacagtgcggcgtggtcggaacagagggttgcgcacctccatttccccggtcggggccaggccngggcantcgta

SEQ ID NO: 7213 - DNA, 1420 bp, Homo sapiens
  III.841 (AF035281)
gtgaagattctaaagtgcttcctagggtgggcggtggtggcaggaggccttggacggagtccaggccagacccagcctcctgtttaataggctgagcccaagcgtccctcagatgcgaatccaacagccttggtgagttgtaagatttcatggaaactttccctgacttctgtctcccccttgctccccattacctgggaaaggcagctttgtgggccatgtgtcccggaagggcctgggctggctgtggcccagtgctcaggaccagccatcttggccctcacagcgccctgcccagttggtgtaatatttgtcttcaagccattgttggagcaggcaggcaaagggggctttctgaggatccaacgtgtgccagccactgggatacaaagacaggcctggttcctagctgtggggctgggaagggtatctgacatcaatggtggcacctggcagaggacacacagacaacagcaggcagcatgggctgcagtaaatgttgcagaagcacctaaaggttgagcagaagggaggtaggaaacctggacatggcctgccagcagctgagaagcccccctgagatcctggcggccccgccaccatctgaagatttaggccagtcccttgggcttttcaggcaggcccttatggtggccggccagtttgggaccctcccattttgatacattagttccccctcagctactggagatctcagccacaactgggctccagctgtgacccagactccgccaggatcccctagatcctcagctgtcagataatcccctgtccccctcctcctccccactcaacccccagtgcttgacatgaatgcatgtgtgcttcctaggactagaggccggtgctgtctctaccattgccctcactttaaggggcacacgagcagatggtagcaagccctggagagcagcactcgggcaagtgaggtggctctggcactgcccctggactttcatgtttgtagcttgagctggttttaattggaagctctgtgatttacataatcacttacaatctctgtaaataaggaactatttatgaggaattgtaaatttcctctctcccccttcttaccctgtctgtgatcttgtctgtgatgcagtaatgatattccactctaggttcccatgatcagtggtgaaatatagtgattttcacctgtgcttccattctgaagttctggaaagaagtactggatggactgaagtccaggacaacgtcccaaagaaaggcagagtccaggtaggcttggaggaccaagccctggatgagcactggagggcagaggcctcagtgtccagcactgtgccctgcacatggaaagcccctacgtttgtggaatgaatgaataataaaaatgttttcataagtgatgccaaaaaaaaaaaaaaaaaaa

SEQ ID NO: 7214 - DNA, 439 bp, Homo sapiens
  III.842 (R39528)
  misc_feature (147)..(147): n is a, c, g, or t
  misc_feature (177)..(177): n is a, c, g, or t
  misc_feature (298)..(298): n is a, c, g, or t
  misc_feature (329)..(329): n is a, c, g, or t
  misc_feature (371)..(371): n is a, c, g, or t
  misc_feature (376)..(376): n is a, c, g, or t
  misc_feature (388)..(388): n is a, c, g, or t
  misc_feature (393)..(393): n is a, c, g, or t
  misc_feature (413)..(413): n is a, c, g, or t
  misc_feature (419)..(419): n is a, c, g, or t
tttttttttggcatcacttatgaaaacatttttattattcattcattccacaaaccgtaggggctttccatgtgcagggaaagtgctggacactgaggcctctgcctccagtgctcatccagggcttggtcctccaagctacctggnctctgcctttctttgggacgttgtcctggncttcagtcatccagtacttctttccagaacttcagaatggaagcacaggtgaaaatcactatatttcaccactgatcatgggaacctagagtggaatatcattactgcatcacagacaagntcacagacagggtaagaagggggagagaggnaaatttacaattccctcataaataggttccttattttacagngtttntaagtgattttngtaantcacagggttttccaatttnaaaccnagtttcaggttccaacattg

SEQ ID NO: 7215 - DNA, 434 bp, Homo sapiens
  III.843 (T77427)
  misc_feature (34)..(34): n is a, c, g, or t
  misc_feature (43)..(43): n is a, c, g, or t
  misc_feature (44)..(44): n is a, c, g, or t
  misc_feature (49)..(49): n is a, c, g, or t
  misc_feature (389)..(389): n is a, c, g, or t
  misc_feature (422)..(422): n is a, c, g, or t
aagtgcttctagggtgggcggtggtggaggagcnttggcgganngaagnacccagcctcctgtttaataggctgagccaagcgtccctcagatgcgaatcaacagccttggtgagttgtaagatttcatggaaactttccctgacttctgtctcccccttgctccccattacctgggaaaggcagctttgtgggccatgtgtcccggaagccctggggctggctgtggccagtgctcaggaccagccatcttggccctcacagcgccctgcccagttggtgtaatatttgtcttcaagccattgttggagcaggcaggcaaagggggctttctgaggatccaacgtgtgccagccactgggatacaaagacaggcctggttcctagctntggggctgggaagggtatctgacatcaatggtnggcaactgggca

SEQ ID NO: 7216 - DNA, 389 bp, Homo sapiens
  III.844 (R14012)
  misc_feature (225)..(225): n is a, c, g, or t
  misc_feature (262)..(262): n is a, c, g, or t
  misc_feature (337)..(337): n is a, c, g, or t
  misc_feature (350)..(350): n is a, c, g, or t
cagtaattgaaaaaatgctcaaattcttagccatggctggcctttgctgagctgggactcaggtgtttaaagagtttgtgctatagctaggtgtggatagcttctgatccctgggttctgggagactgcaggtgccgcacattgtcaagttagaaatactccaggtgggtgttagcactgtggtggtctctggtccacagccttaggtaaacaacttagattctnaggtcaaagaaaaaaggagagggaatgcagccttgtngggggagaagcggggcagagggttctctaatctaatcaggacaggacaggtttcacatacaattgtcccagttcncatcccagccctngggcactttttcttgctttcctttccagaggcctggggc

SEQ ID NO: 7217 - DNA, 370 bp, Homo sapiens
  III.845 (R39135)
  misc_feature (53)..(53): n is a, c, g, or t
  misc_feature (252)..(252): n is a, c, g, or t
  misc_feature (260)..(260): n is a, c, g, or t
  misc_feature (289)..(289): n is a, c, g, or t
  misc_feature (301)..(301): n is a, c, g, or t
  misc_feature (353)..(353): n is a, c, g, or t
tttttttttttttttttttttgaggctgaacactggggagctttaatggcctnttacagggtggcagaaacagtggctgggtctgggagtcacagcaaaatcaggcgcccagaaccatggtggaaggtggggttgctagttcatgaaaacttgaaggacattaggaagaggcggcatttgatgctgtcaagtaactacacacagaacaagggcatgataaaagtcctaatgcacatagagaacaaagccctnctcagaantgctgtcctcaccagcagaaaggactctntggagaaagctntcccttacataaaaaagaagaacatactgggttagcacttgatatccaagangtgaaatggtcgttttc

SEQ ID NO: 7218 - DNA, 434 bp, Homo sapiens
  III.846 (AA709455)
ttttttttttttaagccagacatcattttattttttacaataagaatgtgtttcttcccatgacttgaatattcatgagcataatccaggatgattcttctctacaagggcaaacgggggaagacaggatacacaaaggaaggttgacagatgagtttggggaggcttatcatcttggaggctgtattagtccattttcacactgctggtaaacacatacccaagactgggtaatttataaagaaaaagaggtttagtggactcacagttccacatggctgggcagacctcacaatcatggcagaaggcaaggaggagcgaaggcatgtcttacatgacatcaggcaaaaggatttgtgcaggggtacttccatttataaaaccatcaaatctcatgcgacttattcattaccacgagaacagtatgggggaaa

SEQ ID NO: 7219 - DNA, 338 bp, Homo sapiens
  III.847 (R12261)
  misc_feature (34)..(34): n is a, c, g, or t
  misc_feature (324)..(324): n is a, c, g, or t
gatgttagtggttttggtgcctggcatcgaagangctgtgttctttctggaaactgtatatcttattggacttatccagatgatgagaaacgcaagaatcccataggaaggataaatctggctaattgtaccagtcgtcagatagaaccagccaacagagaattttgtgcaagacgcaacacttttgaattaattactgtccgaccacaaagagaagatgaccgagagactcttgtcagccaatgcagggacacactctgtgtttaccaagaactggctgtctgcagatactaaagaagagcgggatctctggatggcaaaaantcaatcaagttctt

SEQ ID NO: 7220 - DNA, 243 bp, Homo sapiens
  III.848 (R16712)
  misc_feature (5)..(5): n is a, c, g, or t
  misc_feature (7)..(7): n is a, c, g, or t
  misc_feature (144)..(144): n is a, c, g, or t
  misc_feature (160)..(160): n is a, c, g, or t
  misc_feature (191)..(191): n is a, c, g, or t
ttttnanggcaagcaaagtattattaatacatagcagcttcataacagtttacttttttaatataaagatttttcaatttacacttgtaggagtagaaaaaactaatatgctaagtctgtaagctacgcagcaaaaataatgancttaatgaagccaganttctgtgaaaatgtgcaccacactgcatatntagtagctgagtaaatgtaaaccatgtgcttattaactcttctatataaaat

SEQ ID NO: 7221 - DNA, 317 bp, Homo sapiens
  III.849 (H88116)
  misc_feature (1)..(1): n is a, c, g, or t
  misc_feature (185)..(185): n is a, c, g, or t
  misc_feature (201)..(201): n is a, c, g, or t
  misc_feature (229)..(229): n is a, c, g, or t
  misc_feature (239)..(239): n is a, c, g, or t
  misc_feature (276)..(276): n is a, c, g, or t
  misc_feature (295)..(295): n is a, c, g, or t
  misc_feature (301)..(301): n is a, c, g, or t
naaaaaaaaaaaaaaaaaaaaaaaaaggcaaacatcacattaaaaagtctgctacttcacaaatgcagaattacattttcttaaggtttttttatctctctttccctattatgacactataattttatcaggcttaatagtgcagttacataatcaaaatatatttcttcaggtatttatccttnggagacctgatccttngtaatgtctaactaaaagtttccaaatngatgagtgancgattgagcatgtcgagattttcttttgtgtttttanggattgcatttattttaancaggancatactatccttcatt

SEQ ID NO: 7222 - DNA, 357 bp, Homo sapiens
  III.850 (H88117)
  misc_feature (51)..(51): n is a, c, g, or t
  misc_feature (109)..(109): n is a, c, g, or t
  misc_feature (331)..(331): n is a, c, g, or t
  misc_feature (348)..(348): n is a, c, g, or t
agttcattgagagcttttggacattcccctcttcttgacctcacagcaggnaagtaagtctctgcaggtgtgctctgtgatcgaggtttctgaggtcaggccacagccncaaacatttgctattccctcctacagcaaaataggcttatcaaggtagatcatcttccatttcactgtctgaaacttgaaatctcacttactacatcactttatttacatatgggagaaaagctgacctgtcaaaatactttgacctgtccatgtgtgaggcaggcaaattccatttgtgtcaatgaactttttcgagggcgtatccgactgctgggaaggnaaaattaaaatcggggncaggtttca

SEQ ID NO: 7223 - DNA, 439 bp, Homo sapiens
  III.851 (N68932)
  misc_feature (145)..(145): n is a, c, g, or t
  misc_feature (183)..(183): n is a, c, g, or t
  misc_feature (187)..(187): n is a, c, g, or t
  misc_feature (188)..(188): n is a, c, g, or t
  misc_feature (189)..(189): n is a, c, g, or t
  misc_feature (332)..(332): n is a, c, g, or t
  misc_feature (405)..(405): n is a, c, g, or t
  misc_feature (411)..(411): n is a, c, g, or t
ccttttaaatataaggcaacttgccaacacataacttaaaactggtcttcagtcacattgcttcagatcactagagaatttctggctaacgaacagtagtggatagtgaacaaaatgcaaaaccttaaataagaaccatcagctngacattccccagagacaagaggaaaggtaagggcctanttcnnncggtaaaaattaaaaaagcccaattctgcatctttaacagaatggtgcaaaaatttgtaacaaaacagtctaagtttaaaattacagaaaagtgtttctagccaactaattgtcgccttggggatgagacgtgctggagcatnggagtggatgaagggtatggccctaaggaatgggacagaggggccaggaggggggccttgtttttcccaatgnaagggncccagctcccaggtgttaagaaacccaa

SEQ ID NO: 7224 - DNA, 449 bp, Homo sapiens
  III.852 (W00652)
  misc_feature (390)..(390): n is a, c, g, or t
  misc_feature (405)..(405): n is a, c, g, or t
  misc_feature (412)..(412): n is a, c, g, or t
  misc_feature (431)..(431): n is a, c, g, or t
gttagaacctaaccctaagcccaggcttttctctccactgactgcctgtcagctagtctctccaccttggccatttccagccagctcccacccatcttttcttgaatctcttcctgtttcccttaggacgactgaggtgtgggctgacggaatgccctagttgaggtagtataggtgctcaggcccctaatccagacctctacctgttgctaccccccttcccctccctccaggactaagaagcaagatttcccaggtgctctgaaagctaattacttactcatcgaaggatctcaaatcaaagctgacccagtcttcatatcttcaagttcctttccattcctcaaggtttgttttgtgctatattgatccacagccactgcacttgcncttgcagcttgatanaaggcanttggaagtatttgacattnttgagatatggggggaaa

SEQ ID NO: 7225 - DNA, 316 bp, Homo sapiens
  III.853 (H30052)
  misc_feature (36)..(36): n is a, c, g, or t
  misc_feature (189)..(189): n is a, c, g, or t
aaaagatatcttcactgtgaaataactaaataaatncccactcagtacagtcactgtctcccttttggaacttgatggcaccttaagcccaggtttgcctccactctagaaactcatcagagtgatgcccttctcaaatgggggaggtcccaaagcggatatcctggcagtgtgaaaggccggctaaangtttgtgccaagaggatctgtggaatgcatctcctacagctggtgctgctgagtaaccactctgatctggcatcttctttgatcaagttacagagcagagtttccagggcttgggatttaaagtcct

SEQ ID NO: 7226 - DNA, 230 bp, Homo sapiens
  III.854 (H30053)
  misc_feature (8)..(8): n is a, c, g, or t
  misc_feature (19)..(19): n is a, c, g, or t
  misc_feature (98)..(98): n is a, c, g, or t
  misc_feature (115)..(115): n is a, c, g, or t
  misc_feature (218)..(218): n is a, c, g, or t
catccttntattatttatnactgtctacagttcattgagggtttagaatacagagatgaacgacccatgtcatgaataggactatggaggatacagantacgttgctggtgggantataaaacagttcagcctccatggaataagcttctcagttcctcaaatgaattgccatatgacccagcaactccactcctttggtgtttccatatataacctngtaacatctcaa

SEQ ID NO: 7227 - DNA, 383 bp, Homo sapiens
  III.855 (H63136)
  misc_feature (302)..(302): n is a, c, g, or t
  misc_feature (335)..(335): n is a, c, g, or t
  misc_feature (343)..(343): n is a, c, g, or t
  misc_feature (371)..(371): n is a, c, g, or t
ccatatgcactggaaaatgtggtttctgacaatatattaagcaccatgttaaaacagagtgttgcaaaagggtcttaacagaaacagagcaagaggatttttggaaaagagagaaaatggaaaaggaatagacatcttttgaatatcaagcccgggcaagttagaaccatgcatcagcttttcatccatggtgtaacttaaccctcaggctgtcctactcaatgtggtttgctagcctcactcgcacacaggaagcttggaatttggaggctccaagtcactctccagagtcggtgtgcggnaggcctgcaaattccaaaccaagggtctgaagncaccgganggccactgtgcttttcccaaaaccaccntctttgggaatc

SEQ ID NO: 7228 - DNA, 408 bp, Homo sapiens
  III.856 (H63223)
  misc_feature (342)..(342): n is a, c, g, or t
  misc_feature (382)..(382): n is a, c, g, or t
tttaattattatacattagaaagaaatgacaaggattgcatcctagttttaaaatgctgaacttttaaaaaggcaattttatttttaagactttaaataactcttattagtaattggatttgtggcagattccaagagggtggttttggaaagcacagtggcttccggtggcttcagaccttggtttggaattgcaggcctaccgcacaccgactctggagagtgacttggagcctccaaattccaagcttcctgtgtgcgagtgaggctagcaaaccacattgagtaggacagcctgagggttaagttacaccatgggatgaaaagctgatgcatggttcnaacttggcccgggcttgatattcaaaggtgtctattcctnttccttttctctcttttccaaaatcc

SEQ ID NO: 7229 - DNA, 599 bp, Homo sapiens
  III.857 (N52912)
  misc_feature (543)..(543): n is a, c, g, or t
  misc_feature (553)..(553): n is a, c, g, or t
ctcttaaaaagatttattatcaaaaagtttgctccctttaaatactgagccaattcatcaatgcagctccattctttttaggattattagggcccaaataatttcagactaaaacaagaaataaaaaaactggactataggttcagtaacatattcacagacatgtcagtgtgcactcaggaacactggtttcatttcttgattggaatgcttatcaccataaaatcttctgctagagtcacttcttggagatctaacactgattcagcttgcttttttagttctgcaatgccatctgtttctccttctcttggccaaggcaactggtttgtacctctgactgaagtgagtcagaaccagcctctttgcacggcacaactttgcaaatgttgctgccatctgtggtgtgctgtggccatgctcctttgctttgtccatctgggcatcatccagggttgcttcgtggatcaacaggtctggcttcaaagcacagttttactcctccatcacccacaaccccagagcagtcacccatatgcaganttttcttccnacaataggcctttttaagacatcttgggggagaaattgtaacccca

SEQ ID NO: 7230 - DNA, 503 bp, Homo sapiens
  III.858 (N63696)
  misc_feature (250)..(250): n is a, c, g, or t
  misc_feature (483)..(483): n is a, c, g, or t
aagaagctgtaatgatagtaacaaagaagtccaacctttatattgcacaaatatttactaaccatgtagcatctatgtgcctgaccagccctgacagatgaggattcaggagcaaacaagactcgtccctgtgctttcagagcacacagggtagcaaagccactgacaagtacaggtgggattacagtgaggcataagagatggctcgggggagtacaggggccaggcagagcaccctgggcacagcctngaggctttccaaatgaaatgatcccaaaactcagacctgaagaataaacaggagctaagaagcaaaggagggggagataaacaggtatgaatcagtgggtgctcagggttgagaggcaagagaagacatgaaacagaatatgtgaactattattttttaaaaaactaaagtaacttctatatttgatggtagaatttttggtaaaatttatcttgtataaaatatgatactangctggggcacagtggctcac

SEQ ID NO: 7231 - DNA, 224 bp, Homo sapiens
  III.859 (N92139)
  misc_feature (223)..(223): n is a, c, g, or t
aagtgtattggtcagtcctgataaagagttatgtgtgcatctgtgtgacgtgttaaaattgcttcctgccactgctcgtgtttggtcagatagtaggttaggctgaaggaaagagaggtagtagccacaggacagataagctttgagaagccagagtggttggtaaagtatttggctttcatttagtatctctcatatatatatatatatatatatatatatnt

SEQ ID NO: 7232 - DNA, 422 bp, Homo sapiens
  III.860 (AA018113)
  misc_feature (243)..(243): n is a, c, g, or t
  misc_feature (422)..(422): n is a, c, g, or t
tttttagtaggaatgttttattagcaaagaagtttcagagagtgggtggatcagggctctatcacttggtccccacctcaccttggtggggccagagtgagccccttcctgccacagtcaccccaactgaaattgcctttctcttcggccagtgttagcctctgagcaggggaccctggacccttctgtgcgccaaaggctgaggtgactgacgaggagatctccccacagctaggtgtagtnagccagacgaaggcagcttactgaacctgggggttctctccattgtcaccgcattctccttcaccaggtgttggctgtctggggagccaagggggtgactccgctctggggttgtccgggcttgggccccgaagcttcaaggttggggcattgtaagcaagaagcgggccaaccttcan

SEQ ID NO: 7233 - DNA, 314 bp, Homo sapiens
  III.861 (AA018114)
  misc_feature (4)..(4): n is a, c, g, or t
  misc_feature (18)..(18): n is a, c, g, or t
  misc_feature (43)..(43): n is a, c, g, or t
  misc_feature (92)..(92): n is a, c, g, or t
  misc_feature (94)..(94): n is a, c, g, or t
  misc_feature (193)..(193): n is a, c, g, or t
gcgnccgccgagcgcgantatgagcttgctgcgcgccagtctnggagcaccagcgcggggtgagtgagcttctgcggggccggttgcgggantnggaggaagcccgcgaggctgcggaggaggcagcggcgggggcccgggcccagctacgcgaaggccaccacccagaccccgtggagctgtgccgaaaagnccgctcagaccgagtccccggcagaggcgccctccttgactcaggagagctcgcccggatccatggacggagacaagggccgtggcgcccgcgggcaatcctcaaatccatcattgaagga

SEQ ID NO: 7234 - DNA, 365 bp, Homo sapiens
  III.862 (H18886)
  misc_feature (334)..(334): n is a, c, g, or t
gggagattttccttcagacaattttctcagcctgattttgtcaggtatctaagttgaaccactttaaaaatgtagtaggtattaacaaaaaaaagagtggtcagccaagtgaccgaggtctgctattcggcattgctaagtcatgtctgactgtaggaagaataatacacagaggagagcaatctgcatacacgacaaaatagaatgaatactgaaaaatagcaaatgctgaaatatccttctgcagaatgagaaagaagagcagatgtaagacacaaacatcactttgcaaaagataattcaagaacatgaaagatttgtggtattagtggcnttatttgacaataactttctgttacaaaccc

SEQ ID NO: 7235 - DNA, 401 bp, Homo sapiens
  III.863 (H18887)
  misc_feature (157)..(157): n is a, c, g, or t
  misc_feature (367)..(367): n is a, c, g, or t
  misc_feature (378)..(378): n is a, c, g, or t
gttgttattctttttctgtttgttgcttttatcatacagaagcagtgcttacattgaattaaactaatatactcatcttttttgttttaatgcgctttgctttcttcttttcccttaaacgatccctttgaatgtctcctgatgctataattttggnaatatctagcacttaaaccaatttgaacaagaaatggtttgtacagaaagttattgtcaataatgccactaataccacaaatctttcatgttcttgattatcttttgaaaggtgatgtttgtgtcttacatctgctcttctttctcattctgcagaagggatatttcaggcatttggctatttttcaggtattcattctattttgtcggngtatggcaggnttgctctccccccgtggtattat

SEQ ID NO: 7236 - DNA, 332 bp, Homo sapiens
  III.864 (AA039447)
  misc_feature (27)..(27): n is a, c, g, or t
  misc_feature (43)..(43): n is a, c, g, or t
  misc_feature (323)..(323): n is a, c, g, or t
ggtgaatgtaccctttctttccctccntgcagctctgagggancccctgaccttgtagtgggtggaggaggtaaggggcctccctccctaaatctgcctcttctgcaagctacttggagacttgcctagttgtacccacccctccaggtccctggtgctagagcttctgagaagggcctttccctttcctctttgcctgctatataaggcaggctcctgtggctctgctggctcagtgtgggctgcaggaggactgcagactcaagctgcaattctgaaggggggtttgggaaggcttgtgccgaaggtctcaggcctgtgtnggggaagct

SEQ ID NO: 7237 - DNA, 275 bp, Homo sapiens
  III.865 (AA039448)
ttgcacttctgcaaagatgtttaatgcacttagattacagagaggaagagggggcaagaaggaaacgacatctaagtgagtcacccaaaaattcttacaaaagtcccaggctggctgcagcccaggaaccgagtcgccactgacattaaaaactaatataaaattttacaaaaatctgcttgtcgcagcattcaggtacttgtacaaaaggaggggtctccctacagggctcctgacttgtaacaagggacccaaggcacctcacctgggcatgg

SEQ ID NO: 7238 - DNA, 209 bp, Homo sapiens
  III.866 (H79146)
ataataacataagaaaatatttaaagtactatatatatggttagaactatacgacaataggaaatgaatggataaaatgaataaatgaacaaaccttattttaaaacaccgaaaaaggtgaataaaaataccatatatcttctggtccgaagtaactgtaaaacataaggaacaaaatcccaaaaagggtaacaggtaaagtagccaca

SEQ ID NO: 7239 - DNA, 459 bp, Homo sapiens
  III.867 (H79238)
  misc_feature (391)..(391): n is a, c, g, or t
  misc_feature (417)..(417): n is a, c, g, or t
  misc_feature (434)..(434): n is a, c, g, or t
aaactctaatttgaaagaatccacaaatggctagctgagaagttaacagatctctatcattcgtctgtgtgtctttcttccctcacctatttttacatgaaattattatttcaaatgaaaatcatgatcatgtgccttttgggagacatggtttctctagaggtatatagtttgtaattacccgccttggtaataaccttcctgtggaactgaataaaaatttttgttttatttgtagagattatgatttgaggtatacagtaactttaatgttctattcttgggaatctactctatctcccatgtttaaacattcttaggagccatttgtggggattcattggacaaatttataggtctcaagggaggagttttcaagaaggtatctatnatgtattactcatgggttgggggttnctggagggcatttacanctaaatattttatggactttttctt

SEQ ID NO: 7240 - DNA, 283 bp, Homo sapiens
  III.868 (N62346)
  misc_feature (219)..(219): n is a, c, g, or t
aactgccagaaattctttattacttttgctagacacttagggtttacattttttcaaaaattaatcacatcagagttttgatcacatcagagctttgatcacagctctgatgatttctctgggaactgagagcctaacacaagtcattgtccactttaagacttttaacatactgaaaagttatgttacagagtgctggtccccctgcaacacgttcantcacattggctgacgttttaattctttgccaatctgaggggaagaaatgtcaactctttgtttg

SEQ ID NO: 7241 - DNA, 171 bp, Homo sapiens
  III.869 (N79104)
  misc_feature (27)..(27): n is a, c, g, or t
  misc_feature (152)..(152): n is a, c, g, or t
gcgcctaccatcccggaagcctgagcngcctgcgggaaaggactggctcgccgtcatatttgtgacccaggcaggatggagaagatcactaagctgctttggtaatagtttccgggaattcgggagtcaagaataaagcacttcgacctaanaatagagatccagagtcta

SEQ ID NO: 7242 - DNA, 328 bp, Homo sapiens
  III.870 (H91140)
  misc_feature (140)..(140): n is a, c, g, or t
  misc_feature (172)..(172): n is a, c, g, or t
  misc_feature (325)..(325): n is a, c, g, or t
tgtttaggactgctaataaactggctttgatttcatgtaatgattcttagactctgggatttatggttcccggagaagcgcctgagagcctctgctacagcacccctaaggaatcaacatgttggagggagcagaggagnacggcagctcatctcacctgcgcttgttcagncgtgctatgctgcagtcattttcataccctccaccctcgttgagcatgccagtatgcacaatgtggcccacaggcacatccaggtcattgggagaagaggtactgtagaacttctaatgcctggatccccagtgggactgcaggggttagggnatg

SEQ ID NO: 7243 - DNA, 361 bp, Homo sapiens
  III.871 (H91188)
  misc_feature (13)..(13): n is a, c, g, or t
  misc_feature (33)..(33): n is a, c, g, or t
  misc_feature (42)..(42): n is a, c, g, or t
cattggagcaganaaggactttctataagccanattggtttnacatcgtggagtctgaagtcaagtgctgtaaggaagctgtgtgtgtcattgacatgtcctctttcacaaagtttgagataacagtaagtatttgggaaccaaaaagtaatagattaggaaactttacatatttattgaatgccttttgtttttcatcttcaaaactgattcctgactgggtgcagtgggtcatgcctgtaatcccagcagtttgggaggccgagacgggtggatcacctgagatcaggagttcaagaccagcctggccaacatggcgaaaccgtctctaccaaaaatacaaaaaattaaccagggcatg

SEQ ID NO: 7244 - DNA, 336 bp, Homo sapiens
  III.872 (AF086064)
ttttttttttatgtagagagatatagtatagcttttattttttttttgaaccaacccaacatttccactggcaactgtcaacatagcttatgacatgagcactgtttcttttttaattatttttttcttaaaaaatgtgtttaaaattaacaggtgttttttaatttcttcccccccccccttagaaaatgtatttatgtcgatgcagaaagcctaaagatccgtgggcagtttcgtgatgacatcttatgtctgtttatttgtgtgtttgtgtgcgtgttttaaagccaggtccttcccacattcgttgagaaaaggtctgtagggcacggagat

SEQ ID NO: 7245 - DNA, 255 bp, Homo sapiens
  III.873 (N50099)
atgtagagagatatagtatagcttttattttttttttgaaccaacccaacatttccactggcaactgtcaacatagcttatgacatgagcactgtttcttttttaattatttttttcttaaaaaatgtgtttaaaattaacaggtgttttttaatttcttcccccccccccttagaaaatgtatttatgtcgatgcagaaagcctaaagatccgtgggcagtttcgtgatgacatcttatgtctgtttatttgtc

SEQ ID NO: 7246 - DNA, 627 bp, Homo sapiens
  III.874 (AF075020)
gcttctgctccattaaaaagtaaaaattgtcctccaaatataaaactccttaatagatatttttgaaattaaaatctttaaattttataaatcagctgttgccactacacaactatgatggcatgtgcttataacatttttataacattccgtctgtgtctattccctaaatatcatgagtttataataaggaaattgataaaaatacagtaatgaaataaaaatctgaatgtttctaagaaaggttttggaaggaaaaatgacctgaaatcagtgcgtactgcaaagtacagccaataatttttgttctttgttttcacccccaccctcactggaattctcaccaaaaatagtttgatacttaaaaaacagaagtaaatacttttctcaatattgttttggctatgcaaatatttgttttgcttaatgtcctccatttacacttctcagcaaatgtagttgcaaacaaatgctttctttttatttttcccttggtttgaggtatgtaaatagccaaaaatgtacattgaatttcacattgtaaaagttttattttatcccttgtatgatattactcaaaaaatccctgtgtatatgaaagtgcataataaatatatttgctttaca

SEQ ID NO: 7247 - DNA, 501 bp, Homo sapiens
  III.875 (R66840)
  misc_feature (260)..(260): n is a, c, g, or t
  misc_feature (270)..(270): n is a, c, g, or t
  misc_feature (304)..(304): n is a, c, g, or t
  misc_feature (362)..(362): n is a, c, g, or t
  misc_feature (391)..(391): n is a, c, g, or t
  misc_feature (408)..(408): n is a, c, g, or t
  misc_feature (413)..(413): n is a, c, g, or t
  misc_feature (434)..(434): n is a, c, g, or t
  misc_feature (446)..(446): n is a, c, g, or t
  misc_feature (453)..(453): n is a, c, g, or t
  misc_feature (464)..(464): n is a, c, g, or t
  misc_feature (476)..(476): n is a, c, g, or t
  misc_feature (485)..(485): n is a, c, g, or t
gcttctgctccattaaaaagtaaaaattgtcctccaaatataaaactccttaatagatatttttgaaattaaaatctttaaattttataaatcagctgttgccactacacaactatgatggcatgtgcttataacatttttataacattccgtctgtgtctattccctaaatatcatgagtttataataaggaaattgataaaaatacagtaatgaaataaaaatctggaatgtttctaaggaaaggttttgggaagggnaaaatgaccnggaaatcagtgcgtactgccaaagtacagcccantaatttttgttctttgtttttcaccccccaccctcacggggatttcttcacccaaaanaggtttggatactttaaaaaacaggaggntaaatactttttccccnaaatngtttttgggggcttgggccanaatttggttttnggcttangggcccccccnttttacactttntcggggcangtggggtggccaacct

SEQ ID NO: 7248 - DNA, 331 bp, Homo sapiens
  III.876 (R67937)
  misc_feature (13)..(13): n is a, c, g, or t
  misc_feature (17)..(17): n is a, c, g, or t
  misc_feature (296)..(296): n is a, c, g, or t
ctgtaaagcaaantttntttattatgcactttcatatacacagggattttttgagtaatatcatacaagggataaaataaaacttttacaatgtgaaattcaatgtacatttttggctatttacatacctcaaaccaagggaaaaataaaaagaaagcatttgtttgcaactacatttgctgagaagtgtaaatggaggacattaagcaaaacaaatatttgcatagccaaaacaatattgaggaaaagtatttacttctgttttttaaggtatcaaactatttttgggtgagganttcccggtgaggggtgggggggtgaaaaccaaggg

SEQ ID NO: 7249 - DNA, 485 bp, Homo sapiens
  III.877 (H69776)
  misc_feature (142)..(142): n is a, c, g, or t
  misc_feature (144)..(144): n is a, c, g, or t
  misc_feature (312)..(312): n is a, c, g, or t
  misc_feature (374)..(374): n is a, c, g, or t
  misc_feature (384)..(384): n is a, c, g, or t
  misc_feature (397)..(397): n is a, c, g, or t
  misc_feature (412)..(412): n is a, c, g, or t
  misc_feature (418)..(418): n is a, c, g, or t
  misc_feature (451)..(451): n is a, c, g, or t
  misc_feature (474)..(474): n is a, c, g, or t
  misc_feature (480)..(480): n is a, c, g, or t
agaacagctccctaaatacctctctcatctaattggacccatccatagtccattctcaaacatgtgacattttcccctaagtagatgtgattatctcttaggcatttgttgaaaaataattcttaggtccatggtgcttgcntntgtgtcttttctataaaatgtttgggtcttacaggtttcatgtcatttaagctgcacttctcagcaagttaaaagattaggcagttaatctttattcatttgggcctttgtgaatttgtatttaaattatttttttcagggattgggcaaattattcttgtttctccnttacaaaaaaataaatgcggatattttgttcaatgacccccaaacccacttgaaactagggngggtcatatngggcttgccaagncatgtcccccaatgnacccgnccaggcacacagggggttccagggcccgcttgnccagttggcccgtcacccaggtnacaccnatttt

SEQ ID NO: 7250 - DNA, 351 bp, Homo sapiens
  III.878 (H70949)
  misc_feature (236)..(236): n is a, c, g, or t
  misc_feature (342)..(342): n is a, c, g, or t
  misc_feature (347)..(347): n is a, c, g, or t
gaagcatctatctgaaagtgtgttgatacgaccaggtaggcccacctagctatgctatcttttgtggtatgactatcgtgattatttcatggatttttctctacagtctcaattttgagccattttgctagcttcaacaaaggtgatatgtattaatgtatttgtaagctttgatatttataacactttcatataaataaatacacagccagcttttaaaaaattacttttaagancctgtgtcttaatgtgggagctggggaaaagatgctgtgtgggaattccataagtgggctgagtcctctttgggaattttctgcaaggcaattccatacgtgggtnggccnctgt

SEQ ID NO: 7251 - DNA, 539 bp, Homo sapiens
  III.879 (W67719)
  misc_feature (71)..(71): n is a, c, g, or t
  misc_feature (73)..(73): n is a, c, g, or t
  misc_feature (487)..(487): n is a, c, g, or t
  misc_feature (521)..(521): n is a, c, g, or t
cgaccctgtcatggaggaacctctctctgcctcccgcctggaagatcccttgggtccttgatctccgcagncntaagttgggcctgaaggtcaggagggtttggtaacaaggccctgcagccaggaggtggatcactgacaagtgaccctgggcaaggtcactcttgacaagggctctcccctctccagacctcagtttcctcgtctgtcatcaagggggtgctgggttagtgctgcttggagtcaggccccccccaagaatctaataaaagctgccgaccttcctcctgtaaaacagttatgcacccacattccttgtgaatgtctgtgggaggttcagggaccctccccaaccagagcctccaccctcccctgcccctcggctagatgctctccagcatcactccagccctcagtgaggacccggcgctgagggaggaggaaatcacaacagaaaagtggctgcggtgtcatggctcctcagcanatccagggcccccacagacaaggtagtttaggantttcatggacgaaccatt

SEQ ID NO: 7252 - DNA, 637 bp, Homo sapiens
  III.880 (W68178)
  misc_feature (67)..(67): n is a, c, g, or t
  misc_feature (86)..(86): n is a, c, g, or t
  misc_feature (142)..(142): n is a, c, g, or t
  misc_feature (373)..(373): n is a, c, g, or t
  misc_feature (505)..(505): n is a, c, g, or t
  misc_feature (594)..(594): n is a, c, g, or t
ttaagcttcctcctgaatgtttatttacacctccgctcactgagcgtggctggaccgcggcccccgntgcggctcctcgagccctnccccaggaggcatgtccacgtgcctctccagccccctgtttgccaccgaggcggantgggcgggtgggctgtgttcggctgggagagacggccctcggaggaagttctatctttctgttgacgagaagaaactgtaagacaggggtgctgaggttgctcaacacattccccaagcccaccaggggtcaccccagcctgcccaatgcccagggaggttgagagcagttctgttcgccatgctgggctgacacaggctggaggggagctgccggggccggggggcacgngcaggccatctgagctcctaagcagtcatgaagcacccttcatgatcttgtgaatgaaaaataagcaaacacgtcctttgcaggagccaagactgcctctttggtactgtttcctgttaatacagacacgangtgacatccacaccaacaggcacaggaatttcctgagatacaatcctctctcctgttcaaggatttcagtgccttagatagcattgganaaggactaagtttccaagaaaaaattttggaccaggtaaatta

SEQ ID NO: 7253 - DNA, 343 bp, Homo sapiens
  III.881 (R06445)
  misc_feature (330)..(330): n is a, c, g, or t
ttgggtcaaagttaatgaactacgactttgtggacagctagtagactttctaaaacataactctggtactggtattgctgttggtctagtgaactgggtgaaaacacaatgagcttaagagggaatttcacgaaaaataatatataataggagatgagggaagttgggaatgtcagaagatgttcctgagattctaaggttatttctgatcttcaaaaatgttcatctggggaaggtgccattattgtaggggaaaatgctccctactggaactgactaggaggataccaacagacccagagctctctgaccccagagtgggcgtttctntaagttctgggag

SEQ ID NO: 7254 - DNA, 355 bp, Homo sapiens
  III.882 (R06499)
  misc_feature (248)..(248): n is a, c, g, or t
  misc_feature (254)..(254): n is a, c, g, or t
  misc_feature (275)..(275): n is a, c, g, or t
  misc_feature (312)..(312): n is a, c, g, or t
  misc_feature (319)..(319): n is a, c, g, or t
  misc_feature (332)..(332): n is a, c, g, or t
  misc_feature (345)..(345): n is a, c, g, or t
acatacacacacacatacatagtgattttaacagacaactcaatagcacacattctttccttttctaagctgtagtagttttgactttttgggaaagatacctgcttactgaggccaaagcaatttttcttcagtgactgtaatttgcctgtgtgactcgggtacagctctgaacataatttttacaaagtctgtgcccacaaaataggacttaaaatcatttaaaaatggcaaaaggacccaaaatngggacngggtgacctgggtgccttttnggggtgtccgggaaatgtttctcttctccttggcccngggggtngggggagggcccnttttgggggcccnttttttttgc

SEQ ID NO: 7255 - DNA, 417 bp, Homo sapiens
  III.883 (H18454)
  misc_feature (50)..(50): n is a, c, g, or t
  misc_feature (193)..(193): n is a, c, g, or t
  misc_feature (259)..(259): n is a, c, g, or t
ttttttttacataagttgatttattacttataaagggatcgaagatgagnaagtctaaaattcagtgtgatgtggtccccctgaggttcagagaagttgcctggaaggatggaattttgattgcatgtgccccacttgcaacacagttaagagactccagaaaatagcccagcccaggttttatagcccaggnatcacctgactcactgaccaaaagtgttgagagattgtatttcttgtgaagactgttaagtctggngctgttctaccattctcttctgatatcagggatattccattcccaggcacattctacacttattcttggaaaactgcaagtaaggaaagagggtaggaaccgggaccagtccaattaaaacttgggagggacagtttctggaatccttaaacagtgag

SEQ ID NO: 7256 - DNA, 462 bp, Homo sapiens
  III.884 (H18561)
  misc_feature (388)..(388): n is a, c, g, or t
  misc_feature (455)..(455): n is a, c, g, or t
tgaattagaaacagcaattgatggtggactttcactttggtctacacagtgctttgtgttatcagctgttgccacctcttcccacagtagaactctcaactcctagacatgactggttgaccagccgttccccaggaggatgtatgttccaccttgacctgtgtttggcaggcagtttccaaggtaccccacattgaggcagtgacccagcaccttcaccactgggttctttattcctgattatcaaaagtcagactactgctctgtggtaactgcatctcgtttgggttgccatcactgggatgcttggagtagccatgtggaacgttattactgtacacacttgggacagcttccagggattttgtgtgtgtgaagttgcagaaanggaggaatgtcccccatggcttggggagaatttaaggcatgttcaccctaatttgtggtaaccaagntggactt

SEQ ID NO: 7257 - DNA, 384 bp, Homo sapiens
  III.885 (H37768)
  misc_feature (17)..(17): n is a, c, g, or t
  misc_feature (20)..(20): n is a, c, g, or t
  misc_feature (381)..(381): n is a, c, g, or t
ttttaattttttttagnttntggagtctttctatattgcccaggctggtctcgaactcctgctgccatggcttcccaaagtaccgggattacaagcatgagccactgcacccagcctgtatcccattttaaatatatgtatcctttggcccaggaactccatttccacttatttatcctccagatttacttgtgcgtgaacccaatgatgcatgcacgggttattgactgtggcaaaagagtgaaaacaaatgtaaatgtccactgagtgggttaaataaaaactggtgcatccatttaatgcagctgttcaagaaagaatgcaggtaaggacctgtgtgaataaaaggcacttctaaggacacatttttcaggttaaggnaaa

SEQ ID NO: 7258 - DNA, 406 bp, Homo sapiens
  III.886 (N75429)
tctgtcaagctgttctttatttcagggagagggcaggatcccagcaacatctataacatccccaccggcaccctggacacaggactgttagccaaactccctgcagttgtttggcaggagacctcaggggcagtgacaagcggtgtgacacccccagggcttgtagtacttggctctcccaagactggctctactcaaactagctgtgtgaccttgggccactccccttccgcactctgggcttcagcttcttcatctgcacgaggggatcaaacttttgaggtccatcctcactctgacagcctgagccaggggtttcccagagcacagggaaaaggagaatgaatgagaaagaggtgtcaggcccatctctgagaggtaggggtggaaggagcattccaggagg

SEQ ID NO: 7259 - DNA, 325 bp, Homo sapiens
  III.887 (W05149)
  misc_feature (15)..(15): n is a, c, g, or t
  misc_feature (26)..(26): n is a, c, g, or t
  misc_feature (38)..(38): n is a, c, g, or t
  misc_feature (74)..(74): n is a, c, g, or t
  misc_feature (185)..(185): n is a, c, g, or t
  misc_feature (240)..(240): n is a, c, g, or t
  misc_feature (248)..(248): n is a, c, g, or t
  misc_feature (320)..(320): n is a, c, g, or t
ggtgatgtgttcgantgtagggtgantgctgaataacntctgtccagccctgttctgtagtctcaagctgcctncgatggcctgaaattccacctttcatcccctatggatgacagagagcttacagatgaccctactgaatgcaagcacctttggtgaggagcatcacagggctccttctgganatttggtggggacagctgcagagaagaggcctggaactcgggcagcactgcagtnccaggagnaggcggggaaccgaaggcaaaggctgcccatctccccctgccaaggccctgtgtgatcattatcaccaacanctggt

SEQ ID NO: 7260 - DNA, 366 bp, Homo sapiens
  III.888 (R06900)
  misc_feature (1)..(1): n is a, c, g, or t
  misc_feature (16)..(16): n is a, c, g, or t
  misc_feature (49)..(49): n is a, c, g, or t
  misc_feature (76)..(76): n is a, c, g, or t
  misc_feature (262)..(262): n is a, c, g, or t
nggctttattattcanggatcagctcaaaagtcttgacattggacacanggcaagggataattatctcatttacangttgacctttggcacccatttaaaagtactagctttccaaagtgaagacatgttatacccagtagactcggtataatttctgacagccaaatgtatcccaatttcactcagtagggctgccagggggatggggtaggggatacaaacaaaatcatctactttatcaatcttttttttttcatgggntttttttcccccattgggctttcaaagcaagtgagggtaaacagcgttactgggcaggatattggggccataaataaccatctttccccaaaggccccaacagg

SEQ ID NO: 7261 - DNA, 341 bp, Homo sapiens
  III.889 (R06944)
  misc_feature (299)..(299): n is a, c, g, or t
  misc_feature (309)..(309): n is a, c, g, or t
  misc_feature (336)..(336): n is a, c, g, or t
tcaggtgcagtcatcagttctttaggggctgcaatgttttaaaaaaaataagtcatcagattttaagaaaaaagtgatgatttcttattgatatttttgtaacagaatatagctcttaactgaaaatccagaaccagaaacataaatcttgagtttcttttcatgtacataaaaagcaatagcgttttagtataggatagccctgaggccaaaaagtaataggaattttctctaggatatttaattacaggggagtgtataggactgactcttaaggttaataatgtggccaaaatatnctttaaaccnccccttcccccttatttccaccaattntttcc

SEQ ID NO: 7262 - DNA, 574 bp, Homo sapiens
  III.890 (H94893)
  misc_feature (492)..(492): n is a, c, g, or t
  misc_feature (528)..(528): n is a, c, g, or t
  misc_feature (562)..(562): n is a, c, g, or t
  misc_feature (570)..(570): n is a, c, g, or t
tcaggatgtctaactagggacattggatgtcagttctcctcagaaagaagatcacagttactggtgaatggacaagttatgcatggaaaactgagggaagtgggccaggacccattagagtgcccacagaaagaagttgggttgcagaaaaggaaagcagcaagagtctggcagggatgaacccctgaggaactcagagcctcacggaaggggtagacagaaaaacatctctgctgtcttcacccctgcaacagttggctgactgccaaactgttgagaaacacttctgctcttgtgacccacagcaacacttatcaataatgatttggggagttccagaggacaaagaactggggaagccagattgcacaggcatgtctgcactccctggtaccctggaactaagatgacaggtaccatactgcttgtgcagctgtggtggccactgctctgctttgagaatgtgcccttgagtcaccacacccccagatnacccccaaatgttccctacaacccactctgactttnggtaagcccgtggaccagcagtccctgggaagcntttgggantctt

SEQ ID NO: 7263 - DNA, 349 bp, Homo sapiens
  III.891 (H94945)
atttggtgagctgcaatcccctcttccctaagcatggcctatgctgaggcttagatctccaggagtcccacagcttcccagggacctgctggtcactgtgcttaccaaagtcagagtgggttgtagggaacattttggggtgatctgggggtgtggtgactcaaaggcacattctcaagcagagcagtggccaccacagctgcacaagcagtatggtacctgtcatcttagttcaggtgtacagggagtgcagacatgcctgtgcaatctggcttcccagttctttgtcctctggaactccccaaatcattattgatagtgttgctgtgggtcacaagagcagaagtgt

SEQ ID NO: 7264 - DNA, 443 bp, Homo sapiens
  III.892 (W92315)
  misc_feature (390)..(390): n is a, c, g, or t
  misc_feature (423)..(423): n is a, c, g, or t
caaaatcaaggtagttttattgtattttggttgtaaaagtgataataggaaaaaacaaacatatatttgcttatatgtgcataaagtctctaaaaggatacactagttgctggtcacactgtttacctctggagggagccagatggaaggcagacagggacgagagaagaatttttattgtataatcttttagactcttgattattactttgtgaatgtattctctatttcaaaaataaaattaaaaaaactggtacatcctcactgcaaaagaaatcaagcaatatagaaaggaacaaagaagaaaataaattcatctttaaactcaatacccagattacaacactggttagtatttttggccacatttccttcccaggtcctttatcnatggaatggtacagacatggtgtaagggaggantatttttttacccaaaatag

SEQ ID NO: 7265 - DNA, 442 bp, Homo sapiens
  III.893 (W92350)
ctcctctccaggcccattcgtcaaagaatttataacagcttcagtggattttacctgcttttctactttctataaatggaatcacagggtattgtggtagatggaccacagatttcttccattcctgtatgcatgaccctttgcaatgtgacttctactcagggagaggtagggtctattttcacacccttgaatctaggctggccttttgacttatggggtgaccaatagaatgcagagaaatggacacgatgaagctcctgaggctgggccttgcaactcttgatagttacaacccttacgttttaaaactttgcagcttctactttcactctcttgaaatgctgcccccagactgccgtgtaaggaaggtggtctaggccacctgggaaagaactgagcatcaccagaatgaggtcacgtgagggtacctcagaccttt

SEQ ID NO: 7266 - DNA, 416 bp, Homo sapiens
  III.894 (R25734)
  misc_feature (342)..(342): n is a, c, g, or t
  misc_feature (367)..(367): n is a, c, g, or t
  misc_feature (381)..(381): n is a, c, g, or t
  misc_feature (400)..(400): n is a, c, g, or t
  misc_feature (409)..(409): n is a, c, g, or t
ggtcagagggtcatgagcaatagacgatgatgcgaggcatttggggagcttcctggaggaaaattaagtttttttcctagcaaactaccatgtcctacaagaacttggttatataatggtgcgtctctgaatcactgattaaaaccagttgcttctgattttagtcacaggttttacaagtattcagctctccctcatgtttcatttctttttttaagataatctatcaaccttttttaaattttaaaatttttaggatgtaggagtttataagtaaaatatatttttaggccattgttctgttaggctgagcttgatgtgtttgggtcttaggaggggccnggactttcaggatactctttgtggnccctgtaagggggntctacacaaacttccatangtatggggnaaattgt

SEQ ID NO: 7267 - DNA, 319 bp, Homo sapiens
  III.895 (R26581)
  misc_feature (85)..(85): n is a, c, g, or t
  misc_feature (87)..(87): n is a, c, g, or t
aaaaataagtttattataactaacgaatataaaatctgacagatattttcaaacatttttgcaaaaaaagtaaaaccctccccgncnacccctccccacaagatagagaataaggacttggacagagaaacaatacaaatctaaacatgaaactgtcgctcatcggttgggtcccaagagggctccaacatattatattctaaggtaaagggtattaaattaaggaaggttaacaaggccactttggacacttttataggtttaacttggccttctactctggattatggtggctccttttcaaattgctgaggaggac

SEQ ID NO: 7268 - DNA, 368 bp, Homo sapiens
  III.896 (W92438)
  misc_feature (60)..(60): n is a, c, g, or t
tttattgcaattttagtcattaatgccaaattgcaatcaagaaaccattttgtatcaganaattgaactgagaatatgaactatgcaacgattgcaccacgtcttttgttgaaacctcttgtgtagtaatattagaatattactttccagtctttgatagtccgaatgtgcttcaaaaaaaatagttatttgattgtcgagtcatcgttagtttatattcaatgggtttaatgacttcccctaccttagctgatgtgtatgcataggtatttggaaattatagcaaggcatctatttaacttaccgaatctatattaccacattattcatatccaacatttgtaaaacagttgggtgcttttttggaa

SEQ ID NO: 7269 - DNA, 395 bp, Homo sapiens
  III.897 (H78797)
  misc_feature (375)..(375): n is a, c, g, or t
agattctttccattttttattaattgaagcacagagaaaagaggcaaaatgattaaagaaatttatgttttttagacagggtgttggctttacaccaacgaaaaagaaaaacagatgaataagcttttgatcttcattttctttctcttattctcatggtaggctgagatgcttttaaatgtgatgttataagcctaaggcagcttgacttgcaggcaacaagttttttaccctcctcgggcaaagcagggtctccttatcgttcaggccttgcaggcacttctctacaaaaggctggcggaaatcatccataacagctttcagttgctcttttgttgcctggggcttgtgtttcacggggcttcaacaggtgcnggtttgtttcttggatttgt

SEQ ID NO: 7270 - DNA, 500 bp, Homo sapiens
  III.898 (H80172)
  misc_feature (498)..(498): n is a, c, g, or t
ctccaaaaatttggagaaagagctttcaaagcatgggcagtagctcgcctgagccagagatttcccaaagctgagtttgcagaagtttccaagttagtgacagatcttaccaaagtccacacggaatgctgccatggagatctgcttgaatgtgctgatgacagggcggaccttgccaagtatatctgtgaaaatcaagattcgatctccagtaaactgaaggaatgctgtgaaaaacctctgttggaaaaatcccactgcattgccgaagtgggaaaatgatgagatgcctgctgacttgccttcattagctgctgattttgttgaaagtaaggatgtttgcaaaaactatggctgaggcaaaggatgtcttcctggggcatgtttttgtatggaatatggcaagaaggcatcctgatttactctgttcgtgctgctgttgagacttgccaggacatatgaaaccactctagaggagtgctgtgccgttgcagattntt

SEQ ID NO: 7271 - DNA, 459 bp, Homo sapiens
  III.899 (H10052)
  misc_feature (207)..(207): n is a, c, g, or t
  misc_feature (311)..(311): n is a, c, g, or t
  misc_feature (430)..(430): n is a, c, g, or t
  misc_feature (448)..(448): n is a, c, g, or t
ttttttttttgtttaaaagtcctacaagtttattgactaaggctagacagcaattcatatgatcctatttggtgcattttctaccatggtccaagatcattacatggatacagccaaggactgggccccaactttcaggaaaaagaccacaaagaagaaaatcaaggtggctatttggtccccccagttgataatctgtgtcctggnaactggaaaaacaaaaggtggaaaatacagactgcaacgagttaaaggacttgggaaaaagttggtggaaagtgggcacggttatacgagtaaggtcactgggncttggggatgggcaagggtgctgcattggaaagaggcatccacggggaccaagtacttattaatgttctgatgggtgttcatttccctcaacgacttaggattatctgtatggcgttantaaatagttccgttttgntatttagggca

SEQ ID NO: 7272 - DNA, 506 bp, Homo sapiens
  III.900 (H10106)
  misc_feature (435)..(435): n is a, c, g, or t
  misc_feature (462)..(462): n is a, c, g, or t
  misc_feature (503)..(503): n is a, c, g, or t
agaagagaaaatagttcctaagatggccttcaaggaacctaaacccatgtcaaaagagccaaaaccagatagtaacttactcaccatcaccagtggacaagataagaaggctcctagtaaaaggccgcccatttcagattctgaagaactctcagccaaaaaaaggaaaaagagtagctcagaggctttatttaaaagtttttctagcgcaccaccactgatactcacttgttctgctgacaaaaaacagataaaagataaatctcatgtcaagatgggaaaggtcaaaattgaaagtgagacatcagagaagaaggaaattcaacgttaccgccatttgatgatattgtgggtcccaatggattcaggtgtgggagggaggattttattcctcttaaatctggatttcttggaacaacccagttcctggcccgnttcccggttcccggttcccggttcccngttttcacaccttcccggaccggggtaacagggtcctttgnggt

SEQ ID NO: 7273 - DNA, 444 bp, Homo sapiens
  III.901 (H18456)
  misc_feature (200)..(200): n is a, c, g, or t
  misc_feature (246)..(246): n is a, c, g, or t
  misc_feature (371)..(371): n is a, c, g, or t
  misc_feature (411)..(411): n is a, c, g, or t
  misc_feature (434)..(434): n is a, c, g, or t
  misc_feature (440)..(440): n is a, c, g, or t
ttttttttttttttttttttgacagttttaaagaacactctttaatttatctcaatgtccaatttcagccctcccagttctggcgaaccttcctctgtcccgaccttggttattcattccatgtgggctcctctttcttcttagcctctccacctacattgttctggatgcttctcaagcttttctcctgctcagctggnacctcttttgtgcggtgtcagtctgatgtttcgcagcttccagggnattattttcaggggtcttttgcaagtcttctatttttgccctcattaaaaaatatcgtggggctgctctgggtcttaaggttgctgtgccctctttcatttccttgtaagtagggtttctgccancctctggaaatttcaagtggggggagccaccgggggaggnctagggtgaacaggggcaagggncattgnccct

SEQ ID NO: 7274 - DNA, 437 bp, Homo sapiens
  III.902 (H18563)
  misc_feature (362)..(362): n is a, c, g, or t
  misc_feature (379)..(379): n is a, c, g, or t
  misc_feature (412)..(412): n is a, c, g, or t
aaaagagtaggaaatgggtaaggatttaacaggcaattcacagaagacaaagtaaccggcccctaaatgggagcatatcctcaacttcactagtaataaaggaaacgaatttaaaagacgatacatttctcacttcttctctccttatagctgtattccacctttgaccatacagcctgtttttatttatcgtaagcataggttaataaatacagggcttaccatgttaatatcttctttctatggatgcgtaacaacttattttatcattccgtttgtgactgaaattgaatttctttctgtaaacctgaaaatatctgagacaagcctcgatcaacttaggaagtttactttgcccaggnttaagggacacgtcttngggagaccaggtctgtggcctttctcccaaggntggatttccgagggcttccagtatt

SEQ ID NO: 7275 - DNA, 512 bp, Homo sapiens
  III.903 (H23048)
  misc_feature (378)..(378): n is a, c, g, or t
  misc_feature (383)..(383): n is a, c, g, or t
  misc_feature (420)..(420): n is a, c, g, or t
  misc_feature (452)..(452): n is a, c, g, or t
  misc_feature (485)..(485): n is a, c, g, or t
  misc_feature (505)..(505): n is a, c, g, or t
gtttctgattagatagtagtagagacagtatcctgttacatgtatgtacatagcccgaattattttcttaggatatgcgtatagaagtggagttgaagggtcaggaaatatgtccatttttaagatacatatatctccaaattgccattcttaaaggttggagttatacaagtagtgaatgagaatgcctgcttctctacatcctggaagaggcagcagtctctttccttttttttcctttctatgacttctagtgtggaagtgccaacagaagtgttttagaagcagtgataatgaacactcataacacccatacctcattcctgacttctaaaagaaggcattaagtaaggtgttgagggttctgggtaggtgccnattanttaggggtaagggaaattcccctttaattcctttgcnttgccaagggggttttccttcatccaccaggnatttgaatttcctaaaaaggacctttaaatggnttcctttttagggagggggntaggtac

SEQ ID NO: 7276 - DNA, 444 bp, Homo sapiens
  III.904 (H24328)
  misc_feature (56)..(56): n is a, c, g, or t
  misc_feature (407)..(407): n is a, c, g, or t
  misc_feature (414)..(414): n is a, c, g, or t
  misc_feature (431)..(431): n is a, c, g, or t
tttaactttctggttttttaatgttaaaacaacaacaactcttgaagcccctgggnacaggttggtgtagctagataaagattgcctgggatggaagggatggagagaatggaatcaagtgacactttgcaggtcatttggtctcaccagagcaaacgaccaggaaggaagcaaccttcaacgtgatggtatttgaaggcggggccattgggaggtaattaggtttagatgacaccaggaggatgggaccctcatgatgaggttagtgcccttatcagaagaggaagagaccaaaacatacttccctttctccattgtgtgaggacacagtgaggaaggtagccatctgcaaaccaggaaggagggcccttccttcaccagataccaattttgcagacactttgatnttttganttttcagcctccagaanttttgaggaaaga

SEQ ID NO: 7277 - DNA, 437 bp, Homo sapiens
  III.905 (H23058)
  misc_feature (412)..(412): n is a, c, g, or t
ccatattgattgcaacttgtgtctcattctgtcatctaaatcatgtggtttagagataggccttagtgtccacctggccaggcacaagtctggcgttaaggacctacctgctttaatgatccactctcagggagtcagaacagttaagtactaaaaagacaaggatctggagtgagagtccctagggctatgtcactggattcatgtttctttatgggcaagctacttaacatctctgcatccccatctctcaaaataaccataacactacctacctcacaagggtgctgtgaggcttaccatgaaaagcatgaggaaatgggtatataggaattgggggacctagtaggaaaggtgcttacaggattaggagtaactaggatatcattgagtatggaaccctgctttcccnggggagccccaggttttgccagata

SEQ ID NO: 7278 - DNA, 371 bp, Homo sapiens
  III.906 (H24338)
  misc_feature (64)..(64): n is a, c, g, or t
  misc_feature (221)..(221): n is a, c, g, or t
  misc_feature (351)..(351): n is a, c, g, or t
tttttttttttaagaaagtattttatttttgtgtctcaacagatgaaattcataaccttgtttnctgataagacaattcaaacatacaaatcaattacaacaatgtgcttatcagctcccctcccacccctatattttaatgcaactgacagttttgaaggacaccaagacaatagggcttagctaaacaatacggcaattaaaaatgggccctctaaganaataattacaatagttgttgaaaagaatttgtcctttgaggaaaacagactgaaaaggattatcatggaaatgagggagaattataggcttcttcttccaattaaagggggaaaagggggatgtatgttnaaaacaatggattacaggaa

SEQ ID NO: 7279 - DNA, 622 bp, Homo sapiens
  III.907 (N58235)
  misc_feature (12)..(12): n is a, c, g, or t
  misc_feature (16)..(16): n is a, c, g, or t
  misc_feature (55)..(55): n is a, c, g, or t
  misc_feature (279)..(279): n is a, c, g, or t
  misc_feature (280)..(280): n is a, c, g, or t
  misc_feature (351)..(351): n is a, c, g, or t
  misc_feature (394)..(394): n is a, c, g, or t
  misc_feature (501)..(501): n is a, c, g, or t
  misc_feature (515)..(515): n is a, c, g, or t
  misc_feature (543)..(543): n is a, c, g, or t
  misc_feature (572)..(572): n is a, c, g, or t
  misc_feature (580)..(580): n is a, c, g, or t
  misc_feature (603)..(603): n is a, c, g, or t
tttgagacggancttnactcttgtcacccaggctggagtgcaatggtgcacagcnaatctccacctcccaggttcaagcgattttcctgcctcagcctcccgagtagctgggattataggcatgcaccaactcgccaggctaatttttgtatttttagcagagatggggtttctccacgttggtcaggctggtctcaaactcctgacctcaggtgatcctcctgcctcggcctcccaaagtgctgagattacaggcgtgagataccgcgcccggcccannatttcattttaatagcctatgatttaggtaaggggtaggaaaaagaaagagggaggcaagttaagaaaacntccttaagttgtactctctaccatgggtaaagcataagtaagncttttaaattaaaaacatagattactttttaaaataatgccatgttttaaatggtaattaaaaatactcctgcatggaattcaagaaaaagcttgatgggcttcagntaaaccttaaaatntggttccgtgtggcaaagatgacatttngtgtccgtggtttggaggctccattcccncagaggcncttaaacatgtccggaactaatnggaccatttttaaggtggt

SEQ ID NO: 7280 - DNA, 151 bp, Homo sapiens
  III.908 (N77614)
  misc_feature (20)..(20): n is a, c, g, or t
  misc_feature (145)..(145): n is a, c, g, or t
ctgtcacactaaaattgtgngggaggcttaagtgagttgaaagactggattatggtagttgagggaatgggttttttgttagtttaccattttttaaaatacttagctagaaagcattctgaattattgaataaattaccgtcgnatatat

SEQ ID NO: 7281 - DNA, 400 bp, Homo sapiens
  III.909 (W33195)
  misc_feature (365)..(365): n is a, c, g, or t
  misc_feature (397)..(397): n is a, c, g, or t
tttttttaaatagtgactttagttagtgctttatggtaaacatcatggagacaacttccaggctccattcttggcaccagctagtcatatcttatttctctgatccaggcatttcaataaataggccatctcttatgaaccaggcaaaactgctggttgactatgagggacaaattaagtaattagaaaagcagtactaagtaagcactacatcgtggcaagttcctaggaagcactatggggaaagagggagtgtcatggaagagcaggattagattcaaagtgtcagggtgggtaggtaaatcgaatagataaactgtagtacattcagacaatagaatattattcagtgcttaaaagaaatnagcaatcaagccattaaatgacagaaggaacntaa

SEQ ID NO: 7282 - DNA, 434 bp, Homo sapiens
  III.910 (W37261)
  misc_feature (339)..(339): n is a, c, g, or t
  misc_feature (365)..(365): n is a, c, g, or t
  misc_feature (379)..(379): n is a, c, g, or t
  misc_feature (433)..(433): n is a, c, g, or t
aaggttgtggtggcctttgtgcaggttgtaaatttttgtagtcttttgatagttcttgttatcaaccatatgtacatgagaacccttccccttcatggcgtttcctggctccgtttgccagggttttaatacgagtgactccattttgaatctgacaactttcacatttccccttttgatcaaggtctttctcaaaagcatcactgatcaatcatcctgtatttaggttttgatatctcttggtgccagtctgccctcatgttgaagggagtcactggtaactaggaattagcatcaaaacccctttagccacatttgaacaacaaaagaggtttgganggagtggatctccaggctaagtctanctgggagtccactnttaagttcaattctgtctggttccataggcactgtctatcatctcaaagtgctng

SEQ ID NO: 7283 - DNA, 289 bp, Homo sapiens
  III.911 (R06453)
  misc_feature (279)..(279): n is a, c, g, or t
tttcatttcacaaacatttattaagtgcctactaatggcagatactttgctgggcattggatataaagtaattaacaaaatactcatggaactggtcctcatgacattggcattctcatatgagaaatagtggaaacacttctaggctgtttttaaattttcattcaataaatatttcttgaagtagccactattcaaggcactttgctttcatcagtgaacaacagacagctccctgcccttgtgggaactcccattctaggtaagggaggaaaaagncatttaaaca

SEQ ID NO: 7284 - DNA, 325 bp, Homo sapiens
  III.912 (R06507)
  misc_feature (247)..(247): n is a, c, g, or t
gagctatctccactgcccctgcctcttcagaacccgcatcgtggttttccggggtcactccagcagcttcccacaggtctcccggtgtctgcacttgctccctgcagtctgttgtaacacaaaggcagaaaaatcttattaaaagacaagccaagtcaagccatgtctctcctcttgtcacagaggagtgacaaggccatgtcactcctctgcttcaaaaccccttcatttcacttccctgctcttnttcaggaataaaaagccttacggtcctttcaatgggcaggcttaagggtctttcccatggacctggcttcttcatttt

SEQ ID NO: 7285 - DNA, 404 bp, Homo sapiens
  III.913 (H54346)
  misc_feature (370)..(370): n is a, c, g, or t
  misc_feature (391)..(391): n is a, c, g, or t
atctccacatttatgtcccctggatctttttatatttagttagaagaagggaggtggggattaggtcttaaaacatacggggggcagtttaaaagcccactaccattacttgccttggagtaggtaggggcctgatccctcatcaggatatggactgtgagatactcagggaggacaagagactggcagatgctgatagctcacaaagagaacttgagattacggagtctcaacaaatccctgcgactcattaggcatttcagacataatctctgcaagctgaaaactaggacttcaaaatcccttaagcaagggactcagacccaagggacaagggcagggtgagtgaaacaaaagaccagagataccncacagtacaaaatagtaattntttatattttcaa

SEQ ID NO: 7286 - DNA, 561 bp, Homo sapiens
  III.914 (N58405)
  misc_feature (133)..(133): n is a, c, g, or t
  misc_feature (472)..(472): n is a, c, g, or t
  misc_feature (549)..(549): n is a, c, g, or t
ttaaaattttttatttttttatttagtggccttttagattatggtgatcttcacctcatctccacctgtctccccacattagacaggggtcttatgcttgctactgtgagggtaaagggttgactgggaaggnttggtagggacatggtaggggcagagctccagccccacttccccaggttttgctgacagtggccggcttttagatgatggtgatcttcacctcattgttctcatcagtctggtacaaaaaaggaatgcaagggctgctgccaaagcctgggtgctcctggaggttctgcatctcatgaagcagttgcatgatctgctgctcagtggggttgtcacagggagaatgcttccccgcctctccttgtgcagactccccactgctggcaaggctcacctcacaaagatctttggagagagggaggcagggtgctgtgggagccctcccctggctcctgcgtgnccactgtgcctgaggactctactcactaacctgggcttgtcagtagccccaagctaatgggggggccggggcccggnaattggctcatt

SEQ ID NO: 7287 - DNA, 450 bp, Homo sapiens
  III.915 (T97576)
  misc_feature (282)..(282): n is a, c, g, or t
  misc_feature (287)..(287): n is a, c, g, or t
  misc_feature (401)..(401): n is a, c, g, or t
  misc_feature (420)..(420): n is a, c, g, or t
  misc_feature (427)..(427): n is a, c, g, or t
  misc_feature (448)..(448): n is a, c, g, or t
aatttcagcatttttttttctatttcagtgaagaatgttattggtattttgatagggattgcattgagtctgtagattgctttaggtagtgtgaacattttaacaatattaatttttctaatgtatgaacatggaatttctttccattttttggtgccctcttcaatttctttcatcagtggtttatagttttcattgtagaaatccttctcttctttgggttaagttaattttgagggtactttattttatttgtgggcaattgggaaatgggaattcccnttccnggatttctttttccaggattgttttctgttgggcatataggaaatgcctacctggatttttggtatgttggatttgtatccccgccaacctttaccggaaattgttgatccagntcccaataggtttccgggngggagtnccaggggttttcccccaatantt

SEQ ID NO: 7288 - DNA, 447 bp, Homo sapiens
  III.916 (T97624)
  misc_feature (31)..(31): n is a, c, g, or t
  misc_feature (311)..(311): n is a, c, g, or t
  misc_feature (368)..(368): n is a, c, g, or t
  misc_feature (389)..(389): n is a, c, g, or t
  misc_feature (398)..(398): n is a, c, g, or t
  misc_feature (421)..(421): n is a, c, g, or t
  misc_feature (438)..(438): n is a, c, g, or t
tggtttttttagtagagacagggcctcaccngtgttagccaggatggtctcaatctcccgaccttgtgatccgcccgcctcggactcccaaaagtgccgggactacaggcatgagcaccacacccggccctaaattatctctttaaaaaaaaaaagttagaatactgatttttctaattacttggcaagggatcacagagatgaaagtttgctcttgctgcattccttggtgtctctaggaaaaactgaaagcctttcctccaagatctgggaacatgacaagggatgcctacttttcaccactgttattnaacatgggcactaataatgaggtaccaaaaaaaggggcaggtcaggaccaagggganaccaaattaaaggggcatccnaggttgggnaaagggaggggaggtccaaggtncccttgttttgcaggtnacgtgatca

SEQ ID NO: 7289 - DNA, 276 bp, Homo sapiens
  III.917 (N92739)
  misc_feature (53)..(53): n is a, c, g, or t
cttggcaagcattcatttattcacataacataagccagacactatgccagggntggcgatacagaaatgagtaagacatgatccctggcccctcccatccctggaatgtctactaggaagaagctgctagaaaaagacaacatgctactttaaagccaagaggggccagtctcccattccagcttggtacacactgaacacatttgaggcttatgactggttcttttacttacaaatattgtttagacacattttcaaatgtgacaccccatctct

SEQ ID NO: 7290 - DNA, 415 bp, Homo sapiens
  III.918 (W20358)
  misc_feature (128)..(128): n is a, c, g, or t
  misc_feature (203)..(203): n is a, c, g, or t
  misc_feature (215)..(215): n is a, c, g, or t
  misc_feature (218)..(218): n is a, c, g, or t
  misc_feature (226)..(226): n is a, c, g, or t
  misc_feature (233)..(233): n is a, c, g, or t
tcgtccaactaaaacaactgtaatgtacttgatacatttatatcaagttctaaagtatttagacaaatccaaatactttgtttttagttttttcctcctttccatcctgttaaccacagtgaaacgcntgcagtattttgatttggtcagtgctacggaggaagaccatgaaagctgaattggtctgtgccaccagagtaaanctcttctcttcntcnggaaaganggcgtgnaggttttccagggatcctaataaatatcccgcagtcatctcctgagcagctttcctctgtttcacttcgggaactccttcccccactttcttcactccagtttcttcacttgcagcgttttctgctaagaaagacttatcatcttgtatctggtttatgcctctcttctttggggcccctgg

SEQ ID NO: 7291 - DNA, 392 bp, Homo sapiens
  III.919 (R20585)
  misc_feature (242)..(242): n is a, c, g, or t
  misc_feature (300)..(300): n is a, c, g, or t
  misc_feature (307)..(307): n is a, c, g, or t
  misc_feature (361)..(361): n is a, c, g, or t
  misc_feature (373)..(373): n is a, c, g, or t
  misc_feature (381)..(381): n is a, c, g, or t
tgatactaaagctgcatcatttgtttctagttaatgtatactggcatatctttatcactctcctttataaaaactttcaacctttttgtaccttcatattttaaatatatagattaaaacagctggattttattaattcaatctaactgggtaactttagtccatttacatttgttgtgactgatttatataggacttggcttctatcacctttacaacttctatttctctcactttctagnggtaattctaatatctcctccggggggttccactagggccatattttagggacctcantctggancctcttccccacccaacccccacccaacttctgggccccatccatcccatcccncaggggctctcngggggggnaaaccaatcct

SEQ ID NO: 7292 - DNA, 338 bp, Homo sapiens
  III.920 (R46086)
  misc_feature (305)..(305): n is a, c, g, or t
  misc_feature (320)..(320): n is a, c, g, or t
  misc_feature (326)..(326): n is a, c, g, or t
ttttttttaaatctttttattaactcaatcctcttaataacttaaaaagtaggtgctattattatctgcattttgtagatgaggtaactgaagcatacagaagttagttagataacttgtctgaggtgacaagtggcagaacaaggattggaactagacagtctggctgccctaggcccaaccaagaggagctgagagcaagccatgggacataaggatgttgttcaggctggttttcttttcagttaacctgaagcatagggctgtaatgttaattttagggacattagtgagacagccttccnaagccggaggttttnttaccntgactttttggc

SEQ ID NO: 7293 - DNA, 440 bp, Homo sapiens
  III.921 (H80870)
  misc_feature (3)..(3): n is a, c, g, or t
  misc_feature (43)..(43): n is a, c, g, or t
  misc_feature (134)..(134): n is a, c, g, or t
  misc_feature (425)..(425): n is a, c, g, or t
  misc_feature (437)..(437): n is a, c, g, or t
atntttacgaatgaggcaatttattaacccagcatggtttgtnctaatgcttcttgttggcagctgcacctgtccggcgattctgtccagatctctttgtccctgaggtgtcagtttgcggccgccatcttggnccttttccaccattttcagcccctccaggcttggaggacccggcggccacactcttggagcctcggctgaagtggctgggcatgacgccgtttctctgacgtcccccatagatcttggtcatggagccaaccccagcgccaccccggagtacaggtgccgcgctgtggaagcagctcgcgtgtaggaaccagttctcatcgtagggagcaagctctttgtgcttgggccagcttgacggtatccacccattcggggactttcaggtttcccggattttttgaggaagggtngccagagttttnacg

SEQ ID NO: 7294 - DNA, 427 bp, Homo sapiens
  III.922 (H80971)
  misc_feature (1)..(1): n is a, c, g, or t
  misc_feature (86)..(86): n is a, c, g, or t
  misc_feature (317)..(317): n is a, c, g, or t
  misc_feature (409)..(409): n is a, c, g, or t
ntaaaagacgtgaaccagcaggagttcgtcagagctctggcagccttcctcaaaaagtccgggaagctgaaagtccccgaatggtnggataccgtcaagctggccaagcacaaagagcttgctccctacgatgagaactggttctacacgcgagctgcttccacagcgcggcacctgtacctccggggtggcgctggggttggctccatgaccaagatctatgggggacgtcagagaaacggcgtcatgcccagccacttcagccgaggctccaagagtgtggcccgccgggttcctccaagccctggagggttganaaatggtggaaaaggaccaagatggccggccgcaaacttgacaccttcaggggacaaagagattttgggacagaattcgccggaacaggttnggcagttgccaacaaagg

SEQ ID NO: 7295 - DNA, 421 bp, Homo sapiens
  III.923 (N55512)
  misc_feature (50)..(50): n is a, c, g, or t
  misc_feature (293)..(293): n is a, c, g, or t
  misc_feature (308)..(308): n is a, c, g, or t
  misc_feature (318)..(318): n is a, c, g, or t
  misc_feature (339)..(339): n is a, c, g, or t
  misc_feature (359)..(359): n is a, c, g, or t
  misc_feature (371)..(371): n is a, c, g, or t
  misc_feature (404)..(404): n is a, c, g, or t
ttttcaagtttttcaatgttctttaataaaatgacatcaattgctgaaanatctatgacctttgttatgctacataatactgatacaaaatgtgaatagtacaaagttcattatatataaggctttaatatattacatttgtttctacataaacagactataaatatatgtgccatagcatgtcttatagtcattgttcccagcatttcacactatggtaccaaacaaaaaacacattttcttttttgaaaaaaacggacagaacaagggcaaaaatcagtagaaatagctcnatatgttaaaagtcnaaataatacnatagatgttataatttgggcnataaaataattttgaagtcnggctaataatcnttcagagagtgaacaaacccaatcaggtttacnggagtagaggcccaata

SEQ ID NO: 7296 - DNA, 222 bp, Homo sapiens
  III.924 (N77001)
cattcatttaaaaagcatttatcatgccccctgctgcgggtctcaccatgggtttagaacaaagacgttcaagaaatggccccatcctcaaagaagtagcagtacctggggagctgacacttctgtaaaactagaagataaaccaggcaatgtaagtgttcgaggtgttgaagatgggaaggatttgcagggctgagtctatccaagaggctttgtttagga

SEQ ID NO: 7297 - DNA, 424 bp, Homo sapiens
  III.925 (R39039)
  misc_feature (60)..(60): n is a, c, g, or t
  misc_feature (361)..(361): n is a, c, g, or t
ttttttttttactatcttcaaatttgttttatttcttgttcataattaacagtgcaaagnaattacagcctttaccacttatgcagagataacgaatcaaatttcaaagcataataggtatgttactacctttttacaaaaccatgaaaagcaaaggatttatgcctacactaggtgaagaagccacactgttatatgttatgctaggatgtgtatgccaggggatcaagtgtgctacaaggccaagagcaaagacctgcaattactccaaatgatagccaagtccttcttcgggcatctttatggcatttacctaaattatgcccgaggctctgtggtgtgtgtgtgtgtgcacggtgtncatatatggtttaaggggttcaaaagggatttgggggcccagttgggggttcatttgctaggg

SEQ ID NO: 7298 - DNA, 86 bp, Homo sapiens
  III.926 (T80342)
  misc_feature (22)..(22): n is a, c, g, or t
  misc_feature (84)..(84): n is a, c, g, or t
gcttggaacaaagtgacaacgntttgttaactcaaactaggacaattgcaatgtcattggtgaaatgtgccagcagtgacacgnag

SEQ ID NO: 7299 - DNA, 323 bp, Homo sapiens
  III.927 (R69376)
  misc_feature (6)..(6): n is a, c, g, or t
  misc_feature (19)..(19): n is a, c, g, or t
  misc_feature (223)..(223): n is a, c, g, or t
  misc_feature (228)..(228): n is a, c, g, or t
catttnctttcctaaagantatatttgctggataaaggattctgtgttgacagttttgttgctttttaaaagcactttataaatgttgctccatggtttctgatgagaaatctgccatcactgaaatctttggttctcctatatacaaagtgttgttttcttccagttgttttcaaagtattttctttacagttggtttcatcactttgattatgatgtgccngggtntgggtttcctttttggggatttgctgtgccagcagaccggctttaaataggaatgttatggtaaaatgtaatgtgaattattttgttttttttgc

SEQ ID NO: 7300 - DNA, 202 bp, Homo sapiens
  III.928 (R69377)
  misc_feature (191)..(191): n is a, c, g, or t
tggaaggtctcaacacaatgaagatgactgagggaagagtcagtaaatttgaagatacatgagcagaaattatctagtctgaatgacagagaaaaaagtgaaaaaaatgagaagacctttggggatctgtgggacaatatgagacagtctaatattcatgtcttaggagcccagaaagaacaattggaagnaaaaaatatct

SEQ ID NO: 7301 - DNA, 460 bp, Homo sapiens
  III.929 (H06331)
tcttgctcgtatgattttactgtaagattctggaacttttcaaagcctgactctcttcttgaaacagtggagcatcatacagagtttacttgtggtttagacttcagtcttcagagccccactcaggtggctgactgttcttgggatgaaacaataaagatctatgaccctgcttgtcttactattcctgcttgagatacactactttggtcagaaacagaggatgttggctgaagaactgcctaacagcaaataaattaactatggaaaacatagacattatgcttttatatgctattcagatttcaaatctttccaatttacccgggaatcagttttgagggagctgataaagactttaggctgactcgttaagcctgatacataaggccatattttaaaattctaaggaaataattaaatgtttatggatatatccttgttaggtattccatttaaa

SEQ ID NO: 7302 - DNA, 392 bp, Homo sapiens
  III.930 (R91933)
  misc_feature (4)..(4): n is a, c, g, or t
  misc_feature (122)..(122): n is a, c, g, or t
  misc_feature (123)..(123): n is a, c, g, or t
  misc_feature (128)..(128): n is a, c, g, or t
  misc_feature (129)..(129): n is a, c, g, or t
  misc_feature (132)..(132): n is a, c, g, or t
  misc_feature (133)..(133): n is a, c, g, or t
  misc_feature (134)..(134): n is a, c, g, or t
  misc_feature (156)..(156): n is a, c, g, or t
  misc_feature (306)..(306): n is a, c, g, or t
  misc_feature (309)..(309): n is a, c, g, or t
  misc_feature (344)..(344): n is a, c, g, or t
  misc_feature (364)..(364): n is a, c, g, or t
cctnatgctaaatctgaaccctcaaaattgattcctggcagcaaatctctgcaaattaaaaccaaaaacaaaaatagaaaaattatactttttatatatgtgtgtgtatatatatatatatnnccccnncgnnnggaatcctccagcatttaaaanccacattagagatgaattttgggatcctatcactcacaactccaaaatccataatgaaatgggacgtactttctcttgtttccttcctgggctaccccctcccctccaaaacaggttcaatataggccacaggttcaagtttaatggggnagngagtgaaggtttttgaataggttttgttgtttttnactttgggggatctggggtngggcacatattgctctttgccattacgg

SEQ ID NO: 7303 - DNA, 455 bp, Homo sapiens
  III.931 (R92261)
  misc_feature (1)..(1): n is a, c, g, or t
  misc_feature (382)..(382): n is a, c, g, or t
  misc_feature (394)..(394): n is a, c, g, or t
  misc_feature (406)..(406): n is a, c, g, or t
  misc_feature (443)..(443): n is a, c, g, or t
ngatctaatagaagattcctctgttcagaaggatggtctcaatcagacaactataccagtttctcctccaagtactacaaagccatcgagggcaagtactgcttcaccatgtaataataacataaatgcagctacagctgtggctctacaggaaccccgaaagttaagttatgctgaagtgtgccagaagccccctaaagagccatcttcagttcttgtgcagccactacgggaacttcgctccaatgtggtgtctcccaccaaaaatgaagacaatgggagctcctgagaactccgttgagaaaccacatgaggaagccagaaggcaagggcttagtaagggattattctgggcttccgagggcaatataatccccggggnaggcagcagggnaaattcaggggnacagtggacgccatttttaggccttaggggttattancttcagggggtt

SEQ ID NO: 7304 - DNA, 329 bp, Homo sapiens
  III.932 (H64373)
  misc_feature (286)..(286): n is a, c, g, or t
  misc_feature (302)..(302): n is a, c, g, or t
  misc_feature (317)..(317): n is a, c, g, or t
gaaaaagaaaagaaaaaaagaaataacctggttgttggcagataattctattgagtatataactggggatagctcatttttgaaatcagtttagaacatttaaaatgtgggaaattcaaataaaaatgcaaattttcactgttttctaaaaagtcagatcaacattgctggcccaccactgatataatactctatatcaatactcagctaatattctttagaccctccagactattttactcacttacattaaatgcctgactcctatggacatttaagtaactgnatttctgccctaattnctctgttatcttatnttctcctcccgt

SEQ ID NO: 7305 - DNA, 408 bp, Homo sapiens
  III.933 (H64374)
  misc_feature (308)..(308): n is a, c, g, or t
  misc_feature (339)..(339): n is a, c, g, or t
  misc_feature (354)..(354): n is a, c, g, or t
  misc_feature (374)..(374): n is a, c, g, or t
  misc_feature (391)..(391): n is a, c, g, or t
agacagggtctcactatgttgcccaggctggtcctgaactcctgggcttcagtgatcctccctccttggcctcccaaagtgctgggattataggcatgagcactgtgcccagccctcataaagttataatatggtagcctagggctgggtactcaatatgctgtgcctcgcagtataatatttttacacactcaagcttgttagcttttcagacgactttgggtttatagtttttaaatgtctgccagtaaatcagtcaaatgcaaatgctaaaaactgcttcttccaatatatcattaaactcatgnagacataaaaaagatctattccggctgtcantgtaaattatagganatcttagacctaaaagttcntgcatatacctttccantatatagtaggaattac

SEQ ID NO: 7306 - DNA, 393 bp, Homo sapiens
  III.934 (T86024)
  misc_feature (365)..(365): n is a, c, g, or t
  misc_feature (386)..(386): n is a, c, g, or t
agccacaattaaatattttaatataaaaatttgttaataagtttaaaaagttaaaagtgcaaggacaacactttgaggaacggagagtgtggtttctatatggaaaatacctgactaacccaagtatcacatttttgagagaatatatgcatttcttagtaaagaataaccactgaaataacttatttaggttatccttttttgcggggggcgaccataagctttattgggctggaaagttctagggagccgggtctgctagggactggggtgttcctgggctgatcacccccagggcctaaggctccccggttttcgtctgggcccttctgtagcatgttgttagggttaccaacccaacttgntccaaaggatggatttttccngggggtg

SEQ ID NO: 7307 - DNA, 380 bp, Homo sapiens
  III.935 (T91242)
  misc_feature (23)..(23): n is a, c, g, or t
ctgggaaccaccggcggcacaanatttagaactgctgttaaaattaccaattgctgggccactccagacctactgagtcagaatccctggggtgggatccaagattttacatttttaaccagctccctaggaaattcttatattacaaccagggtttgcgaaaccctgatttatgaatatgctaactaaccagatcctaagccaatacctaatcctagaggatttcgatgattatccaccatcatctagaaatgcatttgtttattcctaatttttgttttctatgtgttcattttctgtctacttcaacacgtttttcttctcttcatttttcatcacatggaaggggcaatttttttaaaaaaggtactcttggggac

SEQ ID NO: 7308 - DNA, 505 bp, Homo sapiens
  III.936 (H17788)
  misc_feature (417)..(417): n is a, c, g, or t
  misc_feature (439)..(439): n is a, c, g, or t
  misc_feature (478)..(478): n is a, c, g, or t
aaggtctaggtgtgcttgaggggatgggccaaaatggtgggaaattagcttggtaaggcagctcatgaagatcttcacaacagaagagtttggcaattattgattgagcaactggacaccctgactgaactcttttgccaatagttttatggtggaaaaacaaaacctcctcagctcctctttcactccttctcttctgcaaggaaaacgattttcagactagaaaggacaaggtgaacaccagagagaaactcctgaaggcagtctagttcaagagagccgtaagctgccttgagtaactgcatctcattgtctgagtcagtagcatcccagggcacttaaggacttgcagctcaaattgcaggacaactggtggtggccctgaaaaccccatggaagaagggaagagatacgtgnttgcagcctaggagatggggtnaaactgggccccatttttgacagatggggaaaggtaaantccacaattattggtcatactttggtt

SEQ ID NO: 7309 - DNA, 438 bp, Homo sapiens
  III.937 (H17789)
  misc_feature (223)..(223): n is a, c, g, or t
  misc_feature (224)..(224): n is a, c, g, or t
  misc_feature (287)..(287): n is a, c, g, or t
  misc_feature (296)..(296): n is a, c, g, or t
  misc_feature (301)..(301): n is a, c, g, or t
  misc_feature (334)..(334): n is a, c, g, or t
  misc_feature (395)..(395): n is a, c, g, or t
  misc_feature (404)..(404): n is a, c, g, or t
  misc_feature (427)..(427): n is a, c, g, or t
ttttttttttttttttttttcaggagctgaaacttttattataatttttcatcataaaaaaggaaggaaaaggagcatcttcctcatgttgaacccaaatctgctttcctataatttccatccattagatcttggagccctgaagtcacgcagaacaaatctactgtgagcccagtaattactcactgacagtaggacaaatttctcctgggattcttcaggnntctcactcttctctggatatacttttgttaacatctcccttgaagtctggtgctcataactgnacactgggnatcanatgtggtctgatcagtgcaaagtaggcacaagnatgatcacctcctttgttctgaaagttgtactcttaggtaatatgggcccaaggttcacantactttttnacaggcaaccaatccacactttncaacccatggg

SEQ ID NO: 7310 - DNA, 384 bp, Homo sapiens
  III.938 (R05528)
tctaatcatcagtgtaagcaagtgacagttaaggggtcatttttcacaaagaaactgtgtctatccacctgccccaacagccatcctagttcaggcactgactcactgactctcacatggctggctcacaaggaggatgaggcaaactcagatccaggcaagggaagggaattgacttaggaccacacagcacagctgggtcaaggcagagcaccctgggaacccattcaggctacaaaaaaaaaacaactttttaatgcttaggggaaacaactttactttaaaataggtaatttgcccaacatgaactaaataaaccaaattgcacagaggaaccccccaattcaagtctgttttacccccaaaccttgcttccccaatggg

SEQ ID NO: 7311 - DNA, 234 bp, Homo sapiens
  III.939 (R05638)
  misc_feature (211)..(211): n is a, c, g, or t
  misc_feature (223)..(223): n is a, c, g, or t
aaaatgttggcagtatttctgattaatgtgggaagaaaagctctattcattgactgatttatttgaaatcagatggggtcagttaaaaaatatttaatttgttctcttgaaacactgaacccaaaagaaatgaatctgaacttaaataataatctttgggcaaaaattgcacacaattttgattgctttcctaagtgtcatgtaaacaccnaaacattaaggnaagggcttctt

SEQ ID NO: 7312 - DNA, 124 bp, Homo sapiens
  III.940 (R10324)
  misc_feature (105)..(105): n is a, c, g, or t
  misc_feature (115)..(115): n is a, c, g, or t
tctcttttattgcctgggggaagagtaacctgccagggctctgtcagagctctgggtctgggattctagaacactgctgtcatgcatcctgtcggctgctctttncccaccactnttaccttgc

SEQ ID NO: 7313 - DNA, 382 bp, Homo sapiens
  III.941 (R10325)
  misc_feature (303)..(303): n is a, c, g, or t
  misc_feature (363)..(363): n is a, c, g, or t
  misc_feature (374)..(374): n is a, c, g, or t
aggatcttgctttgtttcccaggctggagtgcagtggtgcactcacagctcactgtaaacttgaactcctaggctcaagtgaccctcccgcttcagcctcctgagtagctaggactacaggtgtgtgtcaacatatgtctggctgattattttgttgttgttgttgttggtagaaacgaggtcttgctatgttgtccaggctggtcttgaactcatggcctcaagcaatcctcctgccttggcctcccaaagcactgggattacaggcgtgcacccacacacctggccatgaatcttgttctngttgtactataagggtactcctaggtaacacatactacttaattactattactacggttnatgctgttatnctggacaa

SEQ ID NO: 7314 - DNA, 425 bp, Homo sapiens
  III.942 (R02818)
  misc_feature (262)..(262): n is a, c, g, or t
  misc_feature (319)..(319): n is a, c, g, or t
  misc_feature (322)..(322): n is a, c, g, or t
  misc_feature (323)..(323): n is a, c, g, or t
  misc_feature (324)..(324): n is a, c, g, or t
  misc_feature (333)..(333): n is a, c, g, or t
  misc_feature (363)..(363): n is a, c, g, or t
  misc_feature (406)..(406): n is a, c, g, or t
  misc_feature (413)..(413): n is a, c, g, or t
taataacagtaccaacaaacattagaactagtttttttatgtttagtaggtttatcagttacctaataaatacattaaaatagcatactatgtatcagttaggaattgtaataaaaatcaagacatgtactctccacaaatttatttaaatttaatgaattatgagtcggggggcaagataaaatagctgtgaaatgtaattaggaaggaatatacaaacaacaaacaataacgtttcaaacctaggaacgatggcaagggnaacatggcactatttgatattatggaagtcctgtggaagtcccaaaggtgagttacnggnnngtgacttcnggggcccctggcacctgctttctgtgtgtntgtgcctgtgtgttaggtggtttcttccttgcccctttttgtnttttccnccgcaccggggc

SEQ ID NO: 7315 - DNA, 409 bp, Homo sapiens
  III.943 (R02819)
  misc_feature (239)..(239): n is a, c, g, or t
  misc_feature (240)..(240): n is a, c, g, or t
  misc_feature (251)..(251): n is a, c, g, or t
  misc_feature (344)..(344): n is a, c, g, or t
  misc_feature (352)..(352): n is a, c, g, or t
  misc_feature (360)..(360): n is a, c, g, or t
  misc_feature (379)..(379): n is a, c, g, or t
ttgatagttatatatttgtgtttattttcctacattaccacattaattagaaaagatattgtaaaatattagtaatgatactagacatcctaatttgttcctaattttaatgtaaatcatggcagtgttttgctacaaagaaaatgttagcttttttcctttttaacataatgttaaagaaatattcttctgtattagtttttaatcgtatagcaatagttttatatagcaaattaccnngaaatgacggnctttcaaaccaccatgaactcattatctcgcgatttttgtggggcaggagccccgtgcgctgcggccagggcagcctctccatctgcagtcangggccttntcccgggntccatgctggaggcggggnttcactgccttccatcctgctccgaaacgg

SEQ ID NO: 7316 - DNA, 481 bp, Homo sapiens
  III.944 (H55992)
  misc_feature (3)..(3): n is a, c, g, or t
  misc_feature (5)..(5): n is a, c, g, or t
  misc_feature (57)..(57): n is a, c, g, or t
  misc_feature (60)..(60): n is a, c, g, or t
  misc_feature (212)..(212): n is a, c, g, or t
  misc_feature (311)..(311): n is a, c, g, or t
  misc_feature (384)..(384): n is a, c, g, or t
  misc_feature (419)..(419): n is a, c, g, or t
  misc_feature (424)..(424): n is a, c, g, or t
  misc_feature (451)..(451): n is a, c, g, or t
ctntntgttccaataaaactttatttacaaaaacagacagtgggcctgatgtggccnagngctgaaggttgcccacccctcgcctagaagagatagggggacttttgtaaatcactcctttaatatctccaaatcccccctcctaacacaagacctccacctccctgcaatccattcataaaaattcatgtcagaataaccccgtgggtggngtagcaagaaggggtgagccagactggccagtgcatttgcagatttttggagctgggtgatgggctcattccactcttctatttttgtgtatatttgancagttttccaagacagaaagtttaaacaataaaattttttaaaaagagagggaaaaccttctcaggacagganccacaaggtggcaactagtggggaagtttgggggnttgtngttgtcccgcccgggggccgggctttncagggaaggcatgttgcagttcgcaccatt

SEQ ID NO: 7317 - DNA, 391 bp, Homo sapiens
  III.945 (H65700)
  misc_feature (341)..(341): n is a, c, g, or t
  misc_feature (379)..(379): n is a, c, g, or t
  misc_feature (388)..(388): n is a, c, g, or t
tactttctagccatgatacattgggaatttgcttaattctttagccttagcttcctctcctataaaatgggcataataatagttcctctacataagagtgttaggaagatgttatttgaatgaaataaaaaatgttaaaatatttcaatgcttggtacatactcaataaatgatagctattattgtactgttaagagaatagcattcacagccttccacaggtcattacagcttggcttgcattataggatttcagatctattaggatgcttgctaatgtagctcacgcttttatacctccatggatttgggctcatgctgtgttccctacttgttggagngaatgccgtgccacctctcccgtggaacctttctcagntactacagncgg

SEQ ID NO: 7318 - DNA, 302 bp, Homo sapiens
  III.946 (N80277)
  misc_feature (264)..(264): n is a, c, g, or t
  misc_feature (283)..(283): n is a, c, g, or t
  misc_feature (291)..(291): n is a, c, g, or t
  misc_feature (296)..(296): n is a, c, g, or t
gtttcataactaaaaatttattaaggaaacaaaaccagtgctgcaaacgggacagaaaggagagctgggtctccctcccgaccacccagtcatcggccttccagctggggagagaatcttaaaggagaggccggggaccctgtactccaaagagcccagtcttctgagactctaggggactcctacccccaaactactggccttggtcccctacacggtaccccatcgcttctggcatagtcctgggcctcagggagggcaganctgcgcacccatcctccangcaagctntgcantcacag

SEQ ID NO: 7319 - DNA, 347 bp, Homo sapiens
  III.947 (W07406)
  misc_feature (4)..(4): n is a, c, g, or t
  misc_feature (34)..(34): n is a, c, g, or t
  misc_feature (268)..(268): n is a, c, g, or t
  misc_feature (328)..(328): n is a, c, g, or t
gctngagggagggccttctcgcctggggacgcanccactttctccagtggagacagggcaggggttcagagtttccgtcagatgcagtgaaatcacagttccctttcatcttcagaacctctgtcgtgaatgtgttcaagaggctttggttaagtcaggaagaagtgcccagggtgtgtgtccccagtctccctaaggcctggactcgcccatgaacccaagtcggcttctagacagcatgtccctaacagcaggcctggggccccanctcttctaccatccaccccagacttaccacacacccttcctgctgctcctctttcttggncttatcaacctgggtccct

SEQ ID NO: 7320 - DNA, 527 bp, Homo sapiens
  III.948 (H04392)
  misc_feature (10)..(10): n is a, c, g, or t
  misc_feature (19)..(19): n is a, c, g, or t
  misc_feature (23)..(23): n is a, c, g, or t
  misc_feature (26)..(26): n is a, c, g, or t
  misc_feature (34)..(34): n is a, c, g, or t
  misc_feature (50)..(50): n is a, c, g, or t
  misc_feature (59)..(59): n is a, c, g, or t
  misc_feature (71)..(71): n is a, c, g, or t
  misc_feature (82)..(82): n is a, c, g, or t
  misc_feature (117)..(117): n is a, c, g, or t
  misc_feature (125)..(125): n is a, c, g, or t
  misc_feature (136)..(136): n is a, c, g, or t
  misc_feature (218)..(218): n is a, c, g, or t
  misc_feature (222)..(222): n is a, c, g, or t
  misc_feature (363)..(363): n is a, c, g, or t
  misc_feature (368)..(368): n is a, c, g, or t
  misc_feature (382)..(382): n is a, c, g, or t
  misc_feature (387)..(387): n is a, c, g, or t
  misc_feature (407)..(407): n is a, c, g, or t
  misc_feature (442)..(442): n is a, c, g, or t
  misc_feature (450)..(450): n is a, c, g, or t
  misc_feature (468)..(468): n is a, c, g, or t
  misc_feature (474)..(474): n is a, c, g, or t
  misc_feature (480)..(480): n is a, c, g, or t
  misc_feature (485)..(485): n is a, c, g, or t
  misc_feature (492)..(492): n is a, c, g, or t
ctcctgctgnctgctggtncgtncgncccactgnctgtctgctgcagctncccacgggnccccgcaggaanaggccccaggnaaggtgagcccctggtaaggatgagccctgccggncctccggnacctgcacggnaactgtactgggggtggaggcggaaggtgaggggagtggcgggaagggtgctcatccccctagggaacaacgagcgaacctncttngtcccgctgtgcttctcgtgcaggaaagacccaagggagtggataacttggccctggaaccctgaccctgtgtctcctgcccggtggcagtaacaaagccttctgtctgcccagagcctgagtctgcagtgtcttccagtnccctngtgccgaattcttngcctngagggcaaattcctatagtnagtcgtattaaattgtaatatgtatagctgttctnttaaattntatcgtaaaaattcacanacattngagccngaagnataagtntaagcctggggtcctattagtagtactacataatt

SEQ ID NO: 7321 - DNA, 378 bp, Homo sapiens
  III.949 (H04417)
  misc_feature (1)..(1): n is a, c, g, or t
  misc_feature (18)..(18): n is a, c, g, or t
  misc_feature (35)..(35): n is a, c, g, or t
  misc_feature (38)..(38): n is a, c, g, or t
  misc_feature (48)..(48): n is a, c, g, or t
  misc_feature (63)..(63): n is a, c, g, or t
  misc_feature (73)..(73): n is a, c, g, or t
  misc_feature (79)..(79): n is a, c, g, or t
  misc_feature (89)..(89): n is a, c, g, or t
  misc_feature (99)..(99): n is a, c, g, or t
  misc_feature (118)..(118): n is a, c, g, or t
  misc_feature (125)..(125): n is a, c, g, or t
  misc_feature (301)..(301): n is a, c, g, or t
  misc_feature (340)..(340): n is a, c, g, or t
  misc_feature (366)..(366): n is a, c, g, or t
nacagaagggctttgttnactgtccaccgggcagnagnacacagggtncagggtttccagggnccaagttatnccactncccttgggtnctttgcctgncacgagaagcacagcgtgnaccaagncaggttcgctcgttgttccctagggggatgtagtcacccttcccgccactcccctcaccttccgcctccacccccagtacagttccgtgcaggtcccggagtccggcaggctcaccttccaggggctcaccttcctggggctttccctgcggggcccgtgggagctgcagcagcanagttgggcgacgaccagcagcagcaggagcagcacggtncctggggacaggacaggcgtccagtnttcccagggaac

SEQ ID NO: 7322 - DNA, 475 bp, Homo sapiens
  III.950 (H30657)
  misc_feature (78)..(78): n is a, c, g, or t
  misc_feature (410)..(410): n is a, c, g, or t
  misc_feature (445)..(445): n is a, c, g, or t
ctcactatttgccccctgtattagtccaatttcacacatctataaaaaaactacctgaaactgggtaatttacaagcnaaggaggtttaattgactcacagttctgcatggctcgagaggactcagggaacgtacaatcatggtggaaggtgagggggaagcaaggcacttcttacatggtggcaggagaagagagagagcacagagaaaacggccacttttaaaccatcagatctcatgagaaaactcttattatcacaaggacagtttgggggaaaccaccggcatcagccaatcacctcctaccagcctctccctagacacatgaggattacaattggagatgaagtttgggtgaggacacagagccaagccatgttacccccaaacccttttatgaattatttctnttataacctgggaaaaacccctgaatgtctcaccntttcctcagcttagtcttaaggaacctgtt

SEQ ID NO: 7323 - DNA, 370 bp, Homo sapiens
  III.951 (H30658)
  misc_feature (6)..(6): n is a, c, g, or t
  misc_feature (7)..(7): n is a, c, g, or t
  misc_feature (8)..(8): n is a, c, g, or t
  misc_feature (34)..(34): n is a, c, g, or t
  misc_feature (42)..(42): n is a, c, g, or t
  misc_feature (63)..(63): n is a, c, g, or t
  misc_feature (65)..(65): n is a, c, g, or t
  misc_feature (70)..(70): n is a, c, g, or t
  misc_feature (158)..(158): n is a, c, g, or t
  misc_feature (163)..(163): n is a, c, g, or t
  misc_feature (198)..(198): n is a, c, g, or t
  misc_feature (213)..(213): n is a, c, g, or t
  misc_feature (243)..(243): n is a, c, g, or t
  misc_feature (255)..(255): n is a, c, g, or t
  misc_feature (276)..(276): n is a, c, g, or t
  misc_feature (319)..(319): n is a, c, g, or t
  misc_feature (324)..(324): n is a, c, g, or t
  misc_feature (329)..(329): n is a, c, g, or t
  misc_feature (334)..(334): n is a, c, g, or t
  misc_feature (343)..(343): n is a, c, g, or t
  misc_feature (348)..(348): n is a, c, g, or t
caaaannnagtcaattttattggttacagaaaanttaaagantttagtaagaaaaacaaggananagaantgtctacttcccatctgtatttcaggttagatacacaagtgggaagtagatatttgtttaggagtcagtaaagcgttatacatacatnttgantatcacatgtgagtcaattttattggtcatcaggntagctgttcaccagnttcctttctggttgcatgttgagtccttangatttgaccttnggctgaaaacaggggctaccngaccatgctccctatttgctctgctcaattcacccttccggcnctttnggccnttggncccgggggnggggntaagggtctttggccctggttt

SEQ ID NO: 7324 - DNA, 389 bp, Homo sapiens
  III.952 (H85606)
  misc_feature (271)..(271): n is a, c, g, or t
  misc_feature (290)..(290): n is a, c, g, or t
  misc_feature (321)..(321): n is a, c, g, or t
  misc_feature (385)..(385): n is a, c, g, or t
tttctttagagttaatatgcagtcttttattttacattaagtactcttatgatttcatgtcttcacaaaattgcgcttaacttttgaagtaggaggtactttaaacaaaaatactgtgccatgtcagcacttttttccttttaaatattgaaataaataaaatagttaactctttttttccatcagtttgtttgtgttcagttatttctactgtagagtaattccaggcggacctggggtactttctcacagacaatcaaagaaaatatanttgaaggatttaaaaaggngaaaaaaaatcttctttatttgcacaaactngaggccattccccaaggctttctgtggggctggagctggagttgccgctgccgggattttgccnctgc

SEQ ID NO: 7325 - DNA, 291 bp, Homo sapiens
  III.953 (H85607)
  misc_feature (279)..(279): n is a, c, g, or t
  misc_feature (287)..(287): n is a, c, g, or t
aggacgatttggaagagcctcgctcctgtcgaggacgccgcagtggccggggttcgcccacagcagataaaaagggcagttgctaaacccacggaacagactctctgggcaattagccatccccctctgactttggtcattgtgctggttctgatatatattttttttaatgaaaggcaactttagattttccctctatccttgctttttttcccttcacctcccacgtgtccctccatccctccccccacccctctgttttgggtatgtacaacaganggcacaanctac

SEQ ID NO: 7326 - DNA, 241 bp, Homo sapiens
  III.954 (N79061)
  misc_feature (163)..(163): n is a, c, g, or t
  misc_feature (167)..(167): n is a, c, g, or t
cagtagagacaaggtcttgctatgttgcccaggctggtctcaaagactagtcatctgccctgcctcggcctcacacccaaagtgctgggattacaggcatgagtcatttcttttttttcttttttgagacagagtcttctctgttgcccaggctggagtgctngctngaggaagacgctgagctccgaggtgaaaagggatgaggacgcctaagaagacacgagcgcaatacctaatacaa

SEQ ID NO: 7327 - DNA, 300 bp, Homo sapiens
  III.955 (W24059)
  misc_feature (178)..(178): n is a, c, g, or t
  misc_feature (186)..(186): n is a, c, g, or t
  misc_feature (193)..(193): n is a, c, g, or t
  misc_feature (221)..(221): n is a, c, g, or t
  misc_feature (293)..(293): n is a, c, g, or t
cgtgtttcatattattttaacgtgtgacatgaaacaatttcaggaaattgtattaggtattgcgctcgtgtcttcttaggcgtcctcatcccttttcacctcggagctcagcgtccttcctcagcagcactccagcctgggcaacagagaagactctgtctcaaaaaagaaagaaaanaaagaaangactcangcctgtaatcccagcactttgggtgttnaggccaagcaggggaagaatgactaagtcttttgaagaccaagccctgggcaaacaatagcaaagacccttngtctcca

SEQ ID NO: 7328 - DNA, 303 bp, Homo sapiens
  III.956 (H65595)
ggcttacaaagtcctttatttagttcctaccctcttcatctgcatagtaaatcatagggttccccccacccccaccacgaatagcagttaatcatggctattctccaaaaagctaggtgcaaattaactttatggctccagtctatctaatctgaatgaataaacaacctaaaggtttggggtaaaccacagcacagaagaagcaccagatctaggctccaggctggtctctgccattgctaacagggacaccaattccacagaatcatcagattttaaatggctgtttttgtatgtaccaga

SEQ ID NO: 7329 - DNA, 405 bp, Homo sapiens
  III.957 (H65596)
  misc_feature (8)..(8): n is a, c, g, or t
  misc_feature (9)..(9): n is a, c, g, or t
  misc_feature (11)..(11): n is a, c, g, or t
  misc_feature (13)..(13): n is a, c, g, or t
  misc_feature (14)..(14): n is a, c, g, or t
  misc_feature (15)..(15): n is a, c, g, or t
  misc_feature (343)..(343): n is a, c, g, or t
  misc_feature (376)..(376): n is a, c, g, or t
  misc_feature (388)..(388): n is a, c, g, or t
ctgcaaanngnannntaggagtgaaggaggaatcttaagaccgagggagaagagccaaggacaaggtcaggttgaatgagtaggaggtgttcacacatcctcttgtgtgctaggtagtggcgtgcatctgatctgagaggcagtaaagcagtgatgaagactgcagcagaacattgaagtcctgattgcagcagtgactctgcaaccttggataaattatttcaatctttattttgtaaaacggagataacggcctataggattgttaagactgaatattttaaaagagcttagaatggtgcctgacaaatgagaaacaataaatactgattattggccatanagtggtattaaaactgggatctcttttcttccntgggcactactntcattttgaagtttatg

SEQ ID NO: 7330 - DNA, 463 bp, Homo sapiens
  III.958 (R52804)
  misc_feature (1)..(1): n is a, c, g, or t
  misc_feature (443)..(443): n is a, c, g, or t
naaacctctatggatatataaagggaagcttgaggaggaatttcacagttacagtgcagaagcagaagcaaaagaattaaccagctcttcagtcaagcaaatcctctactcaccatgcttcctcctgccattcatttctatctccttccccttgcatgcatcctaatgaaaagctgtttggcttttaaaaatgatgccacagaaatcctttattcacatgtggttaaacctgttccagcacaccccagcagcaacagcacgttgaatcaagccagaaatggaggcaggcatttcagtaacactgggactggatcggaacactcgggttcaagtgggttgccgggaactgcgttccaccaaatacatctctggatgggccagttgcaccagcattcagccctctggaagggagctgggtgtgtggtgggcgagtgctttgcccntgccagtggttccctaactg

SEQ ID NO: 7331 - DNA, 500 bp, Homo sapiens
  III.959 (R52805)
  misc_feature (51)..(51): n is a, c, g, or t
  misc_feature (185)..(185): n is a, c, g, or t
  misc_feature (281)..(281): n is a, c, g, or t
  misc_feature (299)..(299): n is a, c, g, or t
  misc_feature (305)..(305): n is a, c, g, or t
  misc_feature (329)..(329): n is a, c, g, or t
  misc_feature (346)..(346): n is a, c, g, or t
  misc_feature (363)..(363): n is a, c, g, or t
  misc_feature (379)..(379): n is a, c, g, or t
  misc_feature (404)..(404): n is a, c, g, or t
  misc_feature (439)..(439): n is a, c, g, or t
  misc_feature (452)..(452): n is a, c, g, or t
  misc_feature (477)..(477): n is a, c, g, or t
  misc_feature (487)..(487): n is a, c, g, or t
  misc_feature (494)..(494): n is a, c, g, or t
ttttttttaacttttagcagtgtttatttttgttaaaagaaaccaattttnttgaaggtcaagacaccttctgattgcacagattaaacaagaaagtattacttatttcaactttacaaagcatcttattgatttaaaaagatccatactattgataaagttcaccatgaacatatatgtaatanggagactaaaatattcattttacatatctacaacatgtatttcatatttctaatcaaccacaaatcatataggaaaatatttaggtccatgaaaangtttcaaaacattaaaanattaangttttgaaacaaatcacatgtganagctcattaaataatancattggacaaataaatnggttaatccggctttncttattaggctggctggccctggcnttttctggggctttccctttcccggcgaggggtcnggctggcgggggnttaatttccctaccttggcgggccntaaggggccncgggggntatttt

SEQ ID NO: 7332 - DNA, 364 bp, Homo sapiens
  III.960 (R61779)
  misc_feature (92)..(92): n is a, c, g, or t
agggcagcgtctgagctcccggcgttccaggagtggcctcttttgtaggagcacctgaaatgcagcgtctggtgcactaagccgtagcgcanagcagccacagcgacagcttggggccctgtgtagaagctccatcccccttgtctttgtgcttgcctgcgtccccagactcagagattatcttagaagacctaggactccaaaaatgtttcccctgaaggacgctgaaatgggagcctttaccttctttgcctcggctctgccacatgatgtttgtgggaagcaatgggacttcctcttcacaccaaattccatcaaaattttaggggcgttttcaaatcctttaaaaccatcacccatccca

SEQ ID NO: 7333 - DNA, 371 bp, Homo sapiens
  III.961 (R61780)
  misc_feature (347)..(347): n is a, c, g, or t
  misc_feature (358)..(358): n is a, c, g, or t
ttttttttttttttttttgaaacttctaagaaatccttttttattgtcaacaattgttagtttatcacaccactgatccaagttcattgctataatacatattgacaacaaacttttattctcatttcactgatgttattattgggtctaggaatacctacattccatagtttagttaatattctatttaaaagcttgaaaatgaactagtaacttctttagtgtatgtcagttttctgaccgtagtttaactttaattactttttcattaattcacaaaaaatgaaaggcttacatcattcacagttatggatactgatggtcagttatatactactccatatggnacattatcttnaatccattatatt

SEQ ID NO: 7334 - DNA, 432 bp, Homo sapiens
  III.962 (H65260)
  misc_feature (387)..(387): n is a, c, g, or t
  misc_feature (419)..(419): n is a, c, g, or t
atcaattgtttatactgccttttacctctgatgaaccaaattaaaaggacatattgtagaaaggctgacatcagccaactcaggaaactaatagggttatacagtgggataaggaagtcaagatgtagtccaaggaatggggctattcggtttacagatttgaagttagcctattccacatatcggagaaaggtataggataccaaaaagtctcaatgaggccacacagccaaaaaactcttcaaggatatagcatgagattgcagaggaaatgttgggaaaagacaaaatggggaggttgagttccacagagagcagcaaaaagaaaattttctggaaaactatttgacacattcttaggacaattctaagggtgaacttttgggncttttaggttattttgcctttggatagttccngggtaatctttcc

SEQ ID NO: 7335 - DNA, 388 bp, Homo sapiens
  III.963 (H65261)
  misc_feature (163)..(163): n is a, c, g, or t
  misc_feature (251)..(251): n is a, c, g, or t
  misc_feature (268)..(268): n is a, c, g, or t
  misc_feature (277)..(277): n is a, c, g, or t
  misc_feature (320)..(320): n is a, c, g, or t
  misc_feature (325)..(325): n is a, c, g, or t
  misc_feature (330)..(330): n is a, c, g, or t
  misc_feature (356)..(356): n is a, c, g, or t
  misc_feature (380)..(380): n is a, c, g, or t
agaaacatgcagttatcatttatttcaattcttttctaaacacagacttccaattccaataatgcaagtatagcaaatgcattagtttcttatggctttacctcagcacataaatgaaaataatacagcaaaactgtaacttctgagcaagtaatcacaaganttataaagactaagaaaaggaagccaaacatgtaggtacagctaatgagaccaaatactgttcagattgaaaaagagttgaataaaantacagccgaggggaaantgccaccanttatggatgccaggagtgggttttgttaaggaggttcttgggnggggntctgncggggggtcccgggtttgtcctgacntgggccacctattctgctccgggnattaatgg

SEQ ID NO: 7336 - DNA, 419 bp, Homo sapiens
  III.964 (N71787)
  misc_feature (81)..(81): n is a, c, g, or t
aaagtgaaagcaagtttattaggaaagtgcaggaataaaagaatgcctactccataaacagagcagccccgaggctggcgncctgcccatttttatggttatttcttgagtatatgctaagcaaggggtggattattcatgcctcccatgtttagatgatctagggtaactttctgatgttgccatggatttgtaaactgtcatggtgctgctgggagtgtagcagtgaggatgcccagaggtcactcttgtcgccatcttggttttggtgcgctttgactggcttctttactgcaactgtttcatcagcaaggtctttatgacctatatgttgtgccaacctcctatctcatcctgtggacttggaatgccttaaccgtctgggaatgcagcccaataaggtctcagcctcattttac

SEQ ID NO: 7337 - DNA, 396 bp, Homo sapiens
  III.965 (R12041)
  misc_feature (354)..(354): n is a, c, g, or t
  misc_feature (391)..(391): n is a, c, g, or t
catttaaaaccttctttgttgactggctccaggcttgtttgcctaaattcttaggtagtttacacaagttctagaatcttttagaactttaactccattggaagcaaacctaactaatcggagtttgagatcctggttggtttcaataggtattctggaattctggcagaacacctaaagatttttttttttttagaaggttttagatacattatcttacacaaactgtgacctaatggcaataattacctcaaatgtgggcattcatcctgggttttagccttttttgaaatcatgtagccagcttgatcttgggaatttaaagactatggaattctctgtggggctggaaantaatgattacttcattacccccggtcctcgttgcttnagtga

SEQ ID NO: 7338 - DNA, 485 bp, Homo sapiens
  III.966 (R37104)
  misc_feature (461)..(461): n is a, c, g, or t
tttttttgtattttttaaaagctccctggtcccaggtgttttgcagttttcaaggtcttatctgctaaagggaatgccctttaggtcacagcaggtcctctgcagtttggtggtggcacaagagaaaacataaaagaaaccaagactcagggaaactgccattcccccagtctgtttctgcatgacagtggggcccattcctgtctcgaagcatcttcttgttccaaatatgatgtctgtttagagtgggtctcaatggaccagggctgagctgcccctctgtctctgcctcctcctgctcagccctgaccatctctgagaggatgctaaggtccccctcccaccgaactaggactttgagtctaagctgggacaatgaggtaaaacggtaaacataggccttttacattgatttttgcttttaaggggggaaaacgggattaaatgacagcaggtatttnggggaaacccaggccagcgaccaa

SEQ ID NO: 7339 - DNA, 139 bp, Homo sapiens
  III.967 (R20445)
tttccaacttttacccttctctagggtaaaatgcttcactgttgctgttaatctctattactatcctgaaacgtttcctgaaatgataataaacagaaaattttaacataagaaagtaaaagatagatgtaaattacat

SEQ ID NO: 7340 - DNA, 504 bp, Homo sapiens
  III.968 (R44149)
  misc_feature (334)..(334): n is a, c, g, or t
  misc_feature (340)..(340): n is a, c, g, or t
  misc_feature (463)..(463): n is a, c, g, or t
  misc_feature (477)..(477): n is a, c, g, or t
  misc_feature (489)..(489): n is a, c, g, or t
ttttttttttcttttcccgtaactgaggaaacaagacacatatttcttaaacaatgataaatacaatctgaatgtataatggtgtcaagtttgataacctgttgtatccattctacaataaggagacacccaccaaacagatattcccatcggccttttggggaatgttctctgggaaagctcttaatagatgaccttctaaggtgctagagggcaatgttaggatgctgaggacttataggacaaaaacgtttcattctgccgataaacttgggagtatgggggaaaatattcaggtttaaccaactaggcttacatggcttacaacagagtnggggcngagccgttgtttctggggctacaccccggatctagggggtttcttaaaattatttccctaagggggggggtacttttctgggattcttaccctcttgagggggggtttttaccaatttttttnccccgggcaggggncagggctgggtngttttggggtggggg

SEQ ID NO: 7341 - DNA, 417 bp, Homo sapiens
  III.969 (H58178)
  misc_feature (8)..(8): n is a, c, g, or t
  misc_feature (10)..(10): n is a, c, g, or t
  misc_feature (12)..(12): n is a, c, g, or t
  misc_feature (16)..(16): n is a, c, g, or t
  misc_feature (31)..(31): n is a, c, g, or t
  misc_feature (67)..(67): n is a, c, g, or t
  misc_feature (152)..(152): n is a, c, g, or t
  misc_feature (388)..(388): n is a, c, g, or t
  misc_feature (397)..(397): n is a, c, g, or t
  misc_feature (411)..(411): n is a, c, g, or t
gacggacnancntctntcacgcaggctggantgcagtggcgcgatctcagctcactgaaacctccgnctcccgggttcacaccattctcctgcctcattctcctgcctcaagagtcccagcctcttgagtagctgggactacaggcacctgncaccacgtccggctaattttttacatttttagtagagacgaggttttaccgtgttagccaggatggtctcgatctcctgacctcgtgatctgcccgccttggcctcccaaagtgctgagattataggcgtgacatacgcactgtcgcccagcctatgtgggatttctttatactaaaacatttgcagagaaagtttacctggcagatttaacctgtcttgagattagggattgagncaaacatgncaaattcaacaagncaattc

SEQ ID NO: 7342 - DNA, 257 bp, Homo sapiens
  III.970 (H58179)
  misc_feature (168)..(168): n is a, c, g, or t
  misc_feature (208)..(208): n is a, c, g, or t
aaaatatagaatttttaatcgagttcatgttgtttatccaaactgctttattttattgcatgtgtaaactactagaaaaaactacttagagcatattgtcttcccataatactaccttaggtgatctttgctgtttattaaccagccctcagattttgaacaaatttntttaaccttactgggaccccagatttctcaattataagangaggaatgttgtattaggggggactcttctaatcctgaatttctatgga

SEQ ID NO: 7343 - DNA, 372 bp, Homo sapiens
  III.971 (H68191)
  misc_feature (356)..(356): n is a, c, g, or t
agagactgagtatgtgttcttttttccaggaaaggctccagtggttcttacttgatccaaaaaatgtcaagaattaatctaggaggccgggcctggtggctcacacctgtaatcccagctctttgggaggccgaggcgggtggatcactcaaggtcaggcatttgagaccagcctggccaacatagtgaaaccccgtctctattaaaaatacaaaaattagctgggtgtggtggtatgtgcctgtagtctcagctactcaggaggctgagacaggagaatcacttgaaccctgggaggtagaagttgcagtgggccaagatcatactactgcactccagcctgggcgacaagagtnaaactccacctcaaaa

SEQ ID NO: 7344 - DNA, 430 bp, Homo sapiens
  III.972 (H68192)
  misc_feature (2)..(2): n is a, c, g, or t
  misc_feature (267)..(267): n is a, c, g, or t
  misc_feature (280)..(280): n is a, c, g, or t
  misc_feature (346)..(346): n is a, c, g, or t
  misc_feature (354)..(354): n is a, c, g, or t
  misc_feature (369)..(369): n is a, c, g, or t
  misc_feature (374)..(374): n is a, c, g, or t
  misc_feature (382)..(382): n is a, c, g, or t
  misc_feature (412)..(412): n is a, c, g, or t
  misc_feature (424)..(424): n is a, c, g, or t
ancaaggtggagtttcactcttgtcgcccaggctggagtgcagtagtatgatcttggctcactgcaacttctacctccagggttcaagtgattctcctgtctcagcctcctgagtagctgagactacaggcacataccaccacacccagctaatttttgtatttttaatagagacggggtttcactatgttggccaggctggtctcaaatgcctgaccttgagtgatccacccgcctcggcctcccaaagagctgggattacaggtntgagccaccaggnccggcctcctagattaattcttgacattttttggatcaagtaggaaccactggagcctttccgggnaaaaagancacatactcagtctntcctngtgccgantttttgggcttcgagggccaaatttccctntagtgagtcgtnttaaat

SEQ ID NO: 7345 - DNA, 324 bp, Homo sapiens
  III.973 (H02012)
  misc_feature (1)..(1): n is a, c, g, or t
  misc_feature (2)..(2): n is a, c, g, or t
  misc_feature (4)..(4): n is a, c, g, or t
  misc_feature (7)..(7): n is a, c, g, or t
  misc_feature (17)..(17): n is a, c, g, or t
  misc_feature (21)..(21): n is a, c, g, or t
  misc_feature (102)..(102): n is a, c, g, or t
  misc_feature (165)..(165): n is a, c, g, or t
  misc_feature (172)..(172): n is a, c, g, or t
  misc_feature (190)..(190): n is a, c, g, or t
  misc_feature (199)..(199): n is a, c, g, or t
  misc_feature (226)..(226): n is a, c, g, or t
  misc_feature (279)..(279): n is a, c, g, or t
  misc_feature (289)..(289): n is a, c, g, or t
  misc_feature (307)..(307): n is a, c, g, or t
  misc_feature (319)..(319): n is a, c, g, or t
nntnttnagccttgggnatanctttattagcagcatgaaaacagactaatacaatatatgtctatgaatacatatacatatactatatattattttattggnatgcatatatttactaaaaataatgtacgtttattataagcaataaatatcatatcaattttncacttgngtgtaatcaataataagnatacacagntcacaatttatatgatactataagggnacaaattgatgaaggcaaggctaaatacatggcaaaatggatattaatcaacnataaaaaagnggggttatcttattaccnttaaacaattgnggtcg

SEQ ID NO: 7346 - DNA, 438 bp, Homo sapiens
  III.974 (H02110)
  misc_feature (241)..(241): n is a, c, g, or t
  misc_feature (342)..(342): n is a, c, g, or t
  misc_feature (370)..(370): n is a, c, g, or t
  misc_feature (375)..(375): n is a, c, g, or t
  misc_feature (386)..(386): n is a, c, g, or t
  misc_feature (391)..(391): n is a, c, g, or t
  misc_feature (402)..(402): n is a, c, g, or t
  misc_feature (408)..(408): n is a, c, g, or t
  misc_feature (414)..(414): n is a, c, g, or t
aattaaggggaagtttcaataaaaaagatgatgtcccaaagaaagtgaatggagaaaacttcatagtaaggacaatcttgaatatattgcacaacattgaaacaaaaaaaattaaatgttggaaacggatccaaatttagaaagagtatgataactggccaagttataaaaaggattctcatttcatattgtgcattataaaatgagaaggcaaacaatgttcaaattactcttgataagnttttttcaaagaaacaaaacaattatcaatgtttctaatattgtatataactgtgtaaaataaatatttggttatttttgattttccccttatatttatcncccaccattaggggattttaggtgttcntgacnccattgttttnagggnattagggtatncccccntttttnttgttggtttatttccctttggcc

SEQ ID NO: 7347 - DNA, 459 bp, Homo sapiens
  III.975 (H23188)
  misc_feature (379)..(379): n is a, c, g, or t
ttttttttttattttttgagatggagtcttactctgttacccaggctggagtgcagtgctacaatctcggctcactgcaaactctggctcccgggtttacacgattcttgtgtctcagcctcccaaatagctaggagcacaaatgtgcaccaccacacctggctaatttttgtatttttagtggagacggggttttgccatgttggcaaggctggcctcgaactcctgacctcatgtgatctccccgcctctgcctcccaaagtgctgggattacaggtgtgagccaccgcacccagccaacattgaccattttaggccatgattaacgtacagttcagtgggcattagggtacatttcacactattggggaacctttngggcaccatccatcttctaggaactgttttcatctttcccaaactggaaaccctgttacccctttaaacattaacttttc

SEQ ID NO: 7348 - DNA, 463 bp, Homo sapiens
  III.976 (H23303)
  misc_feature (380)..(380): n is a, c, g, or t
  misc_feature (389)..(389): n is a, c, g, or t
  misc_feature (453)..(453): n is a, c, g, or t
  misc_feature (462)..(462): n is a, c, g, or t
gagataaataaaaatgataagtaaccacccaggttactaccacccaactggtaggcagaaatggcccaagtcatgaagtcacatgactaaataaagcttgggaaatactagcataaagttaattcatgtaaacactaatgatcacaggcacagtatccttggcttctgtttcttcgtggcgtgtgtccacatgagccggcctgaatcataaagcccagcctgaaagcagctctctttctcggaagggctgatgtcatttgtgtgtgttttatcagctgctcttcaaggagcataactcctgtggcttctgccattatctttatgccatcagaattctgatttcgggaagacctcaagagagcattgaaatagctcacttnacagtcctnacccctttttggcattcaagggcttcacctgtggctcccttcacctccttgttacccggtactncagccaacnt

SEQ ID NO: 7349 - DNA, 447 bp, Homo sapiens
  III.977 (H40102)
  misc_feature (6)..(6): n is a, c, g, or t
  misc_feature (13)..(13): n is a, c, g, or t
  misc_feature (15)..(15): n is a, c, g, or t
  misc_feature (346)..(346): n is a, c, g, or t
  misc_feature (380)..(380): n is a, c, g, or t
  misc_feature (416)..(416): n is a, c, g, or t
  misc_feature (424)..(424): n is a, c, g, or t
  misc_feature (434)..(434): n is a, c, g, or t
  misc_feature (444)..(444): n is a, c, g, or t
ggggantggatantngttttatttccaaaggtccctgaacacagcaatgacaatgaacagcccagcagaggagtgacataaaccttgaggcatgcagtcttctgggtgctgtggagtcccttggccaaacttgagtgcactggattcgacatacaaagaccttcctgggaaggagaaggagaaaaacaacctccgagaaaatacagacagggtcagtggcaggccagggacagggactatttctatacattctggaagtgtcggcattcatcagcctgcatgtgggctcacttttctttctgggaatagccggagacctctactcctcactccagctttaggggtnccagggaacagagtggggtcttggctcagccgangatgttcttgacttagggggcagagcccgggggcanggttttcntccaaaaccnttaactcggnttc

SEQ ID NO: 7350 - DNA, 396 bp, Homo sapiens
  III.978 (H40171)
  misc_feature (48)..(48): n is a, c, g, or t
  misc_feature (112)..(112): n is a, c, g, or t
  misc_feature (162)..(162): n is a, c, g, or t
  misc_feature (256)..(256): n is a, c, g, or t
  misc_feature (261)..(261): n is a, c, g, or t
  misc_feature (297)..(297): n is a, c, g, or t
  misc_feature (316)..(316): n is a, c, g, or t
  misc_feature (356)..(356): n is a, c, g, or t
  misc_feature (366)..(366): n is a, c, g, or t
gtgggtttccaaggcccccctatggagaatccaaaagtattttccatngccgtgctctttgaatgcagacttctatttccagaagtgacagcacaagtctgagttgctgttnggtctggtgacctcagacacactaatttgaattgaaagctaagagtaaanatttgctgggtacaggcgagtcatactcttgcaagtagttagcaaagggaggcccaaattctcaaggttggttgatgggggaacttgccactangaganggcagagaggtccctagtgggtatatttgctgccangccacttgccaaagaaganggaaccacagaaagagaggacatcatgaccaggagagaantgtgactagncatgctaacctccaggtttttatatatgac

SEQ ID NO: 7351 - DNA, 439 bp, Homo sapiens
  III.979 (H99108)
gtaaattctcaggaaaatgagaaaagtgtgcaaaataaaaacgagtttatgctcttaaagtaaaaaaagacaagtacaattaaataataatatgtgacatttcccttaggaagagctaataaaaagttaagaaaaaagtcccattatttttattaaacaaacaccaataacagcaggattatttctgccactgatttccttcctcttttttgtttcaaaaattattgtttgaataaaagaaaggggaaaaatggtttgcttgcagctatgtatgtaacacaaatgaaggcacaaaatagtaggactccaaggccaatgaggaaggtgtagtgatttgggcatgaacaaaaactgaccctgatatacagttaaagatctggcactattttgcatttataattgcatacctaagtgactaaccaatttgggaacccataaa

SEQ ID NO: 7352 - DNA, 479 bp, Homo sapiens
  III.980 (N24349)
  misc_feature (2)..(2): n is a, c, g, or t
cnagaccaaaggcaaaaaattagaggaattgaatcactctttgacaacaggctatgtacatgtggcacttcagattctgatgaagggagatatattgaatatattcgggtaaagggaagtaactatcatctttctgacaatgatgcttctgatgtggaataattttcagctgctcatatatttagttatttaaacaaactggggggagaagaacagcaattggtgacttcactgccctgcttctaatctggttctttccacagcctagttttgattgacttcatattctagaatacttgattaggaggaagatacaaccatgatgacttttttttttccacaaggaacaatattttaaaaaatatttacagagattttaatctaataattcttaagcaaatgtgtggtaatgccctcctggaatagtcctaaaaatggatattgtaccccgtggccttccgtgggtacccttttttccc

SEQ ID NO: 7353 - DNA, 289 bp, Homo sapiens
  III.981 (N91584)
  misc_feature (215)..(215): n is a, c, g, or t
caaggtcaattttcatgtattaaattgtgtatagtgctttaaagagctatattcctcaaaaataaactatataaaaaagattaatagtcctcatcatttcccctaagttccatgccattctgaagaggcaggtgtcttatgctcagaatcccttcctgtgccacccatcccctgaaaggaacccctgtacactgaccttgtcttccactaccaanacacaaataggtctgactttatccaccattggataccatatatacatatccccattttctatgacctaactttc

SEQ ID NO: 7354 - DNA, 455 bp, Homo sapiens
  III.982 (W20479)
  misc_feature (15)..(15): n is a, c, g, or t
  misc_feature (27)..(27): n is a, c, g, or t
  misc_feature (29)..(29): n is a, c, g, or t
  misc_feature (34)..(34): n is a, c, g, or t
  misc_feature (78)..(78): n is a, c, g, or t
atttcggaacgagcngcgcctcggagntntccanctcgcttcaagatgaagctcgaacatctccttcccagccactgntgccagaaactcattgaagtggacgatgaacgcaaacttcgtactttctatgagaagcgtatggccacagaagttgctgctgacgctctgggtgaagaatggaagggttatgtggtccgaatcagtggtgggaacgacaaacaaggtttccccatgaagcagggtgtcttgacccatggccgtgtccgcctgctactgagtaaggggcattcctgttacagaccaaggagaactggagaaagaaagagaaaatcagttcgtggttgcattgtggatgcaaatctgagcgttctcaacttggttattgtaaaaaaaggagagaaggatattcctggactgactgatactacagtgcctcgccgcctgggcccccaaaa

SEQ ID NO: 7355 - DNA, 363 bp, Homo sapiens
  III.983 (R27785)
  misc_feature (153)..(153): n is a, c, g, or t
  misc_feature (249)..(249): n is a, c, g, or t
  misc_feature (300)..(300): n is a, c, g, or t
  misc_feature (306)..(306): n is a, c, g, or t
  misc_feature (332)..(332): n is a, c, g, or t
caatagcatatttaattttaatctaagaacaatgattaaattcaaaggtcagaaatataaaagattatccaaaaagtttaggatcataactgtttcttaaacaacattggcatgtacttgagctggttctgtggctccaaaggcttgattttnaccttgcacagtttaaataagcaaggaagccttacgcgatgctccacaagcatcacaacatcacaaaatcattctacaagggcatgtctcaggggntttggggggccatgaaggatctttttccaaccaaaagtctgaggccgaggntaggantcacagcttgaagttcctgctctccngacttgtccctcccaaatggggttaccttta

SEQ ID NO: 7356 - DNA, 241 bp, Homo sapiens
  III.984 (R27874)
  misc_feature (194)..(194): n is a, c, g, or t
  misc_feature (224)..(224): n is a, c, g, or t
agattcggcatgaggcaagaactgatgggctgcctgggcgtggcgaaagaggacggcaaagcggacaccaagaaacgccacacccccagaggtcatgctgaaagtacgtctaatagacagccaaggaaacaaggataaatggctcataccccgaaggcagttcctaggacacatggggaaattttccctcaccnaagagcaatttaggaaaacaaaaacagganacacttggtttttgcac

SEQ ID NO: 7357 - DNA, 292 bp, Homo sapiens
  III.985 (T70580)
  misc_feature (178)..(178): n is a, c, g, or t
  misc_feature (278)..(278): n is a, c, g, or t
  misc_feature (286)..(286): n is a, c, g, or t
gcaaagcctgcctttattaaatagagatcgcgttacattccatccaaagaaggaaatccggacgtggtgagggatgcgtccaggtgggagctccgaacgctggtcctgagtgggctctgatgggtgggagggcccaggtcctgcctgcccacccaggccccacatgccagggcgcgtntctgcatggccacccacagctgaaaacaggcgtgggtgatctgaagccctgtctgtgttctactgtggcagaaagttccccagtccttccagccgttttngggaacanggcctt

SEQ ID NO: 7358 - DNA, 392 bp, Homo sapiens
  III.986 (T70843)
  misc_feature (50)..(50): n is a, c, g, or t
  misc_feature (354)..(354): n is a, c, g, or t
  misc_feature (383)..(383): n is a, c, g, or t
aggttgactgtagcagcaccaacacatgtgccctgagcgggctgacccancctgccgccaccgaatccggctcggggactccaaaagccattactacatctcgccatcttcccgggccaggatcaccgcagtgtgcaacttcttcacctacatccgctacatccagcaaggcctggtgcggcaggacggaggcttagggcgcggccagggcctgaaggggagctctgagacagagcaaacacccacccccttgtgggccatcctgtggccttgttcccggtgggcctccctattgggactacttagggaggggttgggcagggcttccataggcacagaatttgccccaaagcnttttttaagatggagttcaaggacccttnccccgtttt

SEQ ID NO: 7359 - DNA, 331 bp, Homo sapiens
  III.987 (H87758)
  misc_feature (21)..(21): n is a, c, g, or t
  misc_feature (45)..(45): n is a, c, g, or t
  misc_feature (47)..(47): n is a, c, g, or t
  misc_feature (109)..(109): n is a, c, g, or t
  misc_feature (115)..(115): n is a, c, g, or t
  misc_feature (117)..(117): n is a, c, g, or t
  misc_feature (146)..(146): n is a, c, g, or t
  misc_feature (148)..(148): n is a, c, g, or t
  misc_feature (151)..(151): n is a, c, g, or t
  misc_feature (166)..(166): n is a, c, g, or t
  misc_feature (169)..(169): n is a, c, g, or t
  misc_feature (237)..(237): n is a, c, g, or t
  misc_feature (269)..(269): n is a, c, g, or t
  misc_feature (272)..(272): n is a, c, g, or t
  misc_feature (295)..(295): n is a, c, g, or t
accatgtcggagcccgggggncggcggcgaggacggctcggcgantntggaagtgtcggccgtgcagaatgtggcggacgtgtcggtgctgcagaagcacctgcgcaantggccngnctgctgctggaggacggcggcgaggcgcncncgnctgggaggcgcgctnggnaggagaagagcgccctgggagcagatgcgcaagttcctttcggacccgcagtccacacggtgctggtngagcgctccacgctcaaagaggacgttcggtnatnaaggagaagaagaaaaagatttnaatttcctataacatcaacattagacatttcattat

SEQ ID NO: 7360 - DNA, 416 bp, Homo sapiens
  III.988 (H87807)
  misc_feature (353)..(353): n is a, c, g, or t
attcggcatgagggaaagatttccctctgaatgatttgctgtccagctccgtggcagacagcaaatcattcagagggaaatctttcattcagaggattgtagtcattcacagtttccaaagcctgttttagacctgtgtcagtgtcaaaactgacggtgggcatggaagcgcttgccatgtttcaagatatccagagtcaggagaacttccgggctctcccgtttctcctggatgcggtataacgcacgttccaagtttagccaaaaactaatttcctgtaaggcagttcctgatgcaggatctcgatccagtttggtcactttttgaatttctcggatccagcggttaactnccagattgtaactgattaaggaaatgttggggtcttcaaccttattcaccaaagtctgtaaat

SEQ ID NO: 7361 - DNA, 224 bp, Homo sapiens
  III.989 (H20276)
  misc_feature (172)..(172): n is a, c, g, or t
  misc_feature (191)..(191): n is a, c, g, or t
  misc_feature (217)..(217): n is a, c, g, or t
aaaaagctacataatatgttatttatttgatattctggagaagtccaaacacacaaagtgattctgtatttgcgagaaatttaaggagatgatgaaaatgggtaaaaaatagatttaaaagggtgatgaaagtattatgtataatattataatggtaaatatgtgatatgantttgttgaaatcaacagantatacagcataaagggttaattccanttcacaa

SEQ ID NO: 7362 - DNA, 389 bp, Homo sapiens
  III.990 (H20348)
  misc_feature (73)..(73): n is a, c, g, or t
tctgcctctcagaggtggccttggtcttcaagtttcagcaattctgggaagccaaggacacctccatctcctnctccctgatctgcaactcatctaagagcagctttctcattggaatgtcttgtgtttaaggaacaagaatccctgtttccggtttgggtgcccaagtgcacctactggatccaacccagggattggagatactttgcagaacacaacatcatctgggcacatgaccagccatggtgtttcactttcacaatttcagcttccttcactgattgcagcataatcgtggttcagcagcctccaaggaccaggggctgatgtggggcggctacaggggagaaatttgaaggagggaagttctttggtgggttgccctccct

SEQ ID NO: 7363 - DNA, 375 bp, Homo sapiens
  III.991 (T85680)
  misc_feature (282)..(282): n is a, c, g, or t
  misc_feature (370)..(370): n is a, c, g, or t
agaggaagagagaaagcatttggttgagtttaatacttagatctttttatcaacatcttgattataacacatgctaataatgtgtagtatccattactagggaccctgtggaactgtgttagagctctagatccattttattctctgtagccactacaaaatttggaaaccggcctatttgagtcttattcataatggtagatctcataaatatctgcctgggttgtatgaggattaagttttttgggcacatctactggataggctgaggagaggaaaatnaatactttatctgtgtctttcggactaagtccatatgtttagtgtgtggaatgttttactttgtatttaataggagggtgtttgtgcngttaa

SEQ ID NO: 7364 - DNA, 309 bp, Homo sapiens
  III.992 (T91151)
  misc_feature (204)..(204): n is a, c, g, or t
  misc_feature (223)..(223): n is a, c, g, or t
  misc_feature (276)..(276): n is a, c, g, or t
  misc_feature (295)..(295): n is a, c, g, or t
  misc_feature (306)..(306): n is a, c, g, or t
gagataccttattacctgagattcttcaactacctgcaaccttctttaaacctaacgcaatctgatataaaagagcctgggatgagacttcgaaggcagaagtctactgtctcattaaaacaaggtcttggctattccatgaaatcaaatcttatttcagtgcatgtgtgttccaataaaactactgtattgcaggaggcaagnctatctgggcctatggggngtaggcttgctgactcctgctggaggcctcccccataaaattaaaaacccccncaagggttaaaattcgggnggggggcccgnatt

SEQ ID NO: 7365 - DNA, 377 bp, Homo sapiens
  III.993 (W31677)
  misc_feature (130)..(130): n is a, c, g, or t
  misc_feature (371)..(371): n is a, c, g, or t
ccgactggggcaggcgggctttattccgggtgctggagagctgtgggccccactcctcccccagaatgccaccgggttgaggggctgagcctcagcaggggtgagcgctcagagcaggaaggggatgatngggcatgcgcaggggcgggtagtcccggaactccttcaggtagctgcggtgcttgcccttggcccagatggtcatctgggtgaagcccaccagggacgaacagggccactgggagacactgcgtcatgatggcgaaaccgatccaaggaccccacctcgtaggtgtagttggggcaggacaccagcaggaagagccacgttgaaggggttcttggtggggtatgggatcttccgcgtcttngaccca

SEQ ID NO: 7366 - DNA, 308 bp, Homo sapiens
  III.994 (W32101)
  misc_feature (212)..(212): n is a, c, g, or t
  misc_feature (298)..(298): n is a, c, g, or t
ctgaagtgggagcctgtgctgtgccgcgcagttaggcagcagcagccgcggacagtagccgccgtgggagggagccatgaagcattacgaggtggagattctggacgcaaagacaagggagaagctgtgtttcttggacaaggtggagccccacgccaccattgcggagatcaagaacctcttcactaagacccatccgcagtggtaccccngcccgccagtccctccgcctggaccccaagggcaagtccctgaaggatgaggatgttctgcagaagctgcccgtgggaccacgggnacaacctgtt

SEQ ID NO: 7367 - DNA, 408 bp, Homo sapiens
  III.995 (H66131)
  misc_feature (3)..(3): n is a, c, g, or t
  misc_feature (404)..(404): n is a, c, g, or t
gtnccccctcaagagcaagtaagctgcagtatatttcactagaatagttccatggtgtagctgagcatttttcctgctgtgaaatggccaaatctgactcttaggctacaccagagggtccataagccactaacgtcttttgacaaactcctttctatctaaagtagtttaagtggattctctggtttgcaactaagaactctgaccaatacaatgagattcaagcatctttaagagcctccttagcacagtttccttctaaaaacatctcaaaactccatttgtatttaggttatacacctaggatataggtgtgtaagtgggtaaggagtgagggcctatcatttctcccaggaatttcaggggataaatgctattggggttcttggacccttactaacaanttct

SEQ ID NO: 7368 - DNA, 461 bp, Homo sapiens
  misc_feature (271)..(271): n is a, c, g or t.
  misc_feature (430)..(430): n is a, c, g or t.
  misc_feature (454)..(454): n is a, c, g or t.
  III.996 (H66546)
caattctgatggccaacaatttcaagacatcacttagaaaataatgtagagatggccagagtcccagagttggccaaagactggacaagtggctaacatccttttctacctatctgcctgtctcatcagggctctcattccagacaacctccaaggggctgctgaatgtaaatttctaaagcacagctctgaaatgttggattaaagatgtttctcagtgacccccaaaacatgagtttcacagcataacccttcatagtctggccaaagnacgcttttgagcctcctatgcgggattctccttctgtgccacttgttgagcctaaacaccattttttcacttgcactgtacactgtacatatactggttcctgttgactgaggtgggtttttcccgcatgttacctggatagggtgcttagtttttctntggaggttcccctcaagtgttcanctttttt

SEQ ID NO: 7369 - DNA, 452 bp, Homo sapiens
  III.997 (N69130)
  misc_feature (407)..(407): n is a, c, g, or t
  misc_feature (425)..(425): n is a, c, g, or t
aaatttctcgacactatccacctacagatggcctgattttttttaaggcaatagtaactctgttggtcgtaactagttttggaatggacatatgaccaatctagtccataagatcagtagttccccacctttttggcaccagggaccagttttcgtggaagacaatttatccacagactgcggggagtaggggagatggttttgggatgaaacggttccacctcagatcatcaggcattagattctcataagggagtgcataacctggatcccttgcatgtgcagttcacaataaggttcacactcctatggagaatctaaccgctggccgctggatctgacaggaggccgaagcttaggcggtaatgctcactgggcccgctgctcacctccctggctggtacgancccatttcccaataggcnaaggactggaagaaccgggagtttggg

SEQ ID NO: 7370 - DNA, 351 bp, Homo sapiens
  III.998 (N90656)
  misc_feature (278)..(278): n is a, c, g, or t
  misc_feature (300)..(300): n is a, c, g, or t
  misc_feature (311)..(311): n is a, c, g, or t
  misc_feature (322)..(322): n is a, c, g, or t
  misc_feature (329)..(329): n is a, c, g, or t
  misc_feature (341)..(341): n is a, c, g, or t
gaaacatggttttatgttgactgtgataattttgtatattaaaactgtcatttaaaaatctgttatcttgttttctgtagacaccggagaagaaacaatcggaatcatccaggggaagaaagagaaaagcagaaaaccagaatgaaagtagtcagggtaagcacataacatcttccttcagagcctagtggacacttaaaattaattgttttaatttttaaccaattaatactctaattgtaaaataatatgaagttgtaaattttggtgtgtgcacnggtagttagtgtagaatgatgngccgcttaggnggcttcaacangtggtcncccatagtggtnccccattggg

SEQ ID NO: 7371 - DNA, 387 bp, Homo sapiens
  III.999 (N95196)
ttttttttccaccaatttccatttatttactcctcaacaatcctgatggcaggtattatgtttcccattttgcagacaggtagactgtgtcacagagcggttaaggcacacaatcaaggtcatacagctaggaaggggatgaactgggattcaaaatcaagtccaaactggttcctgagtattttttatttttttgacacagagtctcattctgtcacccaggctgaagtgccgtggtgttagctcagctcatgacaacctctgcctcccgagttcaagcgattctcctgcctcagcctcccgaggagctaggaccacagacgcgtgccaccatgtctggctaatttttaaatatttttaatggatatggggttcacatgttggcag

SEQ ID NO: 7372 - DNA, 136 bp, Homo sapiens
  III.1000 (W24597)
  misc_feature (2)..(2): n is a, c, g, or t
  misc_feature (37)..(37): n is a, c, g, or t
  misc_feature (125)..(125): n is a, c, g, or t
cnaagtgaaaggcgccaggtgacagtcctggcctctnatgtaacccagcgccccgagtcccgacacagattcctggatctcagccccatagcagctatgatcccgctgctgctggcagcatcgcntgtgcgtcccc

SEQ ID NO: 7373 - DNA, 306 bp, Homo sapiens
  III.1001 (R07511)
  misc_feature (293)..(293): n is a, c, g, or t
taggatacatcaatcattctttttcctcttaaaaacagaaattggtcttagtttctcattttaaatgtgctttcttcctttgatttatgtaaaacttccaaagatataaacatctttatatacaaagaagtagtatggcagtacatgtgactttatacattttacatttgtaataaaaaaataatgaaaagtatgctttgaacctgttggtaaattctaaaaaggaactaatttgaaagatttataaatcaaatttgttaagtggccaaactattttttatttgaaaataacnaaaattctaactc

SEQ ID NO: 7374 - DNA, 356 bp, Homo sapiens
  III.1002 (R07564)
tgaagcaactccaaggacacagttcacagaaatttggttctcagccccaaaatactgattgaattggagacaattacaaggactctctggccaaaaacccttgaagaggccccgtgaaggaggcagtgaggagcttttgattgctgacctgtgtcgtaccaccccagaatgtgcactgggggctgtgcagaatgcctggggggggaccctcattccccttgctttttttggcttcctgggctaacatcctgttattttttcctgggagggaaaagtgataggatggacaacggaccaccttttcccaaggagatctggttttttcggagggaatatttagggaagcggtgtctttg

SEQ ID NO: 7375 - DNA, 586 bp, Homo sapiens
  III.1003 (T67475)
  misc_feature (6)..(6): n is a, c, g, or t
  misc_feature (528)..(528): n is a, c, g, or t
  misc_feature (540)..(540): n is a, c, g, or t
  misc_feature (584)..(584): n is a, c, g, or t
ttcatnagtagagccatcaccacatctggagacgtttccagggtcccatctgcagcagcatacactatggcgaagcgtaggtaccaatccacagcacatccagaactctgacaggatgatctgactcataaaacggaggacaaggaatgacttttttttcctgcaaagtaggaagatactggaccacagttccattctgttttcccactgccagctgctttcctttggggctccagcacacagaggttactgctaccgtgggaaggaagagttgcacatactttcactgtttccgtgacttgcagggacagcaatactaccatcagccagacaaactgccaccatgggagggggacagtggggggttccactttcatattcaattcaccatggcctccctggcatcttttccaaaagctttatggataggggcaaatgggggcgtttttttgctggttttaggccttcattttgaggaatgtggcggaacattcaaaaaaaggcaattatggggaccatatttcactngggacattcatngcacggcggaggagttttgaggggttattcacagcttcagggcngg

SEQ ID NO: 7376 - DNA, 390 bp, Homo sapiens
  III.1004 (T69508)
  misc_feature (198)..(198): n is a, c, g, or t
  misc_feature (309)..(309): n is a, c, g, or t
  misc_feature (314)..(314): n is a, c, g, or t
  misc_feature (340)..(340): n is a, c, g, or t
  misc_feature (354)..(354): n is a, c, g, or t
  misc_feature (376)..(376): n is a, c, g, or t
  misc_feature (382)..(382): n is a, c, g, or t
  misc_feature (389)..(389): n is a, c, g, or t
ccagtggtatgcagatttttcctactaaaaatcttcttattcaaaataaacccggagatgatcccaacaaaatagttgataaagtccaaggcttgctagttcctatgaaattcccaatccatcacctgggccttgagctgtgataacctcacactctctgcgtgcatgatgtccagtgaatatgggttccattattgnctttttttgatgttcggcacattctcaaatgagggctaaaacaggcaaaaacggcccattttgcctattcataaggctttttggaaaggatggcggggagggcatggggtngattngatatggaaggtgggggaacccccanttgtcccccttccnggggtggggcagttttgttctngggccngaagggnt

SEQ ID NO: 7377 - DNA, 108 bp, Homo sapiens
  III.1005 (H29307)
  misc_feature (15)..(15): n is a, c, g, or t
  misc_feature (17)..(17): n is a, c, g, or t
  misc_feature (42)..(42): n is a, c, g, or t
  misc_feature (93)..(93): n is a, c, g, or t
ttttttttttgagtntngccctggctattttattccatgtgnctggccctggggacccagctgggccaggtcgacgcccctggggagacagtntggctcggccagcct

SEQ ID NO: 7378 - DNA, 438 bp, Homo sapiens
  misc_feature (206)..(206): n is a, c, g or t.
  misc_feature (334)..(334): n is a, c, g or t.
  misc_feature (366)..(366): n is a, c, g or t.
  misc_feature (408)..(408): n is a, c, g or t.
  misc_feature (425)..(425): n is a, c, g or t.
  misc_feature (431)..(431): n is a, c, g or t.
  III.1006 (H29399)
tctccccacgcccaccgcccgctttgagcaaaggaccttcagcgtcatcaagatcttccctgacctcagcagcaacgacatgctcctcttcatcgtgaagggcatcaacttgcccacacccccaggactgtcccctggcgatctggatgtctttgttcggtttgacttcccctatcccaacgtggaagaagctcagaaagacaagnccagtgtgatcaagaacacagactcccctgagttcaaggagcagttcaaactctgcatcaaccgcagccaccgtggcttccgaagggccatccagaccaagggcatcaagttcgaagtggtttcacanggggggggctgttcaagatttaccgggtgttnggggacagcccagttgaagttgggttgcattgggagatagcntttgaagttccgggagntctttnaggttct

SEQ ID NO: 7379 - DNA, 427 bp, Homo sapiens
  III.1007 (H64619)
  misc_feature (400)..(400): n is a, c, g, or t
tcacttcccgaggccagaagtccaaagtcagggtgtcagcaggattggttacttcttggggactcctggggagagcctggtccgggctccggggaagagtctggtctgtgtccctcgctaagcttctgctggctgttggcagtccttggcgttcttttgctggaagctgcttgactccagtctctgcttccattgtcacatggccattttgcttttgtgcatctgtgtcttaacatggcattcttctctctgtgcctctttgtctcttcttttcttataagaacaccagtcatattgggattaaggggcccacccctctccagcatgccctcatcttaaacttaatgacatctgcaatgatcctatttctaaataaagtcacattctgagggtctagggnagggacataaattttggggggggatgc

SEQ ID NO: 7380 - DNA, 445 bp, Homo sapiens
  III.1008 (H64620)
  misc_feature (321)..(321): n is a, c, g, or t
  misc_feature (428)..(428): n is a, c, g, or t
gtgtcatagttgtttattattcattattgttgttaatctcttattgtgcctaatttataaataaaactttatcacaggtatgtatgtataggaaaaaacatactatatatagggttcagtactaaccgacatctctggcatctactgggggtcttgaaacgtatcccccgcgaagaagggaggactactgtatagctccaataacacagcctactttaaattgaaagtcatgtagggtatactggggttgcatagcatccccccaaaatttatgtccttcctaggaacctcaggaatgtgactttatttaggaaatagggntccattgcaggatgtcattaggttagggtgaggggcatgctgggagagggggtgggggccccttaatcccaattatggactggggggtttctttataagggaaaggnaggaggaccaaaggggg

SEQ ID NO: 7381 - DNA, 214 bp, Homo sapiens
  III.1009 (N80094)
  misc_feature (26)..(26): n is a, c, g, or t
  misc_feature (38)..(38): n is a, c, g, or t
  misc_feature (48)..(48): n is a, c, g, or t
  misc_feature (210)..(210): n is a, c, g, or t
ggagcttgggtaagtggctcagctcntctgagcttcanttcttcatcngcacaagggaacaatagtaccggcccccaggtctcttcacagcagcattaaataaaaatggtacactcaccccaaaaaaaaaaaaaaaaaaaaaaaaaaaaaaaaaaaaaaaaaaaaaaaaaaaaaaaaaaaaaaaaaaaaaaaaaaaaaaaaaaaaaaaangggg

SEQ ID NO: 7382 - DNA, 218 bp, Homo sapiens
  III.1010 (N93212)
  misc_feature (91)..(91): n is a, c, g, or t
  misc_feature (149)..(149): n is a, c, g, or t
  misc_feature (187)..(187): n is a, c, g, or t
  misc_feature (207)..(207): n is a, c, g, or t
tttttttaatgtttattcattaaatatttattgtgtactataaattgacactacactagaattaggcacacattttagaaagatatatttnctatctagaagacaccacagtatcgtaggagatctttataatttacaaatcactgatncattacatagtaaaaatgtatacatacgattgctttanccagaacacagttcccaatnaacactgatgg

SEQ ID NO: 7383 - DNA, 407 bp, Homo sapiens
  III.1011 (W38997)
  misc_feature (1)..(1): n is a, c, g, or t
  misc_feature (4)..(4): n is a, c, g, or t
ngtntggtcgattataagtgtgagccactgtgcctggcctgtaacctttgttttgacaaatggatagtattaaaggaaattttcttgatacgcagtttagtctgttcttggacaagcaatgcagtaggtttgactttgagtgctttattactaacactttctggccaggccacagttaaggtccggttggaaaacacttgttgaggtttgaattgtaacctttttactggatgatagggtattttttagcccatagataaacttgcttaaaaaaccaagaaagacactgaaatctcagtctatacatagtttcatcagtgtttattgggaactgtgttctggataaagcaatccgtatgtatacatttttattatgtaatgtataagtgatttgtaaattataaaga

SEQ ID NO: 7384 - DNA, 417 bp, Homo sapiens
  III.1012 (AA018922)
aagtgggagcttttggtgtaaactttcctgcagccgttaaagtggcaccggtgcaccctcctcctgccgtcgggggaggcatcgcatttcccttgtcacctggcttccccgaagtcccgctgcgcaccttccctggcgagggcagctccccgggcacgcaaccccacagttgagaaggttccctgctcagttccggagaagatggaggcgtggaggtgacagaggagctcaattttcccgagctgaccaaaacttcgccaatggggtcggaggtaaacttggccgttgggaagaaagttcctcggagctgtcagaggattcgctgctgacatctgagttcaggctgttggtctctaagttgtaacaaaagctcgggctgatgagagtgtcctctggaggactggaagatatcttcaa

SEQ ID NO: 7385 - DNA, 268 bp, Homo sapiens
  III.1013 (AA018957)
ccttatttggctgctgatgagaatttcaaaaggaagtctcctttggcattgcgtgaaagaaatcagagtgatgactcatgcagttgtactcttggccagtagataaagttcttgttcattgtgggactcccagcagggccgtggagtaatttccccttgcacccttcacaatagcagatggccatgctggaattatttctgcactcctgttgttgaagttcccttgtttttcccctgaccaactgtagaaagtaattaaaagttcctg

SEQ ID NO: 7386 - DNA, 309 bp, Homo sapiens
  III.1014 (R76359)
  misc_feature (18)..(18): n is a, c, g, or t
  misc_feature (149)..(149): n is a, c, g, or t
  misc_feature (205)..(205): n is a, c, g, or t
  misc_feature (261)..(261): n is a, c, g, or t
  misc_feature (274)..(274): n is a, c, g, or t
  misc_feature (285)..(285): n is a, c, g, or t
  misc_feature (294)..(294): n is a, c, g, or t
  misc_feature (300)..(300): n is a, c, g, or t
cagattctggggcctcanaaacgtcggttgcattgaactcctacccccagtagctcaatgcaaccgacgtttctgagcccagaatctgattccagatcccggacatataaaccacgccaagaagacaggggctgtctctagcacattgnaccgagggagtccggggccccttcccagacggaactgcaaaagggagggctaacgncatggggggcccgtgggttatttttatattccgacaaagtgcacggcagcctgaanttggattgggatnaaaaagacgtnttttggganggggtntaaggggga

SEQ ID NO: 7387 - DNA, 436 bp, Homo sapiens
  III.1015 (R76684)
  misc_feature (283)..(283): n is a, c, g, or t
  misc_feature (288)..(288): n is a, c, g, or t
  misc_feature (330)..(330): n is a, c, g, or t
  misc_feature (405)..(405): n is a, c, g, or t
  misc_feature (415)..(415): n is a, c, g, or t
cccggcctcggtggcagtggactcgggctctgaactcaacagccgctcctccacgctctcctccagctccatgtccttgtcgcccaaactctgcgcggagaaagaggcggccaccagcgaactgcagagcatccagcggttggttagcggcttggaagccaagccggacaggtcccgcagcggttccccgtagacccgtcccagacacgtcttttcattccagtccagttcaggctgccgtgcactttgtcggatataaaataaaccacgggcccgccatggntttancctttccttttgcagttgcgtctgggaaggggccccggactncctcgagagaatgtgctagagacagcccctgtcttcttgggcgtggtttatatgtccgggatctggatcagattntggggggttnagaaacgtcggtttgcattga

SEQ ID NO: 7388 - DNA, 351 bp, Homo sapiens
  III.1016 (H87459)
  misc_feature (13)..(13): n is a, c, g, or t
  misc_feature (22)..(22): n is a, c, g, or t
  misc_feature (75)..(75): n is a, c, g, or t
  misc_feature (112)..(112): n is a, c, g, or t
  misc_feature (317)..(317): n is a, c, g, or t
caatctgcttccnctaatatanccccagtctaaggcatttaaaattaaacagctcttcaacgccccaagttattncatcaggctaagaacttctccgagaaacgcacaaganggcaggcaaacaggtgggtaggtgagaggtcacggggctccatctgcaagctccatctacaaggcatcaatctgcgttgtggcatcaacgttaaaatgttctacagcttagggatcttcttgaagcaaggttccaagcacaaaactaggtatgaccggaggcttcaatttagaagatgcagcatctgaaaacctttaccccgggnaaggaggggtgcctgctggcatttcatggggctc

SEQ ID NO: 7389 - DNA, 291 bp, Homo sapiens
  III.1017 (H87567)
  misc_feature (158)..(158): n is a, c, g, or t
  misc_feature (204)..(204): n is a, c, g, or t
catctggtaagcccgggacagtaagccgagtggctgttggagtcggtattgttggtaatggtggaggaagagaggccttcccgctgaggctggggtggggcggatcggtgttgcttgcctgcagagagggtggggagtgaatgtgcacccttgggtgngcctgcagccatccagctgaaagttacaaaaatgcttcatggaccntggtttgttactatagtgttcctcatggcgagcagatggaaccgggagacatggagtccctggccagtgtgagtcctagcattgcag

SEQ ID NO: 7390 - DNA, 548 bp, Homo sapiens
  III.1018 (AI668609)
ttttttataggaaaagaaaaatgaatttactttagttacccggtcttgtagagagtctctgctgtgtcgctcacctcagctagccacatatggaagtaaagacttggactagcagtccatgttttgtataacaacagataacagctgaagtttcagtttccatccattttagggttctgggctgcactcctgcacaaccttggattaacttggaaacatgcgctgtctacatcaaagggtagagactctgaagtgtaggaattcatattcagcaccattcaccagagctgccaagatgactggcatgacgctcacaaaccttgcttggcacacagtgatgaaggagggtttcggagccaagagggagatgatatttatgtgttcaaatcagaactgatgtggggcatgcttagaacgtgccacctggagaaacatcatctgtgtctggggctcttccttggtctgaagctggtaatcgatcctgacagtgatttcgttaggggactggctggcaggcaaatactgacatatagtctctccattttaat

SEQ ID NO: 7391 - DNA, 473 bp, Homo sapiens
  III.1019 (AI733542)
aattccttcagctcaaaatattcaatatgctggggtgccatattttcaagtagcatgtcctgaaccctgtgatagttataaaaaagaataaaagattgagatgtatatttcttggcagggacagtatgagcaaaaccaagagctggccatgagtgtgggacacttagggagttctttggagagcaaatagtaaattcaatggctgttgagtcagtgaggagaatggattgactcaggagcaaatggtttcactttaattggacagtctatcccacccttccaggactgtttcagtatgaaagaattttattgtcatgtgaagagtgaaaacaaactgaattttcaattaaaatggagagactatatgtcagtatttgcctgccagccagtcccctaacgaaatcactgtcaggatcgattaccagcttcagaccaaggaagagccccagacacagatgatgtttctccaggtg

SEQ ID NO: 7392 - DNA, 419 bp, Homo sapiens
  III.1020 (H26352)
  misc_feature (23)..(23): n is a, c, g, or t
  misc_feature (54)..(54): n is a, c, g, or t
  misc_feature (141)..(141): n is a, c, g, or t
  misc_feature (164)..(164): n is a, c, g, or t
  misc_feature (224)..(224): n is a, c, g, or t
  misc_feature (290)..(290): n is a, c, g, or t
  misc_feature (324)..(324): n is a, c, g, or t
  misc_feature (339)..(339): n is a, c, g, or t
  misc_feature (344)..(344): n is a, c, g, or t
  misc_feature (374)..(374): n is a, c, g, or t
  misc_feature (380)..(380): n is a, c, g, or t
  misc_feature (396)..(396): n is a, c, g, or t
  misc_feature (404)..(404): n is a, c, g, or t
aaaatattcaatatgctggggtnccatattttcaagtagcatgtcctgaacccngtgatagttataaaaaagaataaaagattgagatgtatatttcttggcagggacagtatgagcaaaaccaagagctggccatgagtntgggacacttagggagttctttngagagcaaatagtaaattcaatggctgttgagtcagtgaggagaatggattgactcaggngcaaatggtttcactttaattggacagtctatcccacccttccagggactgtttcagtatgaaagnattttattgtcatgtgaagagtgaaaacaaactngaattttccaattanaaatnggagagactatgatgtccagtattttgccntgcccngcccagtcccccttanccgatatncacctgttccaggga

SEQ ID NO: 7393 - DNA, 360 bp, Homo sapiens
  III.1021 (H26423)
  misc_feature (3)..(3): n is a, c, g, or t
  misc_feature (8)..(8): n is a, c, g, or t
  misc_feature (15)..(15): n is a, c, g, or t
  misc_feature (16)..(16): n is a, c, g, or t
  misc_feature (19)..(19): n is a, c, g, or t
  misc_feature (42)..(42): n is a, c, g, or t
  misc_feature (185)..(185): n is a, c, g, or t
  misc_feature (249)..(249): n is a, c, g, or t
  misc_feature (255)..(255): n is a, c, g, or t
  misc_feature (305)..(305): n is a, c, g, or t
  misc_feature (332)..(332): n is a, c, g, or t
tcntgtantgaaaanngantttactttaattacccggtcttntagagagtctctgctgtgtcgctcacctcagctagccacatatggaagtaaagacttggactagcagtccatgttttgtataacaacagataacagctgaagtttcagtttccatccattttagggttctgggctgcactccngcacaaccttggattaacttggaaacatgcgctgtctacatcaaagggtagagactctgaagtntagganttcatattcagcaccattcaccagagctgccaagatgactggcatgacgntcacaaaccttgcttggcacacagtgntgaagggagggtttcggagccaaggagg

SEQ ID NO: 7394 - DNA, 421 bp, Homo sapiens
  III.1022 (R54764)
  misc_feature (328)..(328): n is a, c, g, or t
  misc_feature (388)..(388): n is a, c, g, or t
  misc_feature (396)..(396): n is a, c, g, or t
aggtttctggtgctattctgccaagttatcgagctcctcctcatgtttcaacattccatcttcccgtttctatcctcgactccaaagtaagccttcttagctccaatcagggatgaggggctcaacctcttctgtcctcaaagaggccaaacgcagtgcgcacagtcggtagccttcacttttagatgtcctattcatgtaaaaaagaaggtgcccccaccagggtttacatcagcaataagcaattctaatgcaacgatggtgtccacattttaccccagtgtgtgcccatgtatgcctttgtgcccgtgtaattattgttaggcgncccttttcacttaggggggtgatggataaactgtgggccaccttggatttacaacccacntttcccgntttggggggggtttccaagtaacag

SEQ ID NO: 7395 - DNA, 329 bp, Homo sapiens
  III.1023 (R54952)
  misc_feature (122)..(122): n is a, c, g, or t
  misc_feature (179)..(179): n is a, c, g, or t
  misc_feature (185)..(185): n is a, c, g, or t
  misc_feature (209)..(209): n is a, c, g, or t
  misc_feature (215)..(215): n is a, c, g, or t
  misc_feature (232)..(232): n is a, c, g, or t
  misc_feature (277)..(277): n is a, c, g, or t
  misc_feature (284)..(284): n is a, c, g, or t
  misc_feature (300)..(300): n is a, c, g, or t
catgatgaagcttgaaaccagtcaagcactttttttattttaaaaaaaaaaaaggaaagaagtcgaatggtaaagtatatagcctacacatgctacagctagttgttctcacccctcccctnacatcctatatactcatttatttaatgtgttaaaggaaacaaaaaccaccaccggantgccantttgccaagagggtagagtaagtntggggntctccagcgtcatcctntgagcagacacgaggtgggtggggcagtgccctgttttcctgggngggaggntaaggaaatgggcctnttacttgggaaggctccccaaaggcaggg

SEQ ID NO: 7396 - DNA, 284 bp, Homo sapiens
  III.1024 (H94043)
  misc_feature (254)..(254): n is a, c, g, or t
acatgtcagtcagagatctgcttcatccttcagtttcatagatagaattattttaaacacttgaaatctaggaagcaaacctgacaaggcttcagaatttaaaaagcaacagctcactgtgtgtggtgtgctatcaggttgaaatctatgttgtcctgatgttttcagagttatttcaaaagacaaaaatacagttgccactgatttatcaaaaacatttggctgccttttgtcatcagctacaaaattacagngctttataaaataaacatctaggccccggg

SEQ ID NO: 7397 - DNA, 340 bp, Homo sapiens
  III.1025 (AA017405)
  misc_feature (321)..(321): n is a, c, g, or t
gacagagagagactctgtctaaaacaaaacaaaacaaaacaaaatgtaaaaaaacaacaaccgcccccctccccccacagaattggtggtatgaagctaaagcagtacttccaaataaattttagcattaaatgtttttattagagaaaaaaaggtctaaaaaaaaaatcagtgatctaatcttccaccttaaaacaaaaactagaaaaagagcaattgaacacaaaataagtagatgtagaaacaattaagaatgtaaggaaatgaaagtgaaaataaatgaaatagaacacagaaaaataatagagaaaggtaaataanaccaaaagctgttctttga

SEQ ID NO: 7398 - DNA, 431 bp, Homo sapiens
  III.1026 (AA017406)
aacacttacgtttaccagtttattatataataaaggatatgataaggatacagatggacagccagaggaagaggtacatagggcaaggtccgaaagcagaacaggcataggaacttctgtccctgtggagttggggtgcaccaccctcccatcacgcggatgtgttcacccacccagaagttctccaaaccctgtacttcagggacttttatggaggcttcatcatgtaggcatgattcattattaactcaatctccagaagttccaagcttctaatcatggcttggtcttcctcgagaacagcccccatctaagagcccaccgagagtcattttattagaacaaagatgctcctagtaccctttcacttcagaaattacaagggttttaggagctccgtgtcaggaaccaggggtcagagaccagtatat

SEQ ID NO: 7399 - DNA, 371 bp, Homo sapiens
  III.1027 (R24801)
  misc_feature (4)..(4): n is a, c, g, or t
  misc_feature (6)..(6): n is a, c, g, or t
  misc_feature (255)..(255): n is a, c, g, or t
  misc_feature (360)..(360): n is a, c, g, or t
gatnancacacacagacacacaagcagacacacacatatatacatacgcaattgtatatatatgtgaactttctcagcatatatataaaatacacgtgtatatgaggatgtatgtgtatatgtttatacacacaggagtcagtgcccatgtgtatggaagacaaatacacatacatatatacattttgcagctatggacaatttaccacaggatgcatattaaagaaagtcatagtttttttcttttttaattgnaaagggacaagtatccatctaaatattatgccttgaggaatgagggcgtgaaacacaatatcatccccaaatgtgtcttgtatttatccatagttaggtgttttngttttaaaatt

SEQ ID NO: 7400 - DNA, 393 bp, Homo sapiens
  III.1028 (R45530)
  misc_feature (338)..(338): n is a, c, g, or t
  misc_feature (344)..(344): n is a, c, g, or t
  misc_feature (357)..(357): n is a, c, g, or t
  misc_feature (363)..(363): n is a, c, g, or t
tttttctttagaaagatctcatctaaatagtaagttaaggttgcgtctatgaaaccggtgcaccttgtcttgtttctacgagctttaaaaagtccaaatactgatgaggctgtggatcagaaggaaccaacagtgactgtgtttgctgtcaggttgccctcctttgcctcagagaacggtcatgggtcgttgggtgacgcgtgggtgtgtacgggtcatgttcctgcagaatcctagtcagtctagggagtagttgggatgtgcttatgaaatatgtcagatacagaaataaagggcatgagggatgattcttagttttctgaaatttgaaccagtangaggtntttttggccttcnatcctnaattttccagggttaccgggaaggtgggtt

SEQ ID NO: 7401 - DNA, 489 bp, Homo sapiens
  III.1029 (R71111)
  misc_feature (1)..(1): n is a, c, g, or t
  misc_feature (20)..(20): n is a, c, g, or t
  misc_feature (33)..(33): n is a, c, g, or t
  misc_feature (192)..(192): n is a, c, g, or t
  misc_feature (357)..(357): n is a, c, g, or t
  misc_feature (430)..(430): n is a, c, g, or t
  misc_feature (436)..(436): n is a, c, g, or t
  misc_feature (446)..(446): n is a, c, g, or t
nattcggcatgaggccagtncgcgcggagggangcgctttgggtgcgttcaagattcagcttcacccgtaacccaccgccatggccgaggaaggcattgctgctggaggtgtaatggacgttaatactgctttacaagaggttctgaagactgccctcatccacgatggcctagcacgtggaattcgcgaantggccaaagccttagacaagcgccaagcccatctttgtgtgcttgcatccaactgtgatgagcctatgtatgtcaagttggtggaggccctttgtgctgaacaccaaatcaacctaattaaggttgatgacaacaagaaactaggagaatgggtaggcctttgtnaaaattgacagagaggggaaaccccgttaaagtggttggttgcagttgttgttagtagtttaaggattttggncaaggngttttcaggncaaggatgtcctttgaaggagtattttcaaatgcaagaattga

SEQ ID NO: 7402 - DNA, 442 bp, Homo sapiens
  III.1030 (R71618)
  misc_feature (14)..(14): n is a, c, g, or t
  misc_feature (318)..(318): n is a, c, g, or t
  misc_feature (422)..(422): n is a, c, g, or t
tgagccaaagtagntatttcttcatttcttgcatttgaaatactcttcaatgacatccttggcctgagactccttgccatagtccttaactactacacaactgcaaccaaccactttacggggtttcccctctctgtcaattttacaaaggcctacccattctcctagtttcttgttgtcatcaaccttaattaggttgatttggtgttcagcacaaagggcctccaccaacttgacatacataggctcatcacagttggatgcaagcacacaaagatgggcttggcgcttgtctaagggctttggcagcttcgcganattccacgtgctaggccatcgtgggatgagggcagtcttcagaacctcttgtaaagcagtattaacgtccattacacctccagcagcaatgccttcctcggccngggcggtggggttacgggtg

SEQ ID NO: 7403 - DNA, 370 bp, Homo sapiens
  III.1031 (H69697)
  misc_feature (2)..(2): n is a, c, g, or t
  misc_feature (5)..(5): n is a, c, g, or t
  misc_feature (7)..(7): n is a, c, g, or t
  misc_feature (52)..(52): n is a, c, g, or t
  misc_feature (53)..(53): n is a, c, g, or t
  misc_feature (55)..(55): n is a, c, g, or t
  misc_feature (158)..(158): n is a, c, g, or t
  misc_feature (278)..(278): n is a, c, g, or t
antcntnaggaagacaaactttataggaagctgcaaaaaaaatgagcagagnngnatatttgtggtaagggatacaaagaacatacaattgtgtacttgagaggtttcatggaacattatgacccatccaatgaagacatcaacattaacaacaaaanttaattgaggaagagcagtatgaaaatattctaatgcagtgctgtccaacagaactttctgtgggtgatgggaaatgttccatatctttgtgctaatacagaatctaccagccacatgantactcaaaatgtgggctaatgcaattgaaggaaatggaatttttcatacaatttactttaaatttaaatagtcctatgggactggtgggctc

SEQ ID NO: 7404 - DNA, 406 bp, Homo sapiens
  III.1032 (H70116)
gcatcgtccccggggctgggctgcagaagccgcacctggagaagctgaccctgggcatcacgcgcatcctagaatcttccccaggtgtgactgaggtgaccatcatagaaaagcctcctgctgaacgtcatatgatttcttcctgggaacaaaagaataactgtgtgatgcctgaagatgtgaagaacttttacctgatgaccaatggcttccacatgacatggagtgtgaagctggatgccagtgatgatcagccagagaagcctcactttgactctcgcagtgtgatatttgagctggattcatggcaatggcagtggggaaagtttgccttgttttacaaaagtggggaaaccagcattagcagaaggacactggaggttcttgtttcccgggacagagcctt

SEQ ID NO: 7405 - DNA, 523 bp, Homo sapiens
  III.1033 (H92027)
  misc_feature (15)..(15): n is a, c, g, or t
  misc_feature (384)..(384): n is a, c, g, or t
  misc_feature (413)..(413): n is a, c, g, or t
  misc_feature (429)..(429): n is a, c, g, or t
  misc_feature (456)..(456): n is a, c, g, or t
  misc_feature (467)..(467): n is a, c, g, or t
  misc_feature (477)..(477): n is a, c, g, or t
  misc_feature (493)..(493): n is a, c, g, or t
  misc_feature (507)..(507): n is a, c, g, or t
  misc_feature (515)..(515): n is a, c, g, or t
atttcggcacaggtnaaacacttgaatttatattgtatggtagtatacttggtaagataaaattccacaaaaatagggatggtgcagcatatgcaatttccattcctattataattgacacagtacattaacaatccatgccaacggtgctaatacgataggctgaatgtctgaggctaccaggtttatcacataaaaaacattcagtaaaatagtaagtttctcttttcttcaggtggcattttcctacacctccaaatgaggaatggattttctttaatgtaagaagaatcatttttctagaggttgggctttcaattctgtaggcatacttgggaggaaactggcatttatcctaaaagggcagtccaatgggtggtttgntttttatcccaaatggtccaaaattaacntactgggaggaagttnggtaaatttgggccttggggaaaattnccacacgggcnttggcaacanggcagtttttaagggnaaaattattggaanggttcggnccccatcc

SEQ ID NO: 7406 - DNA, 385 bp, Homo sapiens
  III.1034 (H92028)
  misc_feature (10)..(10): n is a, c, g, or t
  misc_feature (36)..(36): n is a, c, g, or t
  misc_feature (38)..(38): n is a, c, g, or t
  misc_feature (75)..(75): n is a, c, g, or t
  misc_feature (92)..(92): n is a, c, g, or t
  misc_feature (146)..(146): n is a, c, g, or t
  misc_feature (158)..(158): n is a, c, g, or t
  misc_feature (171)..(171): n is a, c, g, or t
  misc_feature (183)..(183): n is a, c, g, or t
  misc_feature (246)..(246): n is a, c, g, or t
  misc_feature (251)..(251): n is a, c, g, or t
  misc_feature (289)..(289): n is a, c, g, or t
  misc_feature (301)..(301): n is a, c, g, or t
  misc_feature (317)..(317): n is a, c, g, or t
  misc_feature (344)..(344): n is a, c, g, or t
  misc_feature (379)..(379): n is a, c, g, or t
aaaaaaatgngaaaacactttaatataacttatacngnttctacaaattagatgtaagaaataatttcatttagncatagtacaataaattngattaacaaaatcccaatttacaaaacagaagtaaataaatgcagaaatatatncattatcaaatnataaaataaaagnaacagttattgntgagatagcatcagtttattcttcatttcagataatagagtcaattattttggtatacttagnaatgnttttggcaagtattaaaataatggaacgttggagattnaaacacaatggncaggtaaaccattggnaatttcaaattcactttatacagccancatggaatcccataagtggaatggttaatcatggnaaaaaa

SEQ ID NO: 7407 - DNA, 418 bp, Homo sapiens
  III.1035 (H17469)
  misc_feature (211)..(211): n is a, c, g, or t
  misc_feature (306)..(306): n is a, c, g, or t
  misc_feature (348)..(348): n is a, c, g, or t
  misc_feature (393)..(393): n is a, c, g, or t
  misc_feature (411)..(411): n is a, c, g, or t
ttttttttgccaaagagatgtcatgctttatatatttataataggaaggtgtgtgtatgtataaatatgtacatggaaatatgtacacaggttttgactgtcatatatagtatttttcattgcatgtacagtaatgctgcttgagtgaagggttttaaagctggcagaaggctggagaatctggaaccctgcttggcccctagtagggcgnctgtgggagaccacctaaggcagctcccaggggaaggtctgccggggctggggctgggtcctgagggtgttgggggaaagctgagctgcaggcgngctggggcccagggctgcagggttccggccagggcaagtctnggaagcgtccctacgtccccgacattaggacgttttcttccaagnaaggggtttcagtcattnggaatag

SEQ ID NO: 7408 - DNA, 466 bp, Homo sapiens
  III.1036 (H17575)
  misc_feature (435)..(435): n is a, c, g, or t
cagtgcaagtcatctggatttgcatttagctagggaaactcggccctcaaaccctctccctctctgcctgaatttgccaaaatgccaaccatccgggcaggtgtggatgccacagtccatccccattgcatttcacccccacatggacagaggcacacactcgcacacattcccagcacctttgactgctgggggatgcaggccagggtctgcctgggagcctcagggttgggacttatctccaaaggagcccacaccccctcttccagggatgggcactggctggcagcacttttttccctcatcacatccctgacccctgcccagcccacatgcacatgctgtttcctgtcttccaggggccctagctgtgggatctttttcctcccatggcattcctaggggtgaatggggttcagcaccaaactggggttnttgcccatttccccacaaaccccagtttggg

SEQ ID NO: 7409 - DNA, 408 bp, Homo sapiens
  III.1037 (H94031)
  misc_feature (369)..(369): n is a, c, g, or t
tcaagtgtaaaattctgaaacagaggctttaaaatttaaaacctcagcaaaataatccatgaatttactgattcttctgtatcgtgtgtagttaccattatgtaactatacacacatacagctatggatatagttgtataatgaaaattatctgcaaacacctaaattaaagagaaaaaaaagtagtttgtaaactcatttgtgatctactgaaaagaggttatattaaagcaaattaaaatattttccttctctgtcctctgaaatgactgcagtaagatactccttagttatcccattttaagggtgggttgggagggccctttttaatttaattgacccccccgaggtgggtccttttggtttttnaaaccagggggggcaaccagctgggatcctccaggtaca

SEQ ID NO: 7410 - DNA, 638 bp, Homo sapiens
  III.1038 (N32875)
  misc_feature (558)..(558): n is a, c, g, or t
  misc_feature (564)..(564): n is a, c, g, or t
  misc_feature (591)..(591): n is a, c, g, or t
  misc_feature (608)..(608): n is a, c, g, or t
ccttccagctctagttttctactgtgttctttcctcttgagaagttacagctcatcatgggcccttaataacagaattcaacagaaggcatcatctgaaaacaaagtcaattcagaaactgttgttgcaagaaggcaaacagaaaaacggcaccatgtcccactggaatctctttcagcgatggagagttttgttttctggtaaaaaatatagaaatagtggttgtccttgaggggacttgtggtttggttctaaacctccccatggagccgagtggtgtccctgagggtgaggagggcagaggtctctgctcagagctgctctgagcccatccgcaagtttttgatctccagttccaactgtttggcctggacctctcgctgggtcaacagctcccggagccttcggatctcctcctgttgccggtagaacatctgcagcaactcattctctgtctttggtggggggcattcgaaaacgtcaagccatttgtcagccaggttttcttctcctccagcctgtgttctgctgccaccttggcatcttctcctccaacanggaggnagacctccagccacttctgcagccagntttctgtctgattcaanacccgggtaagctgggccatggaattgaag

SEQ ID NO: 7411 - DNA, 411 bp, Homo sapiens
  III.1039 (N41824)
  misc_feature (312)..(312): n is a, c, g, or t
  misc_feature (333)..(333): n is a, c, g, or t
  misc_feature (345)..(345): n is a, c, g, or t
  misc_feature (382)..(382): n is a, c, g, or t
  misc_feature (403)..(403): n is a, c, g, or t
acatataccctccaacagcaggggcccagcctccctgacggcccaggagtggctcagcgggatgaatcgagacccaatcctggtgtcccttaggcctggctctgagctgctgagaccccacccactgcctgcagagagacctatcttcaattccatggccccagcctcaccccggctcttgaatcagacagaaaagctggctgcagaagatggctggaggtcttcctccctgttggaggagaagatgccaaggtgggcagcagaacacaggctggagggagaagaaaacctggctgacaaatggcttttgangttttcggaatgcccccccanccaaaagacagnagaattgagttgctgcaagaatgttcttacgggcaanaggaagggagattcgaagggntccgggga

SEQ ID NO: 7412 - DNA, 523 bp, Homo sapiens
  III.1040 (W52982)
  misc_feature (413)..(413): n is a, c, g, or t
  misc_feature (506)..(506): n is a, c, g, or t
  misc_feature (519)..(519): n is a, c, g, or t
gagattctgtaactgcagacttcattagcacacagattcactttaattttttttttttttttttaaatacaaggagggggctattaacacccagtacagacatatccacaaggtcgtaaatgcatgctagaaaaatagggctggatcttatcactgccctgtctccccttgtttctctgtgccagatcttcagtgcccctttccatacagggatttttttctcatagagtaattatatgaacagtttttatgacctccttttggtctgaaatacttttgaacagaatttcttttttttaaaaaaaaacagagatggggtcttactatgttgcccaggctggtgtcgaactcctgggctcaagcgatccttctgccttggcctcccgaagtgctgggattgcaggcataagctnaccatgctgggcctgaacataatttcaagaggaggatttataaaaccattttctggtaatccaaatgattgggtggtcatttttcccatttgncaatgtagtcccnctta

SEQ ID NO: 7413 - DNA, 491 bp, Homo sapiens
  III.1041 (W52983)
  misc_feature (377)..(377): n is a, c, g, or t
  misc_feature (466)..(466): n is a, c, g, or t
tttttttttctcttttgtgcattttattaaaacttgaaagctatggcttgccgccatcaatgacgcctattgggttccaatagcctcatgttcaaatctgactcgttagcaaatccacccaactcaacatcggtcatcttgacattgcaggatattcagcaagtctgaagtttttaatcgggaaggattttctaccgttactgaacaaataaaggttctttgtagcaatggctggaaatgcaacatgagccctttcttcacaccaaaagaactcataaatagttcaccgggtgaaccaaagactttatttttcaaaagcaggtaacaccaaagtactatgtggtatccatattcgttgcaaaaatggataattactnggaattttccaaacatcaaatgaaggggggatcaatggttaccactatcgtttttccacccaatatacagatgttccgctccaaggtcnagggttttaattcctacataggagg

SEQ ID NO: 7414 - DNA, 467 bp, Homo sapiens
  III.1042 (H19958)
  misc_feature (34)..(34): n is a, c, g, or t
  misc_feature (367)..(367): n is a, c, g, or t
  misc_feature (419)..(419): n is a, c, g, or t
  misc_feature (435)..(435): n is a, c, g, or t
  misc_feature (466)..(466): n is a, c, g, or t
gatgtcaatatttttattaggtatggcctctggngttttcttagtccatttgggttgctatagcaaaataccaaagatactggacaggtaataaacaacagacatttattgcccacagttctggagactggaagtccagtatcaagatgcggcagattcaatgtctggtggggacccactttctcattcatagacagagccttccctctgtgtcctcacactgtgggaaggagcaagcgagctctctggaatcctttttgtaggagtgctcatcccattcatgagggctccactctcatgacctcatcacctcccagagggctccacctgaaactcatttgatttgggagatttaaagagtaggctntaggggcatgttgtacaacttttaggaaacttttccgaaatgttaggccgcntttcattatttaaccntccattccattttccaatcatcttttcgggna

SEQ ID NO: 7415 - DNA, 350 bp, Homo sapiens
  III.1043 (R23252)
  misc_feature (209)..(209): n is a, c, g, or t
aaattagcatctgtttaatatattttaaaatatggaaatatatttaaacagcacatttaaagaataaaacaatagacttccatttcttattctctcaatggtacaccattaattaaaaatatattacttaatgtaccccttaatatagttactgtcaaattttctttaagataaactgtatttcaaaacaacattttaatatacccganttacaaacaaagccataacatttttgaagacatttttgggtatacgtttgggtttgaaagatcccaaagggatggattaattaaatgggtgctttatggaatactttgggttacgggtaaataggcctaccccaggggtcc

SEQ ID NO: 7416 - DNA, 400 bp, Homo sapiens
  III.1044 (R23328)
  misc_feature (329)..(329): n is a, c, g, or t
  misc_feature (338)..(338): n is a, c, g, or t
  misc_feature (383)..(383): n is a, c, g, or t
  misc_feature (388)..(388): n is a, c, g, or t
  misc_feature (394)..(394): n is a, c, g, or t
tgagagtgagctcaatgaaaaccttattttgtaaaggcattttgtaaaccttcttccaagcacaaataattccaaacaggaaggttctgttgtgtgtgtgtgtgtgtgtgtctgtgtgtgcatgtgtgttcttccctctaaaattaatttattttctctatctattagaatgccctctaaggcctttctttaacacacactgactttttgaaggaatgatctttaggattgataacttgctatttatgggtgactctgtgggttagggcttatttacccgttaaatctaaagtattccataaaaggcacccttttattaaattcatccntttggggtnctttccaaacccaaacggtattacccaaaaatgtccttccaaaangttanggggcnttgttt

SEQ ID NO: 7417 - DNA, 1382 bp, Homo sapiens
  III.1045 (AF143869)
ttcggcacgaggaaggaacccattcaacttgagattactgaaaaaagacatgggactttggtgtgggatactgaggtgaagccagtggatctccagcttgtagctgcatcagcccctcctcctttctcaggagtgaggatgtggcctggatgctgcccaatcttgcctagaactggctgcacctgcttgtgccttaacccttggttaccctaaatccctgttatccagactcattgggactgctctagatcttcactatccaatacgggttactgtggcaacgccaacctttgaatccccctcctgcgcgctgagcggctcgtaaccatggagaccgaagcaggtttcccgcgtccgcctcctcacacagagactgcagccccggcgcccagaccctttggacaaggagatccaagcgggccccacaatgctcagcgggtaaagagctcctccccactcctctcccgccagcagacgaaggaaacaccccgcagcctgcacatgctcagatggagctctgggcccgcgggttctactgcgcaggccctcacactcagcaaagggacttggacgcgaaagccctggtggcgctcagccggttgggagttgtagctttctggctgctacagcaggagatacaggtggccaatgggtgagctggctggaggtaggaacaaggttaaggaagctgggatcttcgtgcagactggatcgtcactatagcaacaatgaaacatcgggaagggctagttctgctaggcagtctgccattttcattctttcatctttttttttaactcaaagcttactttgcaacaggcactgttctaggcactggggatacaatggaaaacaaaatagagcttctattttggcgggagatcgacttaataactgtgaacacgtgtcactggaaaaagcagtatgttaataagtaactgggctgctttgggaaaaatggaaatgcaggcaatgttagaacactggtacacacactaattcattcatcctcacaaagccctatagacaggtactattatgacccctcaactgtaacataggctggaaggtcacatgacaaggaagtagtggagctgggatttgaacccaggcagtctggcttcatacttgataagcttaatcacaatgccaaactggtaaatagctgtgtggcataatttcaggtagtgataagtgctgtgaaggataaagcaaagaaaggggcagggatggctctttggagagactacttagggatggctttcaggaagaggtggcatttgagcaggggcccgagggattgatgtgacttgtgataaaagaaaaacttcagacgaattaaatttaaagaagtttaattggcaaaaaaaaaaaaaaaaaaa

SEQ ID NO: 7418 - DNA, 458 bp, Homo sapiens
  III.1046 (T83234)
  misc_feature (10)..(10): n is a, c, g, or t
  misc_feature (11)..(11): n is a, c, g, or t
  misc_feature (390)..(390): n is a, c, g, or t
  misc_feature (450)..(450): n is a, c, g, or t
attcggcacnnggaaggaacccattcaacttgagattactgaaaaaagacatgggactttggtgtgggatactgaggtgaagccagtggatctccagcttgtagctgcatcagcccctcctcctttctcaggagtgaggatgtggcctggatgctgcccaatcttgcctagaactggctgcacctgcttgtgccttaacccttggttaccctaaatccctgttatccagactcattgggactgctctagatcttcactatccaatacgggttactgtggcaacgcaaccctttgaatccccctcctgcgcgctgaggcttcgtaaccatggagaccgaagcaggtttcccgcgtccgccttcctcacacagagacttgcaggccccggcntccagaaccctttgggacaagggagatccaaggcggggccccacaatggttcagcgggtnaaagaggt

SEQ ID NO: 7419 - DNA, 478 bp, Homo sapiens
  III.1047 (T90778)
  misc_feature (449)..(449): n is a, c, g, or t
acttctttaaatttaattcgtctgaagtttttcttttatcacaagtcacatcaatccctcgggcccctgctcaaatgccacctcttcctgaaagccatccctaagtagtctctccaaagagccatccctgcccctttctttgctttatccttcacagcacttatcactacctgaaattatgccacacagctatttaccagtttggcattgtgattaagcttatcaagtatgaagccagactgcctggggttcaaatcccagctccactacttccttgtcatgtgaccttccagcctatgttacagttgagggggtcataataggtacctgtctataggggctttgtgagggatggaatggaattaggtgtgtggtaccagtggttctaacattggcctggcattttccatttttcccaaaggaggcccagttacttattaacatactgntttttccagtgacaggggttcaaaggtat

SEQ ID NO: 7420 - DNA, 330 bp, Homo sapiens
  III.1048 (R21275)
  misc_feature (9)..(9): n is a, c, g, or t
  misc_feature (36)..(36): n is a, c, g, or t
  misc_feature (37)..(37): n is a, c, g, or t
  misc_feature (270)..(270): n is a, c, g, or t
atggctttncgctgcccctgaagacggagcacaagnngttcctggttcgcgtcctgatccccctgcactctgtcaagtcgctgtctgtcttccatgcccagctggcatactgtgtggtgcagttcctggagaaggatgccactctgacagagcacgtgatccgggggctgctcaaatactggccaaaaacctgcacccagaaggaggtgatgtttctgggggagatggaagagattcttgatgtcatcgagccctcccagtttgtgaagntccagggagcccctttttaagcaggtggctcgctgtgtttccagcccccatttccagggt

SEQ ID NO: 7421 - DNA, 382 bp, Homo sapiens
  III.1049 (R45365)
  misc_feature (234)..(234): n is a, c, g, or t
  misc_feature (311)..(311): n is a, c, g, or t
  misc_feature (314)..(314): n is a, c, g, or t
  misc_feature (346)..(346): n is a, c, g, or t
  misc_feature (365)..(365): n is a, c, g, or t
ttttttttttgaatttctctctttattaagtctacccccagccacggaaagaggagtagaccatgattactgtgaacccccccttaccccaggacactgtgaatctcttcttgcctgtgccctccccctccccctgcccaataaataaaaaggggacaaggaagtacacagcgagggaagggaggagtgtgcacccagggacagtgtctgtgtagagggtgagctgggcgagantaaatagaccatgggaccccatggtggggataaggaaggacctcgcattgggccaaggcaggggcagggcgaggcgntgnagtgcccttgcccaaggccagggagcagaggntggggagcccgcctgcagntgggagcctagctttgc

SEQ ID NO: 7422 - DNA, 521 bp, Homo sapiens
  III.1050 (H12100)
  misc_feature (463)..(463): n is a, c, g, or t
  misc_feature (499)..(499): n is a, c, g, or t
  misc_feature (520)..(520): n is a, c, g, or t
ggtttctcaacagcagcacaatttgggacagagaatcttgtggagtggtctgtcctgtgcattgtgggaggtttgccagcaacaccccactcaccccctcccaccaatccccatgtgacaaccgaaaatgtcccaggatttttaggtctcccttgggtctagaagctgcacttaggcattttcccacctgacacttgagttcatctctgctttggtccacataaggccactttaaaaaaatgttgtttctttaaagattctaaccatcttttaaacaaatccattttcttcctctatttctgcattcagttaatccttccaaaccctttgtttagtatatcttgaaatgtatcaattcctgttctagtaattaacatatgtgacttgcatgatatctgctatggacccctagtagaggtctggattcctttaggcacaggggaatgtgttctcggattctggnttggggtggatgtaaatcaatttattttaacttaantgtccggggtgttggcccctng

SEQ ID NO: 7423 - DNA, 226 bp, Homo sapiens
  III.1051 (H12101)
  misc_feature (144)..(144): n is a, c, g, or t
  misc_feature (171)..(171): n is a, c, g, or t
  misc_feature (189)..(189): n is a, c, g, or t
  misc_feature (197)..(197): n is a, c, g, or t
  misc_feature (204)..(204): n is a, c, g, or t
  misc_feature (213)..(213): n is a, c, g, or t
tttttttaatgcaaaggtttttattcatctaaagaaggtaacataagaaaaatagttgagcaagaaagagatgaatattagaaggcagcaaatgacaatggacagacttaaacccaatgaggtcaataattacattaaacatangggactcagacactccaattacaaganaaatagtgcagaggggtnaaaataantaactanataaataanaatgggctgttta

SEQ ID NO: 7424 - DNA, 468 bp, Homo sapiens
  III.1052 (N29513)
  misc_feature (438)..(438): n is a, c, g, or t
  misc_feature (467)..(467): n is a, c, g, or t
tttagaaaaatgaaagctgatttttattttatcatcaacagccattctttagacatgaacatgcatacgtaatattctacgcacacatcacagcttttaacgttagttaataaaggttaaacacacaacatacatccttacaaaaaaagtcaaaatcgcaaacttaaaactttaaacaaaagtattactaatttaaaaaaagtttgtgttgggtaccatttgtacaacacagttaatttaaacattttcattttggttgcacatgaaaaaggcggcagtagaaaataaagtcattgagggtttttaaatagcagaataaggcagttttgccatgcaggagaagcaatattaaatattagtttcaaaaaaaatccacattttaaaaatatttagttcaagtcacagaatttttctcagtagagaccccaatgcaatgcntaattagctgccttagatggcccgtttgna

SEQ ID NO: 7425 - DNA, 456 bp, Homo sapiens
  III.1053 (N57457)
aatgtctttgttttatgctgaggcaactccaatgctgaaaaccttgagtgatgccacaacaaaatttgtatcagagaataaaaatttaccaatagaaaataccacagattgtttaagcacaatggctagtgtatgcagagtcatgctggaaacaccggaatacagaagcagatttacaaatgaagagacagtgtcattctgcttgagggtaatggtgggtgtcataatactctatgaccacgtacatccagtgggagcatttgctaaaacttccaaaattgatatgaaaggttgtatcaaagttcttaaggaccaacctcctaatagtgtggaaggtcttctaaaatgctctcagggtacacaacaaaacatttggaatggatgagactacctccaagcaaattaaaatccatgctgccaataacaattctgggaataaagcacctgctggtagac

SEQ ID NO: 7426 - DNA, 469 bp, Homo sapiens
  III.1054 (N51306)
  misc_feature (212)..(212): n is a, c, g, or t
  misc_feature (324)..(324): n is a, c, g, or t
  misc_feature (439)..(439): n is a, c, g, or t
tgagtgtttcagtgagtttattatgagccattctgagacaggaacaaaccctgacagtctcaaagtgcccccaatttcattagaaagatcgaaatctcacatctggaagacaagacgcctagtgccactttctcttagtttctctgggtaaatagtgaaatcctggcccaacatctaaggaaagagttagttctctgaaaaagtgggctgangatgagtttttaagataataacctgtcacagggtcaggacttctgggcataagctgtaatgatgggtacatgacaacctgatgttgtggccttgcaaattcagcctgtttcncatctctgcacaattccagaggcctgtgctcaatcgcacaatcagcttgtaggacaagaactggggatttgctccatccgagtcctggcccttctggtatgaacctacttatctnctttctcctacaaatgtctctctcagcaaa

SEQ ID NO: 7427 - DNA, 449 bp, Homo sapiens
  III.1055 (R12207)
  misc_feature (163)..(163): n is a, c, g, or t
  misc_feature (164)..(164): n is a, c, g, or t
  misc_feature (368)..(368): n is a, c, g, or t
  misc_feature (385)..(385): n is a, c, g, or t
  misc_feature (397)..(397): n is a, c, g, or t
  misc_feature (415)..(415): n is a, c, g, or t
  misc_feature (438)..(438): n is a, c, g, or t
  misc_feature (448)..(448): n is a, c, g, or t
tttagttcactgctaaacaaattaaagcacacttttcaggacttgctgggtcaccttttcctgaggaatgatacagaagagtgttttttcataaactggaccataattcttcatgtttaccatggagagttttacagaaatttggctgcactctgagagtctnnactcacagtttatttgctttttttaaaaaggagattattctaaaatataaacttatttgcatatattggaggagcatccactatcagtatttctgtgctttataaactatattagagggactggggttttaaaaaaaaaggatataggggtaggaaataggaggctatactttacaaggagttcaataggatccactggacttnctcttttaactgtcccnggaggcttaccntcacggccccaccaatcnggtccttttccatacccactctntcctggcccnt

SEQ ID NO: 7428 - DNA, 376 bp, Homo sapiens
  III.1056 (R39930)
  misc_feature (301)..(301): n is a, c, g, or t
  misc_feature (357)..(357): n is a, c, g, or t
tttttttttttacaaaagcaattatccatttttattttgtttacattgcactgaaaatttacatcatacttttacaaagtttcttttcataaaaatatacttctttacaaaagtgtatgcattaatataagaggagtagccagttgcagaagaaacattgtttaaacaagatcttaaatgtattagccttaacattaatgaatgaatcattgttattgcagtcatttgaataaacaagaataaataactgatggcataaaatttaaaactgcatcctgccagtagagtaccatgttgaggnaaattgtatgaatttcccaaaacaatggtatctcaaaggtggggtttaccaagggnattccatttaaatgttgtg

SEQ ID NO: 7429 - DNA, 434 bp, Homo sapiens
  III.1057 (N66939)
  misc_feature (326)..(326): n is a, c, g, or t
  misc_feature (430)..(430): n is a, c, g, or t
tttttttttaatgcttccattaaggaaaaacaggcattatcacttacaatctagatacaacgaatcttttcaatcttttatatttaagtcatcttagcaaaactttgcagaggaataattaaattgtaaaaaaacttcactctaaattttcattttaatgataacccaaaactattcctggacttgaaggcatctatacctgaaatgggtaacatcttttggatgcaactaactgctcatctactgcttttggtgaacttggaacatatttatcttataaatattgatttcagatttcaaaaaatatttctaacaggcgctacttnattaaatctagttcttctttcttgcatttgttctgtcaaattgcaacacttctaaaaccactgatggctcccaattgtgttgaaaagaggaacagttatcttcnttgg

SEQ ID NO: 7430 - DNA, 195 bp, Homo sapiens
  III.1058 (N69011)
  misc_feature (149)..(149): n is a, c, g, or t
  misc_feature (178)..(178): n is a, c, g, or t
  misc_feature (185)..(185): n is a, c, g, or t
ttttaaaaaacaagctttaatccatttcataaaaattgttcttgcaattgaacacagccaggcccacatgcccagcaggttgcaggagacagtttcacattttccaggcctcaggacagggcagtctcctccacatgccacaggtgtcntgagtgacagtgtaagacgcctgatgggnaggaggnaggcacagat

SEQ ID NO: 7431 - DNA, 433 bp, Homo sapiens
  III.1059 (W00678)
  misc_feature (5)..(5): n is a, c, g, or t
  misc_feature (9)..(9): n is a, c, g, or t
  misc_feature (32)..(32): n is a, c, g, or t
  misc_feature (206)..(206): n is a, c, g, or t
  misc_feature (353)..(353): n is a, c, g, or t
  misc_feature (400)..(400): n is a, c, g, or t
  misc_feature (414)..(414): n is a, c, g, or t
gcgangaanggaggagtgtgtgcggcggggcngcgggggtaaaggcgagaaggctgcagcagacacagcctccagcaaagcaaagtaacaatccgccattacaaaggtcgtcctccttgatccagttaacgagtcagaactcttctcccaatcagcagagaaccccgcaggtcatcggggtcatgcagagtcaaaacagcagcggngcaaccggggaccccggccactggagcaggtcacctgttacaagtgtggcgagaaaggacactacgccaacagatgcaccaaagggcacttggcctttctcagtggacagtgacagcagctggagccagctccgagcagcccggggncccgctgttgggagtgtgcatttaactgtttcatgcgcttgttggcngactgtggctcgantggccgcagacacgtgggt

SEQ ID NO: 7432 - DNA, 392 bp, Homo sapiens
  III.1060 (T97478)
  misc_feature (1)..(1): n is a, c, g, or t
  misc_feature (331)..(331): n is a, c, g, or t
  misc_feature (350)..(350): n is a, c, g, or t
  misc_feature (360)..(360): n is a, c, g, or t
nttcggcacaggaccgacttcaagatgagaatgagaaaaatgtctattaaaatcactacatttgataatatctcagatttagaatctcttttgggattcagatagtctgattattccaattcaagtgttcagttaagttttagttactattcctataatacccaattcactaatatcatatctcctgtggaatattcattggtgcgatggcctcatccccttttttactttttattgacatggtggttataaaatgaagagacttactctattggaattttcatctacgtagtatttaggctgtcaagactaaataggcaaaagggtaggnatattaggtccattctctncaattaaggncctgaatttattaccttagggtgtttattaca

SEQ ID NO: 7433 - DNA, 427 bp, Homo sapiens
  III.1061 (T97479)
  misc_feature (4)..(4): n is a, c, g, or t
  misc_feature (9)..(9): n is a, c, g, or t
  misc_feature (167)..(167): n is a, c, g, or t
  misc_feature (181)..(181): n is a, c, g, or t
  misc_feature (303)..(303): n is a, c, g, or t
  misc_feature (386)..(386): n is a, c, g, or t
atantaaantcaaaattgtttaattagatacattttatatatcctgaacataatggctcccatagaaataaactagtattttgtacacaaactttatttactgtgccacattcataatatactgggccaagtgcaaacatttattacatcccctggtgtgtgcaganctctgctcccacanacacctcattatctaggatgacagagaacaagattagacaagatggataattaaaatccacaaggtaataacaaaaatgtactttatgattataaactcttctccagctacagctgtaaccngtactaagcaaaacagtttaatcaggttttcctccctaaatcccgcccccaagggcactgctccttgggggcagggatcctantaattgattaggtgggggttggctggaagggcctggggcca

SEQ ID NO: 7434 - DNA, 395 bp, Homo sapiens
  III.1062 (R49482)
  misc_feature (185)..(185): n is a, c, g, or t
  misc_feature (225)..(225): n is a, c, g, or t
  misc_feature (247)..(247): n is a, c, g, or t
  misc_feature (267)..(267): n is a, c, g, or t
  misc_feature (272)..(272): n is a, c, g, or t
  misc_feature (278)..(278): n is a, c, g, or t
  misc_feature (293)..(293): n is a, c, g, or t
  misc_feature (302)..(302): n is a, c, g, or t
  misc_feature (370)..(370): n is a, c, g, or t
  misc_feature (389)..(389): n is a, c, g, or t
ttttttttttgcacatagaaacaagacatccatgtgtacagtatcaaaaaatatataccaaggttactggtattgcagttcgtggaaggggaagagaggggagaaaatgaaatcaaccgaaatactggatggaggggaagaaaggtcaaaagaaaatagtttgtctgatatagattataacatgntctagaggaaactccataaatctaggtttttatatttcantatataaatacctacaattaantatatatataggcagcccgntgggngttggntcgggccttttgagnctcaaacantacattttcaatattaacaccacgtacaaacggggagtaggagttcggcactttggacaaggttaggncacgggtttaaatttttanttactt

SEQ ID NO: 7435 - DNA, 469 bp, Homo sapiens
  III.1063 (H66787)
  misc_feature (236)..(236): n is a, c, g, or t
  misc_feature (308)..(308): n is a, c, g, or t
  misc_feature (314)..(314): n is a, c, g, or t
  misc_feature (360)..(360): n is a, c, g, or t
  misc_feature (368)..(368): n is a, c, g, or t
  misc_feature (415)..(415): n is a, c, g, or t
  misc_feature (444)..(444): n is a, c, g, or t
  misc_feature (457)..(457): n is a, c, g, or t
agcgtcaggtgcagaatggcccctctcctgatgagattgacatccagagaagacaagtgatggagcagcaccagcagcagcgtcaggaatctctagaaagaagaacctcggccacagggccatcctcccaccaggacatccttcatctgcagccagcgcccccgtctcatgtagtgggcctccaccgccccccccacccccagtcccacctccacccactggggctaccccacctnccccacccccactgccagccggagagcccaggggtccagccacgacgagagctccatgtcaggactggccgntgcatnagctggggccaagctgagaagagtccaacggccaggaagacgcatntgggaggnttcagttcccagttgggatcttcaaaagtccgattggccaaccgggncaaggcagtgggggtgggcgtaggagggnttcattgggaggnaatgaacaaatt

SEQ ID NO: 7436 - DNA, 261 bp, Homo sapiens
  III.1064 (H66788)
  misc_feature (116)..(116): n is a, c, g, or t
ttttatgcggacagtaaaccgtttattactgtgtggacacagacaccgtggtgcatgacagacagtttcaacaccatgagcgctggggacggagctgtgcctggacagctctgcgntgtgtggtggcgccacgctgggccggctgtcaccgccagctgaggcgctaacagcgtcacctgggagaaaacctggaaaccgtctaatgaagcaggtgacttaggggcgtctctagaaacccaaagaaatgtaccttaaataagc

SEQ ID NO: 7437 - DNA, 406 bp, Homo sapiens
  III.1065 (N49291)
taaccattatgtgcctggcctcgggacacaatggcaaataagagagacatgctctacatgacactgcagaggttacactctaacaggaaggacagatactaatgaaatctaaaaataaattgtacagtgtaataaagtactatgaaggaaaagtacaatatgtttagagaaatataaacaggaaacatttctgagactatcgctttatcagtggagaaagtgacatttaagctaatatctgcaggaattggagttaagtcaaagattgttttaagaagaaggaacaggctgggcgcggtggctcacgcctgtaatcccagcattttgggaggccaaggcaagagagtcacctgaggagtttgagaccagcctggccaatatggtgaaacaccgcctctactaaaaa

SEQ ID NO: 7438 - DNA, 502 bp, Homo sapiens
  III.1066 (N49533)
  misc_feature (19)..(19): n is a, c, g, or t
  misc_feature (21)..(21): n is a, c, g, or t
  misc_feature (463)..(463): n is a, c, g, or t
cttttaagctatttgctantnttataagctatggttcatctgattccaattccatttttgtaagattgcatattaaatatttctttaaattatttaactttatttcctttgttcactttaaaatcaggctgatttgagagtttatgcctctgtacaatgaaaaattggaattgatcttggtgttacagcaattaattgtgaaatcacagctgaacctaattatcgtaaatattttataattaaagaaattttacccatccagcatgttataaatagtaagtggtcttcaaacatagctattccctctattccgtcttctctttttatttttatttatttatttttttttggagacagagtctcgctgtgtcgcccaggctggagtgcagtggcgcgatctcagctcactgcagcctccgcctcccaggttcaagcggattctcctggccttagccttcagagntgctgagattccaggacccggcatcacggccagctaata

SEQ ID NO: 7439 - DNA, 466 bp, Homo sapiens
  III.1067 (N93176)
ttttttttttacaaggtttattgttgctaatttaaccaaacttaaagattttttaaatcaataatcaattgtaaagcatggggtcatgaaacacattagtagaaaacactgacttttgccgatatggttctaaaatgtctcctttgggacagcgtgtaaactgagatttggcaaaagaaggaagtgggtcttagctttgttgggtctataaattactgagttaaggactgatagagtgggggttaggacgatcctgggcatagtgctgggtgggtgaggggttagttacctttccatttcttcgccttagaatacacacttaatttggccagccagcttagaaaatgctcctggtagtaagataaaaggatttacagctacatgaaagagaaaggcatcaaaattccaggccttattcagccttgggctgtggtgccttgagataaaagagaaccaatttatccgg

SEQ ID NO: 7440 - DNA, 378 bp, Homo sapiens
  III.1068 (W38930)
gaccctaaatagaggaaaacataatcatgccattatgcccgctgctggagaggaatgtccctatgttaagataggaaaggagaagaaaacgagctaagataggaagaaaaggactttttaattccggtgccggtataaattgtttctcttttatctcaaggcaccacagacccaaggctgaataaggcctgaattttgatgcctttctctttcatgtagctgtaaatccttttatcttactaccaggagcattttctaagctggctggccaaattaagtgtgtattctaaggcgaagaaatggaaaggtaactaacccctcacccacccagcactatgcccaggatcgtcctaacccccactctatcagtccttaact

SEQ ID NO: 7441 - DNA, 274 bp, Homo sapiens
  III.1069 (R10889)
  misc_feature (217)..(217): n is a, c, g, or t
gttacctggactgggcttggagctcctgggctcaagggattctattgccacaaccttccaagtagctgggactacaggtgcttgccactgtgcctggcttgttagttgtggctttaattcaaagaaagacaacatcctccaaggtaccggttttagaaggattttgttctgtgttctaaacagtcaaataatagtatctggttgtagctaaataagntatttcatattgttatagatataatgtaaattttactttgagaggtagtaatttata

SEQ ID NO: 7442 - DNA, 368 bp, Homo sapiens
  III.1070 (R10940)
  misc_feature (289)..(289): n is a, c, g, or t
  misc_feature (321)..(321): n is a, c, g, or t
  misc_feature (334)..(334): n is a, c, g, or t
  misc_feature (343)..(343): n is a, c, g, or t
  misc_feature (360)..(360): n is a, c, g, or t
  misc_feature (367)..(367): n is a, c, g, or t
attcggcacagggaacatgcaggtacctcagtggcccaattttgagaaatagagggaattttttcatcgtaaggatggtagattaggtcctaggtgagtaatgaaaagaaggctgaaaaacaaaattccttattagaaccagaagtgttaacctgacaaacacattcattcaaactctttagcacgtgaaatatatatatgaaatacatatggtactcattttcccttaaaatgagccatgattgaaaaaagatacaattttacattctcaaggttggaaatagaggangatatgcattggcgataatattgatttaaaanaaaatctgctganaggctattnttaggacataggttttnagttacng

SEQ ID NO: 7443 - DNA, 320 bp, Homo sapiens
  III.1071 (H10740)
  misc_feature (73)..(73): n is a, c, g, or t
  misc_feature (216)..(216): n is a, c, g, or t
  misc_feature (250)..(250): n is a, c, g, or t
  misc_feature (295)..(295): n is a, c, g, or t
cagatacgcctgtgcagggtggggcatggagaatcaagtggcacccgttccaccaccacctgctcctggccgnctgcatgcacagtggctttaagatcctcaactgccaaaaggcaatgggctgtggctctctgagggcttagactctggccttattaccttttcctaagctgtagaagaggtcctgctggcccgagtggacgtgttgagcgattnctgggatgaaagactagcggaggtcctgcctganctgtgacgctacctcccaagggacagtaacggcctccccaggggntttattccgagggtcgccccacaca

SEQ ID NO: 7444 - DNA, 458 bp, Homo sapiens
  III.1072 (H11019)
  misc_feature (196)..(196): n is a, c, g, or t
  misc_feature (319)..(319): n is a, c, g, or t
  misc_feature (375)..(375): n is a, c, g, or t
  misc_feature (383)..(383): n is a, c, g, or t
  misc_feature (390)..(390): n is a, c, g, or t
  misc_feature (440)..(440): n is a, c, g, or t
  misc_feature (453)..(453): n is a, c, g, or t
tttttttttaagtgagcagtttctttatagaagttgctacggcaactgggaaagaggccacaactgcctcccagagcacacagcaacagagggaatgacgaggcgtggccaaacccgaggcgatctggagtccaggaggcaaggccagggctggcaggggcagttgcagagagcaagtggaaggtgagccaggggntgcaaggctgggtggccacttgggctctgaaagggctgccatcgctacctctgaagtacagggattgatgccagcagtgaccggaatcagaaccagaatgagtgctgatgggaagaagggctnagggcagaacaggaccgcactggattacaaaacgtgccgaggttgttttgggcctngggcccgnggaagcnaaacccctggggccccagggttttcaatttggggcagaggttggtttccnaggaagattgagntgttt

SEQ ID NO: 7445 - DNA, 432 bp, Homo sapiens
  III.1073 (H22453)
  misc_feature (406)..(406): n is a, c, g, or t
  misc_feature (414)..(414): n is a, c, g, or t
  misc_feature (419)..(419): n is a, c, g, or t
ttctcttgttgctggagttgtaaaaatcaatgtcccattgctgagatcgaagctccctgtgtctctggggggctcagcagggacgatggcctccagagtggacctctgagaaattgcagaggcatcagagctgtgggctcagcatatgaggtccccaggggccatagaccccctcctcctgggaagagtgctcctgcagagcttatttgcaatctcctgggagtcccagactcaccaaaggattcagatcctcttctttttgcctcctacatagagcacattatagacctgaaacaggaatcagaattccagactcccttagtgaggagacaaagtgttaggtcttagctttttcccttctaaattaagggtcctccctgggattcaggttgcctgatagcttatncctgaaantggtnggagatagggaaa

SEQ ID NO: 7446 - DNA, 355 bp, Homo sapiens
  III.1074 (H22488)
  misc_feature (294)..(294): n is a, c, g, or t
tctgggtagaaaccagaacatgctctccacagcctgggggagtattctatacctttgcagaggatgacctgatttcccacccataaagagaaatacgattttcctactctccaccagtttcacggataatgctatcaggcagcctgattccagggaggacccttaatttagaaaggaaaaagctaagacctaacactttgtctctcactaagggagtctggaattctgattcctgtttcaggtctataatgtgctctatgtaggaggcaaaaagaagaggatctgaatcctttnggtgagtctgggactccagggagattgcaaataagctttgcaggagcaacttttcccaggg

SEQ ID NO: 7447 - DNA, 487 bp, Homo sapiens
  III.1075 (R97798)
  misc_feature (12)..(12): n is a, c, g, or t
  misc_feature (18)..(18): n is a, c, g, or t
  misc_feature (410)..(410): n is a, c, g, or t
  misc_feature (430)..(430): n is a, c, g, or t
  misc_feature (445)..(445): n is a, c, g, or t
  misc_feature (450)..(450): n is a, c, g, or t
  misc_feature (461)..(461): n is a, c, g, or t
  misc_feature (475)..(475): n is a, c, g, or t
catctcagcctntttacnttcatctcagcccagcacttctgttggggctgagatggaagtctcggaaggtgctctgaggaggtgtgactctccctggctgacaggggaaggcttagcagagctttgtcttagaggagtagatgaaaaggaaagtacagagagggcattcaggccaagtcagcaacacagacaaagtcaggtaatgtgggttaagtgcatgggtgatgagtaaaggggatgtggctagatggtgtgagtgtgtgtgtgcttgcatgtgtgcctgtgtgcgtgtgtgtgcatgtgtgtgtctgtgtgtgagtgacagcaacagcaaagggcccgtcatgagtggctaagaccagatgtagggtagactttggagggggctgctaaggattttcatagggcantggggaaccatgaaccttcnctagggcagggggangagcnttccggaaccnatccccgaactttntccattgcaatt

SEQ ID NO: 7448 - DNA, 450 bp, Homo sapiens
  III.1076 (R97847)
  misc_feature (362)..(362): n is a, c, g, or t
  misc_feature (389)..(389): n is a, c, g, or t
  misc_feature (402)..(402): n is a, c, g, or t
  misc_feature (413)..(413): n is a, c, g, or t
gagctagcaccatgaacttcaataccctgtggtcttatcagtataatatcgtttcatcttcttacactcaaatctcattcctgatgaaaaatttaaatcctctgtagggtgaaatgctggacctaatccttttatcttcaaaaaaaaaaagtatatgaaaatattaaatattttcaccacttctttaaaaagtaaggcagtactcctaactatgcaatcctgcccattcttgctgagatacgcattgcaatgataaagttcagggttagttcccgaaggctcctcccctgcctagtgatagttcatggttccccattgcctatggaaattccttaggcagcccctccaagtctacctacatntgggtcttaggccattctggacggggncctttggctgttngctgttcattnacacacaggtcacacacatggcacacacagggacacg

SEQ ID NO: 7449 - DNA, 391 bp, Homo sapiens
  III.1077 (H53599)
  misc_feature (133)..(133): n is a, c, g, or t
  misc_feature (134)..(134): n is a, c, g, or t
  misc_feature (135)..(135): n is a, c, g, or t
  misc_feature (358)..(358): n is a, c, g, or t
  misc_feature (387)..(387): n is a, c, g, or t
aactccctaacaatgactgactgatctctatacacaattattgaacactctcttaactacccccttttaaatttggaattctttgtatctagcatcattcatttgaataattcaatggtatctatattatttnnntcattacatttaacatttctcttttgagaaaatggacataatgacatactacagttttatgttgaatgagtcataagtaaaatgtccatagcgctaaactatgtcccttgactctaggcagagctggtggaacccacctaacggtctaatggggaaaacatttcaaccattgttccaattataagggggtttgtcagttcagctggacttttgtaatgtaggncatttcatcgtggcaaaccaacaggttantggg

SEQ ID NO: 7450 - DNA, 393 bp, Homo sapiens
  III.1078 (H53920)
  misc_feature (331)..(331): n is a, c, g, or t
  misc_feature (377)..(377): n is a, c, g, or t
agacagggtctcactctgttgcctgggctggagtgcagtggcatgaccatggctcactgcaacctctgcctcccaggttaaagcaattcttgtgtctcagcctcccaagtagctgggattacaggcatgcgcctccacacccagcttatttttgtatttttagtagagatcgggtttcaccatgttggccaggctggtctggaattcctgacctcaggtgatccgccagccttagcctcccaagtacaggtgtgaaccactgcattccgccctcttcctcaatttaaactgagaagacagttcgagctaatggattcttagattttatgtnatatataaatatattcaaatctgatgatattgatttcattatatgngagatttgatattcat

SEQ ID NO: 7451 - DNA, 536 bp, Homo sapiens
  III.1079 (AF086521)
tcacattccacaatctatggcttccaccagctagcccaggaaatacttgaaatcagcattccaattagtgttgagtctcttgattgtgtcatttaccaattaaataactgagacctaagtctgggaacagagccacgaatctgcctttgagatgctggcagatctcaaggccatcaattattgggggagggagggacaaacactcccaatcatccaccagtcagactgaatgtgtagctggcgaggaattacttccacttctggcccagcacaagccctgctttggccacctgtctgcaagagaggcggcccctgtgcttgcaacgcttacgtgttcatcccagtgtccttttccaaatgagtgctgtagctttagaagtggccctctatagaaagaagtcaaaagatgaggccccttctagaatctaggataacaagagtgttgacagtttgaggagtcgaattgagattcatcatcaaagagcaatgcagcgtcgttaaaataaaaactgtgccttttaaaaagaaaaaaaaaa

SEQ ID NO: 7452 - DNA, 464 bp, Homo sapiens
  III.1080 (W92630)
  misc_feature (186)..(186): n is a, c, g, or t
  misc_feature (187)..(187): n is a, c, g, or t
  misc_feature (189)..(189): n is a, c, g, or t
  misc_feature (192)..(192): n is a, c, g, or t
  misc_feature (199)..(199): n is a, c, g, or t
  misc_feature (230)..(230): n is a, c, g, or t
tcacattccacaatctatggcttccaccagctagcccaggaaatacttgaaatcagcattccaattagtgttgagtctcttgattgtgtcatttaccaattaaataactgagacctaagtctgggaacagagccacgaatctgcctttgagatgctggcagatctcaaggccatcaattattgttnntnggngggacanacactcccaatcatccaccagtcagactgantgtgtagctggcgaggaattacttccacttctggcccagcacaagccctgctttggccacctgtctgcaagagaggcggcccctgtgcttgcaacgcttacgtgttcatcccagtgtccttttccaaatgagtgctgtagctttagaagtggccctctatagaaagaaagtcaaaagatgaggccccttctagaatctaggataacaagagtgttgacagtttgaggagtcgaa

SEQ ID NO: 7453 - DNA, 312 bp, Homo sapiens
  III.1081 (W94419)
  misc_feature (275)..(275): n is a, c, g, or t
ctttttaaaaggcacagtttttattttaacgacgctgcattgctctttgatgatgaatctcaattcgactcctcaaactgtcaacactcttgttatcctagattctagaaggggcctcatcttttgacttctttctatagagggccacttctaaagctacagcactcatttggaaaaggacactgggatgaacacgtaagcgttgcaagcacaggggccgcctctcttgcagacaggtggccaaagcagggcttgtgctgggccagaagtggaangtaattcctcgccagctacacattcagtctgactggt

SEQ ID NO: 7454 - DNA, 256 bp, Homo sapiens
  III.1082 (H00640)
  misc_feature (28)..(28): n is a, c, g, or t
  misc_feature (129)..(129): n is a, c, g, or t
  misc_feature (226)..(226): n is a, c, g, or t
  misc_feature (235)..(235): n is a, c, g, or t
cccctgtaattacaatgaaaaacaagangcagaatacccatcatcattacagaaacaatgattgtatacttttaacataatattcaggtatttttaatcactatcttaaaccaatttttaattatatangttaactgtatatgcttactggctgaaaaaatactgggcacaacctacctactgcttttaatacacaacgtgggtaacttgtgtcttctgcctaatngcacaattntcagaaaaggattgcaaaggg

SEQ ID NO: 7455 - DNA, 431 bp, Homo sapiens
  III.1083 (H00725)
  misc_feature (303)..(303): n is a, c, g, or t
  misc_feature (323)..(323): n is a, c, g, or t
  misc_feature (404)..(404): n is a, c, g, or t
  misc_feature (417)..(417): n is a, c, g, or t
tgggggcctgtaattgaggctaattcaatagcaacaatagacaacatgatatggctgctgtcactttgaaacccaaaaggtctttgggtaggaatagagtaatgaaagaggaccagtcaacttcagtatatatacaaaggaaagacaaagagatgataaaccaaggctgaggaaatttttctgatgctttcttcatttctctaatataccttttgcattctttttctgataattgtgctattagggcagaagacacaagttaccacgttgtgttatttaaaagcagtagggtaggttgtgccngttatttttttcagccagtnaaggcatatacagtttaacttattattatttaaaattggggtttaggatagtggattaaaattacccggattttttggttnaaaagtttaccantccttgttttcctg

SEQ ID NO: 7456 - DNA, 585 bp, Homo sapiens
  III.1084 (AA029449)
  misc_feature (496)..(496): n is a, c, g, or t
  misc_feature (512)..(512): n is a, c, g, or t
  misc_feature (582)..(582): n is a, c, g, or t
ttttttttttttttcacatgaactgttatttcctttaataatgcaaaggtgtaaacttcataaagccctcactgattatctacacaacaatgttagcattcttattagtagaaaaacatgatccaaacctgctgtataaatagtccaaaaatgagcaaaggggccccatggtgtgtggagcatgggcagcacaactacagggcacaggggagtggggtgtggctgagcaaggtggggtgcactcactcctgcagggtctctgagggctgctgtctccaggactcctggcggggctggggctgcagctgtcaccaggaactcagtgtccgtggggagtgggtatgcgctagtgctgcctcctgaggagcgcactgttacaagccgtgggtctgtctaaatgggacccttgaggaccctgacattgtttcagctgaggcctgcctgaccctgggatgtgttgagatgacagggccacgtcagtcctctccacacttangacgagatctccaaanggtcccttcagaaagatggacactgccctctcctgtggggtggtcctgggatcaggggaagcaactcccnagc

SEQ ID NO: 7457 - DNA, 619 bp, Homo sapiens
  III.1085 (AA029514)
  misc_feature (574)..(574): n is a, c, g, or t
aaggagtttgccccctttttaatggcagtaaaaagaatttgagagctctttctttaaatgctatttttaaaaaccatcatgctagatttacagagaagtttctgcatatctgctacttgttgcattttgggttcaaacctaaatatgatgtagcagaggaagaattctaagtaccttctaaagcttgtgtcagattgttaaaatcaccacacattcccctcattctaactctgtgctccttgtcctcccttcaataataattggctttgcttgcaattaagcatttaagtgcccatgttaaaagagccagaccgcactgattcacatgagcgttttgctgacatgatgggcaactgaagtcacccctgttgcccatgcactggaaaaaaagttgaatttgttggatattttctggggctgatgaacgttctgggatgtgctttcagtcctcgtattacggccagcaccttacactggtctctgtgaacggggccaagccatggatgtgccaacaaagtgtcagctttgaaaggtgtttgtctcccaatcgggggtgactccctgctgccctggncaatggtcgcagatcagcacagagtgggggccgtgggtcagcagt

SEQ ID NO: 7458 - DNA, 153 bp, Homo sapiens
  III.1086 (H01504)
  misc_feature (64)..(64): n is a, c, g, or t
  misc_feature (95)..(95): n is a, c, g, or t
  misc_feature (136)..(136): n is a, c, g, or t
cattgctaataagtatctgcttgctggatacagacacaagccaaattccaaacacacattaggnaacaactggatacaacacacacacattaggnaacaactgcatacaacacacacacattaggtaacaactgcntacaacaaacacacatt

SEQ ID NO: 7459 - DNA, 445 bp, Homo sapiens
  III.1087 (H01610)
  misc_feature (53)..(53): n is a, c, g, or t
  misc_feature (337)..(337): n is a, c, g, or t
  misc_feature (348)..(348): n is a, c, g, or t
  misc_feature (372)..(372): n is a, c, g, or t
  misc_feature (390)..(390): n is a, c, g, or t
  misc_feature (398)..(398): n is a, c, g, or t
  misc_feature (407)..(407): n is a, c, g, or t
  misc_feature (418)..(418): n is a, c, g, or t
  misc_feature (423)..(423): n is a, c, g, or t
  misc_feature (436)..(436): n is a, c, g, or t
  misc_feature (443)..(443): n is a, c, g, or t
ctcgaggccaggcagtcatgcgccttctgggtctccggcgtcttccgttcccntgctgcccgtgtcatggccacaccgtcacccttcagcagcgacctccactcccgccaccgtctgagcagaagtgcaccgaagcctcagagacagagggtctcctcccgatgctctgccgctgttggggatatggtttcttgaagcatttttaggctgccagtattgtattaagcagaacagtattaacctcgtattttagctccaggggtaaaatggttttttaaaaagtcaaatacaatactggtccttaggcacaagtaattttcttgtctgttttcatcantccctaaatantttcttcctcaattatttttctcntgtcaccagattacattnaggatttngtcagatangtgttaggaantggcntaacaggtaattnggaagtngt

SEQ ID NO: 7460 - DNA, 502 bp, Homo sapiens
  III.1088 (H24429)
  misc_feature (210)..(210): n is a, c, g, or t
  misc_feature (470)..(470): n is a, c, g, or t
gaaaaacacaaataagtgagatggcacacagcttaaataaaagcccttagtacctcatactaactctgccaccaagatagaattatgacaaatcatcatctccaagatcaatgactcatctttcaaatttaattaagaggcaactccatagtaaatgactttcacctaatttcaaactgtgtcatctcaggaacagtatagtttcagggnacattttgggcttcccaaaacagagtacaaatctatttaacaaacctaggccttttaggcaagcaattccagctgagcaagtcccttttcagaggaaacaacttcccaactagtcactgggaattgtgtaaacaacacacgcagttgactgacccaccatttataagttaccccaatactctttaactatatttcaaaatgcccagtgattttcccattcaggaagttgttcacagtttttgttctcaggagatgaaagncttgacatgtatttctttaaaggggggtttct

SEQ ID NO: 7461 - DNA, 527 bp, Homo sapiens
  III.1089 (H24458)
  misc_feature (78)..(78): n is a, c, g, or t
  misc_feature (200)..(200): n is a, c, g, or t
  misc_feature (214)..(214): n is a, c, g, or t
  misc_feature (347)..(347): n is a, c, g, or t
  misc_feature (386)..(386): n is a, c, g, or t
  misc_feature (402)..(402): n is a, c, g, or t
  misc_feature (451)..(451): n is a, c, g, or t
  misc_feature (526)..(526): n is a, c, g, or t
ttttttttttttttttccaaatataaaaatgtttaataaaatttaaggcacatgcaaatttaacatcatatacaaagnaacagtactttataacaaagtgaggtttacaaggggtttgtctctctaaaaacagaccttcttctttccccatagattgtaagtctgtgcttgtaaagtcatgattctctgtgagaagatgnaattgtatgcatgnactgttttactattggttactactgcatctatcaacttggggagaaatgtattagagacaaaataaaatggttttaatcttagagagaacaatggtggtggtaacatctgccttgccagcctcccaggtagantcccaggtggtgagtcagacgactgtgagtttacaaatntgcaacacagcagcantcgatgaaccttcatgatgtgctggacgctgtttagggacccaaatagnccatttaccgtcactgcatgcagatctgaaagctcctgtttctaaaggaggtttctagccatttgggtttccatng

SEQ ID NO: 7462 - DNA, 284 bp, Homo sapiens
  III.1090 (R92571)
acaaaacaaaaaaacacaataaacttttatttaatgatactatcaggttacaaagggctccctcctgagggggagaggggtcccttgccactggtgctcacactcaaccaagcgccatccactcccctccactagcctgtgggcctttcactagctcggggtccccaaggcctgggaacataggaggcgctcagggaatgatgatacacaggggttgggggtggagtcgtgaaaaggaagtcaatgataaactctgagggtatcagctgtgcgggcaggggtgg

SEQ ID NO: 7463 - DNA, 291 bp, Homo sapiens
  III.1091 (R46019)
  misc_feature (226)..(226): n is a, c, g, or t
  misc_feature (291)..(291): n is a, c, g, or t
ttttttttttttttggtctggacttcttcagtagtgctcttgtacatttcccttcagcatcacaaaatgtatagttgtctcttcttttgcgaccttaatcaagaagtttcaccacatggttctctgaagaagtctggatactgagggatgacacgatccctgggttcagcctgttcaccatctcaaagggatcggagttggcatttagctgaatgtggagcaagantagacagactgctacgctgctcttctgttcaacagcctcatcacaaaggacaggttcaacttggn

SEQ ID NO: 7464 - DNA, 239 bp, Homo sapiens
  III.1092 (H10734)
  misc_feature (29)..(29): n is a, c, g, or t
  misc_feature (53)..(53): n is a, c, g, or t
  misc_feature (54)..(54): n is a, c, g, or t
  misc_feature (144)..(144): n is a, c, g, or t
  misc_feature (146)..(146): n is a, c, g, or t
  misc_feature (159)..(159): n is a, c, g, or t
tttgggctgggcacacacactcttacgcnggcagctttctttttaacagtggnngtgagcttctttaaataacgacttcctaaatttgtgaaagagtgtgtgtactgggagggagagaagtgctgttacaaaaccccaaggctngntgtctgtgggttngagcacagcccgctacggttttggaaagatggatttcctgggaagacaactttgctactgagcatcatctagtaaataaa

SEQ ID NO: 7465 - DNA, 437 bp, Homo sapiens
  III.1093 (H11013)
  misc_feature (12)..(12): n is a, c, g, or t
  misc_feature (252)..(252): n is a, c, g, or t
  misc_feature (285)..(285): n is a, c, g, or t
  misc_feature (415)..(415): n is a, c, g, or t
  misc_feature (423)..(423): n is a, c, g, or t
tttttttttttntttttttttacacagctctacaaattattttatttatatccttgtatccttataatctataagttttttccattttcaaaattatttattttagtttttaaacttttttgttaaaatctaagacacaatcacatacatcagcctagacctacacagtgtcaggatcatcaaagtcactgtctttcacctccttatctcatcccactgggagggtattcagggggcaataacacacacagnggcagtcatcttctatgataatctcttcttctnggaatacctggctaaagggacccatctgagggctgttttacagtttaactttttctttataaggcaggaaggcaggtatactctaaaataatgggtttaaaaatacgggcataataaatacatatggccngtaacatngggcatttattatc

SEQ ID NO: 7466 - DNA, 289 bp, Homo sapiens
  III.1094 (R94972)
  misc_feature (34)..(34): n is a, c, g, or t
  misc_feature (45)..(45): n is a, c, g, or t
  misc_feature (164)..(164): n is a, c, g, or t
  misc_feature (170)..(170): n is a, c, g, or t
  misc_feature (243)..(243): n is a, c, g, or t
  misc_feature (248)..(248): n is a, c, g, or t
  misc_feature (272)..(272): n is a, c, g, or t
ttttcaaatagtggcaatatttcactttccaggnataattatttncttttaaaaatgccactaatagatacatgtcattacacatttgttaaaatccacagaatgtacaacactgagagtgtaaactgtggactttgggtgataatgagacattgatgtaggtncatcgnttgtaacaaatacaccactgtggcgtaggatgtcaatagtgggggcactctgtactttctgctcaattttgtnctgancctaagactgctctaaaatacaangtctattaaataagtaa

SEQ ID NO: 7467 - DNA, 415 bp, Homo sapiens
  III.1095 (R95058)
  misc_feature (388)..(388): n is a, c, g, or t
  misc_feature (411)..(411): n is a, c, g, or t
cccctccttcttttgcagttttaaattgacttgaactacaaaaacaccaaccaaggttttgacaatggtttaaatctgattttactgaagactttttttcttttttctttctttttccttttttagcattgcagaaattgaagagaaacaaaagatccctttatggcatttatacttatatttacagagtggagtagtggatggaaattagtagagatggaaaatcctggtgacatttcataaatatttttaaaggctgttagcatcttttgccattcattgcaattattactttggatctgtctgatccttaatcattcaaaatgtgctgctcagaaaatgtggtattatgaggaagattagaatatgccaaaatgcagtgtttctnatggcattaaagttttttttttnaaat

SEQ ID NO: 7468 - DNA, 491 bp, Homo sapiens
  III.1096 (T99504)
  misc_feature (37)..(37): n is a, c, g, or t
  misc_feature (39)..(39): n is a, c, g, or t
  misc_feature (234)..(234): n is a, c, g, or t
  misc_feature (337)..(337): n is a, c, g, or t
  misc_feature (445)..(445): n is a, c, g, or t
  misc_feature (450)..(450): n is a, c, g, or t
  misc_feature (490)..(490): n is a, c, g, or t
acgttcagcagacaagctcttcagaagagcagtgctncnggtttacctaaaaggaaaaccgaacaagatgctcagggatgaggcctttcaggatttataccgaatcctgcaaatcggttcatccacattatgtgcagggttttgggtgggttagaaacgtgcccaagttgttcacagtcccagaggagatgagacccagatcatacataactaatgaccacacacgactcagantctcagcggggcagaagctggggtacggagcgaggccctcaggcaggcagagcaaacaggtctgggagctgctgggtggggggattcaacggctgaaaaagtntccagtttgtatcaatctatcctaatttaacaacacttaggtgacttcttcagtgtgtattattttcccggggaaaagtcctcccggggccttacaggtgtttaaagnggcgntttcacccgagggccagcttggtgcatgcagcgttttttng

SEQ ID NO: 7469 - DNA, 343 bp, Homo sapiens
  III.1097 (T99564)
  misc_feature (301)..(301): n is a, c, g, or t
  misc_feature (327)..(327): n is a, c, g, or t
  misc_feature (339)..(339): n is a, c, g, or t
ataccctgttactacaaaaaaaaaaaaatttaaaaattaaccaggtgtggtggcacacacccttctctctcttgctccttctttcgccatgtgataggcctgctcccctttagccttctgccatgattggaagcttcttgagaccctcaccagaagcagatgctgggcaccatactccctgtacagcctgcaggaaccgtgaaccaaaataaatatcttttctttattaaattacccagccttcaggtattccttaaacaggcaacacaaacgggattttacacattggctattaaaaggntaacaggcttcagggtccaagggggnaatggacttttngggc

SEQ ID NO: 7470 - DNA, 478 bp, Homo sapiens
  III.1098 (H09650)
  misc_feature (91)..(91): n is a, c, g, or t
  misc_feature (423)..(423): n is a, c, g, or t
  misc_feature (454)..(454): n is a, c, g, or t
  misc_feature (460)..(460): n is a, c, g, or t
ttttttttaactgtataaagataaaacaagggtgcaaggaaagaaaagaggaacgcaaaaatgcaagcagaggtagaaagagtgtaacgtnccttaaagataatatgccaacccacttggctcttcgtattttctctggcacttgaaaatacatcctgtatccccactgcacttatcctacgtccattagtcctacagatcaatatcccattccctgggatggcttatcctagctattggcactgtccctcagagaacttgtgggcatgaggaagaaaaggttattttactttatactctgaaaggcaaattcagtcaggacaaacacaggccttccaattttaggaaatctacatttaggaactgggaaggcttgaagggagtaatgtaggcaacttaattctttttaatttcccctaaggngcacatttatttttacttttcccccaggggncaaatntttaaggggaagggtaat

SEQ ID NO: 7471 - DNA, 496 bp, Homo sapiens
  III.1099 (H09689)
  misc_feature (280)..(280): n is a, c, g, or t
  misc_feature (300)..(300): n is a, c, g, or t
  misc_feature (307)..(307): n is a, c, g, or t
  misc_feature (380)..(380): n is a, c, g, or t
  misc_feature (389)..(389): n is a, c, g, or t
  misc_feature (398)..(398): n is a, c, g, or t
  misc_feature (431)..(431): n is a, c, g, or t
  misc_feature (437)..(437): n is a, c, g, or t
  misc_feature (445)..(445): n is a, c, g, or t
  misc_feature (465)..(465): n is a, c, g, or t
  misc_feature (484)..(484): n is a, c, g, or t
gagaatttggtttctgggatttcgtgtaattgttttctgttatatacaatttttatatagttgtcactagtttgcacataattatttcctatttgacatattaacatgtgtcacatggaccatatacttgcatgatacattcatttccttaattattccagttgtatttgcattctagttttccacttacttaggatctgactttccattagaccttcagttcctcagaggcagagaccatgattgtattctttatgatgtccctgggcattgttggtanctggggtcattgcagaagangaattantgtatgctattaaagtcagcgctctgtatccatgggattccacatctgtgggattcaaccagcctcaaattgncaaatattnaaaaattgncatttgtactggaacatgtaggagtattgtttncttgtncattattnccccaaggcaataaacgttnaacaactatttaccaggcntttacatgtatt

SEQ ID NO: 7472 - DNA, 493 bp, Homo sapiens
  III.1100 (N20884)
  misc_feature (374)..(374): n is a, c, g, or t
  misc_feature (390)..(390): n is a, c, g, or t
  misc_feature (395)..(395): n is a, c, g, or t
  misc_feature (454)..(454): n is a, c, g, or t
  misc_feature (481)..(481): n is a, c, g, or t
gatatcccagggtgttctcacgaaaattaatttcaaatctaaaaggcaaggataatcactactttcagcagtaaaaggtaacagaaagaaattgcagtttaagcacagttagcatataattaagaacaagaaaaattaaagtattcttaaatatgtgttgctttaatttttctcctgatggcttttcagattaccttaaaaagatctatcaagactcctcctctagaaaagatctattaaaagccacagacacttgggagatccatgagaaggaaaaaaatgggtcatccttatacaggttgattatggtgagtttgtctacatgcagtgcatatggtcagcaaccaagggaaaacaacctccagatacattcncgcagggcagattttncttcngggaggaaaaacctatggttttcctataccatttgtgaagccaacagggtaaggggtanggagcagttcaggttttcatccataangcatccacatca

SEQ ID NO: 7473 - DNA, 433 bp, Homo sapiens
  III.1101 (N68186)
  misc_feature (306)..(306): n is a, c, g, or t
gatcatgtcggtatatttatatgtaaatacaaaactgtatcactgtaagatattgaatatgaacattacaattattttctgaatcagactcagtccattgatattaaatacaaaatgaaatgattgtaaaaaataataatatacacattcaaagagcttattacagtataaaattattgaggtctgatcagctgccaacctcatcttctgtcacaggggaaggtttaggagttcctgggattttttgggaatgtggagtgctgaggactcttgatttatccctagcacataaggatgagtgggctngggagcaggcagggacaggttgggtgggtaggggacaaacagtgattgcaggggaccacctcactcagccagggggtgaagctttttattgacacagaacccacccagtttgagggtctagcaggct

SEQ ID NO: 7474 - DNA, 404 bp, Homo sapiens
  III.1102 (N80645)
ggcgtgaaattgccactagaaagggccagtagcaatgtgttcttaattcctagcatctgctatcaaactgtgccttattaaaaccaaattgtggctattgatttttgctagggtccccgaggtaagtggggaaggaacctccctcctcctttctcccgccattctttttctgaggtctccttgtctcccactccttccctttcctaggattttatggggaggtttgatgagcatttggctttctccccagagagcttgaccaagttacatattctagagatcgtcctgagtgccaagcacgttttataagtagggcgtgtattccaggtcctttctggtcattctgtgtgtgtgtgtgtgtgcacttatgtgtatgggtccatatgtacgtgtgtatataatat

SEQ ID NO: 7475 - DNA, 599 bp, Homo sapiens
  III.1103 (R20949)
  misc_feature (407)..(407): n is a, c, g, or t
  misc_feature (441)..(441): n is a, c, g, or t
  misc_feature (459)..(459): n is a, c, g, or t
  misc_feature (491)..(491): n is a, c, g, or t
  misc_feature (503)..(503): n is a, c, g, or t
  misc_feature (522)..(522): n is a, c, g, or t
  misc_feature (533)..(533): n is a, c, g, or t
  misc_feature (549)..(549): n is a, c, g, or t
  misc_feature (555)..(555): n is a, c, g, or t
  misc_feature (589)..(589): n is a, c, g, or t
  misc_feature (597)..(597): n is a, c, g, or t
gcatctatcccatgctagggttggaaactgatattggtattacttgtgttttttcttagtgtgttttatttcccagtttcatcttcttctaaaaatgaaaatatggtgccttccctccctccaggaagactggcaaatatttccttttatttactgctgctgtggagtgatgagatatgcactttactctttaagattcagcaaaaagcttttcacttctcagtatatccagaatacatcatatctgggacttaggaaaatttgccaagcaatctttgtttttatagatactaatgttgaccctctccagcgttcaatgttataaataggaacaagtcaaggctagtgtttatctcctccccctccccaaaactgtgggcacagcatataaaaatgtaccctcaatnaatgttcctattaaaaatgggggacagggggccntatgtttttccataattnccccaacaatgtgccggccatatttttggccncagggtaagggnttttaacagtggaaaaggnactccccattnccccgtggtatttccnaacccntaatggccccaaaggtttgtggccatgtgtaggngtgtgtgnat

SEQ ID NO: 7476 - DNA, 427 bp, Homo sapiens
  III.1104 (R42732)
  misc_feature (402)..(402): n is a, c, g, or t
ttttttttagatatccgaccaaacgttttattggggttttattgcaatctactttcagcaataaggggaaagtgagcatgaaaagaactccaatcagactttattcaataaagcagcttttcatgaatgcttcaggtcagtgtatgatcagctcagcttccagtatcaacttgagtacctcattatggatatttatgctaggaatgacaacagtaagggcattgcaaaatccaaagtcatctaatattaaaccatattttacataatttgtagggacagtatactaatactctacaataaataagggtttaaaaatgtgttgcttagcccttggaactaaattcaattactaggcttattctaaggtactccagtttaataaacgtttggattgttaaaggnactctggacttcttccaaaggttaa

SEQ ID NO: 7477 - DNA, 346 bp, Homo sapiens; identical to SEQ ID NO: 1969
  III.1105 (R25834)
  misc_feature (295)..(295): n is a, c, g, or t
  misc_feature (305)..(305): n is a, c, g, or t
  misc_feature (315)..(315): n is a, c, g, or t
  misc_feature (344)..(344): n is a, c, g, or t

SEQ ID NO: 7478 - DNA, 311 bp, Homo sapiens; identical to SEQ ID NO: 1802
  III.1106 (R46832)
  misc_feature (141)..(141): n is a, c, g, or t
  misc_feature (162)..(162): n is a, c, g, or t
  misc_feature (165)..(165): n is a, c, g, or t
  misc_feature (187)..(187): n is a, c, g, or t
  misc_feature (196)..(196): n is a, c, g, or t
  misc_feature (233)..(233): n is a, c, g, or t
  misc_feature (247)..(247): n is a, c, g, or t
  misc_feature (263)..(263): n is a, c, g, or t
  misc_feature (300)..(300): n is a, c, g, or t
  misc_feature (307)..(307): n is a, c, g, or t

SEQ ID NO: 7479 - DNA, 396 bp, Homo sapiens
  III.1107 (R70260)
  misc_feature (7)..(7): n is a, c, g, or t
  misc_feature (18)..(18): n is a, c, g, or t
  misc_feature (21)..(21): n is a, c, g, or t
  misc_feature (22)..(22): n is a, c, g, or t
  misc_feature (260)..(260): n is a, c, g, or t
  misc_feature (354)..(354): n is a, c, g, or t
aattggnttaatcaacgnccnngacacacagcatttattttgtaagattaatttttacaaaccatccacaacttgttcaaacctttggctttatcctatctaatttcaaacaaatgcccagccttaatttattacaattatgattcgtagactttcactcaattacataaattcactctcggttgaggaaaagagagaggtggcagaggattaatccaaaggatcctggggtccactacccttcaaagccagaccctggnggggcaagtcctgccaagtcatcaggtgctgattaaatgcagggcactgggtggggaagcaaattcctaaaatgtggttctttcccaggaagcntcttataatctaggctcaggggcttgcagctccaactcactc

SEQ ID NO: 7480 - DNA, 558 bp, Homo sapiens
  III.1108 (R70313)
  misc_feature (41)..(41): n is a, c, g, or t
  misc_feature (352)..(352): n is a, c, g, or t
  misc_feature (390)..(390): n is a, c, g, or t
  misc_feature (412)..(412): n is a, c, g, or t
  misc_feature (423)..(423): n is a, c, g, or t
  misc_feature (434)..(434): n is a, c, g, or t
  misc_feature (442)..(442): n is a, c, g, or t
  misc_feature (451)..(451): n is a, c, g, or t
  misc_feature (476)..(476): n is a, c, g, or t
  misc_feature (483)..(483): n is a, c, g, or t
  misc_feature (501)..(501): n is a, c, g, or t
  misc_feature (509)..(509): n is a, c, g, or t
  misc_feature (520)..(520): n is a, c, g, or t
  misc_feature (540)..(540): n is a, c, g, or t
gcacggacttcccagcctctaggactgtgagcaataaatgnttgatgtttataagccacccagactgtggtattttgttatagcagcctgaacagactaagacgggggtgttgcttccatcaaaggatgtactaagttgtggattatttgtgaaattgaattacaaccttttccttaaggtcttttaccacctcccccccaaaaaaatcccccaaaactgattcagattttcatactttaatgaaatattttataatttgcaaatttttaagtaatttatgaaaaacctagatgcagtggatctcctctctggctgcccattagaatgtcctgtgggaggattaaacttttntttttccagtttatgggacccaaggagtttttgatttnatttagggtgggagttccaggnttcagaatggntttcagaaggntcccgggngattccggngtgagttgggagctgcagcccctgngctaggntttaaggtgcttctgggnaaggaccncatttttgggnttttgcttcccaccccgtgncctgcatttaattcagca

SEQ ID NO: 7481 - DNA, 378 bp, Homo sapiens
  III.1109 (H73681)
  misc_feature (46)..(46): n is a, c, g, or t
  misc_feature (290)..(290): n is a, c, g, or t
  misc_feature (310)..(310): n is a, c, g, or t
  misc_feature (360)..(360): n is a, c, g, or t
  misc_feature (365)..(365): n is a, c, g, or t
ggacaatacccaggcttttctgggcaggggtccctgcggccttccnagtggcattgtgtctctggttaatcgagaatggagaatggcgatggcttttaccaagcatactgcctgcaaacatattgttaacaaggcacatcctgcacagccctaaatccattaaaccttgattcaatatagcacatgtttctgggggcacagagttggggctaaatttacagattaacagcatctcaaagcagaacaatttttcttagtacagatcaaaatggagtttcttatgtcttccnttttctacgtagacacaggnacaatctgatctctttttccccacacttcctattatgttaatgtattttnaattntctgttaggcttt

SEQ ID NO: 7482 - DNA, 203 bp, Homo sapiens
  III.1110 (H73732)
  misc_feature (3)..(3): n is a, c, g, or t
  misc_feature (93)..(93): n is a, c, g, or t
  misc_feature (151)..(151): n is a, c, g, or t
  misc_feature (160)..(160): n is a, c, g, or t
  misc_feature (195)..(195): n is a, c, g, or t
ttngatgtaaatttctttaataaaataataggaaacaagggaatatacttccttacaatcgaattccaaactaataaatgcagaatgataganttagaaaatcatcacagtaaaaaatgtttcaggcaattatcttcaaaagatgctaaantaggcaaantacatgtaatatgatatttacatagtctcaaaggntttcccta

SEQ ID NO: 7483 - DNA, 277 bp, Homo sapiens
  III.1111 (R18961)
  misc_feature (78)..(78): n is a, c, g, or t
  misc_feature (90)..(90): n is a, c, g, or t
  misc_feature (254)..(254): n is a, c, g, or t
ccgagacccggacagaggcaagcaggggcgccgtgggtgcagaagaggcggaagaggaggcctgatggggataccttnctgctgtccttnctgagcacaacctggctgaaaacctggaggtcacaacagtacaaagaatcaaagtcaagatcttgtgccagagagcaaatgaactcttcctcttgctgagaaaacccaccctgctcacctaaaccctggccttgcctggtaattccatccatgcgcctggaagnccacagtacatcaaggctcttga

SEQ ID NO: 7484 - DNA, 513 bp, Homo sapiens
  III.1112 (R43972)
  misc_feature (353)..(353): n is a, c, g, or t
  misc_feature (429)..(429): n is a, c, g, or t
  misc_feature (445)..(445): n is a, c, g, or t
  misc_feature (470)..(470): n is a, c, g, or t
  misc_feature (480)..(480): n is a, c, g, or t
tttttttttttatttgtttattttcttgtaggtttagttcatgcatgtggcaaaaatgcacacagtacagaggatattcagtgaaagtatgcttcctcaccccacagcccttcctttcccttccccaaaacaactattgttgctatttctttgtctctggtaacctttctatattgggtatataaacatatatgtacatgtatatatggatacacatgcattttcagttcacatgatttaaattctttggtctaaagttctcagaccagggcaactcttcctttgagtcaccccagaggttaagagatgggctctccaacgctccagcaattctctttcttcctgccaggganactattactttgattttactgtcttggacttgtaaaaagaggactgacgatgtctatctgtcttcccagagttgancgatggggccaccttnggggcgtaccgtaggcccttttccngccccgggtnaggttttttcaggtgactttttgaggcgaggga

SEQ ID NO: 7485 - DNA, 517 bp, Homo sapiens
  III.1113 (N47631)
  misc_feature (119)..(119): n is a, c, g, or t
  misc_feature (326)..(326): n is a, c, g, or t
  misc_feature (354)..(354): n is a, c, g, or t
  misc_feature (359)..(359): n is a, c, g, or t
  misc_feature (496)..(496): n is a, c, g, or t
ggcagtcggactgcgacacagcccatcccctcgaccgctcgcgtcgcatttggccgcctccctaccgctccaagcccagccctcagccatggatgccccctggatcaggccattgctcnctcgtggccatcttccacaagtactccggcaggagggtgacaagcacaccctgagcaagaaggagctgaaggagctgatccagaaggagctcaccattggctcgaagctgcaggatgctgaaattgcaaggctgatggaagacttggaccggaacaaggaccaggaggtgaacttccaggagtatgtcaccttcctgggggccttgnctttgatctacaatgaagccctcaaggntgganaaataaatagggaagatggagacaccctctggggggtccctctctggagtccaaatcccagtgggtggggtaaattggtacaataaaattttttttttgggtcaaatttttaaaaaaaaaaaaaaaaaaaaattggncggccccaaagctttattcgg

SEQ ID NO: 7486 - DNA, 426 bp, Homo sapiens
  III.1114 (N57485)
  misc_feature (110)..(110): n is a, c, g, or t
  misc_feature (374)..(374): n is a, c, g, or t
taaatttgaccaaaaaaaatttattgtacaattacccaccactggatttgactcagagaggacccccagaggtcgtctccatcttccctatttattttcagcccttgagnttcattgtagatcaaagccaaggcccccaggaaggtgacatactcctggaagttcacctcctggtccttgttccggtccaagtcttccatcagccttgcaatttcagcatcctgcagcttcgagccaatggtgagctccttctggatcagctccttcagctccttcttgctcagggtgtgcttgtcaccctccctgccggagtacttgtggaagattggccacgaggaggccaatggctggatccagggggcatgccatggctngagggctgggcttggagcggtagggaggcggccaaatgcgacgcgagcggtc

SEQ ID NO: 7487 - DNA, 396 bp, Homo sapiens
  III.1115 (R01169)
  misc_feature (248)..(248): n is a, c, g, or t
  misc_feature (332)..(332): n is a, c, g, or t
  misc_feature (334)..(334): n is a, c, g, or t
  misc_feature (376)..(376): n is a, c, g, or t
  misc_feature (383)..(383): n is a, c, g, or t
  misc_feature (396)..(396): n is a, c, g, or t
tttggatggttaaatactgcactctattttttaaggactctgtgcatggtatttccggtggcagatgtgtaagattttttatgtaaatcgtgttgttttagcagaggactatcagacctgacagcagctggacatcgaggtcctcactggggtggtgactgccacgctgatgctgagtggaagccaagccccttcagtcagagctgggccgatctcagacccaaatgctaccaccaccaagccctgtntcacgacggcagcggctgcagtcaccagaaacaatccttcctgcctcgacacccgtgccagccccagccaccctgacggcgggntntccacggaaatgccacggccaagagcccagggtccttcacgntggcctnttccctgccgggn

SEQ ID NO: 7488 - DNA, 381 bp, Homo sapiens
  III.1116 (R01280)
  misc_feature (166)..(166): n is a, c, g, or t
  misc_feature (335)..(335): n is a, c, g, or t
  misc_feature (348)..(348): n is a, c, g, or t
  misc_feature (375)..(375): n is a, c, g, or t
ctgcatcacaaagagaaagttcacgagtacaacgtcctgctggagaccctgagcaggaccgaagaaatccacgagaacgtcattagcccctcggacctgagcgacatcaagggcagcgtcctgcacagcggcacacggagctgaaggagaagctgcgcagatcatnccagggcctgggaccgcctgcgcagggtcagccaccagggcttacagcactgaggctgagttcgaggagcccagggtgatttgacctgttgggacctgggcgcagtccgccaaccttcacgggacaaggagcttggaggcttttccgggaggagctttcaagcattttngaaagccaaattngagaaagcacaaccatttaccagaagnagtttg

SEQ ID NO: 7489 - DNA, 605 bp, Homo sapiens
  III.1117 (T65035)
  misc_feature (431)..(431): n is a, c, g, or t
  misc_feature (512)..(512): n is a, c, g, or t
  misc_feature (519)..(519): n is a, c, g, or t
  misc_feature (541)..(541): n is a, c, g, or t
tttttaaaaaagctaattttgcagacaggtttacatgtaaaaggctaggtatttagccacctcagcattgattagttttggatgtctaagctctgttacacatggcttcccatggcttcactctacaaaacatatttacaacgtgaaggatacatctacaagaaatctacatttcaagggttttacaaatcaatcttgtatctttcccctgaattgactctcacagaccccgtccccttgtcatttcctttgcccagcttaacgggtccaaagtctactttaaatgcaggcttcaaaaatgttaggattggggggcaacaggattttacaggttccctggttcttcaaaaccatggtggcaatttattttcacatctttcacaccatggaggggggattctggattttttagggctttttcagggttcccntaatttggttgggtcttcaaaataggggatccctttggctctcggcaagggttggcttggaattttcacatactcgggggnctaaggntcctttaaatttttttaattcngggacaattcggggggcatggtgggataggggtcccctgggtaggcggggttcttcggggggtt

SEQ ID NO: 7490 - DNA, 573 bp, Homo sapiens
  III.1118 (T66121)
  misc_feature (8)..(8): n is a, c, g, or t
  misc_feature (13)..(13): n is a, c, g, or t
  misc_feature (466)..(466): n is a, c, g, or t
  misc_feature (486)..(486): n is a, c, g, or t
  misc_feature (568)..(568): n is a, c, g, or t
catctgcnttcanggtccctgtttctccgtgttccacagtcgccaataccgcccttacttcaggacccaaatcttcttagacaattgcttcctgctttgaagccacgctgcagcttaataattctaatgtggacatatctaaaataaatgaagttcttacagcagctgtgacacaagcctcactgcagtctataattcataagtttcttactgctggaccatctgctttcaacataacgtctctgatttctcaagctgctcagctctctacacaagcccagccatctaatcagtctccgatgtctttaacatctgatgcgtcatccccaagatcatatgtttctccaagaataagcacacctcaaactaacacagtccctatcaaacctttgatcagtactcctcctgtttcatcacagccaaaggttagtactccagtagttaagcaaggaccagtgtcacagtncagccacacagcagcctgtnaactgctggacagggccaaggtcatggaacctgtctctcctcggaggtcttcagcggtcagtaggcagaggaagtccttcanctggg

SEQ ID NO: 7491 - DNA, 472 bp, Homo sapiens
  III.1119 (H04384)
  misc_feature (29)..(29): n is a, c, g, or t
  misc_feature (48)..(48): n is a, c, g, or t
  misc_feature (76)..(76): n is a, c, g, or t
  misc_feature (83)..(83): n is a, c, g, or t
  misc_feature (90)..(90): n is a, c, g, or t
  misc_feature (339)..(339): n is a, c, g, or t
  misc_feature (357)..(357): n is a, c, g, or t
  misc_feature (364)..(364): n is a, c, g, or t
  misc_feature (428)..(428): n is a, c, g, or t
  misc_feature (436)..(436): n is a, c, g, or t
  misc_feature (461)..(461): n is a, c, g, or t
aacaatggcctatagttcagacctgtagnaattctcataaagttaagnaaggcataaaaatgtcccccccccgagnactcgtncaggagntattgactctcctacagtttaatttgactgcttttgtggtttctgtgatgtcatcccacatgtgtaagctggaaaaatccacgactgtgaaatgtaacctcctgtgtgtatttccacaatggagaatgttaggcttcgtttccctcggttgctacacatctgattacatgtgtcaggaaaacaaacttaaaaaatttcaggagacaaacctttcagcggaattgcctgggaacccatgaagtgaggtcntagaacctacaactatantaagctntgggaggaaagtagcctctgggtactttgtgtctagtcacattgacttccaggtgatggccccncaaacctnaaaccacctctattattcatgcctnttcagccttta

SEQ ID NO: 7492 - DNA, 429 bp, Homo sapiens
  III.1120 (H04410)
  misc_feature (5)..(5): n is a, c, g, or t
  misc_feature (6)..(6): n is a, c, g, or t
  misc_feature (8)..(8): n is a, c, g, or t
  misc_feature (11)..(11): n is a, c, g, or t
  misc_feature (23)..(23): n is a, c, g, or t
  misc_feature (43)..(43): n is a, c, g, or t
  misc_feature (59)..(59): n is a, c, g, or t
  misc_feature (73)..(73): n is a, c, g, or t
  misc_feature (85)..(85): n is a, c, g, or t
  misc_feature (91)..(91): n is a, c, g, or t
  misc_feature (105)..(105): n is a, c, g, or t
  misc_feature (116)..(116): n is a, c, g, or t
  misc_feature (151)..(151): n is a, c, g, or t
  misc_feature (168)..(168): n is a, c, g, or t
  misc_feature (182)..(182): n is a, c, g, or t
  misc_feature (191)..(191): n is a, c, g, or t
  misc_feature (195)..(195): n is a, c, g, or t
  misc_feature (412)..(412): n is a, c, g, or t
aattnngncanaatgggggtggnatatgttttttatatgcctncaaaacaaaaaaaatncaatacttatattncaatggacaatnctagtnatttttttaaaagnactgtataggncatgaataatagaggtggtttgagttttgtagggnccatcacctggtaaagntcaatgtgactagnacacaaagntagncccagaggctacttttcttcctacagcttattatagttgtaggttctatgacctcacttcatgggttccagggcaattccgctgaaaggtttgtctcctgaaattttttaagtttgttttcctgacacatgtaatcagatgtgtagcaaccgagggaaacgaagcctaacattctccattgtggaaatacacacaggaggttacatttcacagcgtngatttttccagcttaca

SEQ ID NO: 7493 - DNA, 534 bp, Homo sapiens
  III.1121 (H48435)
  misc_feature (14)..(14): n is a, c, g, or t
  misc_feature (15)..(15): n is a, c, g, or t
  misc_feature (19)..(19): n is a, c, g, or t
  misc_feature (20)..(20): n is a, c, g, or t
  misc_feature (416)..(416): n is a, c, g, or t
  misc_feature (459)..(459): n is a, c, g, or t
  misc_feature (466)..(466): n is a, c, g, or t
  misc_feature (477)..(477): n is a, c, g, or t
  misc_feature (487)..(487): n is a, c, g, or t
  misc_feature (502)..(502): n is a, c, g, or t
  misc_feature (507)..(507): n is a, c, g, or t
aaacagacccaatnnttannaaattggagatccccttctggaagatacaaggatgggtccactcatcaaccgaccacacctggagcgagtccttgggtttgtcaaagtggcaaaggagcagggtgctaaagtgttatgtggtggagatatatatgtacctgaagatcccaaattaaaggatggatattacatgagaccttgtgtattaactaattgcagagacgacatgacctgtgtgaaggaagagatctttgggcctgttatgtccattttatcatttgacactgaagctgaggttctaggaaagagccaatgataccacttttgggactaggcagctgggcgtctttaccaggggacatccaacgggcttcataggagtgggtaggctggagctttcaggctggggacgtggnttcatttaacaactattaacgtcagcccagtgggagtttgccntttggtnggttttaaggnagttcagggntttgggccagagagnacggnccttttgacattcgattttttttcaca

SEQ ID NO: 7494 - DNA, 510 bp, Homo sapiens
  III.1122 (R99135)
  misc_feature (370)..(370): n is a, c, g, or t
  misc_feature (394)..(394): n is a, c, g, or t
  misc_feature (404)..(404): n is a, c, g, or t
  misc_feature (411)..(411): n is a, c, g, or t
  misc_feature (418)..(418): n is a, c, g, or t
  misc_feature (470)..(470): n is a, c, g, or t
  misc_feature (480)..(480): n is a, c, g, or t
  misc_feature (488)..(488): n is a, c, g, or t
tttttaacagtgtgatttattttaatttcaccatattacattagcatacaaataatttgtacatttaaagggtagctccactggtgtaagacagcaggctgtagttcaaggacccaagatagggagatagatttcctctatcgcagtagtgaacagagacaaagtgcttactaggcaagttcacattcacacagaatttgaccccatctattatctaatcccctccctatcccagttgtcagctttctcaatggaatgacaaggggatatagcttaaaaaaatgtcaatgagctgaaatcatctctactgattctaccagggaacctattaaaggaacaaggttttttttttgttttttgtttttttttncttcaaggactagggcaagttgangcagtggggnatggggngaagggnacaaagatatcttacaaactgggttgtgtttccaattaggttgtaaataccnctggcacttngggtcagnccggggtccaagttctttggaa

SEQ ID NO: 7495 - DNA, 553 bp, Homo sapiens
  III.1123 (H73711)
  misc_feature (1)..(1): n is a, c, g, or t
  misc_feature (356)..(356): n is a, c, g, or t
  misc_feature (384)..(384): n is a, c, g, or t
  misc_feature (456)..(456): n is a, c, g, or t
  misc_feature (501)..(501): n is a, c, g, or t
  misc_feature (534)..(534): n is a, c, g, or t
  misc_feature (544)..(544): n is a, c, g, or t
  misc_feature (549)..(549): n is a, c, g, or t
nttcggcacaggaagtaggcttcgatcctgagaaccttgctgttgctctgaggagatataattctgggagaaagaatcttttataagaacagtacagattgttctcaagagggccatcagaaggaagccaaagagttcacagcctcagcaccaacaactcaacatggtcatcatgttttctatatggtttttccagctagcagtactcccttccatacctgtgactgggcagtgcttttctctctcccatgtctagcctccaaaagttaagtgaaaattagtcaactgcacgtggaagaccccaccactttggggatctctttattttcttttcagccaggggacctgttccactncccttttgaattaatatggggaaggaantttaatacagggtggaactgggagagaaggggtttgagtttggcatactttctggaaaccgggagctggggnattgcggagaaggggaaggtctagactagttacatcacatagggntttctgtaaatcaagttctttcaagtctagtgnggcaggccanagggncaaa

SEQ ID NO: 7496 - DNA, 525 bp, Homo sapiens
  III.1124 (H74226)
  misc_feature (421)..(421): n is a, c, g, or t
  misc_feature (433)..(433): n is a, c, g, or t
  misc_feature (456)..(456): n is a, c, g, or t
  misc_feature (464)..(464): n is a, c, g, or t
  misc_feature (488)..(488): n is a, c, g, or t
  misc_feature (494)..(494): n is a, c, g, or t
aagtgctatgctagattaacaacacctgccttggatgcaggaattaggtggggctgcacacgtgcatggtattttctatccctatgctaggttttgttcctgttggctgtcttcactagacttgagatgacttgatttacagtaatccctatgtgatgtaactagtctagaccttcccttctccgcaattcccagctccaggtttcagaaagtatgccacactcaacccttctctccagttcatcctgtattaatttcttcccatattaattcaaagggagtggacaggtccctgggctgaaaagaaataaagagatccccaaagtgggtgggggtcttccacggtgcagttgactaattttcacttaacttttgggaggctagacatggggagagaggaaagcactgcccagtcacaggntttgggaggggngtactgctagctggggaaaaccntatagggnaacatggtggccctgtttgagttnttgggnccgagggtgtggaccctttgggttccctctg

SEQ ID NO: 7497 - DNA, 397 bp, Homo sapiens
  III.1125 (N58020)
  misc_feature (116)..(116): n is a, c, g, or t
  misc_feature (120)..(120): n is a, c, g, or t
  misc_feature (301)..(301): n is a, c, g, or t
  misc_feature (333)..(333): n is a, c, g, or t
  misc_feature (391)..(391): n is a, c, g, or t
ttatataaaacagctgagctgccagtttattctgggcttctggtggtttgggctgaccaggcttggtggagtctggggacctgcctcagggactggccccctggctgcgagccagntctnctgggggcctggctcaatccagggcctctgtggtggcacacagcaggccagccagaagagccaggcccagcgcggcaacggcgaccagcgccacgtcccacaagacccccgggcgcacccaggacgcctgcagctgccagccacagctgcccagctggtagcctgtcagccggcccagccnatcgcggcatgcgaggctgggggctggcacancggaacctgcagcagggcctcgggcgttgcggtcctccagccagaggccaagataagntgaagc

SEQ ID NO: 7498 - DNA, 300 bp, Homo sapiens
  III.1126 (N64220)
  misc_feature (27)..(27): n is a, c, g, or t
  misc_feature (101)..(101): n is a, c, g, or t
  misc_feature (114)..(114): n is a, c, g, or t
  misc_feature (125)..(125): n is a, c, g, or t
  misc_feature (128)..(128): n is a, c, g, or t
  misc_feature (130)..(130): n is a, c, g, or t
  misc_feature (142)..(142): n is a, c, g, or t
  misc_feature (143)..(143): n is a, c, g, or t
  misc_feature (161)..(161): n is a, c, g, or t
  misc_feature (165)..(165): n is a, c, g, or t
  misc_feature (180)..(180): n is a, c, g, or t
  misc_feature (181)..(181): n is a, c, g, or t
  misc_feature (186)..(186): n is a, c, g, or t
  misc_feature (197)..(197): n is a, c, g, or t
  misc_feature (198)..(198): n is a, c, g, or t
  misc_feature (200)..(200): n is a, c, g, or t
  misc_feature (209)..(209): n is a, c, g, or t
  misc_feature (213)..(213): n is a, c, g, or t
  misc_feature (227)..(227): n is a, c, g, or t
  misc_feature (240)..(240): n is a, c, g, or t
  misc_feature (246)..(246): n is a, c, g, or t
  misc_feature (252)..(252): n is a, c, g, or t
  misc_feature (255)..(255): n is a, c, g, or t
  misc_feature (269)..(269): n is a, c, g, or t
  misc_feature (273)..(273): n is a, c, g, or t
  misc_feature (277)..(277): n is a, c, g, or t
  misc_feature (281)..(281): n is a, c, g, or t
  misc_feature (293)..(293): n is a, c, g, or t
gggctgggcacactccaccttccctantcaccagctggtttcccagaggagaaggctgagacccgagaaggaagccagcctgtcccatgcctgcctggggngccctgttcctgntctgggccacngcngnggccaccagggnntgccccagcccttgtacntgcngcgccctggaaaccnnggggntgtgggtgganngngggggccanggantcagggccctgctngccttgcgggccngaaccngccacnttntgctggccaacaanagcnttcngtcngtgcccccgggngcttttg

SEQ ID NO: 7499 - DNA, 180 bp, Homo sapiens
  III.1127 (R05925)
  misc_feature (1)..(1): n is a, c, g, or t
  misc_feature (5)..(5): n is a, c, g, or t
  misc_feature (6)..(6): n is a, c, g, or t
  misc_feature (146)..(146): n is a, c, g, or t
  misc_feature (152)..(152): n is a, c, g, or t
  misc_feature (165)..(165): n is a, c, g, or t
naaanntaaggttgtgattttgcctacggggtcctgcattctgctgtcttgtgctaacttctaagcagggctagtttgctggaatgctgacgaatccaaagacccacaggactgtctgagagttgtgctgtaacaaaaagagcccncttagnagggcccctgcancacccgggcccgaag

SEQ ID NO: 7500 - DNA, 389 bp, Homo sapiens
  III.1128 (R06024)
  misc_feature (260)..(260): n is a, c, g, or t
  misc_feature (352)..(352): n is a, c, g, or t
  misc_feature (358)..(358): n is a, c, g, or t
  misc_feature (378)..(378): n is a, c, g, or t
  misc_feature (384)..(384): n is a, c, g, or t
tacattagaactacattgctcctagtagaacattacctttaggggactaattttccatggagaactatttcagcatattgcatgctgctcagaccccaagtcagatatgcccaccaagccagatgaagctacacaaatgtggtatttaaatgcattttgtacagtgacttcagagtatctcacatgacatgggtgtaaactggctggggagaaaatgatgcttgttcacctcttcctccagccgtggttaggtggtcctnggggtagcagagggaagggagggttttgtgcagtcaagatttgcttttccatccttgttcttctggaatgtctaaaatctctggcatctttnctggangtttaacaactgtctccagnggtttngccgg

SEQ ID NO: 7501 - DNA, 437 bp, Homo sapiens
  III.1129 (R31045)
  misc_feature (288)..(288): n is a, c, g, or t
  misc_feature (325)..(325): n is a, c, g, or t
  misc_feature (377)..(377): n is a, c, g, or t
  misc_feature (384)..(384): n is a, c, g, or t
  misc_feature (392)..(392): n is a, c, g, or t
  misc_feature (410)..(410): n is a, c, g, or t
  misc_feature (422)..(422): n is a, c, g, or t
gataagacaaataattggtgttatcatgccttctatccaagttttgtaagcaagaatttcatagcatgttttaacacaaatggcaaaaaaaataagcccacagcagcttgaagcattatatgtgaaatttactaaactagaaataagaagaagtgaaaacagtaccccaagaaagtcccagaagactgataacaccaaatgcaggggcccttgctctacctcaactccagcccaaatccaccatgaaggactccctcagttgtcctggaaacacatgccctgaaggcntaatgtgggtatttttaaaataaatttcctggaaaantgacaggataggctttctaatggaactgttgggctaaatctggatactgggnagggggnggttgggnggttggggttttgggggngtttttgtgttngattgtttggacccc

SEQ ID NO: 7502 - DNA, 379 bp, Homo sapiens
  III.1130 (R31533)
  misc_feature (357)..(357): n is a, c, g, or t
  misc_feature (367)..(367): n is a, c, g, or t
gaatttttctgttgtgttgctgtctttaataagtgaacatatgtttgcatttgcacaagtgtattaaactctaacatgcatattgacaagtgtacatataaggtcagagctcaaggaattttcataagctgaagacaccatgtaaactttacaaacattaaaaagaatcaaccagcaccccagtagccttcccttctattccctttttaatcacccaccccttccccaggggttatccctacctcctggacaaaaaggattggggttttgccctctctttggtactttaaataaatgggggatccataaattatgggggcctctttttgccatgggggcttcctttggactccaaanttatgggttncggggggactcc

SEQ ID NO: 7503 - DNA, 421 bp, Homo sapiens
  III.1131 (R94940)
  misc_feature (1)..(1): n is a, c, g, or t
  misc_feature (4)..(4): n is a, c, g, or t
  misc_feature (7)..(7): n is a, c, g, or t
  misc_feature (29)..(29): n is a, c, g, or t
  misc_feature (57)..(57): n is a, c, g, or t
  misc_feature (107)..(107): n is a, c, g, or t
  misc_feature (125)..(125): n is a, c, g, or t
  misc_feature (155)..(155): n is a, c, g, or t
  misc_feature (181)..(181): n is a, c, g, or t
  misc_feature (187)..(187): n is a, c, g, or t
  misc_feature (200)..(200): n is a, c, g, or t
  misc_feature (203)..(203): n is a, c, g, or t
  misc_feature (213)..(213): n is a, c, g, or t
  misc_feature (219)..(219): n is a, c, g, or t
  misc_feature (260)..(260): n is a, c, g, or t
  misc_feature (275)..(275): n is a, c, g, or t
  misc_feature (290)..(290): n is a, c, g, or t
  misc_feature (309)..(309): n is a, c, g, or t
  misc_feature (397)..(397): n is a, c, g, or t
ntcnaanagtgttcctgtcagtggcactnagccccagctgcaacagctggcttctgnttgaacatttttggcaactcacatctagcctcatcactggccctcagagntccctacgacatcaacantgggccctagaggtccaactacaacctggncataaacacccctcagtggcctgagntcccantacataggtcccntantctgaggttntagagnttttgacaatcccagtttcccctgtttggttcccccagggntaggttggtagcagnttcctcagtaatatntccagggtgagcccagtgntcccttttgtcctttctatcctctaatacatgtgtaaactaattcctctaggtaaattccctctgggtgaaattttttttgtgggttntatttttttgggtggggtgtgact

SEQ ID NO: 7504 - DNA, 419 bp, Homo sapiens
  III.1132 (R95027)
  misc_feature (271)..(271): n is a, c, g, or t
  misc_feature (314)..(314): n is a, c, g, or t
  misc_feature (347)..(347): n is a, c, g, or t
  misc_feature (372)..(372): n is a, c, g, or t
  misc_feature (390)..(390): n is a, c, g, or t
cctgttctctctatcacttagagtttgttgtatttaatacctttgctatcattttattgtggttttggttgggagaggaaataaaatggccaatccactacctcgaaaataaattagtacatttatttgcctatcttcatctcctaactagtctgtgagctccttaagggtagggaaggttattattcatttttatatacccaaagtacatcagtcacagcccagccagaaaaatagaaaccacaagaaagatttcaccagagggaatttnctagaggaattagtttacacatgtattaggagggtagataggncaaaaggggagcactggggctcaccgggagatntttacttgagggagctggcttaccnacctaggcccgggggggnaccaaacagggggaaactggggtttttca

SEQ ID NO: 7505 - DNA, 516 bp, Homo sapiens
  III.1133 (N45693)
  misc_feature (31)..(31): n is a, c, g, or t
  misc_feature (33)..(33): n is a, c, g, or t
  misc_feature (62)..(62): n is a, c, g, or t
  misc_feature (131)..(131): n is a, c, g, or t
  misc_feature (268)..(268): n is a, c, g, or t
  misc_feature (293)..(293): n is a, c, g, or t
  misc_feature (298)..(298): n is a, c, g, or t
  misc_feature (395)..(395): n is a, c, g, or t
  misc_feature (442)..(442): n is a, c, g, or t
  misc_feature (487)..(487): n is a, c, g, or t
  misc_feature (508)..(508): n is a, c, g, or t
ctacatacccacatacacggacatagatttntntttcctttctattcatgcctggtcttgtncattccctagagtcttagccaagaatgtttgaaaggactagagggtgtcaaagcttagccatttatttngactgttcttgaatgagatacattatacactaataagtgagaatcaattaagcagaaattcggtctgcttaattggtacctcctagatttggctcctaggattagctgtagttttggagagtgaaatcaccaatccnctatgccagtgtccagttctcacancatgnataaatactggtgtggtctagataagcaaagggtttgaaaactggtaaaaccattcattggtacctaaaatcagttttttggctaccatacctactnggcatcctgtaatctcaaagcatagtatcccctggtgctcaaactgnaggaggaaattaagaaagtattgcgctggtccattgggagccacnttaaaggaattggcctagctnacctgggt

SEQ ID NO: 7506 - DNA, 433 bp, Homo sapiens
  III.1134 (N48975)
  misc_feature (332)..(332): n is a, c, g, or t
gcctttctttggaaaatttgcagatttcctttttatttgccccacttggtgaatggtggtgaggaaaggacatcaatcattacaaagtcaaaaatatcatcatgaattaagaatggaagcatattcaaggaaaagacattatcatcaacgtataatcgtagtaaggatttaacaaattacatgaatttcatctttatggaaaagtcaaaccagataagctaagccaattactttaagtggctccaatgaacagcgcaatactttcttaatttcctcttcagtttgagcacaggggatactatgctttgagattacagatgccaagtagtatnggtagccaaaaaactgatttaggtacaatgaatgggtttaccagttttcaaacccttttgcttatctagaccacaccagtatttatacatggtggtgagaa

SEQ ID NO: 7507 - DNA, 466 bp, Homo sapiens
  III.1135 (AA056120)
  misc_feature (11)..(11): n is a, c, g, or t
  misc_feature (64)..(64): n is a, c, g, or t
  misc_feature (129)..(129): n is a, c, g, or t
  misc_feature (362)..(362): n is a, c, g, or t
  misc_feature (426)..(426): n is a, c, g, or t
gctggattgcngtggcgcaatctcagcttgctgcaagctgccacctcccgggttcactcatgcnattctcctgccgcagcctcccgagtagctgggactacaggcgcccgccaccatgcccggctaatntttttgtatttttagtagagacggggtttcaccatgttagccaggatggtctcgatctcttgacttcgtgatctgcccgtctctgcctcccaaaggctgtttttaattcattctcacagccatttcctctggcagagtgactgcctgtgcatggtctgtgcctttagtggctgaatgaataaatgaatgggatatgcacaaatacctgttgccctagcgcctcctgtggcganagggccacgatgatgtgacaatatcttgtcatgtaattggctgtgaggactccgctggattccnggttgtgttactatttccatagatggtgggttaatgacgg

SEQ ID NO: 7508 - DNA, 424 bp, Homo sapiens
  III.1136 (R21070)
  misc_feature (244)..(244): n is a, c, g, or t
  misc_feature (302)..(302): n is a, c, g, or t
  misc_feature (353)..(353): n is a, c, g, or t
  misc_feature (373)..(373): n is a, c, g, or t
  misc_feature (400)..(400): n is a, c, g, or t
  misc_feature (412)..(412): n is a, c, g, or t
  misc_feature (423)..(423): n is a, c, g, or t
tttctcttgataagggtcctaataccattcctgaaggctctaccctcatgacccaattgccccccaaaaaccccacctcccaaccccatcacaccatcatgctggggttagaatttcaagaaatgaacttgagagaacacaaacattcagttcatacagatgacacagaagatttgaaaagaagtcaagtagaagtgctagaaataaaaagtattgctagtaatcaaaattaaaacccagtggnccatgtttgggtaacagaagagaaaattgggtaaattaggaaggataggaaaaagganaaaaaaacaggaccaaaatgtggacacagggagggccaaaaaggtgggganattggcaggattaaaaaggngatgtgggttgggggggttattgttcnggcaggtggggngggttaggggnt

SEQ ID NO: 7509 - DNA, 329 bp, Homo sapiens
  III.1137 (R46248)
ttttttttttttttttttttttttctttcagcatttttcatgtgtcactgcactgtctcctggcctgcaaattttctgctcagacatatgctgatggtcttattggtggtgtctatgcgtgtgacaatctcttttttcttgctgctttaaaaaatttccctccgattttgacagtttgattataatgtatctgataaagtcttctttgggttgattttgtttgggagactttcagggattcataaacctgggatgtccatattgcttcccagatctgggggagtttccagtcattatttctttatatattacccctgctcctttctctt

SEQ ID NO: 7510 - DNA, 459 bp, Homo sapiens
  III.1138 (R56238)
  misc_feature (429)..(429): n is a, c, g, or t
  misc_feature (435)..(435): n is a, c, g, or t
  misc_feature (445)..(445): n is a, c, g, or t
  misc_feature (458)..(458): n is a, c, g, or t
tttttttttatggataataatataactttattgtgtgcagcctttccacaccaatttagtttttctatgaaataagatttcaagtggtaaagttactgttaaggagacacactggaaaaagctgaagagtttttttgtctgaaactgaaaaacagaaaagtctagggggaaagatgtgagaaaactactataggctacaaagaccacaaaaacagttttggggattagaagggggtgacattgagtgagtgtgtgggaagagaagggctggacaaattatctcagaagagggggtagtaggatttcaggtggatgtttaaggtatttgcttggcagatataatctaggaatctcctagctcttgcatttcctgctatctgttaactttattatgtagtataataattttttatttagccccaaagttcnttgggnctaggagatncggaaggtgccant

SEQ ID NO: 7511 - DNA, 425 bp, Homo sapiens
  III.1139 (R56321)
  misc_feature (358)..(358): n is a, c, g, or t
gcatggacatgctaccacaatttcttgaaacgtgagccaaaccaaaaagcgttcctaatgagtagaggcctgcatgctccgtgaactggggatctttggtagccgtccatgtctggaggacaagtcgacatcaccatgtgttactggcctggaaactgaagggagttttgcaagtgaaaatttagatttctattgacatccttttgttttctaattttaaaaattataaagatgtaaatggaattataaatactgtgacctaagaaaagacccactaggaaagtaattgtactattaaaatttcataaaactgggatttgatttctttttatggaaagttttcatatggaatgtaacnttgattttttactatttataatcctagggtaatatggatataggggggggctaaggatttttttaaa

SEQ ID NO: 7512 - DNA, 461 bp, Homo sapiens
  III.1140 (R97825)
  misc_feature (419)..(419): n is a, c, g, or t
  misc_feature (456)..(456): n is a, c, g, or t
gaaagaataactaggtaatatatgaaactagtttcacactctctggttggtaaaagagatgctgggtgagctacagtaaaggcagccttttaccaagttaccacctattaccgtcaaaagccttcaatagaaagcaaagctccaggatcattctgtttctgctcagtatcagacagataaccttaccctcaaagattctgggttctgagagaacaaactgggcccagggatgctaacttctgcttcaagtgaatctgggccgtgtggggcaacaagcacttgtttgcagtctatattttccaccacttgggactcactaggcatccctcgggtaaagacaagggctaggggtaggtagggtaaaggcacaatgtttttacaatggaaaggggcgctttcactgggtcaggcgcgggaantaagtacaggggcccgcggattttcttttgggctgtnccttc

SEQ ID NO: 7513 - DNA, 415 bp, Homo sapiens
  III.1141 (R97875)
  misc_feature (347)..(347): n is a, c, g, or t
  misc_feature (364)..(364): n is a, c, g, or t
  misc_feature (384)..(384): n is a, c, g, or t
  misc_feature (404)..(404): n is a, c, g, or t
tcacacaacaccgaggtcggggagacgcggacagttactccagaaatgcctgccgtgtctgcgttctttagcctcgctgcgctggctgaagtggcagccatggaaaatgtgcacagaggtcagaggtcaactccgctcacccatgatggacagccaaaagaaatgccgcagtcactgtacttatttcctgcgctgaccagtgaagcgccctttcattgtaaaacattgtgctttacctactaccctagccttgtctttaccgagggatgctagtgagtccaagtggtgggaaaatatagactgcaaacaagtgcttgtttgccccacacggcccagatttcatttgnagcagaagttagcatcntggggccattttgtttcttntcagaaccccggattttttngaggggtaaag

SEQ ID NO: 7514 - DNA, 425 bp, Homo sapiens
  III.1142 (AA047573)
cctaaagagatggggtcttactatgttgcacagattagtctcaaactcctgggctcgagcgatcctcccgcctcagcctcccaaagtgttgggattacagatgtgagccactgcacctggccttgggttattgttagaaaagctaaacacaatttcaaatggatacaacttccaaactgataacttctgtttagctgtctctcttaactccatacagcaaattgcacctctccaccctacccaggaacacttcaaatggaagaggtctaaggcatcacctctcaccaaacatattatacatccacacagggtctcttggtgttccttctcagtgaatagcgccactgcccacgcagccagaatatgatgtctctttattcctcgttctcccatgcaattagtcacttggtcagttccagctccta

SEQ ID NO: 7515 - DNA, 444 bp, Homo sapiens
  III.1143 (AA047629)
  misc_feature (342)..(342): n is a, c, g, or t
aataaaaaatggttagaaaagaaatgatgaggaaatagaaagaggtggacagaatcaagatatatttaggagctggaactgacaagtgactaattgcatgggagaacgaggaataaagagacatcatattctggctgcgtgggcagtggcgctattcactgagaaggaacacaagagaccctgtgtggatgtataatatgtttggtgagaggtgatgccttagacctcttccatttgaagtgttcctgggtagggtggagaggtgcaatttgctggtatggagttaagagagacagctaaacagaagttatcagtttggaagttgtatccatgttgaaattngtgtttagcttttctaacaataacccaaggccaggtgcagtggctcacatctgtaatcccaacactttgggaggctgatgcgggaggatcgctcgagcccag

SEQ ID NO: 7516 - DNA, 358 bp, Homo sapiens
  III.1144 (H00625)
  misc_feature (111)..(111): n is a, c, g, or t
  misc_feature (117)..(117): n is a, c, g, or t
  misc_feature (180)..(180): n is a, c, g, or t
  misc_feature (253)..(253): n is a, c, g, or t
  misc_feature (280)..(280): n is a, c, g, or t
  misc_feature (315)..(315): n is a, c, g, or t
aacagtactcactttaaaggaataagaggatagcatacattttttacagacaatatataaatgttgtacataattaacaataacttagttcactaatccaaaataaaacangccaantaaaacataaaaacagaaaatactgccgattctttttcttatgcggacactagtacaaaatangttacttctggccgtggtgctccctgcagcgactgcccgcccatattgcacttgggtcactacatcagcacantcctcctcctggggccagggcccttcnacaggccaccacaccccgccgtcaccgcatacagnattctaaggctcggggacacgtttatatacaggctgtaccttg

SEQ ID NO: 7517 - DNA, 392 bp, Homo sapiens
  III.1145 (R82780)
  misc_feature (74)..(74): n is a, c, g, or t
  misc_feature (77)..(77): n is a, c, g, or t
gaaacgtctcccagatcgctcccttggctttgaggccgaagctgctgtgactgtgtccccttactgagcgcaancancagcctgtcttgtcaggtggaccctgtaaatacatcctttttctgctaacccttcaaccccctcgcctcctactctgagacaaaagaaaaaatattaaaaaaatgcataggcttaactcgctgatgagttaattgttttatttttaaactctttttgggtccagttgattgtacgtagccacaggagccctgctatgaaaggaataaaacctacacacaaggttgggagctttgcaattctttttgggaaaagagctggggatcccacagccctagttatggaaagctggggggtggggggagggggcctttggt

SEQ ID NO: 7518 - DNA, 366 bp, Homo sapiens
  III.1146 (R20609)
  misc_feature (19)..(19): n is a, c, g, or t
  misc_feature (353)..(353): n is a, c, g, or t
ctacagcagccaaaggttnatccctgactttatatggctgcgctgagcgagcgactgagtcgtccgtgagaaaaaagaggcgaggcttttccgagatcgtctcagcgatggcgcttcggtcgcagttttgggggttctcggtttgcaggaaccctgggtgcaggttcgcagccctgtcaaccagctccgagccggcagcgaaacctgaagtggaccctgtggaaaatgaagctgtcgccccagaattcaccaaccggaacccccggaacctgggagcttttatctgttagccagggaaagagcggggttggcggacggtgttttccttcccgtgagtttttggcacaagtttncgagttataaagg

SEQ ID NO: 7519 - DNA, 476 bp, Homo sapiens
  III.1147 (R46117)
  misc_feature (328)..(328): n is a, c, g, or t
  misc_feature (383)..(383): n is a, c, g, or t
  misc_feature (433)..(433): n is a, c, g, or t
  misc_feature (445)..(445): n is a, c, g, or t
tttttttttttttttaagagttcataatatgcctttattttgtaatttataaacaacttctgacttgccctttgaaagttaattataattgatgactgcttttcttagatgcttctgaagcccaagagaggggcagaatgtagttcttgatttaaaaaaacagaaaggggaggaggatgaccttaactacaaataatattccactgcaacattattgctgtaaaacttccaaggctgggctgttcttccaggatgctctcttttgatgggctgtagtgggctggacaggatttatatttacatgtttcaaaacaattaatggcttccntttatttcatgggttctctgagggttcccgtagggaccacaccaccttctggtcnggggcactttgtaggtcgttttcatcggagtctgaggggttgcccccccnggggtttgggtngggtagggccctggaggttggattcccggct

SEQ ID NO: 7520 - DNA, 486 bp, Homo sapiens
  III.1148 (R59151)
  misc_feature (120)..(120): n is a, c, g, or t
  misc_feature (184)..(184): n is a, c, g, or t
  misc_feature (399)..(399): n is a, c, g, or t
  misc_feature (433)..(433): n is a, c, g, or t
  misc_feature (457)..(457): n is a, c, g, or t
  misc_feature (464)..(464): n is a, c, g, or t
  misc_feature (472)..(472): n is a, c, g, or t
gtaagatcatgagtgaactggtcagcaatggggtccagatatatcagtttcccactgatgaagaaacggtggcagagattaacgcaacaatgagtgtccatctcccatttgcagtggttngcagcaccgaagaggtgaagattggcaacaagatggcaaaggccaggcagtacccctggggtantggtgcaggttgagaatgaaaatcattgcgattttgtgaaacttcgagagatgctgatccgcgtgaacatggaggacttgcgagacaggagctcacacccgccactatgaattgtaccgacgctgtaagcttggaagagatggggttcaaggacactgaccctgacagcaaacccttcagtcttcaggagacatatgaagcaaaaaggaattganttcctggggagaactggcagaagaaagaagaagnaatggagacaaatgtttgttatgnagagttnaaggaganagaagctgagcttt

SEQ ID NO: 7521 - DNA, 386 bp, Homo sapiens
  III.1149 (R59152)
  misc_feature (210)..(210): n is a, c, g, or t
  misc_feature (251)..(251): n is a, c, g, or t
  misc_feature (336)..(336): n is a, c, g, or t
  misc_feature (348)..(348): n is a, c, g, or t
  misc_feature (382)..(382): n is a, c, g, or t
ttttttttttttttttattttaaggtatctttaaatataaattgaaccccagaggcagaaaagtcatctacccaacaccggcacattttaaacatgattaggatttgtaggtcaaaatcccgtaacaaaaaagggaagtttttggttgtttccaaaacaaggaaagcatgttaaacagaatcttgtgacttaaacttcactcaagtgagncttaaaactgggcataattttgataccaaaagtaagctgantaaccaatacaaaaaacaggaactaactgggagtttttctcccccaaaacataggtcccaaatccaaaacaacttatataagggntggcaagtaacngggaaaaggtcaaataaaacaacagtgggttccngatt

SEQ ID NO: 7522 - DNA, 486 bp, Homo sapiens
  III.1150 (R26859)
  misc_feature (333)..(333): n is a, c, g, or t
  misc_feature (341)..(341): n is a, c, g, or t
  misc_feature (392)..(392): n is a, c, g, or t
  misc_feature (404)..(404): n is a, c, g, or t
  misc_feature (410)..(410): n is a, c, g, or t
  misc_feature (415)..(415): n is a, c, g, or t
  misc_feature (427)..(427): n is a, c, g, or t
  misc_feature (442)..(442): n is a, c, g, or t
  misc_feature (458)..(458): n is a, c, g, or t
  misc_feature (475)..(475): n is a, c, g, or t
taccagtgatctaataacattttattgttaactgccaataatcaagaaaaatccatgcaagaaaggtgttagttcttctgatctctatacattttcaatgaattcccttcacaggctgaaacttgtacacaatagaattgctttccatagctaaaaacttacagatctaagttagctagacttgacttcatagtctcttaaaatataaagattattaacatccttatacattaaaattttaatattttaaggatttagacaagtgtcacggtaaggatggaatttttaattaactaagggtggaaattgtctgtggattcaggtaatatcccnaaaaaaanaaaaaaaattctgcgggcccctcgtgcccgaattcttgggcctcggggggnccaaattccccnatgggnggggncggtatttaatncgggaatccaggtcntgggctggttccccgngggggaattgttttccnggtcaccattc

SEQ ID NO: 7523 - DNA, 157 bp, Homo sapiens
  III.1151 (R27089)
tggatattactgaatcacagacaatttcatcttagttaattaaaaattcatcttacgtgacacttgtctaaatcttaaaatattaaaattttaatgtataaggatgttaataatctttatattttaagagactatggaagtcaagtctagcctaact

SEQ ID NO: 7524 - DNA, 449 bp, Homo sapiens
  III.1152 (W69719)
tgatttaaccaagagaaatttattgcctcacagttctggagcctggaagtgcaatatcaaggtggagacagggttggtttcctctggaggccataatgaaagcatctgttccaggtctctgtccttggcttgtagatggccatcttctggtggatccacacagtcttctccatgtgtatccttccttcagtttcccttatagggacaccagtgatgtcagattagggatcgaacccaacaacctcatttgaagttactcacctgtttgaaaaccctatgtccaaatacagttatagtgtaaggaactaggacttagggcttacaaatatcggagtggggcatcatccagaccataccatttaaattgcagggtttctctccaatgtgagttcacatacacacattaaggtttgtgggattcagaaaggtattccccagattctctacat

SEQ ID NO: 7525 - DNA, 417 bp, Homo sapiens
  III.1153 (W69847)
ctggaataaaaccctataaatgtaaggattgtgggaaagccttcactcagaactcagaccttactaagcatgcacgaactcacagtggagagaggccctatgaatgtaaggaatgtggaaaggcctttgccagatcctctcgccttagtgaacatacaagaactcacactggagagaagccttttgaatgtgtcaaatgtgggaaagcctttgctatttcttcaaatcttagtggacatttgagaattcacactggagagaagccctttgagtgcctggaatgtggtaaagcatttacgcattcctccagtcttaataatcacattgcggacccacagcgccaaaaaaccattcacgtgtatgggaatgttggcaaagccttttaagtttcccacgtggtgttaaccttcacatgcg

SEQ ID NO: 7526 - DNA, 394 bp, Homo sapiens
  III.1154 (R45959)
  misc_feature (27)..(27): n is a, c, g, or t
  misc_feature (176)..(176): n is a, c, g, or t
  misc_feature (178)..(178): n is a, c, g, or t
  misc_feature (332)..(332): n is a, c, g, or t
  misc_feature (352)..(352): n is a, c, g, or t
  misc_feature (379)..(379): n is a, c, g, or t
  misc_feature (385)..(385): n is a, c, g, or t
ttttttttgtcagggtatttgcagctntccaggactgtggcccctgtccttttcgccgcagctttcatagccacattggcaaaggtccctggatcttatctgcaaaggtctgtcatcaccttgggatttgcagctcattttgaatggctaggtggttaggttttctcttatctttncntctatttggggtttaatgtcctctaacccctgttttgctgaactcttcccagactgggaagtgcttttcctcgggggagaaagaggaaaatcagagttgagtattctgctttctctgaaaactgccaacctgacatcttcatccccagatgggnaccctgtcttctcctttttnctcttgcttgaacataaccagcaatancttgantgtctgcac

SEQ ID NO: 7527 - DNA, 442 bp, Homo sapiens
  III.1155 (R54416)
  misc_feature (417)..(417): n is a, c, g, or t
  misc_feature (429)..(429): n is a, c, g, or t
tttttttttaatagagacaagttctcgctgtgttgcccaggctggtctcgaactcctaggttcaagtgatcctcctgccttgtcctgccaaagtgctgggattacaggcatgagcgccacgcccagctgagattacattactttgagtgtttaatttcactatgacaggaagtagcctaatacatacttttttgtgttaattttctgggattcatcctggatttttagtcttcgtacctgagtacaacaataaaggaaatcacttcttaggatacattaaaattacttctaaacttggccccccacacatggaactgttttcagtttgctatttttaatgggcccatggcttatttatataggacataggcataacactggcttaacactttatgggcctactgttcctctttcttngggattatattnttaaaaagatttt

SEQ ID NO: 7528 - DNA, 502 bp, Homo sapiens
  III.1156 (R54515)
  misc_feature (96)..(96): n is a, c, g, or t
  misc_feature (285)..(285): n is a, c, g, or t
  misc_feature (457)..(457): n is a, c, g, or t
  misc_feature (476)..(476): n is a, c, g, or t
  misc_feature (490)..(490): n is a, c, g, or t
  misc_feature (496)..(496): n is a, c, g, or t
aaaactgcacccgacagacaactttgcacaaagttcctgctttggactgagatggtttacaccagcgagtgaggtcccactctgtggccatgcacnctggcttctgcagctgtgctgtgttcacaaaataaaaaacatgaatagcacgctcacgtttgtcactctgagtggagaactaagggccagacgagcagaggacggcatcgtctgggacttgcctctttatccagcccacccccaggacttccatgaagtagaggacttgataaagactgccataggaancacactggtccaggacatctgttattctccagatacccaaaagctcctcgtccgcctcagtgacgtttacaacaggtcgtttctgggagaacctggaaagttgaacacggagaatcttgctggcaagtttgaaaaacacaggggaaggttgaaaaggggtttatttctttanccctttaaaagggagagcntgggttggggcagnacccangctttt

SEQ ID NO: 7529 - DNA, 381 bp, Homo sapiens
  III.1157 (H24915)
  misc_feature (121)..(121): n is a, c, g, or t
  misc_feature (212)..(212): n is a, c, g, or t
  misc_feature (261)..(261): n is a, c, g, or t
  misc_feature (310)..(310): n is a, c, g, or t
  misc_feature (348)..(348): n is a, c, g, or t
  misc_feature (375)..(375): n is a, c, g, or t
tatccccttactgagcggcctctactaggtggctgtgattaaatgtcccaagcaaggatagggaaggggaatggtttgagcctctggagatcattgtaaccaatcctgccagacctgtttngggcagtggggagcaaacctagataaggacctgtttggggcagcagggagcaaaatctcctttaacaaccaagcagttcctcattcacatnaacagagcgaggctgtgataacttaggaggcagcaatcctaatagtccntcagtgcattttagtctgtctccaactggacaccagtaggtagtgtcangccagagattcggggcagtagataaatgtttcattttnactggatgtcacttttagttttttggntctgtt

SEQ ID NO: 7530 - DNA, 176 bp, Homo sapiens
  III.1158 (H24916)
  misc_feature (171)..(171): n is a, c, g, or t
caaattaagactatgcagatttcatatatttctgaatcaaaaacacctttgtcttcacagtatgagttagaatgcagcctgagctgaaaatcaagaaactagaaaagaaagtggtagagataactatattaaaaatctgttaggcattttctttaaaagtaggtgtttttnttttt

SEQ ID NO: 7531 - DNA, 454 bp, Homo sapiens
  III.1159 (N72176)
  misc_feature (401)..(401): n is a, c, g, or t
  misc_feature (442)..(442): n is a, c, g, or t
  misc_feature (453)..(453): n is a, c, g, or t
caagagacaaaatttaatatatgcacacagttttatatataatgcagcatcacaccatgtagggcatttactcttattttatacattcagatatgtttgaaacacttcttaaggctacaaaacagaacatagaaaaataaacaggaatatattcaacacttacaaaaagtgatatgataaagaatataaagtactagtttccttttaacacttcaaaagatatgtatatatacttttttttacaagtaacatcacaaatgatcacatcttcacatgctcttaaagtattatttgtactcagtgtaaggctattatcgtttttcatacataaaattttctagctctggtaacacaatgcaatttttaatccattcaagtaagttcaaccccaaagttggccngcttccccagcattaaggacatggcacccaccccctcttcnaaggattttcnt

SEQ ID NO: 7532 - DNA, 419 bp, Homo sapiens
  III.1160 (W00456)
tgactggggtttgatctcagcttctgaaaatgtttaaaaattggaaggaaatactactcatatcttcattgtcactttgtcttacctcaattgagtaacagaatatagctcctgaaggaaacactgatttgctttctgtttcccatatctcacctctaggatatgatggaagaagtgcttgaaagagaattttagcagatggtacttttcttagtgacctctggaataaaagaactgacttttgatagttttaaaattaatctttgcatgaaggttggtttcgctttttttcctttaagtttgtttttaaatgtattagtccaggggattttgccttatgctgaggtcaaactaaggataagcaagcttttgtccttcattttaactgttatgtcatactggttatggttgacatattt

SEQ ID NO: 7533 - DNA, 442 bp, Homo sapiens
  III.1161 (H53139)
  misc_feature (86)..(86): n is a, c, g, or t
  misc_feature (376)..(376): n is a, c, g, or t
  misc_feature (383)..(383): n is a, c, g, or t
  misc_feature (403)..(403): n is a, c, g, or t
atactcattgatttgagtaattagaaaaaaaaggaagcattgtaagcagcattctgcagctgaatttatccctgtctttttacttntaactagagttggagaaaaaaatgtaaattacactatttggtttcatttcttagtttggaaaaatgagtatgaccagcagtaattaattagcagaggcactatttatgtaatggtttccttcagatagtgtaccttgaggggggaaagtagggaagtttgcatattttgtggggctttagtgactataatttaggcaaaacaatatcctggaatgtattagggaaataaaaatgacagattccatcttgccggtattttcctgccccggaaaagctatttatggtaaggngttaaangttgtatttgtattgtaggnacaaaggtaggccgcaaaggtggggctccctagtcactt

SEQ ID NO: 7534 - DNA, 370 bp, Homo sapiens
  III.1162 (H53245)
  misc_feature (311)..(311): n is a, c, g, or t
gtggctatactaagagtttaaaagaaatcatttatgtggctagacatactgacttctgtagcagagaatagatagggagcagtggctctcattagctttggagatgataataaaactggaaaagatcagaaaagtggaaaatgatctttgcatctgagtgcactgattcatgatgtggaaagataaaagaaagtcctattttttttaatagtccttaaaacgcaaatggaaaagtaaaaaatctgcagaaagtgagccagcttttctttccttttgatagaacgaagaacattccagtggaaggtgtaganatacatggctaatttcctgtggactaatttagctttctatggaaatgaggaaagtaaat

SEQ ID NO: 7535 - DNA, 171 bp, Homo sapiens
  III.1163 (AA033725)
  misc_feature (134)..(134): n is a, c, g, or t
  misc_feature (168)..(168): n is a, c, g, or t
agcaggaaccctaccatgggccatttaaagtgtttcaaatcttagggggctgagcctggtggtcacacctgtaatctcagcactttgggaggctgaggcaggaggattgcttgaggttgggagttcaagaccantctgggcaacatggcaaaaactcattgtcttaanaaa

SEQ ID NO: 7536 - DNA, 412 bp, Homo sapiens
  III.1164 (AA033726)
  misc_feature (195)..(195): n is a, c, g, or t
  misc_feature (254)..(254): n is a, c, g, or t
  misc_feature (285)..(285): n is a, c, g, or t
  misc_feature (341)..(341): n is a, c, g, or t
  misc_feature (372)..(372): n is a, c, g, or t
  misc_feature (384)..(384): n is a, c, g, or t
  misc_feature (407)..(407): n is a, c, g, or t
acagccaagcagattaaccccaggcagaccgataaaaagacctccagataggcagacagacagatggaccaccaacctggacagacagccaaagcttcagagatacagtccacaggtggacaaagggatccccagccagagagagagagaccagccaacagcttgatagaccagtgcagccagagagaccaccanacagagcccccaaaagacagacatctctgctagctggacagccaggtggaccccctaangttagattactagacatgatataaacagatnccctgctgaacagatacacagagttctcagaccccacccccaccctcaggtggctnggctggcttgacagaccttctggccagacanactcctaaccanccagatggactgccagacaggcngacat

SEQ ID NO: 7537 - DNA, 416 bp, Homo sapiens
  III.1165 (N62538)
gctaggagactaacgtaaggtcctgaatgcaagcccaaccttgattatgattaaaacagaaaaagatatacttcacaccttggtttttccatctctaaaatgggtagaattatcttccttgtgccttcttaggaggtgacacaatgatacccatgggcagcattttctttctttttaatcagtaaacgtaaacaaaaacctttgtaaggatggaagctattggaaagtaccatataaaggattaggaccgtaaatccagggaaattctaagcattctgaaagctgcttttaggcagggcagcagcaaaagaccagctggtagattgagacctttctgaaaaacctgacttcattctcttgtggttccattttcctttttttcaaatggggtctagtggcttagctgtggttattcc

SEQ ID NO: 7538 - DNA, 628 bp, Homo sapiens
  III.1166 (N79206)
  misc_feature (326)..(326): n is a, c, g, or t
  misc_feature (467)..(467): n is a, c, g, or t
  misc_feature (510)..(510): n is a, c, g, or t
  misc_feature (546)..(546): n is a, c, g, or t
  misc_feature (592)..(592): n is a, c, g, or t
  misc_feature (603)..(603): n is a, c, g, or t
  misc_feature (619)..(619): n is a, c, g, or t
gtggagcccaggagttcgagaccggcctgggcaacatagcaagaccttatctctatttaaaaataaataaataaataacatctcttacaaaatcctgtttactattatctccatattgcctagccattgggatctgaagctactgaaggggggagaaatcctagccaattaaacaattcttcaaaacaaactaaaatccttaagatataatttataactcatttcaacttttttaaaatacggggcattactgacatctataaacaaaggcaagagaggaaggtgcagatggaggtccctttttcaaatcaaacttcctactccanatcaggaattggtaaaattggttttaggaattccttaaaattaaaggttttggtggggtttttttccccccaggaaaacctggtgttgaaggtccagttccatcaaaaagtcatccatcaccccggttcaccttcctcagnccatggggatctcacttcaggctggggccaacagtttggaggngggtactgggtccccttggtacagatgggtcaaggnccctttaattggggggtcagctgacttggcctaggccaaatggccncctttttaccnggtccccccaggggcngtaattttg

SEQ ID NO: 7539 - DNA, 288 bp, Homo sapiens
  III.1167 (T81585)
tagacataaaccaaaaagaagaaaaaaatcaggataaagtgtcaactatcattttgtttgcaaggaggagtcaggaaaaggaacaagttatcagaaaaatattctaagaccatcccaaagtagctaggttacataatcttaagagtcaaatgccaaaattaagtattataccacttaatccacaaatgaacaaaaggggagtcaaaagtttatcctgtttagtgtaataacttttacatcacatatagtgattcacttcttaaaagtggcactggcaacttttagaag

SEQ ID NO: 7540 - DNA, 431 bp, Homo sapiens
  III.1168 (T83398)
  misc_feature (382)..(382): n is a, c, g, or t
  misc_feature (397)..(397): n is a, c, g, or t
  misc_feature (410)..(410): n is a, c, g, or t
  misc_feature (425)..(425): n is a, c, g, or t
aaaatggaaaaataacatccatagtgaaagatagctctgcagccagaaatggtcttctcacggaacataacatctgtgaaatcaatggacagaatgtcattggattgaaggactctcaaattgcagacatactgtcaacatctgggactgtagttactattacaatcatgcctgcttttatctttgaacatattattaagcggatggcaccaagcattatgaaaagcctaatgggaccacaccattcctgaggtttaaaattcacgggcaccatgggaaatgtaggctggaacgtctccagtttccttctttgggcaacttctgttattatggcacgtggaggcctttcccgggaggccaggcgaggcattatggctggccntggaggggacctttnctattctttaccnttatgggctgggggnattctt

SEQ ID NO: 7541 - DNA, 485 bp, Homo sapiens
  III.1169 (T79418)
  misc_feature (336)..(336): n is a, c, g, or t
  misc_feature (344)..(344): n is a, c, g, or t
  misc_feature (481)..(481): n is a, c, g, or t
ttgcccattaaaaaattttattgatacataatatttatgcatgtgatattttgttacatacacagaatgttaaatgatcaagtcagagtagttagggtaaaaactaaaaatagaactaccataccatccagcaattcttttgcctatttttaaattacttgccttttattgagttgtaagagctctttatgtatctggttacaagacttttatcaaatatatgatttacaaatattttatcctattctgtgggtttcctttcaatttcttgatagtaacttttaaagcttttggggttttcatggaaaactttgggtgaaagttcggctatttttnctttgggncccacttaggatacaggtgtctatattcattctggacaggagggaagggtgataggcaggaaaagggacaaatggaaaaaatggacaacttcacaggttcatattaggtaatggaaattatttaggaaaattgcccnttcc

SEQ ID NO: 7542 - DNA, 404 bp, Homo sapiens
  III.1170 (T79504)
  misc_feature (197)..(197): n is a, c, g, or t
  misc_feature (343)..(343): n is a, c, g, or t
  misc_feature (354)..(354): n is a, c, g, or t
  misc_feature (376)..(376): n is a, c, g, or t
ggcacgagcggcacgagcggcacgaggatgcctgtcaaactcttctaaaacgcctcgaacccatcatcagcaagaatcctaaaggaacttggaaagactgggcacagactgcttttgatgaaagcattaacctttcagctgttggatacttcagaggttatgagtcagacatgaactgggagaaaggcgaaggcagncccttcgaatactttgtttatggagctgcctgttccgaggttgaaatagactgcctgacgggggatcataagaacatcagaacagacattgtcatgggatgttgggctgcagttattaaatccagccattggacattagggccagntttgaaggtgnctttatttcaagggctggggantttattacattaggagggaactgaattt

SEQ ID NO: 7543 - DNA, 223 bp, Homo sapiens
  III.1171 (R14971)
  misc_feature (2)..(2): n is a, c, g, or t
  misc_feature (4)..(4): n is a, c, g, or t
  misc_feature (16)..(16): n is a, c, g, or t
  misc_feature (55)..(55): n is a, c, g, or t
  misc_feature (58)..(58): n is a, c, g, or t
  misc_feature (82)..(82): n is a, c, g, or t
  misc_feature (158)..(158): n is a, c, g, or t
  misc_feature (165)..(165): n is a, c, g, or t
  misc_feature (203)..(203): n is a, c, g, or t
gnanggtttagcagantagatttattatttgattgcttcgaggtattttcccagnggnggaggtccagaaagtacacacttnggaagcccggtttcctttaaagtaagaatcattccacttaagcccccaacattagaccagtgcattcgtgtcaggnatatgtngtccaggcgagcaacctttaacttgtgctcctgcatgngtctctgaacgccttctcca

SEQ ID NO: 7544 - DNA, 412 bp, Homo sapiens
  III.1172 (R16465)
  misc_feature (278)..(278): n is a, c, g, or t
  misc_feature (332)..(332): n is a, c, g, or t
  misc_feature (392)..(392): n is a, c, g, or t
  misc_feature (407)..(407): n is a, c, g, or t
tgctttcaggagctagcagaaaataactcaaagttgaagactctggaagattttgctttaacctaactcgcattgatgtattaaatttataattttagcattcccaatagatcctatcattccttaaacataataccctttgtcttggagtagaatactaagttagagttagtggatttctagtttaggagaggagctcaaaactataatctttaacaaattgaaaaatgaaataggggtgttttccctttttgtgcacacctatattaccttaaganatttccttccatagacagctgcctcaaaggggaaatcctcttttaaaccctagnttgggccgccggagggtccagtccctaggtcgggagccttaggggggggggccggagacngcttccaccttcgtnctgga

SEQ ID NO: 7545 - DNA, 407 bp, Homo sapiens
  III.1173 (R14446)
  misc_feature (323)..(323): n is a, c, g, or t
  misc_feature (334)..(334): n is a, c, g, or t
  misc_feature (376)..(376): n is a, c, g, or t
taaccacaaaacctatctattaggattaatggaggctattttttctttaccaattgctatataactacttaagacttcatgtaatcagctgagatgctacaaatgtattgcctgtcaactccagtaaaaaagcgggcagttaattaaagggatgtcttgctgttaaacaaacttgcagtcaattgcttgtaagtaacatttagtttgatatgtagtcaaagggcaggaaaataagtgtttagggcaggactgggctttttgcaacgtaaaaaggggaagtgattatattgggggtcaagatgagtaacctttccaactgggcntattttccctncttaaaagtatatttcacatatccggaggaagggtggaaggncatatagggccttagggttgggtccattttg

SEQ ID NO: 7546 - DNA, 478 bp, Homo sapiens
  III.1174 (R40770)
  misc_feature (195)..(195): n is a, c, g, or t
  misc_feature (349)..(349): n is a, c, g, or t
  misc_feature (377)..(377): n is a, c, g, or t
  misc_feature (432)..(432): n is a, c, g, or t
  misc_feature (450)..(450): n is a, c, g, or t
  misc_feature (457)..(457): n is a, c, g, or t
  misc_feature (473)..(473): n is a, c, g, or t
tttttttttaacgacaaaaaacaaactactcctccgttctcacctcccactttctaaaacctggccattatttcaagattgaacatgttcttgtgaaaatattatgatttaaggtgatgcctactattattccactggtttgggggtatttaggaataagttttaaaatgagttgcaagtaggaagcttggcagnaaagacagacttagggtagggcacaagttattgtatgttaattgggaaaacagctgggtttaggaatttgctaattcataggcagttcagggaaataaaggcaaatctcaccaaccccacctttacacacttgtattcccaaatgttgctcaangcccattcggaatctggcccttaattcngccatgtttttcttccccggaattattaatacttttcttaggctaaatgtggggntccttaccaattaaaatnttggctntggacggaccgttagnggggg

SEQ ID NO: 7547 - DNA, 403 bp, Homo sapiens
  III.1175 (R36009)
  misc_feature (303)..(303): n is a, c, g, or t
  misc_feature (398)..(398): n is a, c, g, or t
tccccaggaaaatgtgcaaatatcaaggttacctgggtctgctggtcacttctagtttttggactcttgaagatggtgagttttgctaatgatgcgcggctgtttaagaaccaggtggcttttctggcaatcactcttcgtgtgccatcttttataaaggtgcttcttgttgctaagagatcagttgcttagagaccaaaccattaaaaaaatatatatgtcaggggccaacataaattatagccaaattttgtcatttcagctcgccccctggaatgtttgggcttttgtaataggatccgnggccgtacccaggaggaggctaatttaccttaattcaccaaataggggaaacttgacccctgggggggggggggaaaagatccttttgcggacgngtccc

SEQ ID NO: 7548 - DNA, 397 bp, Homo sapiens
  III.1176 (R36385)
  misc_feature (356)..(356): n is a, c, g, or t
  misc_feature (371)..(371): n is a, c, g, or t
  misc_feature (379)..(379): n is a, c, g, or t
  misc_feature (389)..(389): n is a, c, g, or t
tagaaaaagactgtaaagtagccccacaattcccacatcttcatactccaccctgcattcaagttttcctggcacaggtatctatgtgtgtgcatgaatctatttttacggcatatgtctaggaccccctacgaggagccaaagtttcagagagcccagcaactatgtaactccatggaagggaggcatgatattactctctgttcacaggagcgtacgcacagatcttttctcctcctcatgggtcagttttctatttgtgattagtaattaggcttctcttgggtacgctacgatctattacaaaaggccaaacatttcagggggggcgagctggaaattgacaaaatttggcncataatttatggttngggccccntgacatatanaatttttt

SEQ ID NO: 7549 - DNA, 463 bp, Homo sapiens
  III.1177 (H13056)
ctggaagggatgatataattccagctcagtcacactgtgtcagagtgatacaatgcaaagatcaggagacccgagttccggtcctgtatttgctgccaactagcagcatgagctgaggcacatcatttaatctttttggaattcatttttctcgtgcctagaagaacagaagtggattgtattccttcttgccttcttttcctttcttctttccctccttctttccttttctcttgctcaaacatgtattcactaccactcaaaaaccatttgttgaacaaagcaaacaaatgaatctcccaagccttgggttcatcctgtgatttcctcaattcccacctgccttaaaattacttcagtggaagccctgttccttgggaggaaaatttcagtggggtggtttaacccagaggaaggtgggaggttcaaaaaggaggtgggccatggaaggaacaaggggcct

SEQ ID NO: 7550 - DNA, 412 bp, Homo sapiens
  III.1178 (H13265)
  misc_feature (10)..(10): n is a, c, g, or t
  misc_feature (367)..(367): n is a, c, g, or t
  misc_feature (388)..(388): n is a, c, g, or t
cattttatantgaaattttattttcaggattttaaagggcagaatgttagtttcaatacagcagaaatgcaatttgtaaatatatacttctattgatgttggtgttccccttcttgtttgtctccagggctgaacatcgtcactatgctaggcaaggatcccagtgggcaaggaaaggcctgcagatgcctctcccaacgaaggacctgtggcacccggggccttggctgctgagctgggtcatttcttcacacattgggcttgactttggggagatgaggaactagggaggggggccagacaatgaatgttcaaggccaaactctcatgggagagcctgggggccaagaggcaactctgctttccngggggatgggagattaaaccntgaaagccgagccacggcaagagg

SEQ ID NO: 7551 - DNA, 484 bp, Homo sapiens
  III.1179 (T71620)
  misc_feature (382)..(382): n is a, c, g, or t
  misc_feature (459)..(459): n is a, c, g, or t
  misc_feature (470)..(470): n is a, c, g, or t
aggaaactaaaagtctgttacatttatttctaactgttgaatgaaaaaaatacattatattctattgccagatcttgaatataccttatctcttaataatcccacaggaatcctaaaaaacagatactatcaatctctactttacagttgaaaaaactgtggcagaaaggttaaatgacttgccccacgtggatttcaggcctgtctgacagagcttcttgaccctgtatgtcttctcggccctgtatgtctatcaagaatgttgtacttttaaatgctatttacatagatgaagattctgcaaactttttcttaaaggccatatattaaatatttcaggccttctgggggcataggagtttctgttgcaaccactctaagngcccaaagcaaccacagggcaatatgtaaaccaaatgggggcatgtgttctcccaataaaacaggggggccagtttnccacctgctgntgtaggacaggggg

SEQ ID NO: 7552 - DNA, 390 bp, Homo sapiens
  III.1180 (T82041)
  misc_feature (235)..(235): n is a, c, g, or t
  misc_feature (362)..(362): n is a, c, g, or t
  misc_feature (372)..(372): n is a, c, g, or t
ggcacgagatcactgtgatcttaccaaagaggagctggagccaagagttttccgagatgtgaccgtaaaaggaattgatgcttctgattaccagacagtccagctccccaagggtactgagtcttccagaaactgaatcactggttgattgatgatgacgaagaatgtctctgttcctttgcaatgagaggtcaccaatagggcaccagggtgtttatcaaggcccctcccaccnggagggtctgggaccacacaggccacagattagggaatcagaacattgtttgtgaagggaaggatgaggaataaaggaggcgctgggatgtttccccacaatgtttctgtggaaactagggggcttntttattaggnttgggtggaatttaccct

SEQ ID NO: 7553 - DNA, 112 bp, Homo sapiens
  III.1181 (H95890)
  misc_feature (1)..(1): n is a, c, g, or t
  misc_feature (36)..(36): n is a, c, g, or t
  misc_feature (42)..(42): n is a, c, g, or t
  misc_feature (46)..(46): n is a, c, g, or t
  misc_feature (48)..(48): n is a, c, g, or t
  misc_feature (49)..(49): n is a, c, g, or t
  misc_feature (51)..(51): n is a, c, g, or t
  misc_feature (64)..(64): n is a, c, g, or t
  misc_feature (75)..(75): n is a, c, g, or t
  misc_feature (99)..(99): n is a, c, g, or t
  misc_feature (102)..(102): n is a, c, g, or t
  misc_feature (103)..(103): n is a, c, g, or t
  misc_feature (109)..(109): n is a, c, g, or t
nctcccgaacactgagaaatagtgcactccaagaancgtggntctncnncncatccaactccgnaagtctgaatntcccaaggtgggcaccatcttacngtnnctctcnctg

SEQ ID NO: 7554 - DNA, 241 bp, Homo sapiens
  III.1182 (H95891)
  misc_feature (13)..(13): n is a, c, g, or t
  misc_feature (15)..(15): n is a, c, g, or t
  misc_feature (56)..(56): n is a, c, g, or t
  misc_feature (62)..(62): n is a, c, g, or t
  misc_feature (87)..(87): n is a, c, g, or t
  misc_feature (142)..(142): n is a, c, g, or t
  misc_feature (148)..(148): n is a, c, g, or t
  misc_feature (151)..(151): n is a, c, g, or t
  misc_feature (152)..(152): n is a, c, g, or t
  misc_feature (153)..(153): n is a, c, g, or t
  misc_feature (185)..(185): n is a, c, g, or t
  misc_feature (195)..(195): n is a, c, g, or t
  misc_feature (216)..(216): n is a, c, g, or t
  misc_feature (218)..(218): n is a, c, g, or t
  misc_feature (234)..(234): n is a, c, g, or t
tacagtatgaatntnaattatctattgacagctgttaacagcatagttacacttgngggccnagagcagcactttcaccgaggttcncagcactctagagagatagcaagagcacagggacctttgccaaagatggctggcncagcanttnnncagtatggatcattccttggcctcaacgagantcagaaatcnaattaaacttgggaccaacgncngacagggtgtccaaanatcttgg

SEQ ID NO: 7555 - DNA, 480 bp, Homo sapiens
  III.1183 (N67810)
ccaaggcagtgtctctctctgtcacccaggctggagtgcagtggttcgatctcattgcaatctccgcctcccaggtttaatcgattctcgtgcctcagcctcccgagtagctgggattacaggcaagtgccaccacgcccggctaatttttgtatttttagtagagacagggtttcgccatgttggccaggctggtctccaactcctaacctgaagtgatccgcccaccttggcttcccaaagtgctgggattacaggcgtgacaacccgcgcccagccgagattaattcttaataaattaagaagagagaaaacctgtcaaggttcgaaaatatgcactgaaggaatcagatctggtagttaaaaataagtcacttcacagaacactgtaccctgacgcaatatccacccagggaaaattaatgagcacatcaatgtaatacatcctgaataaataatgacatcaacaatagccacttt

SEQ ID NO: 7556 - DNA, 432 bp, Homo sapiens
  III.1184 (W03394)
  misc_feature (398)..(398): n is a, c, g, or t
atgtaaagtaattcctcatttgtgtcactatgatatagagatattaaaggaatgttggtttgctaaatagtatagatgtccatttgtactatagtttactgagcattttaaattgctgctacatactgtcttcttaaaatgtaagtgatattaggcactacaataagtttctcttgtcaattctgtttacaattcaatcagatcacagttttaactggattatatgcaaatacctacagattcacctgcacaagtagcagacactggaaagtcatgtagtaatatgacaaaatgcttgacatttaggggtaggattagacaaagtggctattgttgatgtcattatttattcaggatgtattacattgatgtgctcattaattttccctgggtggganttgcgtcagggtacagtgttctgtgaagtgactt

SEQ ID NO: 7557 - DNA, 386 bp, Homo sapiens
  III.1185 (H01679)
  misc_feature (15)..(15): n is a, c, g, or t
  misc_feature (353)..(353): n is a, c, g, or t
  misc_feature (359)..(359): n is a, c, g, or t
  misc_feature (369)..(369): n is a, c, g, or t
  misc_feature (379)..(379): n is a, c, g, or t
tgtaacagttatgtncctttaaataatagagaatataaaatattgtaataatatgtatcataaaatagttgtatgtgagcatttgatggtgctcgatgagttacttgtatttgatgggattgtttggatgtatttaatgggagtatttggagtatttaacgggatgtaaaccctgggatgtacctgattttgttactgttttattttaataggtaatatatatacagggtaaaagcttcaaatgggtacaaaagggttaacagtgatcgtgaagtctctgtcctttccctcttccctgccatccagttccccctccaaggaggcaagtacccgaaacccacctgcttacggcntttttngagattgggnccacaatttnttaacca

SEQ ID NO: 7558 - DNA, 239 bp, Homo sapiens
  III.1186 (H01680)
  misc_feature (135)..(135): n is a, c, g, or t
  misc_feature (176)..(176): n is a, c, g, or t
  misc_feature (198)..(198): n is a, c, g, or t
  misc_feature (222)..(222): n is a, c, g, or t
  misc_feature (228)..(228): n is a, c, g, or t
tgacaaatcataattgtatatacttatggtgtacaaagattcataaatttgcttacatgaaaataaaaatttctacatatcaaaaaataccagaacaaagtcaaaagacaaatgacaatgacaaactggaaagangatatttgcaggatctcttacaaaaggctaatatctaaggncacacctgttaatacaaaacanaggaccaacaaccaacaggaaaantagggncaaggattagg

SEQ ID NO: 7559 - DNA, 328 bp, Homo sapiens
  III.1187 (R19071)
  misc_feature (106)..(106): n is a, c, g, or t
  misc_feature (283)..(283): n is a, c, g, or t
  misc_feature (307)..(307): n is a, c, g, or t
  misc_feature (314)..(314): n is a, c, g, or t
tgagctgattccagctgtgatgacctgcatcgtgagcagacagttgtgcctgcgaccagatgtggacaatcactgggcactccgagactttgctgcccgcctggtngcccagatctgcaagcattttagcacaaccactaacaacatccagtcccggatcaccaagaccttcaccaagagctgggtggacgagaagacgccctggacgactcgttatggctccatcgcaggcttggctgagctgggacacgatgttatcaagactctgattctgccccggctngcagcaggaaggggagcggatccncagtgtnctggacggacctgt

SEQ ID NO: 7560 - DNA, 473 bp, Homo sapiens
  III.1188 (R44112)
  misc_feature (266)..(266): n is a, c, g, or t
  misc_feature (333)..(333): n is a, c, g, or t
  misc_feature (356)..(356): n is a, c, g, or t
  misc_feature (374)..(374): n is a, c, g, or t
  misc_feature (396)..(396): n is a, c, g, or t
  misc_feature (426)..(426): n is a, c, g, or t
  misc_feature (464)..(464): n is a, c, g, or t
tttttttttcagaacttacaaaccaaacttttattctgagaaactggctgtacaatatctaaaaagaaagtgacatgaaggaagcaatctacaacttccttccgcttagcgagcatgcatgtgtgtacgtgcacgtgtgtacatgtctgcatgtgtgggaatccgggggctggcaggtggagcatcacggtagcaggctgaggggagccggagttgggctgggagccattggcttttgggagtccctgggagctggagggggactntccccagcctcctgcttccccccacaaaggggcactgccgctgagtgggagacgggggacgatgccngggggagggaactgggagaaggntggggaggtgggggcctncttttggcccttcccctgtttngggggaaagttgaaggacccacgatgtaantttttgggacatttcccaggggccagagggaagcagtntttgggggg

SEQ ID NO: 7561 - DNA, 170 bp, Homo sapiens
  III.1189 (H84002)
  misc_feature (163)..(163): n is a, c, g, or t
aactaagttgtatatctattttgagcatatcattcttccacctattttttgaaaacttttaaacctcaggaaatttgaaagaattgtatgatatatccaatgtaactaagttgtatatttattttgagcatatcattcccctacctattttttgaaaagtttnaaacctc

SEQ ID NO: 7562 - DNA, 434 bp, Homo sapiens
  III.1190 (H84003)
  misc_feature (13)..(13): n is a, c, g, or t
  misc_feature (41)..(41): n is a, c, g, or t
  misc_feature (263)..(263): n is a, c, g, or t
  misc_feature (426)..(426): n is a, c, g, or t
agacggagcctgnttgcccaggctggagtgcagtggcagantctcggctcactgcaacctctgcctcccaggttcaagtgattctcctgcctcatcctcctgagtacctgggattacaggtgcccgccaccacacctggctaatttttgtatttttagtagagacagggcttcaccatgttggccaggctggtctcgaatgcctgacctcgggtgatccacccgccttggcctcccaaagtgctgggattacaggcgtgacanccacacccagcctaaaatgtttttatcttttaaaatcttcctatctttcaggatgaggatataaaagtgctgattagtaggcagacctaggaaagaaatttcatcagggcattccttcactccttaggacatattaaaaatattaacatggggaactaagggnactaacct

SEQ ID NO: 7563 - DNA, 254 bp, Homo sapiens
  III.1191 (H81086)
gagagagctagcaccatgagcttcataccctgaaaaaaacaaaagtattaataagcttgttttaaaacaactgatttcccagacccacctaacatgcaaagacaagaggaacattcctcactcagtcagaatctacactgaaacttatgtgaatgaacttgacccgggctggcagcaatccagcaatcttcgtcactgaatgacttaacagaacactgtgttcttgggcaaaagcacaaaaaatgtgttgagat

SEQ ID NO: 7564 - DNA, 356 bp, Homo sapiens
  III.1192 (H81087)
  misc_feature (156)..(156): n is a, c, g, or t
  misc_feature (300)..(300): n is a, c, g, or t
cttaccttctcatttgcatcttacccttgtggccgaattagcaggacctgtgtgagaatgacataacttcaccgcctcttacctgctccagctgcaacgcgtgagagtgctgaactgtggcctagatttttctctagggctttccacggaaggagntcaacacattgtttctggcttttcttgctgtccctccctaatatgcaagcttaggttgctttggaattttccaggtacagtgttggagaagttgtaacacaggaggaggccagagcgtaggtttagtgtggtggggagagggtnggagcaattgttcaagggaagattgaaagtgaccaaaatgggcatgagggtaaaaa

SEQ ID NO: 7565 - DNA, 164 bp, Homo sapiens
  III.1193 (N20406)
  misc_feature (6)..(6): n is a, c, g, or t
  misc_feature (9)..(9): n is a, c, g, or t
  misc_feature (18)..(18): n is a, c, g, or t
  misc_feature (24)..(24): n is a, c, g, or t
  misc_feature (45)..(45): n is a, c, g, or t
  misc_feature (54)..(54): n is a, c, g, or t
  misc_feature (82)..(82): n is a, c, g, or t
  misc_feature (100)..(100): n is a, c, g, or t
  misc_feature (119)..(119): n is a, c, g, or t
  misc_feature (123)..(123): n is a, c, g, or t
  misc_feature (125)..(125): n is a, c, g, or t
  misc_feature (139)..(139): n is a, c, g, or t
  misc_feature (161)..(161): n is a, c, g, or t
aagcanccngtatgcgcngtggcnactccaataggtgctgagtgnacagagtgnaataagacagagacctgccctcacgagnaaagtagatcctgcatanagtgtgatgtatgtggaanaaanangtttcacacaaacnaggcctgtcagctaaagaagtntga

SEQ ID NO: 7566 - DNA, 431 bp, Homo sapiens
  III.1194 (N20407)
accaagcaaatgttcacatttattaatacaggttatgtttttaagaatgaacataaaaacagtgacatactattttgtaagtacattaatgatatcatattttaatatatacagactaataaacaatgacagtaaatcttcactgatttagataaaatgaatagtcactaaattaataaaaccagtgctagcttctacttacaatacagttatattacttttatgtaagttattctatggtatttggaaatagtttgctcttttatttttttattttttatttatttttattttttgagatggagtcttgctctgttgcccaggctgggaggcacagtggcgcgatctcggctcactacaaggtccgcctcctggggttcacgcccagtctcccggcctcagcctccccgagtagccgggggactacaggg

SEQ ID NO: 7567 - DNA, 405 bp, Homo sapiens
  III.1195 (T86329)
  misc_feature (1)..(1): n is a, c, g, or t
  misc_feature (41)..(41): n is a, c, g, or t
  misc_feature (53)..(53): n is a, c, g, or t
ntttcggcacagcgcacccatggaacttttgggcgtgcagncaggctgtcaancttgatgatgaccgatacctgcgggctgccatccaggagtatgacaacattgccaagctgggccagatcattcgtgaggggccaatcaagggctcgctgctgaaggtggtcctggaggattacctgcggctcaaaaagctctttgcacagcggatggtgcaaaaagcctcctcctgccactcctccatctctgagctgatacagactgagctggacgaggagccagggagaccacagcccagggcagggttagcctgcgctttccgccacaagccaccagtgggagcttcaaggggcccgatgggattccatgtggttgcacggcagcaaggggcacgttgttgggccaccg

SEQ ID NO: 7568 - DNA, 409 bp, Homo sapiens
  III.1196 (T86330)
  misc_feature (104)..(104): n is a, c, g, or t
  misc_feature (191)..(191): n is a, c, g, or t
  misc_feature (289)..(289): n is a, c, g, or t
  misc_feature (297)..(297): n is a, c, g, or t
  misc_feature (326)..(326): n is a, c, g, or t
  misc_feature (335)..(335): n is a, c, g, or t
  misc_feature (337)..(337): n is a, c, g, or t
ttcaaaaccggagatatcatcagtcacttctgtttataagctgggacacatttgggaagccagtgaaatggagagaatgcttgttcattgacattgactttctngtccacgtggggatgccacctccacctggacgtccagcagagagggatgtggcggaaatgtagcgagacttggactggagtcgggtntccggccagcaggggatgtccgcgctgggcctcccttgcgcctgcttagccggagggaatggtgcttgcggggtggagctgggagggaggagggcctntttggctnctttcagctcagcctgagccaaagctggntccccagantnttggggccccagtgaccctccttaccttgtccttagatgcttaacatttttgtttggttttcttataaaaat

SEQ ID NO: 7569 - DNA, 558 bp, Homo sapiens
  III.1197 (R59300)
  misc_feature (414)..(414): n is a, c, g, or t
caaagatccaagacaaggaaggcattcctcctgaccagcagaggttgatctttgccggaaagcagctggaagatgggcgcaccctgtctgactacaacatccagaaagagtctaccctgcacctggtctccgtctcagaggtgggatgcagatcttcgtgaagaccctgactggtaagaccatcaccctcgaagtggagccgagtgacaccattgagaatgtcaaggcaaagatccaagacaaggaaggcatccctcctgaccagcagaggttgatctttgccggaaaacagctggaagatggtcgtaccctgtctgactacaacatccagaaagagtccaccttgcacctggtgctccgtcttcaggaggtgggattgcagatcttcgtgaagaccctgactggtaaggaccntcattttcgaggtgggagccgagttgacaccatttgaggattttcaagggcaaagttccaaggacaagggaagggcttccttcttgttcagcaggggttgtttttttgttgggaaacagttgggaggttggacgtacctttttt

SEQ ID NO: 7570 - DNA, 419 bp, Homo sapiens
  III.1198 (R59301)
  misc_feature (319)..(319): n is a, c, g, or t
tttttttttttgggaatgcaacaactttattgaaaggaaagtgcaatgaaatttgttgaaaccttaaaaggggaaacttagacaccccccctcaagcgcaggaccaagtgcagagtggactctttctggatgttgtagtcagacagggtgcgtccatcttccagctgtttcccagcaaagatcaacctctgctgatcaggagggatgccttccttatcttggatctttgccttgacattctcgatggtgtcactgggctccacctcgagggtgatggtcttaccagtcagggtcttcacgaagatctgcatcccacctntgagacggagcaccagggtgcagggtgggactctttctggatgttgtagtcagacagggtgcgtccatcttccagctgtttcccagcaaagatcaacctt

SEQ ID NO: 7571 - DNA, 379 bp, Homo sapiens
  III.1199 (H88113)
  misc_feature (1)..(1): n is a, c, g, or t
  misc_feature (191)..(191): n is a, c, g, or t
  misc_feature (216)..(216): n is a, c, g, or t
  misc_feature (243)..(243): n is a, c, g, or t
  misc_feature (329)..(329): n is a, c, g, or t
  misc_feature (348)..(348): n is a, c, g, or t
nggcatgaatgagatggtggctcccaggatagggatggaccagtgcagctgtcagttctcctatgccacatgcttccgtggcccgcagcctgagacagaggaagaagacagggacttggaagcacaccccatggcccccctcacctcaccgccctctgcgggaagcccggtggttctgccctggaggcctncccgagcccacagctgcaccaccgnacccctgtcgaggaaaagccacatctngccagagtactgctccagggcactgagacagctgaaagccacccctgtccagcacccctgagggcttcatccaactcatggagagnttgctggagcttacaaganttttagaaattttctggggggttggaaacaa

SEQ ID NO: 7572 - DNA, 449 bp, Homo sapiens
  III.1200 (H67466)
  misc_feature (368)..(368): n is a, c, g, or t
  misc_feature (379)..(379): n is a, c, g, or t
  misc_feature (408)..(408): n is a, c, g, or t
gcgcataaatgatctttgtagataccatttcatttactcaaataaccctgcgagccaggcactgttatccctgtgatgaaactgaggctcagagaggttaagacacttgccaaggattacagagctagtaagtggcggaactgggctttaaacccaggaagctagattccaaagtcttgtgttcttaactactaagctacactgttgatcacccttggagtcgtgggttaggagaaaaggaagggaaacaataaggtgggagaagatgaaggacttagggctcaaagctggatgcttccagtgaggtgggaaaacctgtgctgtgggggttttcctccagattacacacacgtgcacactgttttatnatccaggtgcntgaaaaaaaagattatttaattttaggtnttttacccaggggtttttttccagaaggcttttttaattga

SEQ ID NO: 7573 - DNA, 389 bp, Homo sapiens
  III.1201 (H67467)
  misc_feature (178)..(178): n is a, c, g, or t
  misc_feature (189)..(189): n is a, c, g, or t
  misc_feature (262)..(262): n is a, c, g, or t
  misc_feature (290)..(290): n is a, c, g, or t
  misc_feature (320)..(320): n is a, c, g, or t
  misc_feature (345)..(345): n is a, c, g, or t
gaatttaaagacagacacaccctgtctctccaaattagaacaaaacatcactagctctaattggcagggatctcctattaaatggtcagaggtatactagtggatacaaacatactaacattttttaaagcttgccaaacccatgttacgttgtgggagagaaaaaaaagtgtaaaanacaacctggtncatttactaagggttctatcaaattcgcagtgatgaggggtacaaaaggaaaagatgtttacttgtacaaganttccttactgccttcaactatataaaantgaagcaaaaagatttgtgcagtgcaaatntgactcattaaaaatgcttctgaangaattccggggtaaatatctaagttaattatctttttttcagca

SEQ ID NO: 7574 - DNA, 468 bp, Homo sapiens
  III.1202 (N70293)
ttatttatttatttatttatttgagactccgtctcaaacaaacaaacaacaacaacaacaagaaacagttgattaagctgttatgtaggctgggtgcagtggctcatgcctgtaatcccagcactttgggaggccaaggcaggcggatcacctgaggtcaggagttcgagaccagcctgaccaacatgaagaaaccctatctctactaagaatacaaaattagccaggcgtcggtgctgggcgcctgtaatcccagctactcgggaggctgaggcaggagaatcgcttgaaccgggaggcggaggttgcagtgaaccgtgatcacgccattgcactccagcctgggcaacaagagcgaaactctgtctcaaaaataaataaataaataaataaaacaaaataaaataaaaggctgttatgtaagaactaaaaaaaaaaaaaaaaaaagatctttactcgtgccgaatt

SEQ ID NO: 7575 - DNA, 420 bp, Homo sapiens
  III.1203 (W04238)
aaagatctttttttttttttttttttagttcttacataacagccttttattttattttgttttatttatttatttatttatttttgagacagagtttcgctcttgttgcccaggctggagtgcaatggcgtgatcacggttcactgcaacctccgcctcccggttcaagcgattctcctgcctcagcctcccgagtagctgggattacaggcgcccagcaccacgcctggctaattttgtattcttagtagagatagggtttcttcatgttggtcaggctggtctcgaactcctgacctcaggtgatccgcctgccttggctcccaaagtgctgggattacaggcatgagcactgcacccagcctacataacagcttaatcaactgttcttgttgttgttgttgtttgtttgtttgagac

SEQ ID NO: 7576 - DNA, 427 bp, Homo sapiens
  III.1204 (H40118)
  misc_feature (90)..(90): n is a, c, g, or t
  misc_feature (273)..(273): n is a, c, g, or t
  misc_feature (321)..(321): n is a, c, g, or t
  misc_feature (417)..(417): n is a, c, g, or t
gagaggaattataatctctgtcgcccaggctggagtgcagtggcgcgatcttggctcactgcaacttctgcctcctgggctcaagctatncttctgcctcagactgccgagtagctgggattacagatgtgcactaccacggccggctagtttttgtatttttagtagagacggggtttcaccatattggccaggctggtttcgaactcctgacctcgtgatctggccccttcggcctcccaaagtgctgggattacaggcgtgactgcgcgncacccggccaagatataccattcaatgtaggagattattcttacatgnaactgacccaaacaatttaataaaaattaatttttacttttaaatcaaaatgtggggggaggggaaccactctccctctctaacatggacaggctnattttacatt

SEQ ID NO: 7577 - DNA, 433 bp, Homo sapiens
  III.1205 (H40177)
  misc_feature (115)..(115): n is a, c, g, or t
  misc_feature (133)..(133): n is a, c, g, or t
  misc_feature (265)..(265): n is a, c, g, or t
  misc_feature (289)..(289): n is a, c, g, or t
  misc_feature (316)..(316): n is a, c, g, or t
gaagcacttggagaaggatgttgaatacttttgtcatttcatctctgtgacgtacagttgtcatgtcaaccctcctatctgcgggttttgcatctgcaagcacatgcagctgganagtacagcattggcagantctgaaacccgagtaaagagcacctcattttcataaccatgggttctgaagagctaagggagttgaggatgcaccgattttggtatgggggtacggtacaggtacaaatccccgatggatatcactagacanctgtacaatcctctttagcttttnttttgttttatagacagtgtggacgtncatatattgcaagcatcactttgttaaactatgcttaaccctgcaaatgattttaagagctctgtgtgggtggctttcttgggtttgctgattaaaatgtcctgtgtttatcatagt

SEQ ID NO: 7578 - DNA, 373 bp, Homo sapiens
  III.1206 (H68885)
  misc_feature (109)..(109): n is a, c, g, or t
  misc_feature (132)..(132): n is a, c, g, or t
  misc_feature (156)..(156): n is a, c, g, or t
  misc_feature (253)..(253): n is a, c, g, or t
  misc_feature (294)..(294): n is a, c, g, or t
  misc_feature (357)..(357): n is a, c, g, or t
aagcaaactggccaagtgatttatttgcaatgggcacagtgatgcaaaaacaagatattaagactataaaatatgtgactacaaagaaccagcgaaataaatacatagntattagatagtccaataacttanggcgcccgtgcaacgaagcgaggntccgcgcgcacgggaagttcttctgctgcagggctggagagcgccggccacgtcctagcctcggtccgactcgtccagcgtatggcccgcgggggtncatggcgtgcggggtttgggctgcggggatggcctggaggntccgagggctcggagggtgcggcggccgggcagccacggcgtcctcagcgggtacggcgggtncggtgcgttcctgggc

SEQ ID NO: 7579 - DNA, 369 bp, Homo sapiens
  III.1207 (H68978)
  misc_feature (1)..(1): n is a, c, g, or t
  misc_feature (2)..(2): n is a, c, g, or t
  misc_feature (227)..(227): n is a, c, g, or t
  misc_feature (308)..(308): n is a, c, g, or t
  misc_feature (343)..(343): n is a, c, g, or t
  misc_feature (356)..(356): n is a, c, g, or t
  misc_feature (367)..(367): n is a, c, g, or t
nncccgcgctcggcacgacatgaaatcccccgacgaggtgctacgcgagggcgagttggagaagcgcagctatgcctcttccagctatggaagaagaagcgcggggtgctcacctccgaccgcctgagcctgttccccgccagcccccgcgcgcgccccaaggagctgcgttccactccatcctcaaggtggactgcgtggagcgaacgggcaagtacgtgtacttnaccatcgtcaccaccgaccacaaggagatcgacttccgctgcgggacgaagagtgctggaacgcggccatcggctggcgtncatgcgatttccagaaccgtcgtgccctgtaggantttcgtcagccgncaggaacgcancg

SEQ ID NO: 7580 - DNA, 284 bp, Homo sapiens
  III.1208 (R05933)
  misc_feature (4)..(4): n is a, c, g, or t
  misc_feature (88)..(88): n is a, c, g, or t
  misc_feature (151)..(151): n is a, c, g, or t
  misc_feature (180)..(180): n is a, c, g, or t
  misc_feature (263)..(263): n is a, c, g, or t
  misc_feature (276)..(276): n is a, c, g, or t
gggngaaagggatggccaattggactaaagcatgagtgctgctttaattacttggcagagtacccagcaatagtcccctgcaataccnctacacatctgctcggggatgaacaagggcagactgatgggtaacctcttgaaaaggcttggnttcactgcaccctgttaagtctccaaggnatgctaactttttcctctgccatgaaaggcaggaggtgaagtaaacaccaggggctggaggctggatggacctcaggggctgncccgcagcttctntaacctca

SEQ ID NO: 7581 - DNA, 400 bp, Homo sapiens
  III.1209 (R06035)
  misc_feature (368)..(368): n is a, c, g, or t
ctgctccaactagtacttgcagtttcttaaaaccatatgttcattttactaaaggagttatccctccacattgtcagctgaaccaatggaatccagtacagatgaccatcgctgctccccagagttcttcccctccattaagccatttctatggtataggggcagaagtctcagggaacaacccccataggatcctttgaaatgcacttcattgccgcctcacctcctgcacccccttctccctctcttaagttctccgctaaccaaaccttctcttgttatatacccaatgataaaaccaaagtagttgtaggaggttaaaggtttaaaacaaactataggcaattggacacaggggtattcagggncacaaatgcttgggcttggaatggggtttaaa

SEQ ID NO: 7582 - DNA, 521 bp, Homo sapiens
  III.1210 (R19732)
  misc_feature (408)..(408): n is a, c, g, or t
  misc_feature (440)..(440): n is a, c, g, or t
  misc_feature (476)..(476): n is a, c, g, or t
  misc_feature (505)..(505): n is a, c, g, or t
tgcggactcgtgtgtaagaaaaactaggactgtgtggtgtaaataactacaattctcttaactccgtagcagttgccaactcagtccttgtacttcgttaacacgaatctgtttcagagctctcctaccttgctcactgccttaatcagaccgatttcctgcccacctgaccagcccagcgtggtaaacctctgtatattgagaccttggcataattggtgatcctgaagaaagaggtctctctcctaagtctctgtcagaattgagcttcacaattgctaatggttgttttctgtgagtcctataaaaagcaaggatatgcatgattcagggaatgaagaatcacaggcttgggcagtgttaaacactgtggcctattgtccccgtgtgatccaccctggtttcttntccagggggaccataggtcgttccatggttantcagtgttccacagcagttcagtcgtgtattgaccntgttaacgtgggaaatcttattcacacanctgtttattccaacat

SEQ ID NO: 7583 - DNA, 568 bp, Homo sapiens
  III.1211 (R45147)
  misc_feature (208)..(208): n is a, c, g, or t
  misc_feature (258)..(258): n is a, c, g, or t
  misc_feature (289)..(289): n is a, c, g, or t
  misc_feature (319)..(319): n is a, c, g, or t
  misc_feature (332)..(332): n is a, c, g, or t
  misc_feature (349)..(349): n is a, c, g, or t
  misc_feature (369)..(369): n is a, c, g, or t
  misc_feature (409)..(409): n is a, c, g, or t
  misc_feature (446)..(446): n is a, c, g, or t
  misc_feature (456)..(456): n is a, c, g, or t
  misc_feature (469)..(469): n is a, c, g, or t
  misc_feature (485)..(485): n is a, c, g, or t
  misc_feature (493)..(493): n is a, c, g, or t
  misc_feature (502)..(502): n is a, c, g, or t
  misc_feature (510)..(510): n is a, c, g, or t
  misc_feature (539)..(539): n is a, c, g, or t
tttttttttttcatgaaatgacatttattgtttaaaaaagcgtgagtctggaattagatagtggtgatggttgaacaagtttgtgaatttactaaaaccactcaattgtacgcttaaaaaaaaaagcaagcttgagctgcctaagtcccgctcacacacactggacttgtactaaatgctcaacgattccattctctcagactatggnaacattctgtcacatttttttccttcaggagatttccctaaggaaggagnctgtttgcaaaatattgcacttaatttggantccggggggacctggatgtctccggggagnaaaacgtacactncacatggcctttcctgncctggcggcagatgggcggngagtgggtgggggacaaggggggcttcaacaggcagtttnccatggaacattgttttccctttttcccctttgtttntacacacagnggacacagttttnaggggaagttttcttngggggttnaggcgggtngatggggntcccccaaacgggggttgttgaacttttngattgtttttcagttcggagggccgtttg

SEQ ID NO: 7584 - DNA, 482 bp, Homo sapiens
  III.1212 (R38554)
  misc_feature (285)..(285): n is a, c, g, or t
  misc_feature (352)..(352): n is a, c, g, or t
  misc_feature (393)..(393): n is a, c, g, or t
  misc_feature (430)..(430): n is a, c, g, or t
  misc_feature (447)..(447): n is a, c, g, or t
  misc_feature (457)..(457): n is a, c, g, or t
ttttttttttcagagtgcctggatgtagctgcatttattacaagcatcacatacattatctcagtaggtgctttgactcacagggagatgttaataataattcctcaaaagcgccctgtttacacgagaagcctgaggttcagcgagggtaagcagcaggaccacctggcatctgtatgactcagaggcactgagcctgggaaacagacccagtccccgccccagggagcactgaccctccccagtccccgccgggccctgcaggagggcagggtgagagagttncagacggggaaaccccacggcacgcaggctctgagtctgtttatgaacgcgattcttgggttgggtnaggcttgacttcattttgagtttgcgaggcagtggactttnaactttctcagacgattttccccaactttagtagttnacagacctttttagctntttgggcccngctttaagaggttttctggggtttt

SEQ ID NO: 7585 - DNA, 497 bp, Homo sapiens
  III.1213 (T75134)
  misc_feature (20)..(20): n is a, c, g, or t
  misc_feature (21)..(21): n is a, c, g, or t
  misc_feature (46)..(46): n is a, c, g, or t
  misc_feature (414)..(414): n is a, c, g, or t
  misc_feature (466)..(466): n is a, c, g, or t
  misc_feature (477)..(477): n is a, c, g, or t
  misc_feature (490)..(490): n is a, c, g, or t
gagcctcttggcattaaggnnatctttgtgacctctgtcttgaganctttgctctgacaagttctatagccttctcagtgctgctatcgtgacgcagtgtccctgctgtggctaagtaacctttcgttttgatcaagatttgtccacgcagactcctacctctgcgcctttgcccgtgccgttcccactacctggaaggtctccccgttgctctccagctttgaggtggagacagagcatctcacacttccttttggtgtctcctgacccttttgctccctgctggacttggcgatgtcctcttctgggctcccctagtccttgttttggttgtgagcgaccgcaccaggggagcaaaaccttctatgggccccggcaccagggagcaggcaagcactggggcagtgccccagnacgggaagggaccatcgcgagaattaaagggcactgaggatgtcttggcatnttggcccaaangggccaatttatnaaccgtg

SEQ ID NO: 7586 - DNA, 452 bp, Homo sapiens
  III.1214 (H47652)
  misc_feature (4)..(4): n is a, c, g, or t
  misc_feature (5)..(5): n is a, c, g, or t
  misc_feature (7)..(7): n is a, c, g, or t
  misc_feature (10)..(10): n is a, c, g, or t
  misc_feature (61)..(61): n is a, c, g, or t
  misc_feature (393)..(393): n is a, c, g, or t
  misc_feature (413)..(413): n is a, c, g, or t
gaanntnaantggagtgaccaaaaccttcattcctgaagggtctgggccatttgtcttccngcgtggattgggctgtggaactttcccactgaccttaatcacagggcatggtaatactaagagatgccctaatggatatcctgtattccacacatattcttcctcacctccactgtggcatagtagactgatttcatcttgacagtctgggtcaatctccccagccaacattgtaagtctcttcttagcctgttgacttaaaggtaggagaagcccagtgtccgggtgggcaatcttaacttccagtttaatgggaatcattgttgtgtctcctggtggcagtgttcctccctctgaaactaaggacctctagggccagcaggaacataatntcaaggggaacagttatggnaaaaaatttttgcggggaggggtcctttaggggggcaat

SEQ ID NO: 7587 - DNA, 446 bp, Homo sapiens
  III.1215 (H47959)
  misc_feature (317)..(317): n is a, c, g, or t
  misc_feature (409)..(409): n is a, c, g, or t
  misc_feature (415)..(415): n is a, c, g, or t
  misc_feature (430)..(430): n is a, c, g, or t
  misc_feature (441)..(441): n is a, c, g, or t
tcatggaatgccttatctaccatcatactattccacacagcattgcctctgaccaaggcactcactttattgctaaacaatggccgcagtggactcatgctcatagaattcactggtcttaccatgttccccatcatcctgaagcagctggattgatagaacagtagaatggccttttgaagtcatgattacaatgccaactaggcaatagtttgcagggctggggcaaagttctccagaaggccatgtatgctctgaatcagcatgcaatatgtggtactgtttttcccatagccagggttcacaggtccaggggntcaaaacacatgggaagttggaagtgggcaccactcaccatttgcccctaatggttccttcccgcaaatttttgcatactgtttccctttgnacattnatggttcttgctggnctaggaggggnttttt

SEQ ID NO: 7588 - DNA, 433 bp, Homo sapiens
  III.1216 (AA021230)
  misc_feature (4)..(4): n is a, c, g, or t
  misc_feature (35)..(35): n is a, c, g, or t
  misc_feature (192)..(192): n is a, c, g, or t
  misc_feature (411)..(411): n is a, c, g, or t
  misc_feature (416)..(416): n is a, c, g, or t
gcgnccgctccggacgcagcgggtgccggggcagngacgttctgggtccgggctgagcgcgtcccgggcgccggcggtgccagctcactccgggcggggtagggcagggcagaccccagcggaacacggacccggccgatctggactggacagagcgaatcccggacggtgcagagcccggggaatgccggngtagaggctgaggggatcccggcgccctcccagccctccgactttggctcacgcgctgggacctgcccggcgtctcctcggcctccccgcgccccggggacctgtggcctcggagccccaaatctgccggaccctcgctcattcccgaccccgagcctggagaggtttgagaaagatttttccttgcccccttccctgggaacagcggaggccccggcncctcncaccgcccaagatgtct

SEQ ID NO: 7589 - DNA, 267 bp, Homo sapiens
  III.1217 (H80081)
  misc_feature (1)..(1): n is a, c, g, or t
  misc_feature (10)..(10): n is a, c, g, or t
  misc_feature (14)..(14): n is a, c, g, or t
  misc_feature (86)..(86): n is a, c, g, or t
  misc_feature (116)..(116): n is a, c, g, or t
nggaattaantgangacaggtaaattgtagacatgcaatcccacctagcataaacatggacttgttaaaacacttttccttttctnctcttctaaaagctcaattaagctcctggncttctaacaaggcttagtccagaattaagcacttttatgctgcaaaaacccatgtacaaggtaggaacagagctcatcacttcatccactgataagtcagagacaggcgtgtaaaatgcacttcacaggagcagttctcacccaaatgaaa

SEQ ID NO: 7590 - DNA, 589 bp, Homo sapiens
  III.1218 (N58251)
  misc_feature (524)..(524): n is a, c, g, or t
  misc_feature (542)..(542): n is a, c, g, or t
gccaataactctgaaaaacatttattcatccatttgaagactatacatccattacatgttaccttaaaaaaatttttaaacctatattttccaaaacaatatatttcatcagtaggagtggcatcgttttacatttttgcagatccttaaagcctggcttaacagaaggctgctgcatcctcatagctgcttccgccttcggtctgttgcagtatggtatcctgactgaagaaaaccacgtggggttgggaaaggaaggaccttgaggaccctcaggggtccttgggaccacactgccgagggattggtgtggcagccgactttaacccatacattctagaacagagagagccatgaccaaaccagagggagagacacctgcagatatcctgggttgcgggctggaagaagtattaacagttgatgaagcagcttggcattgctctcctttctcctagggaaggggataaaccactggtcctttttgtgaagcatgggttgtggttatggtcaggtgggaagcngaatttctgaggtgcgcncatgggaaagatggggggtgcatcagatagccaaggaaagtggtgta

SEQ ID NO: 7591 - DNA, 518 bp, Homo sapiens
  III.1219 (N77630)
  misc_feature (195)..(195): n is a, c, g, or t
  misc_feature (203)..(203): n is a, c, g, or t
  misc_feature (331)..(331): n is a, c, g, or t
  misc_feature (390)..(390): n is a, c, g, or t
  misc_feature (514)..(514): n is a, c, g, or t
gaagatgacaaaagtccactacaccactttccttggctatctgatgcacccccatcttcccatgcgcgcacctcagaaatcaggctcccacctgacataacacaaccatgcctcacaaaaagacagtggtttatcccttccctaggagaaaagagaggcaatgcaagctgcttcatcaactgttaatacttcttncagggccngcaacccaggatatctgcaggtgtctctccctctggtttggtcatggctctctctgttctagaatgtatgggttaaagtcggctgccacaccatgccctcggaggtggtggtccaaggacccctgagngcttctaaggtccttcctttcccaaccccacgtggttttcttcagtcaggataccatantgcaacagaccgaagcggaacagcttatgagggatgcagcagccttctgtttagccaggctttaaggatctgcaaaaatgtaaaacgatgccactcctactgatggaatatattgttttggganaata

SEQ ID NO: 7592 - DNA, 537 bp, Homo sapiens
  III.1220 (N93148)
  misc_feature (319)..(319): n is a, c, g, or t
  misc_feature (379)..(379): n is a, c, g, or t
  misc_feature (470)..(470): n is a, c, g, or t
  misc_feature (496)..(496): n is a, c, g, or t
  misc_feature (502)..(502): n is a, c, g, or t
  misc_feature (509)..(509): n is a, c, g, or t
  misc_feature (518)..(518): n is a, c, g, or t
tttttttaattttccaatacatttattgaaaaaaaatccatgtataagtggacccacacagttcaaacccaagttgttcaaggattgactatttgtctatctaaacatacctaaacatagaaaaggtacagtaaaaatacagtattataatcttatgggatcaccattgtctatgcaggctgacattgaaatgtcattatgtacagcatgactgtatagtgtttccgagttctgtgaggctctctagcaaactaatggagctcaagaaggggttatgggaaccctaacttatagctagttggttaggacccttggtcancatctggggcttctgattgtcactgaagtgggagccatcttgtggcactgagccttcaanctatggaactgatgctatctccaggtagtgtaagaagtgaattgaattagaagacacccacctggtgctgtgaaaatgctattgctaatcntggggacccctcaaaaaatctggggnaaaggngtgtganataagtggngaacggaattgttatccta

SEQ ID NO: 7593 - DNA, 328 bp, Homo sapiens
  III.1221 (N72717)
  misc_feature (236)..(236): n is a, c, g, or t
ttttttttgagacagggtcttgctctgttgcccaggctggagtgcagtggtgcaatcttggctcactgcaacctccacctcctgggttcaggtgattctcttgcctcagccttctaagtagctgggattacaggtgcctgccacgagacacccagctaatttttgtatttttagtagtaacggggtttcaccatgttggccaggctggtctcaaactcctgacctcaaatgatccngcccaacttggcctcccaaagtgctgggattacaaacgtgagccactgcgcccaagcacctcctctcttttctaccacttcctgattccggt

SEQ ID NO: 7594 - DNA, 409 bp, Homo sapiens
  III.1222 (W02267)
  misc_feature (18)..(18): n is a, c, g, or t
  misc_feature (26)..(26): n is a, c, g, or t
  misc_feature (35)..(35): n is a, c, g, or t
  misc_feature (36)..(36): n is a, c, g, or t
  misc_feature (37)..(37): n is a, c, g, or t
  misc_feature (273)..(273): n is a, c, g, or t
  misc_feature (288)..(288): n is a, c, g, or t
  misc_feature (290)..(290): n is a, c, g, or t
  misc_feature (293)..(293): n is a, c, g, or t
  misc_feature (295)..(295): n is a, c, g, or t
  misc_feature (297)..(297): n is a, c, g, or t
  misc_feature (299)..(299): n is a, c, g, or t
  misc_feature (302)..(302): n is a, c, g, or t
  misc_feature (305)..(305): n is a, c, g, or t
  misc_feature (307)..(307): n is a, c, g, or t
  misc_feature (321)..(321): n is a, c, g, or t
  misc_feature (323)..(323): n is a, c, g, or t
  misc_feature (324)..(324): n is a, c, g, or t
  misc_feature (344)..(344): n is a, c, g, or t
  misc_feature (369)..(369): n is a, c, g, or t
  misc_feature (371)..(371): n is a, c, g, or t
  misc_feature (382)..(382): n is a, c, g, or t
  misc_feature (390)..(390): n is a, c, g, or t
  misc_feature (406)..(406): n is a, c, g, or t
gtgcacgagcggcacgangaccttgngcaagtccnnntgacctttccagcctatatttcctcttctgtaaaatgggtatattgatgataatacccacattacaggatggttactgaggaccaaagatacatgtaaaatagggctttgtaaactccacagggactgttctatagcagtcatcatttgtctttgaacgtaccccaaggtcacatagctgggatttgaactgagccgtgcagctgggatttgaaccaggccttctgatttcaaggntcggagctctgtccncngtnantnanggntcnantttcccttcccccngnnaattcttcccttcccaattntggttccaaagccctaaccttaggnancccttttctcngggcccanaaaaagggtccctgtnagg

SEQ ID NO: 7595 - DNA, 462 bp, Homo sapiens
  III.1223 (AA035683)
  misc_feature (404)..(404): n is a, c, g, or t
aattgagatggattctctacttaccaccagttttactaccacattttcatttttgagtgtttcattttaattaacttcttattgggttggatcattttttgaatcacttttgtttttatgtttaaaaatgaggatcatttaagttttacatgatgtcatatttgtaaaataaagtaaaaaaaagacttaatttggtcttttgatgatttttcattggaagtctaggcattccattgagttagttatacttaaaaacactgtataggtacttttgtgaaaacgctactgtattttcgagtacgaaaaaacccaaagattaaaaattacttttgtaattttgagaaatatcaaacttaatagcaaagaagcaaagtataatactgctacatgccattatttttgcntttatccaactttccaagtaactactttgtggtgataaaccccaatggtaaggggcca

SEQ ID NO: 7596 - DNA, 379 bp, Homo sapiens
  III.1224 (AA063553)
  misc_feature (371)..(371): n is a, c, g, or t
taatcaagagcacactgatttggatagacacagtacgagaggtagaagtacacagaagcaagaaagttacagtgagaggacataactgtctgaagccagctctgattctgcatgaagaaaacaactctgtacgtatcatggatgtaatttgcaaaacagaactttcctgaacccattgccattcaagctcaagagtagctagttgctccaagtggatgggatatgactggagtaagtcagactgaatctgggagaacatcctacttactatctgccatcatccaccgtcaattatcagccttccctaagagggaggatggttctatctgcttggtgctggttgccaactccaggaactttgtccatagggntaagccca

SEQ ID NO: 7597 - DNA, 238 bp, Homo sapiens
  III.1225 (R17404)
  misc_feature (178)..(178): n is a, c, g, or t
  misc_feature (209)..(209): n is a, c, g, or t
  misc_feature (230)..(230): n is a, c, g, or t
caagttccactcagttcccacaggttctactcatcctagcaagttccttgcttcccccatttcccatgtcttccctttccaactgccagacacaaaagaaaccgcctcctataatccctataataagccccttattttgaatattaagatatgtgtatgtgtattagatcctagtggntcttttctgatcagaccctgattaaccatancatcctacctaattgctattnccccatcc

SEQ ID NO: 7598 - DNA, 492 bp, Homo sapiens
  III.1226 (R42639)
  misc_feature (364)..(364): n is a, c, g, or t
  misc_feature (418)..(418): n is a, c, g, or t
  misc_feature (437)..(437): n is a, c, g, or t
  misc_feature (451)..(451): n is a, c, g, or t
  misc_feature (477)..(477): n is a, c, g, or t
ttttttttttttttgtctatgcgtaactattacagtttattatagcaaaaggatacaaatcagaacagccaaaagaagacatacatagagcaaggtgtaagaggatcccaaacacaaagtttctgtgccctcagggacatgtcaccctcctagaacacaccagagtattgccaaccagggaagttcacttgaggcatcactgaccagagtttctctcggggtttcatgacagggcatgattaattgactcaatctctatataaaggctggaactccatctctaacccctctctccacctcagagggttggggctaatatcatatggacttcaaaactccaaccctcttaatccatgggttgggncttctggtgtgggctaggcccctatttggggtcatctgggttgggcggtaactntcggggcttcactttgggnttaaccaagggtantttcccttcacctggggaaattcccnggggtttgggtcggg

SEQ ID NO: 7599 - DNA, 401 bp, Homo sapiens
  III.1227 (R25526)
  misc_feature (27)..(27): n is a, c, g, or t
  misc_feature (29)..(29): n is a, c, g, or t
  misc_feature (84)..(84): n is a, c, g, or t
  misc_feature (196)..(196): n is a, c, g, or t
  misc_feature (228)..(228): n is a, c, g, or t
  misc_feature (255)..(255): n is a, c, g, or t
  misc_feature (330)..(330): n is a, c, g, or t
  misc_feature (368)..(368): n is a, c, g, or t
ggcggtgggaaatgctggcgcgcgcgngngacaactggggcctctttgctgaggggctctctactggcttctggccgcgctccncgacgcctcctctggattgccccgaaacaccgtggtactgttcgtgccgcagcaggaggcctgggtggtggagcgaatgggccgattccaccggatcctggagcctggtttnaacatcctcatccctgtgttagaccggatccnatatgtgcagagtctcaaggaaattgntcatcaacgtgcctgagcagttcggctgtgactctcgacaatgtaactctgcaaatcgatggagtcctttacctngcgcatcatggacccttacaagggcaagctacggtgtnggaggaccctggagtattgccgtcacccagcta

SEQ ID NO: 7600 - DNA, 426 bp, Homo sapiens
  III.1228 (R45586)
  misc_feature (108)..(108): n is a, c, g, or t
  misc_feature (357)..(357): n is a, c, g, or t
  misc_feature (382)..(382): n is a, c, g, or t
ttttttttttttttttttttggtttgccactggtggagtttattacacgactaaagttcaaataaaaaaataaaaaccaaaatcttggcagggaagctagagccagantcaggaaaatctgcttccttgtccccagactccctggccaagcccagctccactaactcatcttgactcgatcaagttcctcatcaaggacttgcatctgtaccctgggacatctctgctgctcccactggagagtgagtctggagtccctgggcactggggctttggtgagggctccatatacacccatgggcctgcagccaccatgctggtgacatcgccagggttgggagggcagtagggatagtnttgggagtccttgggccagtttggnaggaacgcgtttgacatactgtttcggccacagttcagttgaag

SEQ ID NO: 7601 - DNA, 121 bp, Homo sapiens
  III.1229 (H87364)
  misc_feature (9)..(9): n is a, c, g, or t
  misc_feature (22)..(22): n is a, c, g, or t
gcaattagngggaaatgtatgncacaccttgggcccagaaccacagggggccgcttctcagcatgcccaacgaacatacatcatccccaattcccatttaaagctcattaatgtctacaaa

SEQ ID NO: 7602 - DNA, 574 bp, Homo sapiens
  III.1230 (H87908)
  misc_feature (2)..(2): n is a, c, g, or t
  misc_feature (14)..(14): n is a, c, g, or t
  misc_feature (339)..(339): n is a, c, g, or t
  misc_feature (377)..(377): n is a, c, g, or t
  misc_feature (384)..(384): n is a, c, g, or t
  misc_feature (398)..(398): n is a, c, g, or t
  misc_feature (429)..(429): n is a, c, g, or t
  misc_feature (478)..(478): n is a, c, g, or t
  misc_feature (489)..(489): n is a, c, g, or t
  misc_feature (498)..(498): n is a, c, g, or t
  misc_feature (505)..(505): n is a, c, g, or t
  misc_feature (515)..(515): n is a, c, g, or t
  misc_feature (523)..(523): n is a, c, g, or t
anttcggcacaggngtttaaaatattttgccccattacccttgtagatacacatgtatttgtcagtttatgtgcctcagttttgtcttaggcactgagggacagaaagagaaataaggaataccttggtattttcctttgcaagcaatcacagcagaatgtagaaaacataaaatatactcttataaattgtatgtgtgttgaaaccaaagtgtgaagaaattgtcaggtatttggaggaggaaaataatttgtaaaataacctttttaagaatttggattttgtacttatttaaggtgctaaatatgtgttaaaatatcccctcttgaatcagctccngggcttaaaagggcagagtggtttgggattcttgtccnggggtcngggaaagagcttcntcttgccgaggaggggaaataaatgtgagcnttgagggccgtctaactaccccagcttttaggtatttatgttccccccnaatgttaaaanctgtaagtntttcctngaaattgttngtcccggncatttcttggtccccggggtttttcccgccgtttcctcctgggggtttgtt

SEQ ID NO: 7603 - DNA, 357 bp, Homo sapiens
  III.1231 (N74379)
  misc_feature (314)..(314): n is a, c, g, or t
  misc_feature (327)..(327): n is a, c, g, or t
  misc_feature (333)..(333): n is a, c, g, or t
  misc_feature (340)..(340): n is a, c, g, or t
ttccttgctcacacagtggtggtggtctccccacaagcgttctcagcaaagacatagtaagagcatattggagaagacgcctcggattactaagacttcattagtcttataaaatgcacttgggggcataaccactgtacaataaaacattaacagaaatcattaaaatggaaccatgcctcatcaagataaataagaggactgtgttttatgtggcattgtctttatttctttaaattggtttgttcacttgctaatttgcaaaactgaacaatcagacgttctgtggtataaattaaagcagtgagattccnccattcacaaganatcccntctcganacccccggtttgtggac

SEQ ID NO: 7604 - DNA, 271 bp, Homo sapiens
  III.1232 (W02579)
gaaagcaaagttctttttcaactggacacccaaggtaggggagaacatcctccttacctacaaaggaattcttaacaacttgaggtccaggcccacgtcaggtatttagcaatggttttagacttacagtatgccaatttgcaaaatggagaaggttaactttttgcataagaggttttcttttctgctttgtcaacttttctctacctgaagaatggtatcttacagacaagcttgttcctataaccaaacactctcatatggaccaatt

SEQ ID NO: 7605 - DNA, 193 bp, Homo sapiens
  III.1233 (R60315)
  misc_feature (95)..(95): n is a, c, g, or t
  misc_feature (177)..(177): n is a, c, g, or t
ttttttttggggttttgttcttttttttattccaacaggggctgcgatgtggcaaggggagggatgggggcccaactgaccccctccctgggganggcctcatagaaattccgaggtttctccccccaaaaaagagaggaagagaagagtggaggggcaccaggggacacccatctntccagaggccctcccc

SEQ ID NO: 7606 - DNA, 456 bp, Homo sapiens
  III.1234 (R60372)
  misc_feature (101)..(101): n is a, c, g, or t
  misc_feature (198)..(198): n is a, c, g, or t
  misc_feature (219)..(219): n is a, c, g, or t
  misc_feature (221)..(221): n is a, c, g, or t
  misc_feature (399)..(399): n is a, c, g, or t
  misc_feature (405)..(405): n is a, c, g, or t
  misc_feature (422)..(422): n is a, c, g, or t
ggctcttcatgcttcttgcctacctggctgtcagctgcgtcctgtttctggctgccaggctgagccctatgagtggtataacccacacccatgcctgcggnacgccccacatcctggagaaccagtacacgctgggcaacagctgtggtttcccgtgggggcttcatgcagcagggctcggagatcatgccccgggcnctgtccacgcgctgtgtcagngnagtctggtgggccttcaccttgatcatcatctcctcctacacggccaacctggcccttgcctcaccgtgcagcgcatggaggtgcctgtggagtcggccgatgacctggcagatcagaccaacatcgagtatggcaccatccacggtcggctccaccatgaccttctttccagaattnacggtnaccaaacgtaccagcgnatgttgggaattacatggcagttcgaagtagccc

SEQ ID NO: 7607 - DNA, 296 bp, Homo sapiens
  misc_feature (282)..(282): n is a, c, g or t.
  III.1235 (H84698)
gcgaaccgtgacatttttgtataaccaattaaatatgaaaattcttgaatctcatcttttccaaaatatattgaaataggtttgcatgctactatatgcagaagtaaaatgagcaaaacaattttggattacgattttttagaatttttagatagaagctcaatatgattgaatattaatatcaatgactgaatattaaagtttactttaacaaggagaaagtaacatagtagatcaggaaagactttctaattgtaggaaaattttgggaaaaagtagganacctggaggatggg

SEQ ID NO: 7608 - DNA, 240 bp, Homo sapiens
  III.1236 (H85089)
  misc_feature (61)..(61): n is a, c, g, or t
  misc_feature (107)..(107): n is a, c, g, or t
  misc_feature (163)..(163): n is a, c, g, or t
ggtactttccttgtgatctgccttctcactatttcactatttatttacactccgaaggagnatgtagacttgcaaccccaccatcatcaagccttttctagaaagangcagaaaaaggacagttctgcctccactgctacacttaagaaatggtttgtgcttngcatgcagtgaggatcagaaaggaactgaagaggagcaaacaacagattccattccaatgaaagtttgctaatttgt

SEQ ID NO: 7609 - DNA, 200 bp, Homo sapiens
  III.1237 (N32877)
  misc_feature (160)..(160): n is a, c, g, or t
  misc_feature (168)..(168): n is a, c, g, or t
gcatcacttaatttttattaaaatgctctatactcacaatgtcaaaatatccttggggccaaaccttcccatcaactgtgaagccgggaaccacacagggtttgagaaaaagcagggccacacatggttctcccttgctggcctctccctggagttctgnccacgtgnctgtgtctcccacagaacctgcctgttcacct

SEQ ID NO: 7610 - DNA, 549 bp, Homo sapiens
  III.1238 (N41826)
  misc_feature (2)..(2): n is a, c, g, or t
  misc_feature (468)..(468): n is a, c, g, or t
  misc_feature (521)..(521): n is a, c, g, or t
  misc_feature (526)..(526): n is a, c, g, or t
cngtaagtgacagctttgggggtttgctgctggctctgactcccgtcctgcgatgggttgcgacgggggaacaatccccaagaggcatgaactggtgaaggggccgaagaaggttgagaaggtcgacaaagatgctgaattagtggcccaatggaactattgtactctaagtcaggaaatattaagacgaccaatagttgcctgtgaacttggcagactttataacaaagatgccgtcattgaatttctcttggacaaatctgcagaaaaggctcttgggaaggcagcatctcacattaaaagcattaagaatgtgacagagctgaagctttctgataatcctgcctgggaaggggataaaggaaacactaaaggtgacaagcacgatgacctccagcgggcgcgtttcatctgccccgttgtggccctggagatgaacggccgacacaggttctgcttccttcggtnctgcggctgtgtgttttctgagccgacccttgaaaagagatttaaaaccgganttttnccacacgtgtggggcttgccttg

SEQ ID NO: 7611 - DNA, 416 bp, Homo sapiens
  III.1239 (R11359)
  misc_feature (318)..(318): n is a, c, g, or t
  misc_feature (331)..(331): n is a, c, g, or t
  misc_feature (386)..(386): n is a, c, g, or t
  misc_feature (391)..(391): n is a, c, g, or t
  misc_feature (397)..(397): n is a, c, g, or t
  misc_feature (407)..(407): n is a, c, g, or t
ggcacgaggtctaggcttccatttaaaattatatgaatggtttgggatctttttgcactgagcctgggttgagctgggtaggaatccaaatgtatcatcttttccatatccccatctgtaaatcagaaatggagagaagtatgtacgctgtgggttgtgagataattaaagagatcaagtataagacacacttaacacagtgggctggtctatgggttgtactgaataagtggtctctcctgtgattttattttttctagcttttcttcaaaataatatgctacatattatgccagtaaatgttttttgacatacccncttatgactcctncaaaaatagcctaacttctttcattaacgttttggagtgccttcaaggcggagtncactncaaacntggagtgccnttcctttta

SEQ ID NO: 7612 - DNA, 331 bp, Homo sapiens
  III.1240 (R14858)
  misc_feature (4)..(4): n is a, c, g, or t
ttcntattgatccctgcctctctccttactgggccacttgcaatcccaccccatttgcaccccactcacactcctgcatcaccaccaccaccaccacacgtgggtccctgcatttgcacaggctgtattgcctgcctgggtagatgtttcatcaccttcattgcctgggctccattcaacacattctttaagatccagtcatcccactgtgggcaggccttccttaactccagtctccagtctcaaaaaaatgttcctcagttctatgtgtaggaattaggtgcttgcatctgttgtaggctctttacaccctggcactgtaattctctgg

SEQ ID NO: 7613 - DNA, 444 bp, Homo sapiens
  III.1241 (R54491)
  misc_feature (9)..(9): n is a, c, g, or t
  misc_feature (26)..(26): n is a, c, g, or t
  misc_feature (275)..(275): n is a, c, g, or t
  misc_feature (320)..(320): n is a, c, g, or t
  misc_feature (442)..(442): n is a, c, g, or t
ttttttttnacaaagcatcaattggnaggtaactgtgtatatttccaagtaatttttccttttacaatgtatagagaactcttctactttcaataatttatttagatattattagatatttgaaaggccaaggaataaagaaaattaaaattaaagccttaggaaacgttaccgattcaagaccctaaattaagatacagctggcttggcaattataattacattcaggagtgaaagaggaatttgactcataaatagaaaagcagcttccaccngggcttccaggtacgggctaatcccaaaacacaggtgcctggggnggatcctcagccaccccctttcattcaaaccccaacccttgtgggactgcctgctgtgtttcacagaatgtttctttactcaaaagggacctctcatccttaaaggccattattctttcttntt

SEQ ID NO: 7614 - DNA, 411 bp, Homo sapiens
  III.1242 (R31068)
  misc_feature (154)..(154): n is a, c, g, or t
  misc_feature (324)..(324): n is a, c, g, or t
  misc_feature (340)..(340): n is a, c, g, or t
  misc_feature (356)..(356): n is a, c, g, or t
  misc_feature (366)..(366): n is a, c, g, or t
  misc_feature (372)..(372): n is a, c, g, or t
  misc_feature (382)..(382): n is a, c, g, or t
  misc_feature (398)..(398): n is a, c, g, or t
  misc_feature (408)..(408): n is a, c, g, or t
gtctgtgccatgggccccccgggtggaggcaggaacaccgtcaccccgcggctgatgcgtcacttcaactacctgtctttcgctgagatggacgaggtcagcaagaaacgcatcttctccaccatcctgggcaactggttggatggactccttngagaaaaaagctaccgggagcgtatgcctggggccccccacattgcccacttcacggagccccttgtggatgccaccatcatggtgtatgcaaccatcacctcccagctgctgcccactccagccaagtcccactacaccttcaacctgagggacctatccaaggtcttncaagtcatggttcatnggcttgacccggccanggtcgaggancaagtngcagctgctngcgaattatggtattnacgagaattngac

SEQ ID NO: 7615 - DNA, 361 bp, Homo sapiens
  III.1243 (R31548)
  misc_feature (6)..(6): n is a, c, g, or t
  misc_feature (313)..(313): n is a, c, g, or t
cgtagnggtgcggctgatgcgacagatgtggctcatggcgtccatgaagaggaccagcttcagcttggccgtgttgatctggttgtagtcctctatgtactcctctatcacctgcatcatcttactctcactggtgatgagctcgtaggacttgacatcggagcctggtgacatgaagtccccgtaaagaatgggctggaaggggcagaccttgttgaaggtcacctcccactgctccatgcagcgcttgaggagctggtcgaaccagctgcggtcctcctcattcaccagtcggtcccggaacacgcggcanttctcgtgataccacagtcgcagcagctgcacttgggtcctcgacctt

SEQ ID NO: 7616 - DNA, 414 bp, Homo sapiens
  III.1244 (R53365)
  misc_feature (297)..(297): n is a, c, g, or t
  misc_feature (356)..(356): n is a, c, g, or t
  misc_feature (371)..(371): n is a, c, g, or t
aaaaggaaattagaaaaggtagtagtgcaactgactcttctaaatatgaagataaaaaacggagaaatgaaagtgtaactactgtgaacaaaaaactgaaaactgaccataaagtggatgggaaaaaccaaaatgaaagccagaaaagaaatgctgtggttaaggtttcaaatattgctcacagcagaggcagagtagtaaaagtttctgctcaggcaaatacatcaaaagctcagttaagtactaaaaaagttctccagagttaaggaacatgggatgcatgcgaaagttcggggnagtgttaaaaattgccaaaggaaaagggcacaaaggaaggcaaaatggaaacctcttanttcccaaaattggcncctttcaaaagttcccttttcacacgttcggtatccggattcc

SEQ ID NO: 7617 - DNA, 414 bp, Homo sapiens
  III.1245 (R53967)
  misc_feature (256)..(256): n is a, c, g, or t
  misc_feature (276)..(276): n is a, c, g, or t
  misc_feature (356)..(356): n is a, c, g, or t
  misc_feature (383)..(383): n is a, c, g, or t
  misc_feature (392)..(392): n is a, c, g, or t
ttttttttttgtagtaagtaatcaatatggattatctttctggtttaaaaaataaatcagtattgccactaaaaaacttcagttttattattattaaaagtacggcaccatcaaatataaaatgccttaaaaatgtagtactaacaggtccatctggttttctcatgttttctccattcattaaaaaagaaaaattaaggtcttttatatatttaccaaagacaagtaaaaaaactacagtctctattagtaaganttcatgctccatgcatgagnaagtttgacactgttttaaaggatcctgttcctgccacttgttgtcccccagggccaagtcctactgacacctgttggantttcttgcacttaggagcggctctctntggagaggngggtccacatcaaaatttagga

SEQ ID NO: 7618 - DNA, 383 bp, Homo sapiens
  III.1246 (R27572)
  misc_feature (12)..(12): n is a, c, g, or t
  misc_feature (232)..(232): n is a, c, g, or t
  misc_feature (283)..(283): n is a, c, g, or t
  misc_feature (369)..(369): n is a, c, g, or t
tcaaggaagttntttttaatgaaaaatcagtgattaaagaggagaatcccaatttgtaccaaaatattcatttccacaaatcctgcttagtgcatggtctatttcattatactaattagctacactgattaatgcttctgtttatatttttaaatagattttgtaaaagaggataatgaaacgggaaaagcaccttcatcacattcccctccaacaggacatgcctacaggngggcctttatcagtgggttctcaatcgtgggttctcccgataggatcaccnggggggaccttgttagggaaggtgcaaattttcacacactggggggggagggggagccatctggggggttttaacaagtccccccngggggggatttctt

SEQ ID NO: 7619 - DNA, 454 bp, Homo sapiens
  III.1247 (R27671)
  misc_feature (333)..(333): n is a, c, g, or t
  misc_feature (351)..(351): n is a, c, g, or t
  misc_feature (362)..(362): n is a, c, g, or t
  misc_feature (369)..(369): n is a, c, g, or t
  misc_feature (403)..(403): n is a, c, g, or t
  misc_feature (412)..(412): n is a, c, g, or t
  misc_feature (419)..(419): n is a, c, g, or t
  misc_feature (431)..(431): n is a, c, g, or t
  misc_feature (439)..(439): n is a, c, g, or t
  misc_feature (444)..(444): n is a, c, g, or t
gttaggggaggctgagcaaagcaaaaaggacaaagcagaattgatttcccccacttcacctctttctagttgtcttccaataatgactcactcttctcttggggttgacacgcacaactccacaggccaaattcatgacgtccctgaaaatgacatagttgagcccagaaagcgtcagtatgtgtttcctttttcacagaaaaggggaactattgaggaatgagcgtggggaaaccttttgccctcttctcctgatctttaccaggttcccttgttactttcatctcctggaagggaaatgttcacaggattttttggattaaggccacaaanggggaggggaccctaaantaggagggtgntttcaantttggggggggaaacccaaaccccccaaggttcntcttagggntcccttnaggcggaggacnttggggcnttttntttttccagg

SEQ ID NO: 7620 - DNA, 453 bp, Homo sapiens
  III.1248 (N77910)
  misc_feature (184)..(184): n is a, c, g, or t
  misc_feature (243)..(243): n is a, c, g, or t
  misc_feature (346)..(346): n is a, c, g, or t
aattttgcaactttaatgtaacactgatacccaaaacatgaaaacacaaggaaaagcacaaaatgaaagcaggaagagcaaagagagcttcatcttgcatgccacctccgactgacaggaagaagccgcctagggtgctgtgtcgagaaggaatctcgagaggaggcgctctggcttggcagtnaagatcgctgcagttcgtcaacggtgctggatccaggagaagaagctggcgccactctnggcagcatttctggtccggatggtggagctggtgctggggccatctaggacgctggtgctggccctccattggtgccactggttgacgccagtctcccacgtnggccctccttgttgggcacggtttgctattcagaatgtactgatgggtatctgggccctggcatgttcctcggccatatccacatccattgtcttgaaagcatcatc

SEQ ID NO: 7621 - DNA, 530 bp, Homo sapiens
  III.1249 (W07076)
  misc_feature (27)..(27): n is a, c, g, or t
  misc_feature (186)..(186): n is a, c, g, or t
  misc_feature (308)..(308): n is a, c, g, or t
  misc_feature (343)..(343): n is a, c, g, or t
  misc_feature (402)..(402): n is a, c, g, or t
  misc_feature (497)..(497): n is a, c, g, or t
  misc_feature (507)..(507): n is a, c, g, or t
  misc_feature (512)..(512): n is a, c, g, or t
  misc_feature (525)..(525): n is a, c, g, or t
gtgtgaagcagaagtacctggaatacnagaagatccccaacagcaacccacctgagtatgaattcctctggggcctgcgagcccgccatgagaccagcaagatgagggtcctgagattcatcgcccagaatcagaaccgagacccccgggaatggaaggctcatttcttggaggctgtggatgatngctttcaagacaatggatgtggatatggccgaggaacatgccagggcccagataccatcagtacattctgaatagcaaccgtgccaacaggagggccacgtggagagctggcgtcacacgtnggcaccaactggaggggccagcaccagcgtcctangatggccccagcaccagctccaccatccggaccagaaatgctgccagagctggcgccantttcttctcctggattcagcaccgttgacgaactgcagcgatcttactgggcaagccagagcgccttcctctcagattccttctcgacacagcancctagggggnttttnctgttagtcggangttgg

SEQ ID NO: 7622 - DNA, 458 bp, Homo sapiens
  III.1250 (N24972)
  misc_feature (132)..(132): n is a, c, g, or t
  misc_feature (137)..(137): n is a, c, g, or t
  misc_feature (431)..(431): n is a, c, g, or t
aacataagttatatttttattaaaaatcttttccagacaaaaaacagactttgattttgttttatgtgttgacagatctctttcatgtctggcttcacacagataagaaaatctggcctcccgcatgcgcanaagtncctcactgctgtcagtgcgttcttgggaatcaggacttttaagtgaaacaacgtatagcaaaaccaattttaccagaggctaaaaaataaggattaagttcctaaagcatacttctggccaaggaaaaaaaaaatcactaagcttctaaaggccaaagtattctaatattaaacattgaaataaatgtgagctatacatacatttaagaaagatgaataaaaagataattattacttaattattccagttctgggtcatgtgtagctgaagcctgtttcagtagctcagggccncaaagagggaaccagccctggacagga

SEQ ID NO: 7623 - DNA, 316 bp, Homo sapiens
  III.1251 (N33844)
  misc_feature (284)..(284): n is a, c, g, or t
  misc_feature (293)..(293): n is a, c, g, or t
  misc_feature (300)..(300): n is a, c, g, or t
  misc_feature (313)..(313): n is a, c, g, or t
aaaaagttttcctgtggtttaaaaaaaatctttcatgaaaagaattgtcaatcaacgtgacaaatttcattattgtcttattttaagaaactgcaacagccaccccaactttcaagcaccaccttgatcaacagccatcaacattgaggcaaaaccctccaccagcaaaaagattatgactcattgaaggctcagctgatggttagcagtaaaaaatattaactttaatcatctcgaccattcagtactcatctaatattctctataacaaaatgggaaatgcncattaagcncttctgntacatgctgaggnatg

SEQ ID NO: 7624 - DNA, 304 bp, Homo sapiens
  III.1252 (AA021490)
  misc_feature (135)..(135): n is a, c, g, or t
  misc_feature (259)..(259): n is a, c, g, or t
  misc_feature (277)..(277): n is a, c, g, or t
  misc_feature (285)..(285): n is a, c, g, or t
  misc_feature (296)..(296): n is a, c, g, or t
acaacatggagattttgttattataaatttcaaaacaaaatgaaggaatttccacatatttataaccttcaaagtacaatattaatacatgtctgtcagttagaaagaacagcagtttgttaggctacaaaggtntaacataaaaccaatttacaaatgtgaaaagcagtagtggtccaatattcaccattacacatgaatctgtttcttccagaattttttaaaattaaaattttagtatcgtgaaatattaaaatancaccccaaacatgccacnagtcactngttcacaaatnaagttaaa

SEQ ID NO: 7625 - DNA, 424 bp, Homo sapiens
  III.1253 (AA021491)
  misc_feature (2)..(2): n is a, c, g, or t
  misc_feature (63)..(63): n is a, c, g, or t
  misc_feature (64)..(64): n is a, c, g, or t
  misc_feature (66)..(66): n is a, c, g, or t
  misc_feature (117)..(117): n is a, c, g, or t
  misc_feature (194)..(194): n is a, c, g, or t
  misc_feature (197)..(197): n is a, c, g, or t
  misc_feature (203)..(203): n is a, c, g, or t
  misc_feature (205)..(205): n is a, c, g, or t
  misc_feature (235)..(235): n is a, c, g, or t
  misc_feature (294)..(294): n is a, c, g, or t
  misc_feature (308)..(308): n is a, c, g, or t
  misc_feature (323)..(323): n is a, c, g, or t
  misc_feature (352)..(352): n is a, c, g, or t
  misc_feature (380)..(380): n is a, c, g, or t
gncgcggagaaggagccagcgcccggccagacagtctcagcccgccgtcggcccagcgcgctnncnccggctgctccgaggggattagtgggccgtccgcgcggctcgtcggcgggnagccatgttgaccgagggacttggcaacgcgtgagacacccgcggcccctcccgaggctccggacccgcggcgaganganaagcgncnttgtggcggcggaggctgcgctcggaagcnctcacgtctgccggccgctgagacccggacttgcatccggtcgccgcggggttccggangcaagctttccccncgcgcctctcttcgncttcgcttcgggacccgcggtcccagctnctttgctggattttttcaagccacattnaatttgataggatgaaaaaatttaaagagaagggctatccctta

SEQ ID NO: 7626 - DNA, 166 bp, Homo sapiens
  III.1254 (R99758)
  misc_feature (46)..(46): n is a, c, g, or t
  misc_feature (82)..(82): n is a, c, g, or t
  misc_feature (89)..(89): n is a, c, g, or t
  misc_feature (145)..(145): n is a, c, g, or t
  misc_feature (166)..(166): n is a, c, g, or t
ggtgctggagaaaataagatggaatgatgggctggaccaataccgnctgacacctctggagctcaaacagaaatgtaaaganatgaatnctgatgcggtgtttgcattccagttgcgcaatcctgtccacaatggccatgccctnttgatgcaggacactcgccgn

SEQ ID NO: 7627 - DNA, 286 bp, Homo sapiens
  III.1255 (R99935)
  misc_feature (169)..(169): n is a, c, g, or t
  misc_feature (174)..(174): n is a, c, g, or t
  misc_feature (179)..(179): n is a, c, g, or t
  misc_feature (181)..(181): n is a, c, g, or t
  misc_feature (185)..(185): n is a, c, g, or t
  misc_feature (187)..(187): n is a, c, g, or t
  misc_feature (215)..(215): n is a, c, g, or t
  misc_feature (226)..(226): n is a, c, g, or t
ttcaattgtacagaagaggacacaatctgatatattttacaactgataaatgacattggaagagtacaggttgtcaagacatgctggaaaatatattcacttttcagcaagtaactagacacatggtcaaacaaagccttaagaaatctgggacctgcctgctcaggtncagtngaaantncatngngctaattttattatgaaatgtataggantattgcttttncctgctaagatttggtcttcagtttgactttgtatgtatatgtgtgtgtgtatatatata

SEQ ID NO: 7628 - DNA, 342 bp, Homo sapiens
  III.1256 (R16541)
  misc_feature (311)..(311): n is a, c, g, or t
  misc_feature (323)..(323): n is a, c, g, or t
  misc_feature (329)..(329): n is a, c, g, or t
ggcaaaagccttgggttttgggtgatccatattaactacagacagatgcctggttaataatatttctgaattcctttccttttgttaatgggttaatacacattataccttttcctaaaattctaaggacaaggacacttaggctttgggtgttacccggggacaccaggggaatctgtgaaactcctaaaatcacatatatgattttgtatgtgtgtgtatctgtgcattttttctgggcatagaatgtttacttttcatcacctacataaaggtgttctgtggaccccaaaggggttggccaaaccacnggctaggagggngagggngttcctggattcc

SEQ ID NO: 7629 - DNA, 416 bp, Homo sapiens
  III.1257 (R16598)
  misc_feature (81)..(81): n is a, c, g, or t
  misc_feature (353)..(353): n is a, c, g, or t
  misc_feature (369)..(369): n is a, c, g, or t
  misc_feature (378)..(378): n is a, c, g, or t
  misc_feature (386)..(386): n is a, c, g, or t
  misc_feature (403)..(403): n is a, c, g, or t
ttggcaggatggcttctcatcgtctgctcctcctctgccttgctggactggtatttgtgtctgaggctggccctacggacncggtgaatccaagtgtcctctgatggtcaaagttctagatgctgtccgaggcagtcctgccatcaatgtggccgtgcatgtgttcagaaaggctgctgatgacacctggggagccatttgcctctgggtaagttgccaaagaaccctcccacaggacttggttttatcttcccgttttgcccctcacttgggtagagagaggctcacatcatcttgttaaagattttacaagtaggtttgaaaaacgtagggcagagggtcaagtattgccntcttgaagggttgccnttttttttnttttttgnttaggctagggaagttnaccaggggacctt

SEQ ID NO: 7630 - DNA, 206 bp, Homo sapiens
  III.1258 (T83104)
  misc_feature (140)..(140): n is a, c, g, or t
  misc_feature (154)..(154): n is a, c, g, or t
  misc_feature (189)..(189): n is a, c, g, or t
  misc_feature (202)..(202): n is a, c, g, or t
ggaattactctgcctctaaagaatgtcaggaagagaaggttccggaagacagcaaagaagaattatattgaatctccagatgttgaaaaagaagtgaaacgattgctgagtacagatgctgaagctgttagtactcggtnggaaataattgccnaagatgaaacaaaggaggcagaaaatcaaggcctnggtatctcttctncagg

SEQ ID NO: 7631 - DNA, 422 bp, Homo sapiens
  III.1259 (T90567)
  misc_feature (313)..(313): n is a, c, g, or t
  misc_feature (357)..(357): n is a, c, g, or t
  misc_feature (379)..(379): n is a, c, g, or t
  misc_feature (389)..(389): n is a, c, g, or t
  misc_feature (413)..(413): n is a, c, g, or t
aaacagatgcttttatttattgtattggaaacaacttaataatttgcatctctacatatagaaagctgctttgaataactgggaaaacaactattgcataggaaaacatatgcaaactagcatcattgtctctagactaggttcttcttattgatctcacgtcatcacaaagcagcaacagcagcttctagaaaatggagaaacagtaaagtcctgcaatgaagctataattaaggttgaaccatacattccgctaatcctgcaactttcctacaatcatttttctgcctatacaatcctgcttcttataggntgaacacctaggcaaaaccaatataaatttgctggaaaaaaaanttaccaaaccaaatggaaaggncttaaccggncacaccgccttaaaagggctgggnggggcaggg

SEQ ID NO: 7632 - DNA, 285 bp, Homo sapiens
  III.1260 (N73861)
  misc_feature (3)..(3): n is a, c, g, or t
  misc_feature (163)..(163): n is a, c, g, or t
  misc_feature (167)..(167): n is a, c, g, or t
  misc_feature (226)..(226): n is a, c, g, or t
ctngaatatttattggagttaaacactgatagctttgtccttttttttttcccccaccacacagccataaaaaagaaggaccggtagatttgacagtgatattagctaacccataggctaactaggttaccaaagaggacaaggaccagtcgaaatagctagnaaanaacagactccctgggttcagaataaatctcaaacaaccacctcaaaaaccatccctctngggccctggcatagtggctgacgcctgtaactcccagcaccttgtgaggctgaggtggg

SEQ ID NO: 7633 - DNA, 158 bp, Homo sapiens
  III.1261 (W01026)
  misc_feature (54)..(54): n is a, c, g, or t
cattctcacacagtatgaaactggtggtgtgtcttggagggaggaagccatggntcagctctttttcccagaccatactcagctgttaaactctaccaattgctggctgattgctttattgttttcaacaatgttttggggcatagattgctgcccaa

SEQ ID NO: 7634 - DNA, 455 bp, Homo sapiens
  III.1262 (R34918)
  misc_feature (12)..(12): n is a, c, g, or t
  misc_feature (356)..(356): n is a, c, g, or t
  misc_feature (362)..(362): n is a, c, g, or t
  misc_feature (410)..(410): n is a, c, g, or t
  misc_feature (425)..(425): n is a, c, g, or t
  misc_feature (446)..(446): n is a, c, g, or t
ttaacctaatgncaaataaatactggttaaataaatgtatggcacagaatataatttgactatcaagacttttagcataatgaaaaaccctctctctatatatatatgtgtatatgaattatgtgggcattcttgatacttcaagttctagtttgaaaaaatacataactaatttaattttacacaaaaatatttatgcagattttcagaatttcatatcaggaaatgacctttttatgtctgttaaatatcaaaacaatttgctacagtgttaatctgcatggtcttttaagcctgctgttagttgagttgcagacagtgcatggaaaaagtattcccgctggggatttgagccntgcccncccaaagcccaagaggagcgcatgggaaccccggtagtcttaggactnattccggttacctgntttttaggggcaccgcacccnggtggattg

SEQ ID NO: 7635 - DNA, 355 bp, Homo sapiens
  III.1263 (R49310)
  misc_feature (209)..(209): n is a, c, g, or t
  misc_feature (210)..(210): n is a, c, g, or t
  misc_feature (217)..(217): n is a, c, g, or t
  misc_feature (231)..(231): n is a, c, g, or t
  misc_feature (239)..(239): n is a, c, g, or t
  misc_feature (255)..(255): n is a, c, g, or t
  misc_feature (287)..(287): n is a, c, g, or t
  misc_feature (329)..(329): n is a, c, g, or t
ttttttttttttttttggaagacactgagttactttaattggctattaatttttcttcataataagggataatgcaaggtttgagtgcaatatgaactgacaatagcaggtaacacatgcttttgttgcacatttgagttgtgtgtacattttaatcctactacaatggattaatggtatgatgtctcaaatactaaaagtaacctggnntcaaagnaaaaacaaactggnttccatgntataacactgggaaantataaatgcttatgggtgggcctagggagggntggaaaaggaggggaaggaatttaaggaaaattggggaaaanctaggtaggtaccctcttcccaaggc

SEQ ID NO: 7636 - DNA, 192 bp, Homo sapiens
  III.1264 (R22988)
actaaaaagagggtggtgcttagctttaaaacaaatacataaaacttcctaaggatactgtaatatttttctctcaaagtaatcagaacttataagtaactttgcataaagtacaatcccaaaatctcggcttcagaaacacgaagttttgttttgtgtcacctccctatacaataactggctcaatcaaat

SEQ ID NO: 7637 - DNA, 377 bp, Homo sapiens
  III.1265 (R23097)
  misc_feature (367)..(367): n is a, c, g, or t
gtaccccacattgggataagtatggtccactgacattgagaataaccaggcctgttgtagacagccagccatcctgaaactactaggtttatacttcttacctgttagaacagagtttcccaagttgtattcccttggaaacactaggcagtcgtgcatcatttgggcagttaggttacacaaaatttaaatggtctatttattttcttttccagacagaactcaggggcagtcccaccttcaaggggaaatcttcatttacatccttctggatgggtgggggtaggctggggagttcagcatggaaaatcccaaatttcttaaatccatcgggggaaaaaggcaggaggggtttgggaaccccaantttaaacttg

SEQ ID NO: 7638 - DNA, 480 bp, Homo sapiens
  III.1266 (R68101)
  misc_feature (14)..(14): n is a, c, g, or t
  misc_feature (17)..(17): n is a, c, g, or t
  misc_feature (338)..(338): n is a, c, g, or t
  misc_feature (343)..(343): n is a, c, g, or t
  misc_feature (362)..(362): n is a, c, g, or t
  misc_feature (367)..(367): n is a, c, g, or t
  misc_feature (387)..(387): n is a, c, g, or t
  misc_feature (403)..(403): n is a, c, g, or t
  misc_feature (424)..(424): n is a, c, g, or t
  misc_feature (436)..(436): n is a, c, g, or t
  misc_feature (454)..(454): n is a, c, g, or t
  misc_feature (469)..(469): n is a, c, g, or t
  misc_feature (474)..(474): n is a, c, g, or t
  misc_feature (479)..(479): n is a, c, g, or t
tgaacttgtgcatnttnactttattaccataaacatatgaatactcctgaatagtttcccaattctggggcacttagggagcaaaagcaaatgtttcaatttttgtttacaaaagtatactttaccaattgctgaagaaaaaaagtgcataaatctggagaataaaacattcaaagaatcagcacattttcaaatagaaaattatgaaaacattgttttgactatttagtccaataaaattgggtttttttctttgtcttgaatttcatgaagtatcagcctgttcattaaaattttgaaagttcttaggtccagtgggtatgatcttgaagttatcngggancttggtattcaggagtccntgtcnggggtcttttccataaatcncccttggaaccaaaangccattttggggccgtaggcnggtgggggaatnccttgggggggggttggnaggccacccgtccgncccgncttcnt

SEQ ID NO: 7639 - DNA, 363 bp, Homo sapiens
  III.1267 (R68145)
  misc_feature (298)..(298): n is a, c, g, or t
  misc_feature (349)..(349): n is a, c, g, or t
  misc_feature (356)..(356): n is a, c, g, or t
cccgaagctgcccaagccctacatcaccatcaacaacttaaaccccagggagaataaggatgtcttagccttcacctgtgaacctaagagtgagaactacacctacatttggtggctaaatggtcagagcctcccggtcagtcccagggtaaagcgacccattgaaaacaggatcctcattctacccagtgtcacgagaaatgaaacaggaccctatcaatgtgaaatacaggaccgatatggtgggcatccgcagttacccagtcaccctgaatgtcctctatgggtccaggacctncccagaatttaccctttcatttcacctatttaccatttagggaggaaaacntttattngttcctg

SEQ ID NO: 7640 - DNA, 425 bp, Homo sapiens
  III.1268 (H87079)
  misc_feature (211)..(211): n is a, c, g, or t
  misc_feature (390)..(390): n is a, c, g, or t
  misc_feature (406)..(406): n is a, c, g, or t
  misc_feature (418)..(418): n is a, c, g, or t
ggcgggcagacgcctggagacggcgctcctggccgcacctgccctggcagcgccggctctgccagcccctacccacggccccggcccgcaccggcagtgggcagccatgcgagtcatgaaggtggcatgcagggatgggaaatgctgccttaggagggacacatggaagctgccagccccccagccaaggatcagctgagccctagggtgnatgcttgcctacgttgctgagaatggcactgaggcccagccaacaaaggttaacccaggacactcctggacagtgatcctgatgtctgttgtgagctgcacactcaagggtgttgataaccagccccagtcgggcgccatggctcttgccgaagcccctgaacgggcggttgttcccgnttggttacctgttatngccatccacggntaatttt

SEQ ID NO: 7641 - DNA, 459 bp, Homo sapiens
  III.1269 (T78903)
  misc_feature (269)..(269): n is a, c, g, or t
  misc_feature (391)..(391): n is a, c, g, or t
  misc_feature (409)..(409): n is a, c, g, or t
  misc_feature (436)..(436): n is a, c, g, or t
  misc_feature (447)..(447): n is a, c, g, or t
tatttcgatggaattttaagttgtcaaaaatgttctttaactgaatctagcaaatctttattgagtaccccttgtatattgaaaagtggggtgtacaaaaattaatgataagcagtcttaatagcaggcaactaattataatacaatatgattggtgctgctatggaaagaagggctctagtattttgtttacatatactggaaaataaaaatgcttgaggaataaatgcttgagggaataaaaatggaagaagaaaacatgtattacnggaaagagcaatgaacaatgggcaccatgttttaaatgtaccatgatgttgggggggaatgacctaacatatgtaggggtatacggtaaggcatgggtccaaaagcctggcctagggaaacngggttggatgatgggggnctttaggtgcctacgggaccttccttntggaaccggtntccggtagcctc

SEQ ID NO: 7642 - DNA, 393 bp, Homo sapiens
  III.1270 (T78955)
atgcatttcccttaccaatctggctctcagcaggcggtccagcccgatgaagtatcagcaaaatgtcagctcccacagagaagtgcgacagaggcaacagtgcagcagtgacaggcctttcaaaaagctattgtgcaaattcagttttaaaatagggatgtagttgaggactgatgggtatttcattaccaatgcgttcatctcccccatcgtccaagacaatgagagggggtcatggtgcagctgatataaagccattaagttgagtagcggttgatttggtctgtagaagatttgtcttcctatctgtatttttggaaaagttaatattcaaattaggctgttcatttttagtacatacctggcttaaaggggggccaaggattgttcttt

SEQ ID NO: 7643 - DNA, 513 bp, Homo sapiens
  III.1271 (H29510)
  misc_feature (457)..(457): n is a, c, g, or t
  misc_feature (469)..(469): n is a, c, g, or t
  misc_feature (499)..(499): n is a, c, g, or t
ttcatacatcctctgaaatctaggcagaggtccccaaacctcaattcttgacatctgtgcactcgcaggcccaacatcacatgggaactaccaaggcctgggacttgcaccctctcaagcaatggcctgagctgtatgttggcctcttttagccaagtcttaaggctgcacacagcaggagggaaaaaatcatttttcccgtctaggcctctgggtctgtgacaggaggggctgcagtaaaggtctctgacatgtcctggagatattttccccattgtcttgattattaatcttcagctcattgttacctatgcagatttattcagactgcttgaatttctccccggaaaatggggttttcttttctatcacattgtcaggctgcaaatttttctaacttttatgctttgcttcctcttgaatgctttgctgcttagaaatttcttctgccagatancctagatcaggnctctcaagttcaaagttccacaaatctctnggggcaaagggaaa

SEQ ID NO: 7644 - DNA, 379 bp, Homo sapiens
  III.1272 (H29511)
  misc_feature (8)..(8): n is a, c, g, or t
  misc_feature (49)..(49): n is a, c, g, or t
  misc_feature (59)..(59): n is a, c, g, or t
  misc_feature (108)..(108): n is a, c, g, or t
  misc_feature (157)..(157): n is a, c, g, or t
  misc_feature (158)..(158): n is a, c, g, or t
  misc_feature (163)..(163): n is a, c, g, or t
  misc_feature (171)..(171): n is a, c, g, or t
  misc_feature (176)..(176): n is a, c, g, or t
  misc_feature (215)..(215): n is a, c, g, or t
  misc_feature (230)..(230): n is a, c, g, or t
  misc_feature (250)..(250): n is a, c, g, or t
  misc_feature (268)..(268): n is a, c, g, or t
  misc_feature (284)..(284): n is a, c, g, or t
  misc_feature (326)..(326): n is a, c, g, or t
  misc_feature (336)..(336): n is a, c, g, or t
tttttttnttttttttttttttttttttttgagacagagttttgctctnttgcccaggntggagtgcagtggcacaatctctgctcactgcaacttccgcctcctggnttcaagagattctcctgcctcagcctcccgagtaactgggattacaggnncccgntaccaggnctggntaatttttgtatttttagtagaaatagagtttcaccatnttggccaagctggtntcaaactcccaacctcaggngattcacctgcctcagtntcccaaattgctgggnttacaggcatgagccaccgtgcctgggccctacaatagcctnttaattggtntccctgtgatattgtttgggctgtgtcctcccccaaatctaat

SEQ ID NO: 7645 - DNA, 140 bp, Homo sapiens
  III.1273 (N71061)
tctgatgcataattttattaaagccagagatggactttttttctagagaaacagatctctgaggttagaatggaagataatgaaacaagagatttcactttataatttacctttgtcaaactatcccagagcatgtcaaa

SEQ ID NO: 7646 - DNA, 125 bp, Homo sapiens
  III.1274 (W01940)
gacattcacctgtgttcatgggatgtattgtttccactcgtgtccctaaggagtgagaaacccatttatactctactctcagtatggattattaatgtattttaatattctgtttaggcccacta

SEQ ID NO: 7647 - DNA, 387 bp, Homo sapiens
  III.1275 (R83911)
  misc_feature (348)..(348): n is a, c, g, or t
tatccagtgaattacaagtagaataaagatctggttctaaattgtcttttggtggtgaagtgccatagaccatttcggaccatttctatgatgtaccagcagcccccacatcacacctcctcttccttggcttgtctcttccccaattcttagagttagcagtgtttcttactgcattcatctcctcagtcataagtgtctgtcaacctccgttgtgaagtcatgagtctcttgagactgaaactccaagaatgtattgtgctcacagtggcgatggtgttcctgtgctggatggtcagtggttgttgacatgtagttaggaaaataggtaggcaagttccacgcagncctcactctttgggaacctagtttcctcctatgggcctc

SEQ ID NO: 7648 - DNA, 428 bp, Homo sapiens
  III.1276 (R83912)
  misc_feature (49)..(49): n is a, c, g, or t
  misc_feature (246)..(246): n is a, c, g, or t
  misc_feature (393)..(393): n is a, c, g, or t
  misc_feature (402)..(402): n is a, c, g, or t
acagaaacagctggggatatacatgtggggaatcttcccttgccctggnggtgccttattggaaatgtacagaagtagacaaatttaggtgacaaagaatactaactgctccatagattctaatattcctcctgtgaagagaggcatggatcattaatagaatgttattaacaacagtagaaagggaggccataggagaaactaggttccaaagagtgaggctgcgtggaacttgctacctatttnctaactacatgtcaacaaccactgaccatccagcacaggaacaccatcgccactgtgagcacaatacattcttggagtttcagtctcaagagactcatgacttcacaacggaggttgacagacacttatgactgagggagatgaatngcagtaagnaacactgctaactctaagattgggga

SEQ ID NO: 7649 - DNA, 450 bp, Homo sapiens
  III.1277 (N24966)
  misc_feature (336)..(336): n is a, c, g, or t
aaaagactctgcctgcctggagatctagggcctgatacttcttgaaatttgctaatcacatctggtttagctttagacattttctgggattttgccagcagctacgacactttaatggctacaataaacctcaaagcctcatcaaatctttgctgtatgtgtgaaaattatgtcctcttcaattaaacattcaatctcagctcacaccaaggccttatggaaaaggaggtgaaacctgaatggaaacgttaagatgaaacggaccgccacgattctggccatcttgccagatggtatttagaagaaaaagaaattcattagagaacctacggtgtngtattttctttaaatatttactgggtacctttcatgtgttgaaaacactgggcatctctaaagattagcagggcatttttgtttaaatattccatgtgtgtgaggtggggggag

SEQ ID NO: 7650 - DNA, 536 bp, Homo sapiens
  III.1278 (N33840)
  misc_feature (111)..(111): n is a, c, g, or t
  misc_feature (117)..(117): n is a, c, g, or t
  misc_feature (119)..(119): n is a, c, g, or t
  misc_feature (420)..(420): n is a, c, g, or t
  misc_feature (443)..(443): n is a, c, g, or t
  misc_feature (529)..(529): n is a, c, g, or t
attatgagtacatggatgtggggtcagacctcagtgcctctctgggcagcacacagagttgcccactccaccctgtacccatcatgcccactgcaggcacaactccagatnaagacnangaatatatgaatcggcaacgagatggaggtggtcctgggggtgattatgcagccatgggggcctgcccagcatctgagcaagggtatgaagagatgagagcttttcaggggcctggacatcaggcccccatgtccattatgcccgcctaaaaactctacgtagcttagaggctacagactctgcctttgataaccctgattactggcatagcaggcttttccccaaggctaatgcccagagaacgtaactcctgctccctgtgggcactcaggggagcaattttaatgggcaagctagtgnccttttagagggtaacggtcttnttccctaatttcccctctctcctcccaagggtcccaggccccttttttcccccagttcccagaaaattccaattcaatctttggangggtttt

SEQ ID NO: 7651 - DNA, 351 bp, Homo sapiens
  III.1279 (H50594)
  misc_feature (272)..(272): n is a, c, g, or t
  misc_feature (331)..(331): n is a, c, g, or t
tattaatggtaataaaatagattataaagtaagctggaactttgttgttttaacctccatcctgtcaaggcaaatgtgatctcttatcttatatcctttacgtttaaatatttttttctcaccgatcaccacatttaatatgaggttattatgaacttatatataccatggtaatggttactgaaagtaaatggaaacaaggtggctactgttctctataatgacacaagggaaaggaagaaaactgcacttctacaagtataacatgaganaactattaaagtatatatgcgtttgtatgtatgtatagatatctagataggtatatccngtatttacggaggagggttt

SEQ ID NO: 7652 - DNA, 53 bp, Homo sapiens
  III.1280 (H50595)
  misc_feature (5)..(5): n is a, c, g, or t
  misc_feature (18)..(18): n is a, c, g, or t
  misc_feature (33)..(33): n is a, c, g, or t
  misc_feature (43)..(43): n is a, c, g, or t
  misc_feature (46)..(46): n is a, c, g, or t
gcctnagcctcccaaagnattgggattacaagnatgaggcacngtncctggcc

SEQ ID NO: 7653 - DNA, 317 bp, Homo sapiens
  III.1281 (H89826)
  misc_feature (288)..(288): n is a, c, g, or t
tggatgccaagaggtgcccaagcctccaaggtcaccctccctagagcattccagttaagactggactgggctcgtactgccgggtcaggagacttgatttcaggaaacaaagtccaactctgggcaggagagggtagaaaagtcaaagggcaagagcctagagacacttctacttctcaccacattaaaaaagacacattttgttttcatacatcatcatttgtgggggaaaaaatctttaaaatctcacccctataaacaagaccctgtcaagctctgattggaganatgggaaatacatggcaacctttccagga

SEQ ID NO: 7654 - DNA, 260 bp, Homo sapiens
  III.1282 (H90678)
  misc_feature (14)..(14): n is a, c, g, or t
  misc_feature (25)..(25): n is a, c, g, or t
  misc_feature (28)..(28): n is a, c, g, or t
  misc_feature (50)..(50): n is a, c, g, or t
  misc_feature (58)..(58): n is a, c, g, or t
  misc_feature (63)..(63): n is a, c, g, or t
  misc_feature (67)..(67): n is a, c, g, or t
  misc_feature (137)..(137): n is a, c, g, or t
  misc_feature (155)..(155): n is a, c, g, or t
  misc_feature (157)..(157): n is a, c, g, or t
  misc_feature (167)..(167): n is a, c, g, or t
  misc_feature (200)..(200): n is a, c, g, or t
  misc_feature (258)..(258): n is a, c, g, or t
cccaggctggagtncaatggccganccncagctaactgcagcctctgccncccgggtncaagngatncccctgcctcagcctccttagtagctaggattacaggcatgcaccaccacgcccagctaattttgtattnctagtagagacggggttncnccatgttggncaggctggtctggaactcccgacctcaggtganccgcccgcctcagcctcccaaagtggtgggattataggtgtgagccacttcatctggngt

SEQ ID NO: 7655 - DNA, 479 bp, Homo sapiens
  III.1283 (N29510)
  misc_feature (172)..(172): n is a, c, g, or t
  misc_feature (176)..(176): n is a, c, g, or t
  misc_feature (193)..(193): n is a, c, g, or t
tatccattcctgggcatggcacccagactaaatgtcactcaaaagcgagttgacatatattactgtattggaagttagcataaaccgccccacaaatggtcccacacgtaacacatctttttaaaattgtggcatttcatacgtaccacaggggcaaactacagccctcagngaanatccagcccaccgcagntctgctgtactaggagctaaaaatgggtttcacatttttcaaaggttaaaaaaaaagttttgcgacagatgacaattatatgacattcatatttgtgtctgctttttaaagtttcattagaacatagctttgcattcctatacatgctgttaattaaagcttttatactacaatagcgaatttgggtagttgcaatagccccttaccctcttgaagtgaccttggcaattacgttgaggtcgggaaaacagattcagtttcaactagttaatcaacctcaaaatgt

SEQ ID NO: 7656 - DNA, 621 bp, Homo sapiens
  III.1284 (N57453)
  misc_feature (536)..(536): n is a, c, g, or t
  misc_feature (557)..(557): n is a, c, g, or t
  misc_feature (584)..(584): n is a, c, g, or t
  misc_feature (589)..(589): n is a, c, g, or t
  misc_feature (617)..(617): n is a, c, g, or t
aacgattcaagaaattctgcggtaaaactcatcagacttcatgactgattaaaggtatggtggtagacaagggagggagaggaaggataagaatggagaagcaggaattgggcgttatttgaaaatttctgacatgggaggaaaatctggatatttaataacatctgactaaattaggggatgaaagagcataagcggagagggaatggtggtgctctctccttgaccatactttagttaggctcctctgagcctcttcccaactaggcctcatccttgggcccctgtcttaggcctgctgagtccagttttagcaagaatcttgcaaagtcagtttagagagtatctcctagccttgataattgatcatctccgcctgtcttcagcaagaatcttgtaagtcactttaacaagaatatccccgacccttgatatcacttcttagtaattttccatggaactgacccctcagtctgcttgctggttataaatcctagctggttttggtgtattaaaacttggaggcaatctctctnccccatggtgatagtcatggnacctattgcaatagtcctaaatggctncctgncattttaccagtggcagaataattttcnttgc

SEQ ID NO: 7657 - DNA, 199 bp, Homo sapiens
  III.1285 (N92522)
  misc_feature (18)..(18): n is a, c, g, or t
  misc_feature (37)..(37): n is a, c, g, or t
  misc_feature (42)..(42): n is a, c, g, or t
gggaccacaggtgtgtgnccacccagcctggctaatnttttntattttttgcagagacaaggtctcactatgttgcccaggctggtcttaaactcgagttcaagccattctcctgcctgagccttccaaagtgccgagccgccatgcccagcgtgagtttatacctgctcattggagtttcccagggatttttcttttt

SEQ ID NO: 7658 - DNA, 264 bp, Homo sapiens
  III.1286 (W38969)
  misc_feature (144)..(144): n is a, c, g, or t
  misc_feature (198)..(198): n is a, c, g, or t
  misc_feature (229)..(229): n is a, c, g, or t
  misc_feature (240)..(240): n is a, c, g, or t
tgttgaagtatcattgtggacactttcccagttgacttccacttgatcccctgaattaactaactggcactggcgtttcctttgtaaaatgtacaatgtcagccaccatcttgctactaaagtgtggcctgtggaccacaacancggggggaatctcaggtctcacctcagacttgctgggtcagaacctgagttttngagaggctctgggcaaccgggaccctctcanacctgctgttnggttctcaatcgatggacccgatt

SEQ ID NO: 7659 - DNA, 328 bp, Homo sapiens
  III.1287 (N94561)
  misc_feature (293)..(293): n is a, c, g, or t
ttttttttttttggttaattctgccacatttaatgttggtgagagagtgatctatcctaatgacattttactgtttaaaaaagtttcctagccatgaagccctgctactgatttagacaaggtattatggtcattactttgtacccctatccttccaagcacttctggtacttcagtcgtttttactgatccaccaacacctaaagaggctatgctacagtctctagctaaatggaagacacattcatccttctccctctgactgctttgatcatcatttattgcatctcatnactaattttctaaagtttggattgggacttttcag

SEQ ID NO: 7660 - DNA, 267 bp, Homo sapiens
  III.1288 (W30852)
  misc_feature (1)..(1): n is a, c, g, or t
  misc_feature (2)..(2): n is a, c, g, or t
  misc_feature (192)..(192): n is a, c, g, or t
  misc_feature (198)..(198): n is a, c, g, or t
  misc_feature (205)..(205): n is a, c, g, or t
  misc_feature (210)..(210): n is a, c, g, or t
  misc_feature (217)..(217): n is a, c, g, or t
  misc_feature (263)..(263): n is a, c, g, or t
nnttttttagaacaaaacaggtatatttctattagactacctgatacagaagatagtgtggtatggatggatagtatgaaggacaaataatacaaatatattttattgaaataaacaaaaatgcatacacagctcaatgggtcacttggaacaaacttgcttgactatattactgagcagaaacaaaacggnagcacnaacaccnttccntttttgncatgtatctggagataggtagggagacactacactggggtttttanaaaa

SEQ ID NO: 7661 - DNA, 462 bp, Homo sapiens
  III.1289 (AA016082)
  misc_feature (373)..(373): n is a, c, g, or t
  misc_feature (425)..(425): n is a, c, g, or t
  misc_feature (439)..(439): n is a, c, g, or t
gagatagcatcttgctctgttgctcaggctagagtgtagtggcaccatgatggctcactgcagctttggcctcttaggctcaagccatcctcccacttcagcctcttagtagctaggactacaagtgcatgctaccactcacagctaactttttgtagaggcagggtctcactatgttgccagggctggcctcaaactcctgggctcaagtgatcctcccgtcttggcctcccaaagttctgggattacaggcatgagccacctgcacccagccaggttttttgtttttaaaagtaaagacaaactatggaaaacacgaaggggcaaccaaccaccgcaactaaaaagtgtagatgggcagcactataaaaanagctaaattccgaatggtttaatgctgtaagatggttaacccagtagaaccnagctagagaaatanatgttttaattcgattaaaagct

SEQ ID NO: 7662 - DNA, 481 bp, Homo sapiens
  III.1290 (AA017001)
  misc_feature (248)..(248): n is a, c, g, or t
  misc_feature (467)..(467): n is a, c, g, or t
aaaatagttctggtcttgtgaaaggctgttggggttccccaaggtttcctggataacacttggagagctgctttagagcatatattggcaaccatcccaggccaaatctagaaaactttaaatgtttgcaggcctttcgttcaagtcctcaatattagttactcctttttgtaaagttaagaaatttgacacctgctattgcacatcggcattgtaaaaattatcccataatttgaagggtttctttntccttaactccttgaggatggcagtggggtggagaaaataaagttattggtatgtgattgtatgctctaccctggaattctgttaagtgtaaggtatcagcttggactaatctagaatttgataggcaaaatcaatgtagtgtgggtagaccggtgctcgggtttgtgaactttctgtcctggaggttgtgccagaatgttaatcacttaaaatagaangtttagttcagctg

SEQ ID NO: 7663 - DNA, 371 bp, Homo sapiens
  III.1291 (R06130)
  misc_feature (4)..(4): n is a, c, g, or t
  misc_feature (5)..(5): n is a, c, g, or t
  misc_feature (8)..(8): n is a, c, g, or t
  misc_feature (9)..(9): n is a, c, g, or t
  misc_feature (11)..(11): n is a, c, g, or t
  misc_feature (13)..(13): n is a, c, g, or t
  misc_feature (33)..(33): n is a, c, g, or t
  misc_feature (35)..(35): n is a, c, g, or t
  misc_feature (47)..(47): n is a, c, g, or t
  misc_feature (51)..(51): n is a, c, g, or t
  misc_feature (52)..(52): n is a, c, g, or t
  misc_feature (53)..(53): n is a, c, g, or t
  misc_feature (54)..(54): n is a, c, g, or t
  misc_feature (56)..(56): n is a, c, g, or t
  misc_feature (59)..(59): n is a, c, g, or t
  misc_feature (60)..(60): n is a, c, g, or t
  misc_feature (62)..(62): n is a, c, g, or t
  misc_feature (63)..(63): n is a, c, g, or t
  misc_feature (68)..(68): n is a, c, g, or t
  misc_feature (76)..(76): n is a, c, g, or t
  misc_feature (85)..(85): n is a, c, g, or t
  misc_feature (86)..(86): n is a, c, g, or t
  misc_feature (153)..(153): n is a, c, g, or t
  misc_feature (175)..(175): n is a, c, g, or t
  misc_feature (281)..(281): n is a, c, g, or t
  misc_feature (367)..(367): n is a, c, g, or t
gaanntcnngncngacaatcatccacccaggcncnctcccaggatantagnnnnanacnncnngaccngggtggancagggacgnnacaccagtttgctaagtacaaatcattcaaggtggctgacgaggcagagaagtacaagctggtactnggagcctttgtcgggggcagtncgggtaattctctaacgggccacaacaacaacttcttctccaccaaagaccaagacaatgatgtgagttcttcgaattgtgctgagaagttccagggagcctggtngtacgccgactgtcatgcttcaaaccttcaatggtcttttaccttcatgggaccccatgaggagctatgccaatggtattcaactnggag

SEQ ID NO: 7664 - DNA, 382 bp, Homo sapiens
  III.1292 (R06131)
  misc_feature (213)..(213): n is a, c, g, or t
  misc_feature (296)..(296): n is a, c, g, or t
  misc_feature (321)..(321): n is a, c, g, or t
  misc_feature (339)..(339): n is a, c, g, or t
  misc_feature (356)..(356): n is a, c, g, or t
cccaaagtaaacatatttagaaacataattctccctctggtgaggttgtgggcatgtggcggcttgactgagctgggggcaaaggggcagctgtgggcgtcatgggagtgtgtctggctggggaaatggggtgacttccacgacgcagcgcttgtgggtgtggcctccccactagcaggtgcatgtggaggggtcctggcccgtctaggcgcntcatccttcatctctgacaccatgcacctatatttgtaccccttcgccgcactccagttgataccattggcatagctctcatngggtcccatgaggtagagaccattnaggtttgaagcatgacantcggcgtaccaccaggntccctgggaacttctcagcacaattc

SEQ ID NO: 7665 - DNA, 374 bp, Homo sapiens
  III.1293 (R19072)
  misc_feature (362)..(362): n is a, c, g, or t
tggggaatgtatgacatggtttaaaaagaactcattataaaaaaaaaaaacaaaaaaaatcaaaaattaaaaaaaatcaatgcggtctctttgcagaatgttttgcttgatgtttaaaaaataccttggatcttattttgtaaatacttacatttttgttaaaaaatacaagtattgcattatgcaagttatttcataatcttacatgtcctgtaacaggcttttgatgttgtgtctttccactcaaatgaatttgctaggtctgttctttttgaaggctccccatgtctaactccattccaaaaggaaaaatgagggtcagtaggacagtctatggggtgctaggaaacccacccattggnctaatggaccct

SEQ ID NO: 7666 - DNA, 377 bp, Homo sapiens
  III.1294 (R44113)
  misc_feature (46)..(46): n is a, c, g, or t
  misc_feature (202)..(202): n is a, c, g, or t
  misc_feature (218)..(218): n is a, c, g, or t
  misc_feature (231)..(231): n is a, c, g, or t
  misc_feature (232)..(232): n is a, c, g, or t
  misc_feature (298)..(298): n is a, c, g, or t
  misc_feature (304)..(304): n is a, c, g, or t
  misc_feature (361)..(361): n is a, c, g, or t
  misc_feature (369)..(369): n is a, c, g, or t
  misc_feature (374)..(374): n is a, c, g, or t
ctccaattctttattaatcacagcttgctcacaatgacatacaggnaaatagcactaatgaagagtaaatatgcaggcagcaaccttcaggagttgggagttggggagaaacgacttcaaaactgcgataggtacttatggtgggtatctggtgattcttagttggcacaaatgccctgcctagcccccttaactgcgtcanttacacagatggagtnttttgttgttggnnttgttagtaggcaggattgccttaacactggggaagaaagaccagcttgagtgaaagtccgcagtntttttnattttgtttgtatgtgtgttttaatgcaacaaccagctcacagtttccaagtggganaattattncagtngcc

SEQ ID NO: 7667 - DNA, 454 bp, Homo sapiens
  III.1295 (R66781)
  misc_feature (382)..(382): n is a, c, g, or t
  misc_feature (387)..(387): n is a, c, g, or t
  misc_feature (403)..(403): n is a, c, g, or t
  misc_feature (413)..(413): n is a, c, g, or t
  misc_feature (420)..(420): n is a, c, g, or t
  misc_feature (427)..(427): n is a, c, g, or t
  misc_feature (453)..(453): n is a, c, g, or t
aattttatttggtgataagcacaaatctctactcctcatgacatgaagaaaaagactgaatgtgaagggagtttctgtactgtaagctagattggataatgatggctgtaacaaatcatgttagatggttttcagttggggtgtagaaataggaagatgcaaaggaacaatggtgttggcaaagtcttctttgaatatcagggactgagtcaataaaaaaaatagtagaaaggtggcttttactattgacaaaagccggggtcaaaaaaagtagtttaagtcttaagactgaatatgcattaaagtatgcaggtagcaaagatgttaattaaatttgcttaaaaaaaagaatttaaagtttttattttaggattccattttnacccngttccttgttatttgncccctcctgnggatttnccattangccagggggaattttaggtttttttnc

SEQ ID NO: 7668 - DNA, 424 bp, Homo sapiens
  III.1296 (R67886)
  misc_feature (1)..(1): n is a, c, g, or t
  misc_feature (10)..(10): n is a, c, g, or t
  misc_feature (78)..(78): n is a, c, g, or t
  misc_feature (206)..(206): n is a, c, g, or t
  misc_feature (293)..(293): n is a, c, g, or t
  misc_feature (309)..(309): n is a, c, g, or t
  misc_feature (345)..(345): n is a, c, g, or t
  misc_feature (356)..(356): n is a, c, g, or t
  misc_feature (372)..(372): n is a, c, g, or t
  misc_feature (379)..(379): n is a, c, g, or t
  misc_feature (406)..(406): n is a, c, g, or t
  misc_feature (413)..(413): n is a, c, g, or t
naattttctnattcaaaatgggtcaaacgtattttagttggaagccaatttctgagaatgtaccatagaatatttatnccaataaatctacttactgcgaactgaacatactctcggcactgttttttaagcacgtacaatttggctatacattgggtggcgtaaacttcacttcttaatcaaataaaaaacaagttgtatataanctgtattattttttaagtcatgaatttaagtgatgcagctctatcctctagtgtgcactgtacatgtattaggaaaggatgaaatanggatattgcaataggngtttatatttggggaaacagccccgggtatggcccnaataataaatnggcctcctttaacccnttggccnggggttttccgggggtccctttggtcngttcccnggggggccccc

SEQ ID NO: 7669 - DNA, 437 bp, Homo sapiens
  III.1297 (W60052)
  misc_feature (434)..(434): n is a, c, g, or t
agaaaacaaccaaaactttatggcaatgtgctgtcatctttcctggggttagtgcctgagtaataccccttgaaaacttctcatcccctgaagggtggggtgaccaccctcatgggactgaactccttttgggagccagagaagggtctgtggttggctgaggggctgtagcttagacctcagggtctccaggatggaccccaaggccaaagggtctaaaattctgaattctgaatctggtggcctcctcctcacacccttccctggagcagctgcctccggaatggctcaaagtcctcaggcactgtgtcattgcatccgatactgggagattggaccaaattatgttttcttggggagaagccagaatacaccaagacgcccccctcggaatggatgtgtcaatgatcaccccagaatccggcaaaaagttnggg

SEQ ID NO: 7670 - DNA, 456 bp, Homo sapiens
  III.1298 (W60130)
  misc_feature (445)..(445): n is a, c, g, or t
ggtggccgcttctacgtatcatgtggaagcagaccgagcagacctactggcaggctacacccttccgggcggttgcagcccggctgcagctcaaggcagtgacatcagtgtctggcccaggtgagcacctccgaaatgccctgtggatactggccacacccctgatcaggtacgactgctgtggacagacccacgaaatgtgggcttggcgggacaagacctcctatcgctggcagcttctgcaccggcctcaagttggctacattcgggtgaagctctatgagggaccccaagcttgtggcggattctggggtgatcattgacacatccatgcgaaggggggcgtcttggtgtattctgcttctcccaaagaaaacataatttggtccaatctccaagtatccgatgcaatgacacagtgcctgaggacttttgaaccattccngaggcaactgc

SEQ ID NO: 7671 - DNA, 402 bp, Homo sapiens
  III.1299 (H17054)
  misc_feature (327)..(327): n is a, c, g, or t
  misc_feature (350)..(350): n is a, c, g, or t
  misc_feature (357)..(357): n is a, c, g, or t
  misc_feature (378)..(378): n is a, c, g, or t
  misc_feature (397)..(397): n is a, c, g, or t
tttttttttttttttaagtcttccaacagtttattagaaagaatgtagacatttaaaaaaatccccactgtcatgaacataaattgaggttttcagcccgggtataagctgaatcaaaaaaaggaaataaaaaatccaatagtgtattaaacatttttcactcatttgccatactgacagtgcaaatacaaatctgggactaaatgtacagactctcaagcaacaatgtacagctttcttcgtcctccatgctaagagatgtaaaagcttaagggtcaaacaataccaattgtatagggcttcaaaaaccatctaagttagggggcnttctctaggttttaggctaaggntacaccngggggacactggaccaaggtncttcactttacattggggnttaat

SEQ ID NO: 7672 - DNA, 422 bp, Homo sapiens
  III.1300 (H17669)
  misc_feature (336)..(336): n is a, c, g, or t
  misc_feature (412)..(412): n is a, c, g, or t
cgagcccgccgctgccgccgtcgcctgagggaagcgagaagaggccgcgaccggagagaaaaagcggagtcgccaccggagagaagtcgactccctagcagcagccgccgccagagaggcccgcccaccagttcgcccgtccccctgccccgttcacaatgcagcctgcttctgcaaagtggtacgatcgaagggactatgtcttcattgaattttgtgttgaagacagtaaggatgttaatgtaaattttgaaaaatccaaacttacatttcagttgtcttcggaggaagttgattaattttaaggcatttaaatggaaatttgatctttttcantgttattgattccaaatgatttccaaggcttaaaaggaacggacagatcattttatgtttgttttacggaaagggngatttgggcc

SEQ ID NO: 7673 - DNA, 275 bp, Homo sapiens
  III.1301 (W94118)
  misc_feature (122)..(122): n is a, c, g, or t
ttttgagacacaaaatttaatttaatagaaattttgtttgtagttcttacattctcagtgtgagccaatctgggacccactgccccacccagaagtggcccagtcctgggggcaggggaganagggaggggtgaaatgagaagagccccgttcttcctcagtgctggggggttggagacaccacccccttctgctgccctcctctgggctccaggaaggagagcagatgaaatctcaggcctgtggttctccacaccactgccccccaggttgga

SEQ ID NO: 7674 - DNA, 288 bp, Homo sapiens
  III.1302 (W94163)
  misc_feature (2)..(2): n is a, c, g, or t
  misc_feature (32)..(32): n is a, c, g, or t
  misc_feature (184)..(184): n is a, c, g, or t
  misc_feature (197)..(197): n is a, c, g, or t
  misc_feature (204)..(204): n is a, c, g, or t
  misc_feature (214)..(214): n is a, c, g, or t
  misc_feature (232)..(232): n is a, c, g, or t
  misc_feature (244)..(244): n is a, c, g, or t
  misc_feature (250)..(250): n is a, c, g, or t
  misc_feature (266)..(266): n is a, c, g, or t
  misc_feature (274)..(274): n is a, c, g, or t
  misc_feature (279)..(279): n is a, c, g, or t
angggtcgttttaaagggcccgcgcgttgccncccctcggcccgccatgctgctatccgtgccgctgctgctcggcctcctcggcctggcctcgccgagcctgccgtctacttcaaggagcagtttctggacggagacgggtggacttcccgctggatcgaatccaaacacaagtcagattttnggcaaaggctgtnctcaggnccggcaaggnctacggtgacgaggaganagagaaaggtgngcaganaagccaggatgcacgnttgtatgnctctngtcggccag

SEQ ID NO: 7675 - DNA, 145 bp, Homo sapiens
  III.1303 (R60885)
  misc_feature (66)..(66): n is a, c, g, or t
  misc_feature (84)..(84): n is a, c, g, or t
  misc_feature (127)..(127): n is a, c, g, or t
  misc_feature (135)..(135): n is a, c, g, or t
ttttttttttataaaaaaaaaaaaatctttatttcatgtaccaggattttttttttcagttttctnctttttaaaatttttttnctgttaacagtctgaaaaaaaaaaaaaggactcaccaagaaantaaatggnggttagtttc

SEQ ID NO: 7676 - DNA, 459 bp, Homo sapiens
  III.1304 (R67306)
  misc_feature (388)..(388): n is a, c, g, or t
  misc_feature (400)..(400): n is a, c, g, or t
  misc_feature (426)..(426): n is a, c, g, or t
gcaaagaggggaaagacgcaggggtccccaaagcccttcttcactttgtgtccccttgctgcgatcatggagagttaaagaggcttccttgggagaagagctctgccaccagggcttccccagtgtctttgggggtctgtgaaaaagaggatcctctgaggtttactgggagggctcaaggctgagggaatggagaggaaaattttagcagttccatcccagtgtaaggaccaaccccaaaagttaaacttgcaccacagactaaaggtcaagggcatcctgtgtttctcccctttcttccccagagtgacaagggccagttcagactgacagaaatccaacagctttcctgagctgggaattttcaggaacagtcttgcaagtttantcccgggtggantgaaggttcaagggtgagggcccccntgcctcttgcctggcgagttttccccccggttt

SEQ ID NO: 7677 - DNA, 318 bp, Homo sapiens
  III.1305 (H79277)
  misc_feature (88)..(88): n is a, c, g, or t
  misc_feature (199)..(199): n is a, c, g, or t
  misc_feature (286)..(286): n is a, c, g, or t
  misc_feature (313)..(313): n is a, c, g, or t
atcttgggataattagaagtgggggctggcgtggtggctcacgtctgtaattccaacactttgggaggctgaggcgggcaaatcaccngaggttgggagtttgagaccagcctgaccaacatggagaaaccccatctgtactaaaaatacaaaaatattagctgggtgtggtggtgcatgcctataatcccagctactngggaggctgaggcaggagaatcacttgaacctgggaggcagaggttgtggtgagctgagatcatgccattgcactccagcctggggnaacaagggcaaaactccatcttagggnaaaaa

SEQ ID NO: 7678 - DNA, 367 bp, Homo sapiens
  III.1306 (H79388)
  misc_feature (11)..(11): n is a, c, g, or t
  misc_feature (54)..(54): n is a, c, g, or t
  misc_feature (194)..(194): n is a, c, g, or t
  misc_feature (244)..(244): n is a, c, g, or t
  misc_feature (246)..(246): n is a, c, g, or t
  misc_feature (248)..(248): n is a, c, g, or t
  misc_feature (296)..(296): n is a, c, g, or t
  misc_feature (358)..(358): n is a, c, g, or t
tccacgatttnagtcctggaagctgttttttccttcccagaggagccttcattnataatacgcttacagatttcatacgaagaccgtgttggccaggatggtctcaatctcctgacctcgtgatccacccacctcggcctcccaaagtgctgggattataggcatgagccaccaccgcgcccggccttttattnttttattttatttttttcctaagatggagttttgcccttgttgcccaggntngnagtgcaatggcatgatctcagctcaccacaacctctgtcctcccaggntcaagtgattctcctgccttcagcctgcccaagtagctggggattatagggcattgcaccancacacccag

SEQ ID NO: 7679 - DNA, 309 bp, Homo sapiens
  III.1307 (R05837)
  misc_feature (4)..(4): n is a, c, g, or t
  misc_feature (147)..(147): n is a, c, g, or t
  misc_feature (179)..(179): n is a, c, g, or t
  misc_feature (254)..(254): n is a, c, g, or t
  misc_feature (262)..(262): n is a, c, g, or t
ttcntgattactttttatttttaacttaaacgactgtgtattttccacagtcttatgatgagaaaggctccagaatcacgtgtaggtgtcctcaacatttcatagctcgaaccgtcctttctttacgttgtgcattgatatgggctnctcagttcagaaaacaaggcactataactatnttatcagctacattaatacattgaagatatatttatcctttcatgaaagatacagcatttgaatacaatatgggntttatgcnggatcagggttcaaaacacccaagggcacacactttattttttttcc

SEQ ID NO: 7680 - DNA, 330 bp, Homo sapiens
  III.1308 (R09846)
  misc_feature (239)..(239): n is a, c, g, or t
  misc_feature (261)..(261): n is a, c, g, or t
gacacgttgggaaatattgaccagccacagtacagacagatcgttgtagagttacttatggttgtatccattgtactggaaagaaaccccgagctagaatttcaagacaaagtagatctagacagactggtcaaagaagcatttaatgaatttcaaaaagatcagagtcggctaaagggaaattggaaaaacaaggatgacatggacttcctttttacaacactcctcccctggggggnaaaaggaggggacatggcaggntattttggacaagggcggttgatggattctggcttgctggggaggggaggaagttcaaggccccaaacc

SEQ ID NO: 7681 - DNA, 442 bp, Homo sapiens
  III.1309 (R11640)
  misc_feature (220)..(220): n is a, c, g, or t
  misc_feature (368)..(368): n is a, c, g, or t
  misc_feature (416)..(416): n is a, c, g, or t
  misc_feature (427)..(427): n is a, c, g, or t
ttgataaggtacagatttattatattttagtccaacccctatatttagcaaatacaaaaccacagtcatgtttacaatgtaaaaactgtagaatagctctgtatactaaaatattattaataatgcagtttttgagaaccaaaatatcagctggctgactttgcttttatgatgtatattaacatcttttagcatgacaataccactaagagaagttcancattctttcagtatcttttgatttccagtatgcattactagttggcaaatttattttaatgggcaggtatgggtaaggaattcaggtccaaaaggggcaaaggattccattttggatggaacctatttggatccataccaacatggcngccgggcaaattttccaattccataaacctattttttatccccccggnggggggttacntttatgggtggggca

SEQ ID NO: 7682 - DNA, 521 bp, Homo sapiens
  III.1310 (H29478)
  misc_feature (323)..(323): n is a, c, g, or t
  misc_feature (411)..(411): n is a, c, g, or t
  misc_feature (457)..(457): n is a, c, g, or t
  misc_feature (468)..(468): n is a, c, g, or t
  misc_feature (521)..(521): n is a, c, g, or t
taggtttggcccatgggtaaggatgatgcttgacttcagcatagagtcgtgggttatttacaagtgacatacttttcctgggttatctgggtatgttgactccatgccacttgcataaagcagcaatggatattagtattatggatgtccagtaagttattccacaaagaccatgcctaaggtggcatcagccctgggctccacagctgcgtggcatcaaagctttctcttaactctcttacctctaggcaaactgagacctcaccatcctctcccctgcttcccacgacagtcctttgcccttgccatgctcagggttggantcaagttgttctattctcaacagaccaaaatgtttagttaaggcaaagtatcttggaaacaattgtggattaattacagtcttgtacncttgacaaagctgtgcaggatgggcaataagttcataccagcaatnctggggtcccntaataaatacgtacatgtgggacatcgtgcacatatttcaacagttcggagtn

SEQ ID NO: 7683 - DNA, 448 bp, Homo sapiens
  III.1311 (H29479)
  misc_feature (184)..(184): n is a, c, g, or t
  misc_feature (193)..(193): n is a, c, g, or t
  misc_feature (427)..(427): n is a, c, g, or t
  misc_feature (437)..(437): n is a, c, g, or t
ttttttttttgaagggaagtatgtctttatttaagaattccgactgataaaacaatgtatccaggggaactaacataggatccccatacacaagcaattctaacagttccaggaacttggtgaaatgacaatgtgcccatcacccagtctgatacagtgtttcacctactcaagatgccagganttgtaagangcacagtcactggcactctcggtacacccaaaaaaaccacagccagttccggaagtgccatcagaagatgcatcccaacttgagatgctcaagtaggacaaaaagtggccttgattcaagtgacaacgccatttcatatcctaagccttattttcactacttcttactcttcagatttatggaggggccagtatttgtcacccatattgtatcactgcaaattcaggggtaaantagcacagcnttatgggcaac

SEQ ID NO: 7684 - DNA, 399 bp, Homo sapiens
  III.1312 (H81736)
  misc_feature (287)..(287): n is a, c, g, or t
  misc_feature (396)..(396): n is a, c, g, or t
gacactctcagttttttgtcatgtaagatactaacctagccaccctgggagagaacagaaagctgtccctggctgcactttctcagccctgggagggcgcactgaacccagaacatttccctaaccccaacctggtaggactcagccacttcttcaggaatttcacttatttggacgggattttaggtttccctcccttccccaaaccatacagttgagaagtaattcagaagtaggccagaagacactttattcgtttatattgtgagaaaacagccccatcaggnttgtgttaaggcaatggactgaatgagtgcgtgctgggtggggtggggcacggaggctggcgggttgctttcagccagtgcagttgagaacagcagccccacggccccntgg

SEQ ID NO: 7685 - DNA, 367 bp, Homo sapiens
  III.1313 (H81737)
  misc_feature (37)..(37): n is a, c, g, or t
  misc_feature (130)..(130): n is a, c, g, or t
  misc_feature (132)..(132): n is a, c, g, or t
  misc_feature (166)..(166): n is a, c, g, or t
  misc_feature (319)..(319): n is a, c, g, or t
  misc_feature (332)..(332): n is a, c, g, or t
  misc_feature (343)..(343): n is a, c, g, or t
  misc_feature (364)..(364): n is a, c, g, or t
ctctggcgcaggttaaatgcagttttgaaaacctggnaacatcaaatggaggcgggaaataggctggggcgaggctgaggggctgaacacagcagtgaccgtgggtcagcaggtcgcctgcccagcagcncncccaggagagggctcgggcgcccctggcagcccncatacccccaggacctggctcgtgagtgcgtctgggtcaggaagagacctctctgtgcgtctcaggctgagatgcagatttctgttttctaaaactggaagcgaccttgacgtgtattgaaggtgtgtgtgccaaatgcttccgacggaggtnctggccttggttngtttctctctncccctgtggtcatcaagtccnggg

SEQ ID NO: 7686 - DNA, 411 bp, Homo sapiens
  III.1314 (R79965)
  misc_feature (314)..(314): n is a, c, g, or t
  misc_feature (368)..(368): n is a, c, g, or t
  misc_feature (376)..(376): n is a, c, g, or t
  misc_feature (381)..(381): n is a, c, g, or t
  misc_feature (392)..(392): n is a, c, g, or t
  misc_feature (407)..(407): n is a, c, g, or t
tttaaatgattatcgatacaccaagtaatacatgtaacaagttcttgaattctatcatctagtaattttgattaagagaaactaaaagcagcccaaacaattccactagtattcactgttctaaccattagcaagaatggactactttaaggctggctgctgcttcacacaggttacaaagaactatttactactttttcatagataaagcccctgaccttcaagaaagtgttagggaaaaaaattatttaatcccttcctttcttcaaagaattgttatgtgggtttttttttttttaaactagatctaaggnaagaaaaagtcaacactgatatacatgttgcttgagcccaaaagacataggggnaaaaaggncaacntttaacccttnaaattccccaagggntttg

SEQ ID NO: 7687 - DNA, 327 bp, Homo sapiens
  III.1315 (R80059)
  misc_feature (1)..(1): n is a, c, g, or t
  misc_feature (274)..(274): n is a, c, g, or t
  misc_feature (291)..(291): n is a, c, g, or t
  misc_feature (325)..(325): n is a, c, g, or t
nattcggcacgtgggctgacccaaggggccttcgaggtgccttaggcgcttgccttgctctcagaatcgctgccgccatggctagtcagtctcaggggattcagcagctgctgcaggccgagaagcgggcagccgagaaggtgtcctaggcccgcaaaagaaagaaccggagctgaagcaggccaaagaagaagctcaggctgaaattgaacagtaccgcctgcagagggagaaagaattcaaggccaaggaagctgcggcattggggatcccntgggcagtttgcagcanttgaaagttggagaagggagaccccagggagaanga

SEQ ID NO: 7688 - DNA, 345 bp, Homo sapiens
  III.1316 (H09716)
  misc_feature (51)..(51): n is a, c, g, or t
  misc_feature (224)..(224): n is a, c, g, or t
  misc_feature (258)..(258): n is a, c, g, or t
  misc_feature (338)..(338): n is a, c, g, or t
tttttttttttttttttttggccttgaattctttttaataaaaaaaaactntttacaattttatatattagttgaggaaatcatatatcttccatgtttagctgttattatgtgctggtgtctttctccatttttgcatactgcacaaaaagtttcaaaaggaatcgttcctcatttaataaatctccacttttcaaacaatccatcacaaagtttatgcttgnaattttggtatttgggcattcaaatatacacaantaaaaatagataataggcaaccaccacaaaatttaagctgagtgaatttgatagtctcgtagctgcctttgtgtgtctgncactcac

SEQ ID NO: 7689 - DNA, 501 bp, Homo sapiens
  III.1317 (H10472)
  misc_feature (4)..(4): n is a, c, g, or t
  misc_feature (48)..(48): n is a, c, g, or t
  misc_feature (85)..(85): n is a, c, g, or t
  misc_feature (175)..(175): n is a, c, g, or t
  misc_feature (228)..(228): n is a, c, g, or t
  misc_feature (314)..(314): n is a, c, g, or t
  misc_feature (379)..(379): n is a, c, g, or t
  misc_feature (442)..(442): n is a, c, g, or t
  misc_feature (482)..(482): n is a, c, g, or t
caanaccagaccaagatatcaaattcaccattcaagtttcaagaattncagaccctaaacctctggggtctagaatttcagaagnaacaaagattattacattatatctacatcaaatgggtctttggagggccggataaccaggagggaggggtgtgccagacaagagccatgnaaggatcctcatgaaagttggacaagatgcaagttctgctggatcaaccaggnaataaaggatccaacaagacgtccagaactagaagctggtacaaatggaagaagttcgacaacaagtccctttgtaaaaccaaatncaggttctagcacagacggcaacagcgccggacattcggggaacaacatcctcggttccgaagtngccttatttgcagggattgcttcaggatgcatcatcttcatcgtcatcatcatcacgctggtngtctcttgctgaagtacccgaggagacacaggaagcactngccgcagcacacgaccacg

SEQ ID NO: 7690 - DNA, 115 bp, Homo sapiens
  III.1318 (H28171)
aaaagaagtggtggggaaagacctgctgaaagggtcgctcctcttcacagctggcccgttggaagaagagcggtttggcttccctgcattcagcggcatctctcgcctgacctgg

SEQ ID NO: 7691 - DNA, 426 bp, Homo sapiens
  III.1319 (H30763)
  misc_feature (16)..(16): n is a, c, g, or t
  misc_feature (105)..(105): n is a, c, g, or t
  misc_feature (209)..(209): n is a, c, g, or t
  misc_feature (423)..(423): n is a, c, g, or t
acagagggacagactnctgaggaatacatgtggattctttccttctgtgacactctgaaagaattgtgactggggcatggggtgccaccttcagaggcaggagtntttaggaaatgccacagtggcacatgacctgcgtgggctccagcagcagcagcaacctgcagggtagatagggcagctgagaacacgagagcagaagggcggtnactctatcatctcggagggttcttttcaaacaacattttctagtatacaatgaaaagagacctggtgccaggcatggtggctcatgcctctaatcccagcactttgggaggccgaggcaggtggattacctgaggttgggagttcgagcgagaccaggcttggctaacgtggcgaaacctcatctctacttaaaactacaaaaattagccaggntta

SEQ ID NO: 7692 - DNA, 468 bp, Homo sapiens
  III.1320 (H82646)
  misc_feature (340)..(340): n is a, c, g, or t
  misc_feature (374)..(374): n is a, c, g, or t
  misc_feature (389)..(389): n is a, c, g, or t
  misc_feature (422)..(422): n is a, c, g, or t
  misc_feature (447)..(447): n is a, c, g, or t
  misc_feature (464)..(464): n is a, c, g, or t
attcggaacgaggagcctattcctattctctagcctattccttaccacctgtaatcttgaccatataccttggagttgaatattgttttcatactgctgtggtttgaatgttccctccaacactcatgttgagacttaatccctaatgtggcaatactgaaaggtggggcctttgagatgtgattggatcgtaaggctgtgcttcattcatgggttaatggattaatgggttatcacaggaatgggactggtggctttataagaagaggaaaagagaactgagctagcatgcccagcccacagagagcctccactagagtgatgctaagtggaaatgtgnaggtgcagctgccacagagggcccccaccagggnaaatgtctagtgttntagtggatccagggccacaggtagagagtggcnttgtggagcgctggggagcaggganctgaccaccaccagggncccg

SEQ ID NO: 7693 - DNA, 385 bp, Homo sapiens
  III.1321 (H82647)
  misc_feature (153)..(153): n is a, c, g, or t
  misc_feature (192)..(192): n is a, c, g, or t
  misc_feature (338)..(338): n is a, c, g, or t
  misc_feature (349)..(349): n is a, c, g, or t
  misc_feature (358)..(358): n is a, c, g, or t
  misc_feature (382)..(382): n is a, c, g, or t
ttttacttcaaagtttacctcagatcagcctgggaaggtgaggggaatgaagcagatgctgttaaagggtcatgggagagaaaaggtatctgtgggaagagaataatctcttttgacttcgtgtgctgcctcacggacacactggagcagggnttgggcccccaaggctcaggtagccccgtgcctgtggtnttgctgggtgcagcctacgtggctctcgaatgggttgcaggctggtgcctaaagctttcccaagggggcgctgcatgctgccactgactccacagttctggggtcctgggtggtggtcaggtcctgctcccagcgctccacaaggnactctctcctntggcctggnttccactagacactaggacatttncct

SEQ ID NO: 7694 - DNA, 460 bp, Homo sapiens
  III.1322 (R90923)
  misc_feature (1)..(1): n is a, c, g, or t
  misc_feature (115)..(115): n is a, c, g, or t
  misc_feature (249)..(249): n is a, c, g, or t
  misc_feature (252)..(252): n is a, c, g, or t
  misc_feature (256)..(256): n is a, c, g, or t
  misc_feature (259)..(259): n is a, c, g, or t
  misc_feature (296)..(296): n is a, c, g, or t
  misc_feature (408)..(408): n is a, c, g, or t
  misc_feature (413)..(413): n is a, c, g, or t
  misc_feature (433)..(433): n is a, c, g, or t
  misc_feature (438)..(438): n is a, c, g, or t
  misc_feature (455)..(455): n is a, c, g, or t
nagcaggccccatgaatgaagagaacttttttgaatgggaggcattgatcatgggcccagaagacacctgctttgagtttggtgtttttcctgccatcctgagtttcccacttgnattacccgttaagtcccccaaagatgagatttacctgtgagatgtttcatcccaacatctaccctgatgggagagtctgcatttccatcctccacgcgccaggcgatgaccccatgggctacgagagcagcggnagntggnagntcctgtgcagagtgtggagaagatcctgctgtcggtngtgagcatgctggcagagccaatgacgaaagtggagctaacgtggatgcgtccaaaatgtggcgcgatgaccggggagcagttctattaagttttgccaaggcagattcgtnccagnaagttttctggggactgttnagacngggcttcgcacaggcgnacaca

SEQ ID NO: 7695 - DNA, 448 bp, Homo sapiens
  III.1323 (R90924)
  misc_feature (335)..(335): n is a, c, g, or t
  misc_feature (405)..(405): n is a, c, g, or t
  misc_feature (429)..(429): n is a, c, g, or t
  misc_feature (434)..(434): n is a, c, g, or t
cagtggcgggacttcagctcactactacctatgcctcccgggttcaagcgattctcctgcctcagcctcctgagtagctgagactacaggcgtgcaccaccacgcccagctaattttttgtaattttagcagacatggggtttcactgtattagccagggatggtctcaatttcctgaccttgtgatctacctgccttggcctcccaaagagctgggattacaggcacgaaccaccgcacctgggccaatcagcaataaatttcttttctatttaccccatttcttattaattcacacttcaaaaaaggcatttcctggggagtatttctaaggnatggatgggtttgtaatatataacaaatggaaaaggtgtaattagggttataagggaaaggcatctgccngtaaaatttgaagggaggaagggngtatngggctccccatggg

SEQ ID NO: 7696 - DNA, 303 bp, Homo sapiens
  III.1324 (H10357)
gagaggagggcacacttggaactcccctccccacaatacgtgattatttacattttagtaattggacaatcccggctcaggaggaggttgcaagaatctgcaaaagttggagggagcgccccaggagaacaaacagcaagccttatttcccctagcccatcccccaaaaaaccatccatcccatcctagtgtctggtggtgtccggtggtgtccatcttccattccttcccaaattatgggaagtaaggtttcttcttcaccagaataagagcacttggggataaacagagtagggttccctt

SEQ ID NO: 7697 - DNA, 557 bp, Homo sapiens
  III.1325 (H10546)
  misc_feature (388)..(388): n is a, c, g, or t
  misc_feature (435)..(435): n is a, c, g, or t
  misc_feature (488)..(488): n is a, c, g, or t
  misc_feature (507)..(507): n is a, c, g, or t
  misc_feature (537)..(537): n is a, c, g, or t
  misc_feature (549)..(549): n is a, c, g, or t
ccttgtcagactcagtcacatgcccactcgaagtcgcactgctatggaaagtgggtgcaggtggtgggcaccctggcgtgatccgcctgcttgactggtttgagacacaggagggcttcatgctggtcctcgagcggcctttgcccgcccaggatctctttgactatatcacagagaagggcccactgggtgaaggcccaagccgctgcttctttggccaagtagtggcagccatccagcactgccattcccgtggagttgtccatcgtgacatcaaggatgagaacatcctgatagacctacgccgtggctgtgcaaactcattgattttggttctggtgccctgcttcatgatgaaccctacactgactttgatgggacaagggtntacagccccccagagtggatctctcgacaccagttaccatggcactnccggccactgtctgggtcattggggcattcctcctctatggacatggtgtttnggggacattccctttgagnagggaccaggggattttggaagctgagttncattttcccagnccattttt

SEQ ID NO: 7698 - DNA, 536 bp, Homo sapiens
  III.1326 (H19029)
  misc_feature (437)..(437): n is a, c, g, or t
  misc_feature (456)..(456): n is a, c, g, or t
  misc_feature (489)..(489): n is a, c, g, or t
  misc_feature (506)..(506): n is a, c, g, or t
  misc_feature (520)..(520): n is a, c, g, or t
  misc_feature (529)..(529): n is a, c, g, or t
ttagttttaagcacaagcagaggaagatgggagcatagagaaggggaaatttctcctgcgcagttagttcaagaattcttcctggagaaagtgacctctgaactaaatgtttagggattctgtaatttactaagcaatacttacaaaaatctgttatgccagatgcagttctaggggctgggattctatagaaaagatctcaactttcataaagataccttctggggaggaaagtgagacactaacacaagcaaacaaataattaaaatcttcagtagtgatgagagtgatgagagctacttaaaatatatcaaggttgtatgattcagcctccattttgctattgtaacatttaagctgatacgtgggaagacaacaaagaaataatggagtaggtgaaaggaaatgcatttccaagcttcgggaaacagccaacngttaaaaggcaaaccaacngttcgccgctagggcagctttaaaaggtttttntttatttaaaatttgcnttttggaaaaccgnttgttcccntctattt

SEQ ID NO: 7699 - DNA, 434 bp, Homo sapiens
  III.1327 (H19320)
  misc_feature (334)..(334): n is a, c, g, or t
  misc_feature (413)..(413): n is a, c, g, or t
  misc_feature (424)..(424): n is a, c, g, or t
ttttttttctttaagataaatttgtttttaatgtaattacttagtggtaaatttattaaacatgatagtccaaatggtaccctaatttagatgaggtgtggacattgaaacttaaattataagacaaaatcttgaggccatacactatatggccatacactcactcttcacaatatgtaggctcaatttggtgacatttcagaacatgataatggatttagtgataccaagatttgtcagcaattccctacatatagtctgaaaaacatatgaaatactatgaacctctatgaactaataagcctacctacatgtttttaagatcatacatagncatgcatttcaagactcaaagtttgttacaggttttaatttttgaaggccaatttgcggtaacacacttttactggacntcaaaatgggngattaggtcc

SEQ ID NO: 7700 - DNA, 235 bp, Homo sapiens
  III.1328 (N95024)
tttttttttttttttttttttattgcacatcactcctttattatactgatatggaaaaaggatttagtacagttatgctcagatgaacactggacccatgtggcagggtcaagcaactagaacatgattcagaaatcagtgaaagatacacttggacaggaccaagaggcatttcactgccatgaaacaaggcaggaagggattctaatacacacaccaggaagcactcctgccc

SEQ ID NO: 7701 - DNA, 128 bp, Homo sapiens
  III.1329 (W23870)
tgcaggcatacatttttcctgtggctcgcacttgacaggcgcaaacctctccaaatccgccttttcctagaactctgtaatgtctaaatgtgttctttgttacgggttgcctttccagccatttccat

SEQ ID NO: 7702 - DNA, 453 bp, Homo sapiens
  III.1330 (W67141)
  misc_feature (440)..(440): n is a, c, g, or t
ttagataagtccaaactttatttaaaactacattttaaattcgttaccaaacatcacaatggggaaaaaaaatcaagacccaaaaaagaagggggaaaaaaaaaaaaacacagtgtgtcaaggcttaaatctgtccagaattcagtttctgatcgttttaaactaccatggggagaaatgaccacacctatcaaaaaagcagtgtcaaactaatttacatttttatacagatcagatgtttatttagtattgttttcatatatgcattgagtatgtaaggacagagttagatgagcctctgaagacatctcatatactctgggctcccaccgtttcaggttcttttaagtgtctcagaatttccagctaattcttcgggtctgcatttcacatatttcaccagataaatgggtttttctgttcttcttctaccattttcnttcttagatctgc

SEQ ID NO: 7703 - DNA, 241 bp, Homo sapiens
  III.1331 (W67310)
  misc_feature (241)..(241): n is a, c, g, or t
cctacaacgtgactttaaaaagacagcagaaagcaaaaatgtcccattggaacgagaagccactagtaaaaatgaccaaaataactgtcctgtgaaaccctgttacctcaatatcttggaagatgagcaacctttaaatagtgctgcccataaggagtcacctcctactgttgattcaactcaacagcctaaccctttgccgttacgtttacctgaaatggaacccttagtgcctagagtn

SEQ ID NO: 7704 - DNA, 466 bp, Homo sapiens
  III.1332 (AA757900)
taagatggtgtctcgctctgtcacccaggctagagtgcagtggtgcaatcttggctcactgcagcctccacttcccaggctcatgcgattctcctgcctcagcctcccaagtagctgggattacaggcacctgcaccatgcccaaccaacccttgtatttttttttttttttagtagagacagggtttcatcacataagtcaggctggtttcgaactcctgacctcaagtgatccgcctgcctcagtctcccaaagtgctgagattagaggcataagcaccatgctcggtgacatttcacttttgaaaatttaagacttaccttctcagagcaactgtacaagcaatgtacaaataaaggatgataacatcagcaccaaactacacacttattcattcctgggttaattctgtggctctatgactttatttcttcattttactttctcatctacttgtactttgtt

SEQ ID NO: 7705 - DNA, 438 bp, Homo sapiens
  III.1333 (R76380)
  misc_feature (339)..(339): n is a, c, g, or t
  misc_feature (358)..(358): n is a, c, g, or t
  misc_feature (376)..(376): n is a, c, g, or t
  misc_feature (404)..(404): n is a, c, g, or t
  misc_feature (419)..(419): n is a, c, g, or t
  misc_feature (429)..(429): n is a, c, g, or t
tcagctatactgacttctgttgaaaccattcaaagctaaagacatggaccttcagcagtgtaagaagatattgtacagtatattttaaatctatgaaattcatagttctgatgcttttggtcacagagcatcattttatcacttctggaaaatgtttattccaaaacagctttaatcccatatgtacacttcgtaatctcaaggttattattctgacaccagcttgctgctatggatttcagaggcacataagtaaaggtgctttttaatgtgcagtctatttccagaggcttacttagttgctgatttccagatttcgatgtttcttaagtctagggngaatttatatatatatttntttggcctttccattttnccaaaagttaggtaattatttcccttgnaggcctggttttccnttttttcctnccccttttt

SEQ ID NO: 7706 - DNA, 267 bp, Homo sapiens
  III.1334 (R76702)
  misc_feature (181)..(181): n is a, c, g, or t
  misc_feature (189)..(189): n is a, c, g, or t
  misc_feature (256)..(256): n is a, c, g, or t
tttaagctgacaggagtgtggcagtaactgctgacattgcaatctgaccgagaaagaattatagcagaaaacaggacatacttcacttagcaataaaatggcacattttaaatacatatatataaaatttttacaaatcaagtgtgaaacaaaagcactgcagtagctaaaatgggaaganaaaaaganaacaagcttcaatggaaataataactaactttagaaaatgaaaagcaaaaaaatatatatataactncacctagactt

SEQ ID NO: 7707 - DNA, 313 bp, Homo sapiens
  III.1335 (H82811)
  misc_feature (1)..(1): n is a, c, g, or t
  misc_feature (27)..(27): n is a, c, g, or t
  misc_feature (69)..(69): n is a, c, g, or t
  misc_feature (70)..(70): n is a, c, g, or t
  misc_feature (88)..(88): n is a, c, g, or t
  misc_feature (196)..(196): n is a, c, g, or t
  misc_feature (209)..(209): n is a, c, g, or t
  misc_feature (221)..(221): n is a, c, g, or t
  misc_feature (276)..(276): n is a, c, g, or t
ncaaaataatgtaacaaactaaaaccnaattttagactgtctttaaggcacaccaccttcatattcctnngtatttaaatcccctgtnctcttaacaggttctggataaaagcagtctccaagtcccaaatgagtggggccaccagttttaaaagtaacttgcttggctcagtgcagaacagatcatttgatttancacagagggggantaaaagggcgtnttaaatttcaggcagattcgcttcatcaggtccagtgggtcactacacccctgtngtactataggggctatgcttcccgggggtccttccca

SEQ ID NO: 7708 - DNA, 295 bp, Homo sapiens
  III.1336 (H83030)
  misc_feature (12)..(12): n is a, c, g, or t
  misc_feature (58)..(58): n is a, c, g, or t
  misc_feature (154)..(154): n is a, c, g, or t
  misc_feature (275)..(275): n is a, c, g, or t
gactttcaggantcaggactgctggggatcaagcccaaggatgtttttcagagctctntgatttaagatgctcgaaaagagtgtccaagaggagtaaaggtcatgacaatttactcccaggacaatctaagttctgccacaagtacccgtggtntctgttcccacaacaatggccctttcacaagctcttgcctcacaacccctgcagaagtccttcaacaaaactaataatagactagtgaaacctactcctcacatgggtaagagttgcagtnggcaggtgaccctcctccca

SEQ ID NO: 7709 - DNA, 420 bp, Homo sapiens
  III.1337 (H48599)
aaaaatgatgagaaaaacactccaacaattaagagagtgttataaaatctaaggaacaaggaactaacaaagttctaatgatgtggtaaaaataagaaagatagctttaactattagattatccatcaataactttggaaaaacagtttcggtggaatactatgggtagaatacaaatttctgtgggtagtgtagtggatagaattgggagttgaagacatggagatgcagtattgatagttgtgtccctgagagcacgtagcctggacgctggatgtcctggatcctcagcttgccactggccatggcaattgttgtagtgagatatattaaaaagcagccaaatggttacgcattattattgggctaaaacttttaccccaaactccaatgtattcatctactgaattaaaccaattt

SEQ ID NO: 7710 - DNA, 346 bp, Homo sapiens
  III.1338 (H48793)
  misc_feature (327)..(327): n is a, c, g, or t
gatttaggagattccaagtgatacctttaattcactactctatgtccttattaataaatacatatttaaaaaaacctatacaatatagtgtatttacagcatggaagagcagagactctgaagccagactgcctgagttcaaatcctgacacttctactcaaatatgtgtgagtgactttgggcaatttacttactctttctgtgtttctatttactcgtctacaacaataatttctacctcatcaaattaaattaaaaaaaaaacggcttaaataggttaacatttgtaaataggcttaggaaaacactacatttaaaaaaataancattcctaacccaccttcc

SEQ ID NO: 7711 - DNA, 437 bp, Homo sapiens
  III.1339 (N57757)
  misc_feature (418)..(418): n is a, c, g, or t
  misc_feature (432)..(432): n is a, c, g, or t
ttttcaatcaataaaaatattttattcaaaaaacagtctaatatcttattttacatgatttcaaaataaagttgattgtagtacagattgctgtggcctttttcccctccattttttacatgttctcatggttacaatatccagcataaagaggttgtgcagctattccacgtctgtagataacatgaataaagatattttagattgatttagattgatatcattcataaagatattttagattgatattcatgtcatcttagaaacttaaattagaatcactaaatcacagcattactgaaaataagggaagaaaattaaagcaactcaagatggagttctaagttacaccaacattttttgtatctataaaacagtcacaagtctgaatatatctttacaggtattattacttacnaaaaaataattccnggttt

SEQ ID NO: 7712 - DNA, 261 bp, Homo sapiens
  III.1340 (N59724)
  misc_feature (59)..(59): n is a, c, g, or t
  misc_feature (190)..(190): n is a, c, g, or t
  misc_feature (211)..(211): n is a, c, g, or t
  misc_feature (237)..(237): n is a, c, g, or t
  misc_feature (238)..(238): n is a, c, g, or t
  misc_feature (239)..(239): n is a, c, g, or t
  misc_feature (248)..(248): n is a, c, g, or t
  misc_feature (250)..(250): n is a, c, g, or t
  misc_feature (254)..(254): n is a, c, g, or t
tttagagacctttagccagttagtttatcaagattcttatggaactttcaccatcaatnaatccaccattattgattctccaaggttttctcacagaggaattttgattgatacatccagacattatctgccagttaagattattcttaaaactctggatgccatggcttttaataagtttaatgttctncactggcacatagttgatgancagtctttcccatatcagagcatcannnttcctgagntnagcnataaagg

SEQ ID NO: 7713 - DNA, 472 bp, Homo sapiens
  III.1341 (AI668695)
tttggttgactaggctgtggggctttgaccccacttatttaatcccctcagtggcagctccaataaatcctgaccagatccagagattggggaccactttacatttctaaattaatgttttacaataatcctcgtagttatgacctttcatagaacagggctgaggtttgtaacatgctggagttcaaccaggatctgtgactcaaagcacactccttttactactagtaagtcagcctcctaagcttgtttaaccagaggttaaataatggccacagaaagcattgtggcatatgttaagtgctagatgcccctccaatctcgctccaaggacaggagtcctgagtgtccactataggcatccattacttcaagacttcccaggatagttcagatttcaagaatgtcccacggttatccctggaagtacactccaacctgacaccacatgacctgttttgaaaatgtggtt

SEQ ID NO: 7714 - DNA, 566 bp, Homo sapiens
  III.1342 (AI734273)
ttgagatggagtcttgctcttgtcacccaggcaggagtgcagtggcgcaatcttggctcactgcaacctctgcctcctgggttcaagctgttctccttactcagcctcccatgtagctgggattacaggcgtccgcaaccacgcccggctgatattagtagttttagtagaggcgggtttcaccatgtggccaggctgatctcgaactcctgacctcaggcagttcacccgtctcagcctcccaaagtgctgggattagaggcgtgagccactgcgcccggccaaccacattttcaaaacaggtcatgtggtgtcaggttggagtgtacttccagggataaccgtgggacattcttgaaatctgaactatcctgggaagtcttgaagtaatggatgcctatagtggacactcaggactcctgtccttggagcgagattggaggggcatctagcacttaacatatgccacaatgctttctgtggccattatttaacctctggttaaacaagcttaggaggctgacttactagtagtaaaaggagtgtgctttgagtcacagatcctg

SEQ ID NO: 7715 - DNA, 384 bp, Homo sapiens
  III.1343 (N95831)
  misc_feature (292)..(292): n is a, c, g, or t
  misc_feature (333)..(333): n is a, c, g, or t
  misc_feature (340)..(340): n is a, c, g, or t
  misc_feature (372)..(372): n is a, c, g, or t
ggttgactaggctgtggggctttgacccactttatttaatcccctcagtggcagctccaataaatcctgaccagatccagagattggggaccactttacatttctaaattaatgtttttacaataatcctcgtagttatgacctttcatagaacagggctgaggttgtaacatgctggagttcaaccaggatctgtgactcaaagcacactccttttactactagtaagtcagcctcctaagcttgtttaacccagaggttaaaataatgggcacaagaaagcattgtgggnatatgttaagtgctagatgccctccaatcttcggtccaagncaggagnccctgaggtgtccacaatgggcatccattacnttcaagacttcc

SEQ ID NO: 7716 - DNA, 267 bp, Homo sapiens
  III.1344 (W24977)
  misc_feature (156)..(156): n is a, c, g, or t
  misc_feature (188)..(188): n is a, c, g, or t
  misc_feature (242)..(242): n is a, c, g, or t
  misc_feature (264)..(264): n is a, c, g, or t
gcgcaaattttttttttttttttgagatggagtcttgctcttgtcacccaggcaggagtgcagtggcgcaatcttggctcactgcaacctctgcctcctgggttcaagctgttctccttactcagcctcccatgtagctgggattacaggcgtccncaaccacgcccggctgatattagtagttttantaaagccgggtttcaccatgtggccaggctgatctcgaactcctgacctcaggnagttcaccccgtctcaagcctncca

SEQ ID NO: 7717 - DNA, 343 bp, Homo sapiens
  III.1345 (W32521)
  misc_feature (78)..(78): n is a, c, g, or t
ggaccgactgccagcctaggaaaagccctgggaactgagtctcgcacagcttccccgtcagcatcccgcacctgtgtncgcagcccgagcgtcccgtgtggctccgctcggggagggttccacgctgcggctggtctccccggccccgccgcaccttctcccctggctgatgcctccccgttgtaagtcatggcagtgagtaggactgtcgccaagacctgggactcctcccagcgagagtgctcccttgcggtatcttctgaagtcaagtggtgaagcgtggaagccccctcccctgaaagcccttgggaactccttccccggaagtaattttctggtgagt

SEQ ID NO: 7718 - DNA, 265 bp, Homo sapiens
  III.1346 (W32637)
  misc_feature (28)..(28): n is a, c, g, or t
  misc_feature (60)..(60): n is a, c, g, or t
  misc_feature (104)..(104): n is a, c, g, or t
  misc_feature (109)..(109): n is a, c, g, or t
  misc_feature (257)..(257): n is a, c, g, or t
gcgctacatctgaatactgggtgccatntgcccgaccctccctgcaggctgcgtcctgangcttcccgaggcgggtctggcctccccagaaggtcggcagtcancagantgccgtccggatctgcttgtgctcacctgggtcatcctcctacctgttccaggccacaaataacatgaatggatgcagcaggaaaatgctgtaaagggagtgggctccacgctcatcactcaccagaaaatactgcggggaggagtcncaggggct

SEQ ID NO: 7719 - DNA, 147 bp, Homo sapiens
  III.1347 (AA058882)
  misc_feature (8)..(8): n is a, c, g, or t
  misc_feature (12)..(12): n is a, c, g, or t
  misc_feature (14)..(14): n is a, c, g, or t
  misc_feature (114)..(114): n is a, c, g, or t
  misc_feature (135)..(135): n is a, c, g, or t
cctcgtgnagantntaaaaaactgtattggcaatgccacattttagttgtttggagaaattggttattttatgtaagtacattttcccagtaaaatgaaataaaatttttaatnaaatggtaccttggttccccncccctttaataa

SEQ ID NO: 7720 - DNA, 525 bp, Homo sapiens
  III.1348 (AA059472)
  misc_feature (112)..(112): n is a, c, g, or t
  misc_feature (475)..(475): n is a, c, g, or t
tgtatttttagtagagacggggccccaccgtgttagccaggatggtctcgatctcctgacctcgtgatccgcccgcctcggcctcccaaagtgctgggattacaagcgtgancaccgcgcccggcccatatagaagtcttgacgcagagagacacggaaaggaaagctaggttaagattaaggaaggcaggcaaacattatagctcagagagtttaagaaaagggagaagagtgattaaaatcttgagggagacctgcaagtagtattgtactacaggttcactatctcagaatgctggtaagaggcctcattagagccaggccaagcaccctggtaccatctacccggaaaagagaagccatggatgggtaatttttaagcgtcctatgtcttcaaagtatatattccctcctgcatgctcttgacatggacaattcctctaacagagaaaagcactttcattatatattagcntaaatggtttaccatattagataacacataaaattcatcataccaggtta

SEQ ID NO: 7721 - DNA, 461 bp, Homo sapiens
  III.1349 (H10383)
  misc_feature (10)..(10): n is a, c, g, or t
  misc_feature (336)..(336): n is a, c, g, or t
  misc_feature (347)..(347): n is a, c, g, or t
  misc_feature (386)..(386): n is a, c, g, or t
  misc_feature (394)..(394): n is a, c, g, or t
  misc_feature (408)..(408): n is a, c, g, or t
  misc_feature (423)..(423): n is a, c, g, or t
  misc_feature (440)..(440): n is a, c, g, or t
  misc_feature (445)..(445): n is a, c, g, or t
tttttttttntttttattccagagaagtttgtatttgggccttaagcttttgaaaataaagtttagagacatagcatatgaataccactgtaatacacatgaaatattctatcagaccctaaaaattaacataaacttttaactttctcatagtcaacaaaatagtggctggttgccaattttattagataagttggttacagcattttaattatcattttacgtctatctaggtgtagctgaaattcaaaatgcacatcaaagtaaaactatatcacaactcaatgccatactaaatgtacttgggcctctggcaataggaattctaggtcaggncttcatttttnactcccttcttatggacccaagtgggcttttaacgggtntgccgggncttagtgctggtcntcacacacctacccnttctttttaggaccctnaccanttttgagggggagtgg

SEQ ID NO: 7722 - DNA, 457 bp, Homo sapiens
  III.1350 (H10589)
  misc_feature (360)..(360): n is a, c, g, or t
  misc_feature (397)..(397): n is a, c, g, or t
  misc_feature (408)..(408): n is a, c, g, or t
  misc_feature (423)..(423): n is a, c, g, or t
  misc_feature (434)..(434): n is a, c, g, or t
  misc_feature (439)..(439): n is a, c, g, or t
  misc_feature (454)..(454): n is a, c, g, or t
gagaaggattaggaaaaaacaaagaaggcaataaggaacccatcctagttgattttaagacagaccgaaaaggtcttgttgcagtaggagaaagagcacaaaagaggtctgggaacttctctgctgcaatgaaagatctgtcaggcaaacatcctgtgtctgctttgatggagatctgtaataaaagaaggtggcaaccacctgaatttctattggtccatgatagtggccctgatcatcgcaaacattttctctttagggtattgataaatgggaagcgcttaccagcccagctttgccagccctaataaggaagcatgcttaaagccacagcagctactgtgggttctttcaaggcanggggccttgttacccaaagggaccttcatgggcttantgccactttgntttcagggagttgcntcacgttgggntaggntttgagggtttttantaa

SEQ ID NO: 7723 - DNA, 243 bp, Homo sapiens
  III.1351 (N30709)
  misc_feature (203)..(203): n is a, c, g, or t
gcatatttatgacacattttatttgcacaaataatactgcatcagtttcattgagaaaagttggaattttgttatcaaaatcattggatgggaaactgcattttcagaacccacttcttttcctctttcactaacggtattccttacaacttgtaaacattcatgaagaactctatcattgtgatccatttttaaaccaatgncccccacttggagttataatttccccataaaaactttcca

SEQ ID NO: 7724 - DNA, 300 bp, Homo sapiens
  III.1352 (N41322)
gtaaagaaatgttgtttctaccatttgtcacatttggacgtttttcacagacaagtgtcaaaagacatagttaatgtttcgagggggaaagcagaactgatcaactgcgactagagacgtctttgaaggaaattttccttttcctcttgctggtctcctacagttttacagctgagcttttgaggtttggaaaattcaagatgtttgtttcataagaaaaggggcagaaagcaagcacaagacacttttaggtctagactaaaatggtagttacaacaatttgaaccttgttggtgcagt

SEQ ID NO: 7725 - DNA, 373 bp, Homo sapiens
  III.1353 (H27085)
  misc_feature (105)..(105): n is a, c, g, or t
  misc_feature (293)..(293): n is a, c, g, or t
  misc_feature (326)..(326): n is a, c, g, or t
  misc_feature (352)..(352): n is a, c, g, or t
  misc_feature (362)..(362): n is a, c, g, or t
ccaagccacaccctgtaagagcctggaaccacatatcatcctatggacaactggcctgaatctccttggggactccaagtggtaagacaggatcttgctacattncccaagctaatccccaactcctggcctcaagggatcctcccacctcagcctcccgaagtgctgggattgcagatgtaagccaccatgcctggcccctagatgcttcaaaaggatgtgacattcacttaaagaggaattctacagttttttgagacagggtctccctctgtcattcagactgtgcagtngcatgatcacagctcatttgcaccctctacctncaagggttcaagcgattccttcccancttaggcttnccaagtaggtt

SEQ ID NO: 7726 - DNA, 352 bp, Homo sapiens
  III.1354 (H27282)
  misc_feature (27)..(27): n is a, c, g, or t
  misc_feature (77)..(77): n is a, c, g, or t
  misc_feature (132)..(132): n is a, c, g, or t
  misc_feature (268)..(268): n is a, c, g, or t
  misc_feature (327)..(327): n is a, c, g, or t
  misc_feature (348)..(348): n is a, c, g, or t
ataattctgtagaagtctgacaaggancactggctaaagtcaaagcattggtagaagctgtgttccttctggaggtnccaggggagtatctgtttccttgtcttttgcaccttctagaggccaccccatagnccttggctcatggcctctttgtcaatcttcaaagtcagcaacagaaggtgggagtctttttcacatcccatcactcttaccttttccacctccctcttataaaggactcttctgcttaaactggggcacactggantaatacaggcataatctccctggtctcaatgtctttaactaaatcacatctggcaaagncccttatgttgggggcagggnaaca

SEQ ID NO: 7727 - DNA, 425 bp, Homo sapiens
  III.1355 (R91385)
  misc_feature (1)..(1): n is a, c, g, or t
  misc_feature (3)..(3): n is a, c, g, or t
  misc_feature (137)..(137): n is a, c, g, or t
  misc_feature (256)..(256): n is a, c, g, or t
  misc_feature (419)..(419): n is a, c, g, or t
ntntatagaaaaaattggcccagccccagggaataaattgtgactggtctaaacagggttggcaaactatagaccaagggccaaatctggcctctgactgtttgtataaattaagttttactggaataaaaccaggnccattcatttatgcattgtctacatatgcttttaggctatgatggcaccactgcgtcactgcaacagaggttatctaggaccaaaagcctaagatattaccgtttgcttctttatgggnaaaagttagccattccccagtctaaggtttaggattctgaggcttaacattttaggcctacccccactttacccgtgactgggctcaaaacaaggtctgtggattcccttctggactatttctactgaggggggaatcccccttctttctcatggcagggctngatgag

SEQ ID NO: 7728 - DNA, 386 bp, Homo sapiens
  III.1356 (R92640)
  misc_feature (209)..(209): n is a, c, g, or t
  misc_feature (292)..(292): n is a, c, g, or t
  misc_feature (325)..(325): n is a, c, g, or t
  misc_feature (351)..(351): n is a, c, g, or t
tgtgattgagatggagtctagctctgtcaccaggctggagtgcagtgacacaatctaagctcactgcaacctctgcctcccaggttcaagcgattctcctgtctcagcctcctgagtagctgggactacaggcacgtgccaccacgcccagctaatttttgtatttttagtagagacggggtttcaccacgttggccaggctggtctcnaactcctgacctcgtgatctacctgcctcagcctctcaaagtgctgggattacaggtgtgagccaccgcgcccagccagactngcagttgttattggaggctgtggtgaggctttnctgaggatggggatgcctgggaagtnttgttccttcagcatcagtggtagttgttcgttag

SEQ ID NO: 7729 - DNA, 541 bp, Homo sapiens
  III.1357 (H73329)
  misc_feature (323)..(323): n is a, c, g, or t
  misc_feature (414)..(414): n is a, c, g, or t
  misc_feature (422)..(422): n is a, c, g, or t
  misc_feature (445)..(445): n is a, c, g, or t
  misc_feature (484)..(484): n is a, c, g, or t
  misc_feature (500)..(500): n is a, c, g, or t
  misc_feature (539)..(539): n is a, c, g, or t
ggcacgaggcatagggctcggcgtggtttcacaggtggtttcttgggcaagatgggcccaccttcaagtattctgggatcaagttcacgtgctttgaatttgtattgttgcaatttctcgagctcctcagcctccagctctgctgtaacttttgcaggtcacagcccgtgcacggtgtttggtttgcagtacaggagtctgtgggtctctgcaaatcttggtcacagaagatttggagggtaacaggttaatatcatccttcttgctcctcaaatgatatctgttaggggttcgtttatggaagtcttcaacttgctgtgcanggggggcacatatgtaggaaactgtttcatccaaatgttcttttctttccttggggacaggttgaaaaggctttaacaatgggtacatccnttagtcantcgggcaggagatgaaggatgcnttcgtagttcagatgtaaaagttcacttcctatattccncccgggttctagggangttgtttgattcgctcatctgtgccggagtggagtcacnga

SEQ ID NO: 7730 - DNA, 319 bp, Homo sapiens
  III.1358 (H73968)
gctcagaaggatttggaacagaaagaaaagcatcatgtaaaaatgaaagccaagagatgtgccactcctgtaatcatcgatgaaattctaccctctaagaaaatgaaagtttctaacaacaaaaagaagccagaggaagaaggcagtgctcatcaagatactgctgaaaagaatgcatcttccccagagaaagccaagggtaggacatactgtgccttgtatgccacctgcaaagcggaagtttctaaaaaggtactgagggagcaagagctgggagaaggagtatggaaaatgcaggcaagggggtggttggagatgc

SEQ ID NO: 7731 - DNA, 422 bp, Homo sapiens
  III.1359 (N57736)
  misc_feature (371)..(371): n is a, c, g, or t
catgggataaaatgtgcatatttatttcagggcaacaagcgtatacacagcaaagcagtgtggggtagagcccacctcgtgcctgcaagccagccagcccctgccggtcgagaaggaagcctgtgtgagagcacacaactggaggccgggcggggaagagaaacacgtgccaacaggccacgcaggccaggaccccagacccggagcagcgccctttgagttcctctctctggtctccgatgttcttctgttgggatcatttcaccttgaacaaggtgacggtggtactgtagaagaggctcaggaggaagaggacgatgaaggtggaggcggtggcccacaggttctcaaagccctcctcgtcggcgctnacctccccctcggtggacttgtcagggtcctctcggtgaccctgttgggca

SEQ ID NO: 7732 - DNA, 329 bp, Homo sapiens
  III.1360 (N59703)
  misc_feature (1)..(1): n is a, c, g, or t
  misc_feature (4)..(4): n is a, c, g, or t
  misc_feature (9)..(9): n is a, c, g, or t
  misc_feature (118)..(118): n is a, c, g, or t
  misc_feature (231)..(231): n is a, c, g, or t
  misc_feature (310)..(310): n is a, c, g, or t
  misc_feature (319)..(319): n is a, c, g, or t
nagngatcntcggcaacccccgcaagtccaagctcatctgccaggccacgggtttcagtccccggcagattcaggtgtcctggctgcgcgaggggaagcaggtggggtctggcgtcancacggaccaggtgcaggctgaggccaaagagtctgggcccacgacctacaaggtgaccagcacactgaccatcaaagagagcgactggctcggccagagcatgttcacctgcngcgtggatcacaggggcctgaccttccagcagaatggtcctccatgtgtgtccccgatcaagacacagccatccgggtnttcgccatncccccatcct

SEQ ID NO: 7733 - DNA, 448 bp, Homo sapiens
  III.1361 (N30235)
  misc_feature (305)..(305): n is a, c, g, or t
  misc_feature (377)..(377): n is a, c, g, or t
  misc_feature (401)..(401): n is a, c, g, or t
  misc_feature (442)..(442): n is a, c, g, or t
  misc_feature (448)..(448): n is a, c, g, or t
cccatttaaagattttatttgcataaatatcctgtgaccataagaggttgaggataaaaataacgtggttattgtccaattttgcaaccatcaataacctatgatccaatatcttcactgctgacaaagagaacagtttctagtcagtgatgtttaggatacttaatcttcaaatccaatagttttagtttcgaaagataaaacagaaatctttttgttgcttttttctgaaggataggcttttttttgcttcagtatgtttgggtttctcttccctctcagctttcctcagatgagcttcctcnctggagtcttcttctggggaaatacctataagtaagggtaaccggtgtgggccaataaaatgggctggaatnggaaaaccggtggttacaccttgnaagggaccgaaaggtctgtttgggaaacctaaaatgggatnccgggn

SEQ ID NO: 7734 - DNA, 454 bp, Homo sapiens
  III.1362 (N57127)
  misc_feature (367)..(367): n is a, c, g, or t
acggggtttcaccatgttagccaggatggtctcgatctcctgacctcgtgatctgccagcctcggctcccaaagttctgggattacaggcatgagcacagcgcccggccaaaatccgcacatcttaaaggacaagaagaggtatttacgcctcctggagattcacaaaataatgcggacgtaccgactgccagatctttacactcacccctccacctgccccgaggagtccggtcacaagggcccagccattcacaaagacacccaggtgtcccttccatttttttccacgaaggcccagaatccattttaggtttccaaacagacctttcgtcccttcaaggtgtaacaccgttttccattccagncattttattggccacaccgttaccttacttataggtatttccccagaagaagactccagagaggaagctcatctgaggaaagctgag

SEQ ID NO: 7735 - DNA, 312 bp, Homo sapiens
  III.1363 (N45677)
  misc_feature (2)..(2): n is a, c, g, or t
  misc_feature (285)..(285): n is a, c, g, or t
  misc_feature (290)..(290): n is a, c, g, or t
  misc_feature (296)..(296): n is a, c, g, or t
  misc_feature (303)..(303): n is a, c, g, or t
gngcttcattgaggtggaggtcaaaaatcacaaaatttgtgatgaattaagatttgaacatatgttttgtgactccagttttcctttcagattttaaaattaattaaagggatcttcattatacttttattgttaactttttgttaacataatttattcatacattcagtgaaaattttgttgaggtactgggacaggttaaaaaatacagttgtagccctcaggatatttaatatccagtgaaaagtgacagtcagtaaaccaacaatctcaataccttgatantatgntggganggtgtgntaaaccggg

SEQ ID NO: 7736 - DNA, 433 bp, Homo sapiens
  III.1364 (N48960)
  misc_feature (422)..(422): n is a, c, g, or t
cagataatcaaaataatttttatttggttgtagaatgttgtagtacataaaagcaaaatgtgtctgcaggatactccaaatttaccaacttcaaacaaaataatgcacagtgaagaattagaaaattatcaaccttactcaatacatggaagtattccttaatcttcatcattttcattaaacaaaataatattttggatgagttcaacatttctatcctatgctttatgtttagtgccttccctgaattggaaaaaatgaggtgttttatttaaatttaacactggtctaagggagatatagaattaaactaaacaagaatccggttatcacaacctcacaacatatatccagagtattgagattggttggtttactgactgtcacttttcactggatattaaatatcctgaggggctacnactggattttt

SEQ ID NO: 7737 - DNA, 400 bp, Homo sapiens
  III.1365 (H28102)
  misc_feature (5)..(5): n is a, c, g, or t
  misc_feature (25)..(25): n is a, c, g, or t
  misc_feature (166)..(166): n is a, c, g, or t
  misc_feature (227)..(227): n is a, c, g, or t
  misc_feature (233)..(233): n is a, c, g, or t
  misc_feature (236)..(236): n is a, c, g, or t
  misc_feature (319)..(319): n is a, c, g, or t
  misc_feature (350)..(350): n is a, c, g, or t
  misc_feature (363)..(363): n is a, c, g, or t
  misc_feature (392)..(392): n is a, c, g, or t
ccgtncacctgtccgccctcctcancagcacctgcatcctgcccaatgtggaggccgtgagcaacatccacaacctgacctccatcagcgagtccccgcatgagcccatgcacccctacatcgagctggcctggggcttctccaccgtgcttggcatcctactctncctggccgaggtggtgctgctctgctggatcaagttcctccccgtggatgcccggccccantgggcnccnccacctgggccctgggagtcacacgggctggcaggcggccctgggtgtccaccatcatcatggtgcccgtgggcttcatcttngtggtcttcaccatccaattctaacgcttcnctgggtgcgccanaaaacgggagcgccaaaaaccgcgagatncgaggagt

SEQ ID NO: 7738 - DNA, 472 bp, Homo sapiens
  III.1366 (N51617)
  misc_feature (362)..(362): n is a, c, g, or t
  misc_feature (463)..(463): n is a, c, g, or t
atttttaagtaagtttattatttttgagcacagtctttatttttaagcctaattgtttctgaaagcaaacattcctatagatagcttaactgttggactagaaggttatatataatcaaagcacagtatttcccaagaagcagaatatcctagtcataagacaaatatatgacagggaagagacaactcttagaaaccacccttgtaggtccaaacctgtagactaaaaatgaagcatcaaagcaacctgtgagagattctacaacatagttttcacagtatttgaatagatatgttaaaattaaaaatgcattgtgctgttaagattctttttatttttacagctggaatacataattggnttatcttaaaagttcccttactctcatttactggaattatttggaaagcaacgatgtgtcatggacagaagattttcaccctttcatggtttcccctttangtcctccta

SEQ ID NO: 7739 - DNA, 252 bp, Homo sapiens
  III.1367 (N53911)
  misc_feature (24)..(24): n is a, c, g, or t
  misc_feature (58)..(58): n is a, c, g, or t
  misc_feature (197)..(197): n is a, c, g, or t
  misc_feature (212)..(212): n is a, c, g, or t
  misc_feature (251)..(251): n is a, c, g, or t
ggtccattcagttccccaagctanccactgccccatccccaggggatgtgcagcaatncctggagacatttctgcttgtcgcaactgtcagggggatgctattagtatttagtcggtagaggccagagatgctgctaaacatcctgcattgcacaggatagcccccaaacagcaaagaattattcaagctcacaatngttgacaagctttcnagggtgagaagccctgcattaaaagctggcgttgtttant

SEQ ID NO: 7740 - DNA, 578 bp, Homo sapiens
  III.1368 (H15339)
  misc_feature (535)..(535): n is a, c, g, or t
  misc_feature (568)..(568): n is a, c, g, or t
ttgggcttttcttaacaggttaacagtttgtgctggttataagaaattaaccttcttttctttttgccaagggttgcatgtgaattatacctttcttaatatttgattaaataatgcagtcagctaagagccaacaaaaccccatatccagatagttagctgtgagccagcactcagctgtgtcagatttgattaatattgtattaatctcatggatggttctcaaaggtaaaaaaagagagagaaagagagagagctagctgtgggattctgtgtagttcttcactatctgttccagggctagtcggaggatcataaggcaagctcagacctgcccccagttcagtacttgaccacatcccagggtttatggtgtctgtctatgggccacagccaaccagaatgagtggggtcatcttattaaccttttctggaaggttccatggagggacatgttttaggaatgctggcacctttcagccagctctgctcttgatcttttgcagatcttttaagttgttcactgttttctacnggtaggacaatttggattggtggtttagatcancccttagttc

SEQ ID NO: 7741 - DNA, 286 bp, Homo sapiens
  III.1369 (T83632)
  misc_feature (32)..(32): n is a, c, g, or t
  misc_feature (42)..(42): n is a, c, g, or t
  misc_feature (61)..(61): n is a, c, g, or t
  misc_feature (106)..(106): n is a, c, g, or t
  misc_feature (116)..(116): n is a, c, g, or t
  misc_feature (127)..(127): n is a, c, g, or t
  misc_feature (159)..(159): n is a, c, g, or t
  misc_feature (165)..(165): n is a, c, g, or t
  misc_feature (180)..(180): n is a, c, g, or t
  misc_feature (255)..(255): n is a, c, g, or t
  misc_feature (272)..(272): n is a, c, g, or t
  misc_feature (278)..(278): n is a, c, g, or t
gaagagatgttctcgtttgcatactgcttttnaaagactttnatttctccaagtgtgtatnatctgcactaggaactttgtttttaagcaataggtctggatacanatttaacttnggaggctcctncaatttgcctcaaacctcttacggagcttctnctcagnagtgggtaccatcgncttccaaaggtcaggcactctacactcttggaatgtacccaagggatctcttgggcgacagtacccaggcacggnttctctacacagggtgnctgttngttgcctc

SEQ ID NO: 7742 - DNA, 443 bp, Homo sapiens
  III.1370 (T87071)
  misc_feature (67)..(67): n is a, c, g, or t
  misc_feature (128)..(128): n is a, c, g, or t
  misc_feature (136)..(136): n is a, c, g, or t
  misc_feature (179)..(179): n is a, c, g, or t
  misc_feature (201)..(201): n is a, c, g, or t
  misc_feature (233)..(233): n is a, c, g, or t
  misc_feature (305)..(305): n is a, c, g, or t
  misc_feature (426)..(426): n is a, c, g, or t
  misc_feature (434)..(434): n is a, c, g, or t
tgttttggcagtcttttattactagggctaagtcaattcctggaggcccttactactttttcaagtncagaattttctgactcaagttttctgcaagtgaaggtttcttctaggctccataggcccgngaaggacntcagggatgccagccaacacagaggcaacttcagtcacctgtntagagaaccgtgcttggtactntcgccaagagatccttggtacattcaagagtntagagtgctgactttggaaggcgatggtaccacttctgaggagaagctccgtaagaggtttgaggcaaattngaggagcctcctaagttaaatgtgtatccagacctattgcttaaaaacaaagttcctaggtgcaggatgatacacacttgggagaaatcaaagtcttttaaaaaagcagtttgcaaaacgnggaccatnttttttaca

SEQ ID NO: 7743 - DNA, 462 bp, Homo sapiens
  III.1371 (N59410)
  misc_feature (462)..(462): n is a, c, g, or t
tttttttttcacatttgcataacttttattacaatatattgttgtaattgttccattttgttagctattgttaatctcttaatgtgcctaattacaaattaaacttgatcgtaattatgcatgcataggaaaaaacaggccggacatggtggctcacgcctgtaatctcagcacttgggaagttgaggcgggcacatcacttgagcttaggagttcgagaccagcctgggcaacatggcgaaattaattagtcagaaatatgtatataccaacatactaatatgtttcagctataaatacttctaacatttcacatgtatatttatgtaatcaccacaatcaaactacagaacttttccaccacaaggctccctttatagccacattctccttcccttcagtcccaagacctggcaaccacgaatcttgtttcccatctctatagctttattatttaagaan

SEQ ID NO: 7744 - DNA, 415 bp, Homo sapiens
  III.1372 (N81014)
ttttcggcataaacacaaactttattgaggccctcagcactagttctctttctcctgcacagtcttggttccccggagacgtccagtccggcgggcagcaatgagacccactttgcggccagcaggggcatctctgcggatggtggagggcttgccgatgtgctggtggttgccacctccaaaaggatgctccacaggattcatggccacaccccgtactcgtggccagcagttcctctttgccttatatttgtggtacgcccggccagccttcaagatgggtttgtcaattcggccacctccagccaccacaccaaccacagctctgttggctgaggagataaccttcttggagccggaggcagctttcacacgggtcttcttggtctcagggttgtgggagataacggtggca

SEQ ID NO: 7745 - DNA, 455 bp, Homo sapiens
  III.1373 (W07842)
  misc_feature (37)..(37): n is a, c, g, or t
  misc_feature (54)..(54): n is a, c, g, or t
  misc_feature (102)..(102): n is a, c, g, or t
  misc_feature (110)..(110): n is a, c, g, or t
  misc_feature (116)..(116): n is a, c, g, or t
  misc_feature (159)..(159): n is a, c, g, or t
  misc_feature (335)..(335): n is a, c, g, or t
  misc_feature (393)..(393): n is a, c, g, or t
  misc_feature (429)..(429): n is a, c, g, or t
  misc_feature (433)..(433): n is a, c, g, or t
  misc_feature (438)..(438): n is a, c, g, or t
  misc_feature (450)..(450): n is a, c, g, or t
gcgctggtgaacaggacccgtcgccatgtgccgtgtnatccgtggacagaggangggcgccgggtctgtgttccgcgcgcacgtgaagcaccgtaaaggcgntgcctgcngccagntgcgaatttcgctgagcggcacggctacatcaagggcatcctnaaggacatcatccacgacccgggccgcggcgccccctccgccaaggtggtcttccgggatccgtatcggtttaagaagcggacggagctgttcattgccgccgagggcattcacacgggccagtttgtgtattgcggcaagaaggccagctcaacattggcaatgtgctccctgtnggcaccatgcctgagggtacaatcgtgtgctgccttggaggagaagcctggaagaccngttggcaagctggccccgggcatcagggaactattnccancgttnatttcccacaancctga

SEQ ID NO: 7746 - DNA, 257 bp, Homo sapiens
  III.1374 (T97360)
  misc_feature (2)..(2): n is a, c, g, or t
  misc_feature (3)..(3): n is a, c, g, or t
  misc_feature (6)..(6): n is a, c, g, or t
tnnctnttaacaattttattttaaagtttttcaaaatacaaaagttagcaaaaagctgaatatttacaattatgtcataggttactattaacagtgcagaggatagagtatgtaaaaaagactttgaagaggaaataatatacaaagtacaataaacagcaaggttacatgtcatcgttttgccaccgtacagaagtgggaaagtgccgacctggggagagggtcaccgttgtttcatttctctgtatccaggaaag

SEQ ID NO: 7747 - DNA, 407 bp, Homo sapiens
  III.1375 (R21095)
  misc_feature (142)..(142): n is a, c, g, or t
  misc_feature (324)..(324): n is a, c, g, or t
  misc_feature (346)..(346): n is a, c, g, or t
  misc_feature (360)..(360): n is a, c, g, or t
  misc_feature (378)..(378): n is a, c, g, or t
  misc_feature (398)..(398): n is a, c, g, or t
  misc_feature (403)..(403): n is a, c, g, or t
gagggtgctggacccatgacacgttgcttcctctggcttttccctgctgggccgctttctcagaggcacttccccacccctaacacccagtgggcccccccaggttctgtgccactcagagggaccctggcaggggccaganaccacttaagggtggtgctggagggccttgtgccagttcccatcccaggacgccctgagggatggacgcagccatgcaccccccatctggggcctctccctgttccctctcccacctgggcagctgggagttctggcttctaggcctgccctgtcaccagggcctcttgagtgggccagggncctttccacctccccatctgtnaaaacgagggcagntgcccgggacaagctttnggggttccttagttgggccntgcangttc

SEQ ID NO: 7748 - DNA, 417 bp, Homo sapiens
  III.1376 (R46269)
  misc_feature (251)..(251): n is a, c, g, or t
  misc_feature (351)..(351): n is a, c, g, or t
  misc_feature (412)..(412): n is a, c, g, or t
tttttttttttttctttgcaactcacttttattgtttctttataaacttcctctcccatggaggaatatattgttatagtcattagcttatctctttttttaaaactctatgctaacagcaatggagccaagaggaggaaaacataagctacgatagaaaggcacttagaacctgttaaaatactgacgtcctgggaatgtgcaacaacacaccaatgacaaccacaaaaagtacaccggaccctgccagncctgggtccgtcaccgagttcgcatgctgagctcgtcggccttccagtgccctgttcctccgctctgcttcaagtcgcaaacccatgaccccgccagggnctttaagggcctggggggcccttcacagggggtggggggtgtgtttcaggggcctggggtnggggg

SEQ ID NO: 7749 - DNA, 489 bp, Homo sapiens
  III.1377 (R48254)
  misc_feature (1)..(1): n is a, c, g, or t
  misc_feature (2)..(2): n is a, c, g, or t
  misc_feature (18)..(18): n is a, c, g, or t
  misc_feature (106)..(106): n is a, c, g, or t
  misc_feature (435)..(435): n is a, c, g, or t
  misc_feature (459)..(459): n is a, c, g, or t
  misc_feature (466)..(466): n is a, c, g, or t
nntttttgttttaaattnaaaaagacaaaattgttcgccttgtatagaagtagatacagcttagagagccaaggtaacaagaggggaaaagtttgtgttgtctggnacttttgagggagtcagaagcctaaagggaggctctaactcatgattctcagaagacaactgttgtcaacagttcaaatgagaactgaacggccacactcctgcagctgaaaggagtcaatgcgagctgagttgctctcaccgaacagagtgcgttccccggggagggcaggggaaaggccggcttgcacctgctctgtcacccagctccactcttagggacagaagaggtctgggaaaatgtctggggccattccctcatttcacggggggagggaaatggggttagtgttgtaattgttttttattcatcaccctgttttatccttncatctgccagggttcactcaatgntacatcntgcagtccccacccctgggggat

SEQ ID NO: 7750 - DNA, 371 bp, Homo sapiens
  III.1378 (R48351)
  misc_feature (51)..(51): n is a, c, g, or t
cacgccacgcccgttgccttccgatggacagttccttacctgccgggtcgncttccgcagagagtggtggtcttgaaaacccagttttgggagaatacctgccgcgcctcccgcccaaatacccagaggtttcatagccgccatcgctgcggtggaggaggccgcctgttgcgtcccaccccaccagaaagcctaacactggcctgaagcgtaatcttaaagtggtaggggaaaataccgatctaggcgcagagagcaaaacacctccgttctgggtttaatggggcaggtctgggaggtgaggtatgccgtccgcactcaataatttactttgcagggatccggattttttcttccagttgggttggggg

SEQ ID NO: 7751 - DNA, 577 bp, Homo sapiens
  III.1379 (AA056275)
  misc_feature (15)..(15): n is a, c, g, or t
  misc_feature (86)..(86): n is a, c, g, or t
  misc_feature (208)..(208): n is a, c, g, or t
  misc_feature (291)..(291): n is a, c, g, or t
  misc_feature (354)..(354): n is a, c, g, or t
  misc_feature (390)..(390): n is a, c, g, or t
  misc_feature (448)..(448): n is a, c, g, or t
  misc_feature (489)..(489): n is a, c, g, or t
  misc_feature (524)..(524): n is a, c, g, or t
  misc_feature (553)..(553): n is a, c, g, or t
  misc_feature (575)..(575): n is a, c, g, or t
gtcacacagaaaaanaaactgccttgtctcccttccgggaattctctctttaagactgtaagtcgctgcctgagtggtttcatttngttttgtttttctgcccttctctttcttcttttgccctttcttagcttgcactcccatggtgatttctgcttggtctcctgctggggttggtggtactcgttcccaccgcacagaacccggngcctattattggccaagaaacttgagcagcctgttttgaaaagtccctcgctcagaaatgccagcttgcagatggctaatcanagagacgtggatccaggaggctcatttgagtaccggagcctctgagagtccatggatttttantttattgggccccaacaaagtgccaggcatagcganagaagtgtttacaaatgtgatctccgcggattctcacgagagccatgtagtggggaanataaccacatccccattttacagatggcgaaatgagggtcngagagcttcagtaattcagccagatcacacagctngtaaatgggggatatgggatgacccagantaattcaaactcatgcggttcntg

SEQ ID NO: 7752 - DNA, 498 bp, Homo sapiens
  III.1380 (R13522)
  misc_feature (413)..(413): n is a, c, g, or t
  misc_feature (423)..(423): n is a, c, g, or t
  misc_feature (432)..(432): n is a, c, g, or t
  misc_feature (437)..(437): n is a, c, g, or t
  misc_feature (447)..(447): n is a, c, g, or t
  misc_feature (459)..(459): n is a, c, g, or t
  misc_feature (483)..(483): n is a, c, g, or t
  misc_feature (495)..(495): n is a, c, g, or t
aaatgcaaatgcaatccatatttgttaggatggtcaggtctcatgagaaatctatgctatgtgtccagagcttttgaaacagagtccattggagtgggagttagggagtgtagtggatgccaaatatgtttttcttcagtgcttaagagaactgtttcctgaagtccagctttgaacataaacaggggtgtgggttgggggaggagcttaggacaaacctctctgatgaaggtcagcaatagactgaagtcttgactgcatggaagaggaaaaacatcagaactgtctgacaatggaggggacagtgagctacgcacaacttgccagcggaggtgaactttgcacctgcccagggccggatggaacattcagcctgccaagaactagttgttttgagtttgattttgcagtgntcttccaatngggcaagtngccanattttccctngggcagagattntcccaaaaattttaaaaaccaggnttattattgggnctt

SEQ ID NO: 7753 - DNA, 479 bp, Homo sapiens
  III.1381 (R20644)
  misc_feature (279)..(279): n is a, c, g, or t
  misc_feature (324)..(324): n is a, c, g, or t
  misc_feature (347)..(347): n is a, c, g, or t
  misc_feature (389)..(389): n is a, c, g, or t
  misc_feature (412)..(412): n is a, c, g, or t
  misc_feature (423)..(423): n is a, c, g, or t
  misc_feature (448)..(448): n is a, c, g, or t
  misc_feature (461)..(461): n is a, c, g, or t
  misc_feature (467)..(467): n is a, c, g, or t
  misc_feature (473)..(473): n is a, c, g, or t
tttttcactaattatttttaataaaacaaaagatcaaaaatcagcatcaggagatgacacaatacagttgagactatggaaagcaactatttccaagctgggcatcataaaatacatcatcaagaactgtgaacagatttgctaaacaaaggaaagcctcatccctttaaccctccacagcccgacatcgggagtctcttggggtagaacatgaagtgaaaaagaagtggatggccagaatgctgtacattgtcccccagtgacctgccacagagactntttttaaagacgcatttatctcagcaggagtgacggcatttaagnagtagcccggtactcaggctagncaatcctgcaaaagtctgcagagcttggcttgcacccttttncaaaggcctgaggtgatggggtnaggttgggggntttcccctttgatttggctagggtnggcttggtttttnaagggncctttnaggtta

SEQ ID NO: 7754 - DNA, 252 bp, Homo sapiens
  III.1382 (R17394)
aaccacttatgcacatggagacctaatgtaataatagaaaaatactcataatagggagaaaccaagagaagttttgtttttgtttttttccaactgtgttcattagaacagcgtgttctaagtatttgaaactgaatgtttattccttgatactaaaagttcttctccaatcctatcactgatagtgtccaaattctcaccaaattgctcctaagcttcaaatcaggaaggcaggaaactgggcagggccat

SEQ ID NO: 7755 - DNA, 401 bp, Homo sapiens
  III.1383 (R42630)
  misc_feature (236)..(236): n is a, c, g, or t
  misc_feature (279)..(279): n is a, c, g, or t
  misc_feature (392)..(392): n is a, c, g, or t
  misc_feature (398)..(398): n is a, c, g, or t
ttttttttttaaactcagctacatgttgtattaggctattagacaaatgtcacttttaatatcacaacacatacatgtactttttttcattgacagaggaacatgcctttcaaaaatattttattgggtgaaactttcttattctcaggaaaacttttggttctttaatataatttattatgctctttaaaattctgtttgataaaagcattgggtatattataaatacctgtaangaaaatatagtttaaaatttcaaggggaaatagtatataagtnttctctttgacattttcacaaaaatccacacagggcactagggaaggactggacaaaactgttttatatctggaatattatactccgggggtggggaaaccttccaatatggntttttnttt

SEQ ID NO: 7756 - DNA, 353 bp, Homo sapiens
  III.1384 (R96640)
  misc_feature (98)..(98): n is a, c, g, or t
  misc_feature (120)..(120): n is a, c, g, or t
  misc_feature (300)..(300): n is a, c, g, or t
  misc_feature (342)..(342): n is a, c, g, or t
gaaaaataggctttattttaaccagtggtattgtctgacatcctatacggcataactgattacagccaagttcatgaatacaaataaaatagcaattnccctcattctctcttttgtttnctgttcagagaaatcaggagatgggagcattatgctcagaaaccgaagagctcttccaagagctccagcttagagtccaggcttccagagcatgcagcctcctaacacgtatgtggtcacatgtgcaaagacctttattacaaaatattcagagcagtatttctgtaggaaatcacacgngccatttacaaccaaaccatggctgataaaatttccatcctngcctgtgggtt

SEQ ID NO: 7757 - DNA, 385 bp, Homo sapiens
  III.1385 (R96688)
aaccaactatttttgaggaattatcatgggaaaagaccagggcttttcccaggaatatcccaaacttcggaaacaagttattctcttcactcccaataactaatgctaagaaatgctgaaaatcaaagtaaaaaattaaagcccataaggccagaaactccttttgctgtctttctctaaatatgattactttaaaataaaaaagtaacaaggtgtcttttccactcctatggaaaagggtcttcttggcagcttaacattgacttcttggtttggggagaaataaattttgtttcagaattttgtatattgtaggaatcctttgagaatgtgattccttttgaccccggagaaaggggcaaattattttaatattttgttattt

SEQ ID NO: 7758 - DNA, 219 bp, Homo sapiens
  III.1386 (H92310)
ggcagacggggtgagtctcaagccagtggaccagtgaggggtgagggcacgtcctccgaagaccaggggtggcatccctgcccaggggccttagcctgaatgcactaagggctggcccctcagacaggctcaggggaggtccgcccacaagggctttgggcccctccctcatgaagacgccacccctgccatggggtccgtggcccttgctgtcacatc

SEQ ID NO: 7759 - DNA, 479 bp, Homo sapiens
  III.1387 (H92366)
  misc_feature (117)..(117): n is a, c, g, or t
  misc_feature (412)..(412): n is a, c, g, or t
  misc_feature (421)..(421): n is a, c, g, or t
  misc_feature (436)..(436): n is a, c, g, or t
  misc_feature (479)..(479): n is a, c, g, or t
aaatacgtcctctttgtcaacgtggccagctactgaggcctgacgggcagctacattgaactgaatgcactacaggaagagcttgcaccattcggtctggtcattctgggctttccntgcaaccaatttggaaaacaggaaccaggagagaactcagagatccttcctaccctcaagtatgtccgaccaggtggaggctttgtccctaatttccagctctttgagaaaggggatgtcaatggagagaaagagcagaaattctacactttcctaaagaactcctgtcctcccacctcggagctcctgggtacatctggaccgcctcttctgggaacccatggaaggtttcacgacattccgctgggaactttggagaagtttcctggttgggggccagatgggttattacccntcatggcgnctgggcaccaccggnaccacggttcaggcaacgttcaagattgggacattcttgtttn

SEQ ID NO: 7760 - DNA, 433 bp, Homo sapiens
  III.1388 (T64863)
taatgtaatattttaatagcaaagatatcatgactctagccacagcctaaccaaggattatcaaaggaggtggacactcaaggaagggccacgcaggctgcgtttcctgcaaggactcagatgttcagtaccttatgatacagggaagatagttttcttacaagtagtttggtaatattttttttcttaagttgtatatttgactcagctgtcaaatttctcacacttgtatatatctacacacaactaagttaaaatgttgatgtgagttttatttcacatggatggaataaacttgtggttgtcctttaactggaggtcccagcacatgtgttttcaagaggccactagggatttcttcactggagtgctgctgacttcaacgttcactttatggcaccaagtggaaaggattccagtgtatccgttattt

SEQ ID NO: 7761 - DNA, 448 bp, Homo sapiens
  III.1389 (T72603)
  misc_feature (224)..(224): n is a, c, g, or t
  misc_feature (249)..(249): n is a, c, g, or t
  misc_feature (275)..(275): n is a, c, g, or t
  misc_feature (327)..(327): n is a, c, g, or t
  misc_feature (351)..(351): n is a, c, g, or t
  misc_feature (374)..(374): n is a, c, g, or t
  misc_feature (399)..(399): n is a, c, g, or t
  misc_feature (404)..(404): n is a, c, g, or t
  misc_feature (429)..(429): n is a, c, g, or t
ggtaaacaatacaaaattaaatacattttcaaaagcttgccaggtatacgaaaaattcacaaacatagtttttttaaaaaataaaatatgttcagagcacccttgatataaaatgcctgacccccatccttggacaaggccacctgaagacatcttatggtaggtgggtttctgtgggagtcagcgggggcctcctgggagggaagggtttctactctcacctnttacccatcccacattccatctganttttgatccttctccaaagagctggntaactgagagggctagagcacgccaccagggcctagctccaagcacgggggntcaggggtgcacatttaggggccngggagcacccagaggtccctcancacaagccctttgaggagaaggccnggaanttgcattcttcccacactttcccanaacccggcaacttcaggct

SEQ ID NO: 7762 - DNA, 626 bp, Homo sapiens
  III.1390 (AF074997)
gatctgtttaaaaaagaatgtgcattcctgaatcaagagtttatgaatagcttaaagatgaagaggagagatgaaggaggattagctgttcaccagaagttctggttattctggttattggatctgaaagcatattattaaagtatcgtctagatttcctggaatagttctcatttctaatattctttcccattgtttttataatacatgtctgatttgccctaatttttggttagttgaggtgtggttgatttgtaaaagaacaccaaaagtgggtctacttgactgaagaagctctcttgctttccaactttgtgtttgtgtatgtgtgtgttaaatgtatgttttctaatctatctcttttaacctaaactttgattttaaagtccacattagagaaagagcaatagagacagactgactccactttagaaaattggtcaagaagtggaccaggtgggaatggttacttaatcctagcagaggaataaagtacttgatttccagctacctactgaatgcactctgctactagacagctattcttatttttttttttttgacatattatttccataggggaactttatagttcaattcagtaaccttggagagagatcctgacc

SEQ ID NO: 7763 - DNA, 411 bp, Homo sapiens
  III.1391 (R36684)
  misc_feature (14)..(14): n is a, c, g, or t
  misc_feature (83)..(83): n is a, c, g, or t
gtcaggatctctcnccaaggttactgaattgaactataaagttcccctatggaaataatatgtcaaaaaaaaaaaaataagantagctgtctagtagcagagtgcattcagtaggtagctggaaatcaagtactttattcctctgctaggattaagtaaccattcccacctgggtccacttcttgaccaattttctaaagtgggagtcagtctgtctctattgctctttctctaatgtgggactttaaaatcaaagtttaggggttaaaaggggataggattagggaaaacatacattttaaccacacacatacacaaacacaagttgggggaaggcaggggagctttctttcaggtcaggtgggacccccttttgggggggttccttttttaccaaattcaacccacacc

SEQ ID NO: 7764 - DNA, 430 bp, Homo sapiens
  III.1392 (R37529)
  misc_feature (369)..(369): n is a, c, g, or t
  misc_feature (378)..(378): n is a, c, g, or t
  misc_feature (383)..(383): n is a, c, g, or t
  misc_feature (396)..(396): n is a, c, g, or t
  misc_feature (404)..(404): n is a, c, g, or t
  misc_feature (422)..(422): n is a, c, g, or t
gatctgtttaaaaaagaatgtgcattcctgaatcaagagtttatgaatagcttaaagatgaagaggagagatgaaggaggattagctgttcaccagaagttctggttattctggttattggatctgaaagcatattattaaagtatcgtctagatttcctgggaatagttctcatttctaatattctttcccattgtttttataatacatgtctgatttgccctaatttttgggttagttgaggtgtgggttgatttgtaaaagaacaccaaaagtggggtctacttgactggaaggaagctctcttgctttcccaactttgtgtttgtgtatgtgtgtgttaaatgtatgtgttcctaatctatctcntttaacccnaaacnttggatttaaagnccccatangggggaggagccataggngacagact

SEQ ID NO: 7765 - DNA, 452 bp, Homo sapiens
  III.1393 (N54323)
aaaaaaatttattggctatgtttgattatccacaacagaatttcccttaattagcacaggaaattgaaagttggttataatttaatatctctgctcgtcttcaacagacatactcagcatttatacttgtaaatagaattcgagttttcattgtttcgttttctgtttttgtttccttaggaacaagaggatgaaggaaatatggtcagcattttaataacaccataaatccaagataataagtaattctataaagttttccagtttcattaattcagaatttcatcatataacttgaaatccaattggcttcctctttcttagaaacaaaaaccaaagaaacctttttctgaaagacattattttccagtattaggccaatttggtcctcaaattaagtagaatctcaacatcttgttgagccagtttgtaaattccaacttcatttaatg

SEQ ID NO: 7766 - DNA, 129 bp, Homo sapiens
  III.1394 (T80809)
  misc_feature (122)..(122): n is a, c, g, or t
ttttttgtttgagatctttgtattttgttaacaaacactgagatccatcgaagctgtgtgggtcctggcagaggtcagcaaaggggtccttggggcctgcatcagctcagaagcccagaccnctccctg

SEQ ID NO: 7767 - DNA, 102 bp, Homo sapiens
  III.1395 (T81213)
  misc_feature (76)..(76): n is a, c, g, or t
  misc_feature (89)..(89): n is a, c, g, or t
  misc_feature (91)..(91): n is a, c, g, or t
caaggtgtgctacgagggccagccagtgggtgaattcatccactgcctgcagaatcatccagaacatatgtgagtngggccagggcagngncaggcgctttt

SEQ ID NO: 7768 - DNA, 428 bp, Homo sapiens
  III.1396 (H07885)
  misc_feature (72)..(72): n is a, c, g, or t
  misc_feature (85)..(85): n is a, c, g, or t
  misc_feature (261)..(261): n is a, c, g, or t
  misc_feature (329)..(329): n is a, c, g, or t
  misc_feature (411)..(411): n is a, c, g, or t
  misc_feature (423)..(423): n is a, c, g, or t
ttttttttttttttttttacctgcaggaagatctctttattccttccccttcccactccccatcaaccaggnccccctgcagcanccttccttgtgaaatcacagctgctatgacagtgaccagctccaaaccaccctgtgtcactgaaccttgggtgctgggtgacacatgggcaggaaaggcaggaagagcagggatctgagggcctgggggctgggcaagccttcaggggtggggtgggtgctgatcaatgccaggtnatcaatgccaggtgattgggacccactgagtaccagggacaaacctgggagtcacgtcaactggcctnacatcagttgccttggcaaaatccacttgccctttgaaccctaacccgggaaaaagattttattttcagcccggttagcccntgggtaaacttnaagtt

SEQ ID NO: 7769 - DNA, 343 bp, Homo sapiens
  III.1397 (H07976)
  misc_feature (204)..(204): n is a, c, g, or t
  misc_feature (312)..(312): n is a, c, g, or t
gattcaaacccaccacacacaccacggggctagagtgactcacctgggctcacaccaacttctggccaatgcagggaccatgctctgcagacagcagtcctctagcatggccccagcattcagccagtcggtcacctgtgggccatccccatgtgtgaggaagcaggagtcagccaccaagtgtctccacatcggagcttgcgngtcagacctgtgggccaggggatgggagcagggctgagggtaggggctgaatgtgtggctctgtccctgtgttgccttccacagaggagcaaggcctcaggctgaggnaggaggggcacgctggaacagccttagtttt

SEQ ID NO: 7770 - DNA, 566 bp, Homo sapiens
  III.1398 (H94895)
  misc_feature (494)..(494): n is a, c, g, or t
  misc_feature (542)..(542): n is a, c, g, or t
gaataacaaattgagtacttttattagacctaagtggaactttatctgaatctgaattttccaaggggccagtgtagagtgacacaggtgtccgaggccacctttccatcttcagacacccccccgtctctctgcacagggagttggccttccagtaggtgttgctcttctgtcttgacgtctcctggaaagatttttatctctattttcctgtggtggtgttttccacgagctaattctttctatctttaaactcattggctttggaggagctgaattgttagatgacgatctttgtcccaggagagtggcactctgattcttgtggccagcgtatttgggtattgtctcttcatcagctgacagaggtgaaatttttcccaaaagcaggttccaatgccagagtgtgcgattcttgccccgcgtgtgggggacgctgcagatttcttcctggctttccaccgctgcagctgcagagctctcagcttttcccngagctcccaggttctgctcccctcaaagcatctatatgactccggagntttccatgaacatcagccacagag

SEQ ID NO: 7771 - DNA, 479 bp, Homo sapiens
  III.1399 (H94947)
  misc_feature (229)..(229): n is a, c, g, or t
  misc_feature (299)..(299): n is a, c, g, or t
  misc_feature (310)..(310): n is a, c, g, or t
  misc_feature (324)..(324): n is a, c, g, or t
  misc_feature (347)..(347): n is a, c, g, or t
  misc_feature (426)..(426): n is a, c, g, or t
  misc_feature (448)..(448): n is a, c, g, or t
  misc_feature (467)..(467): n is a, c, g, or t
agggcttggggacaactgtggggacatggcccagatgatctgatcctggcagtagtgactgttggggaccagccattacagcagcagatcatcagactccaccaagagcttgggagacagaagtctctgtgggctgatgttcatggaaaactccggagtcatatagatgctttgagggagcagaacatggagctccgagaaaagctgagagctctgcagctgcagcggntggaaagccaggaagaaatctgcagcgtccccacacgcggggcaagaatcgcacactctggcattggaanctggctttttnggaaaaattttcanctctggtcagctggatgaagagnccatacccaaatacgctggggccacaagaatccagagtggccactcttcctggggacaaagattcgttcatcttaacanttcaggttcctccaaaggccantggagttttaaaggttagnaaagaatttagg

SEQ ID NO: 7772 - DNA, 453 bp, Homo sapiens
  III.1400 (AA284239)
tacatagaatgtttaaaaagataacaattagaatgaaaaattaaaattatgtatgcttttatatgggttactttttattgatcacatttctctggaaatttttctttatattttttcacagttgtctttctagctactgaaaaaattatacaaatatctttggccatttaaatgtttatcattgtgcagtgaactgttttagtaactttctgtttgacctttttagaaggttgcatccttaaaatgtgaaccagatacatggctttgcattgaagaggaaagcagtagaatgtcaggttactttaggcagtgtgacagtatataaatgaaatgtggaggatggtggtaacaatttgattttccacacagcaaaaccacagtcccgccacctaacaaagccctgtttatgccacacaccagcatctgagggaagaggaggcactgtgacaaagc

SEQ ID NO: 7773 - DNA, 354 bp, Homo sapiens
  III.1401 (W52232)
  misc_feature (352)..(352): n is a, c, g, or t
gacagaattaagatttactgatagcggtcactcgtaataacacaatttgcatagagggaaaattaaatagcgaaagataacttgtttgtttctaatgcaacagtaaaataaaatcagcacatttaatcaaatggaaagaaaaacctgtttcgatgcttaacttttgtattggaacccaaaattgtcccggcatgttccctctgatgagtatgtattaaactttcagatggctgtgcagatgagctgtaatcatcgcaggctgagcagcatcagcgctgctttgtcacagtgcctcctcttccctcagatcgctggtgtgtggcataaacagggctttgttaggtggcgggantg

SEQ ID NO: 7774 - DNA, 344 bp, Homo sapiens
  III.1402 (R06544)
  misc_feature (327)..(327): n is a, c, g, or t
  misc_feature (336)..(336): n is a, c, g, or t
gcagcctcaacctcttgggttcaagtgatcctcccgcctcagcctcccatgtagctgggaccacaggcacatgccactacacccagctaatttttttatttttttgtagagatggggtctcactctgttgcccaggctggtggggatggtttttattattaaattactaggctgataaccaatagtcattatgaaaacataattcctcaaaactcttaggagcagcataattcgttagggtttaccattttgttatgccctaatttgtaggagactctttaaacaggatatcttatggtctgatcccatacttggcaacccgcccgnttgtccccngggttttt

SEQ ID NO: 7775 - DNA, 326 bp, Homo sapiens
  III.1403 (R06545)
  misc_feature (154)..(154): n is a, c, g, or t
  misc_feature (308)..(308): n is a, c, g, or t
tctgggcaatcttgtttgcaaatatattgttacataccacaattaataactatgtttactgcaacaacgcccctttattaaagtaggtactactttccttctccactctggggtaatgccgtcccctcacctgcatgtatcagtcttctctggnctcaccttttctttctcctccagacagtgggcagagctgcttgggcggtaaccatgactctgttcttgcctcatcgcttgggactggggtccttaaaagggtgtgggttataggtaaatcacaatgtaaaacttccctgcccgggcatttccanctggggggattaatcagg

SEQ ID NO: 7776 - DNA, 483 bp, Homo sapiens
  III.1404 (R18206)
  misc_feature (368)..(368): n is a, c, g, or t
  misc_feature (377)..(377): n is a, c, g, or t
  misc_feature (383)..(383): n is a, c, g, or t
  misc_feature (397)..(397): n is a, c, g, or t
  misc_feature (418)..(418): n is a, c, g, or t
  misc_feature (427)..(427): n is a, c, g, or t
  misc_feature (453)..(453): n is a, c, g, or t
  misc_feature (474)..(474): n is a, c, g, or t
tttacagtttcaaagacactaacataaactacatcactaatcaggcataagtgtctgaagaagcagatcacgtcttcatacctactaaaggacattttaaccaccttgtcgttggccagtagattgcactgatggagtgctggagaacagcatcacccttctgcattatctggaagtaagagccagtattaactccttcctggttcatctagcaccttaacctgagctgggtgtgcttcagcatgttgaccatgtgactgacacttaggcacatacaattttttaggattcccagcgggtaggagaccaatgttttacctattattcttgttaaatgggtgggtagcaaaatttaactgtggatattntaggtggantgtggntaatgtttaggaantcactctaggactatttcccntggaatggntcttaaaggggtaaaaaccaagtggncccaaacaggaaacccagggnttggcccaa

SEQ ID NO: 7777 - DNA, 458 bp, Homo sapiens
  III.1405 (R42143)
  misc_feature (225)..(225): n is a, c, g, or t
ttttttttaagtctagtgatctggcagaaagaattcaatagggataatatgttatagggtcaaaagtatctataaatattatgaagttgtatcagatagacaaatgatgtgttattatccctattttagagtattctgtaaaaaaaaggttaaacatctttcatttcaaattgtaatgtaactgtaacgtgaacaccactaatgggccaggaaattatctcaggncatcatgaggactccctctctgtcacctctgaggattaggcactaaggctttatccaggcttgcgggtgggggacatttttacagtccacttaggacaacttaggcttcacttaattaattttaggggtcttttattaggaaaataaaaatctaggcctcatatttctccaaggcactattttttgggggggtcttagggctgtttttcaggtcgggtggatactgcccctgg

SEQ ID NO: 7778 - DNA, 426 bp, Homo sapiens
  III.1406 (R31343)
  misc_feature (60)..(60): n is a, c, g, or t
  misc_feature (61)..(61): n is a, c, g, or t
  misc_feature (68)..(68): n is a, c, g, or t
  misc_feature (398)..(398): n is a, c, g, or t
ctgatgaacattcttatcagttgaggacccacatgttaccttgtcctatttttgtctgtnntcccaanaggtacaaactgtgtacatgggtatgtggcacttttgtaagaattagaaaaaggtatccccactctcaccttagctgaaggattaggaaaaagtgaccccttacgcctagatgcagctccaaacagacagcagatgagctttgtctattggatgtctttgctctactgtaatattgtcaaaaaacaaaggaaatgactacttagtgaattgtggttcatgtctacaaaattgtgtcttccttttctaagtatccagatgtcattttaataataggtttattcatttgttcagtatctgtgaaaagtttcttgcctcggttttcaggactnagggccaaaactggaactccatctgtcc

SEQ ID NO: 7779 - DNA, 315 bp, Homo sapiens
  III.1407 (R31603)
  misc_feature (1)..(1): n is a, c, g, or t
  misc_feature (217)..(217): n is a, c, g, or t
  misc_feature (238)..(238): n is a, c, g, or t
  misc_feature (245)..(245): n is a, c, g, or t
  misc_feature (260)..(260): n is a, c, g, or t
ngtttaatgaattaaactcaagaggagaacagaagccgcatacctgtaacagccctgtaatattgttactctgttattttaggctaaagcaagaataaactaaggacgacaacaacaaaaaataacattttgttttgttcagacaagaagaacatggaagggatgcctctgcttgagataaaatggatgactaaacaaaactaattccctttttttngtcttctctattatgtaaaantaaaccnattaaatgtaggggntaaaataaggctttcaaagaggttaactggaaaggatgggtgaggaggcttggta

SEQ ID NO: 7780 - DNA, 180 bp, Homo sapiens
  III.1408 (T91361)
  misc_feature (81)..(81): n is a, c, g, or t
  misc_feature (87)..(87): n is a, c, g, or t
  misc_feature (89)..(89): n is a, c, g, or t
  misc_feature (129)..(129): n is a, c, g, or t
  misc_feature (150)..(150): n is a, c, g, or t
aaaaaattttgtaaccagacaggataaagtagacaagaatgttattatctaactatataaaattttctcaatcttgtggancactanantataacaaaggtttgttttctatgctaattttcaggttgnccagttaaaccattatttggnatcctttgagcaggttagcctttcaactat

SEQ ID NO: 7781 - DNA, 309 bp, Homo sapiens
  III.1409 (T91448)
  misc_feature (65)..(65): n is a, c, g, or t
  misc_feature (67)..(67): n is a, c, g, or t
  misc_feature (68)..(68): n is a, c, g, or t
  misc_feature (101)..(101): n is a, c, g, or t
  misc_feature (185)..(185): n is a, c, g, or t
  misc_feature (232)..(232): n is a, c, g, or t
  misc_feature (273)..(273): n is a, c, g, or t
  misc_feature (279)..(279): n is a, c, g, or t
  misc_feature (299)..(299): n is a, c, g, or t
  misc_feature (306)..(306): n is a, c, g, or t
gagaggatccttgcaaacagtgcaagaaaaagtatgtgaaaggggatgtgtccctgtgccgatgncnncaagccctattgccaggcattgcctatggcagnggtattggatgtgctgccaccggtctcagaaaggattccctggctgtaagtggggcttcatgacaatcactgggttcctgcctnccacagcttttaatcggggcaatccataaggaaagcaaaagtgactngaagctgaagaggaatactaaagttccatgtgagagggcancaaaanggacccgttttttaaagctngcaaaancac

SEQ ID NO: 7782 - DNA, 150 bp, Homo sapiens
  III.1410 (N92342)
taaaacaaacaggtttattgataagcaggaatgccgtccagcatacagtgcaaactttcattgtcttgggatcaacacacacacacaagggaaccaaggccccacagagtctccaaattcatcgcttcccggctctgcctgtgatgccaa

SEQ ID NO: 7783 - DNA, 299 bp, Homo sapiens
  III.1411 (W24526)
  misc_feature (75)..(75): n is a, c, g, or t
  misc_feature (258)..(258): n is a, c, g, or t
  misc_feature (271)..(271): n is a, c, g, or t
  misc_feature (276)..(276): n is a, c, g, or t
  misc_feature (284)..(284): n is a, c, g, or t
  misc_feature (293)..(293): n is a, c, g, or t
aagaaaaaaaaaagcaccgcctccaaatgccaacttgtccttttgtaccatggtgtgaaagtcagatgcccagangacaagcgcaggccaccatattcagtgctgtggcctgggcaagataacgcacttctaactagaaatctgccaattttttaaaaaagtaagtaccactcaggccaacaagccaacgacaaagccaaactctgccagccacatccaaccccccacctgccatttgcatcctccgccttcactccnggtctggctttantcccngcgcctgngtttccttnccttgc

SEQ ID NO: 7784 - DNA, 418 bp, Homo sapiens
  III.1412 (W92272)
  misc_feature (21)..(21): n is a, c, g, or t
  misc_feature (201)..(201): n is a, c, g, or t
  misc_feature (204)..(204): n is a, c, g, or t
  misc_feature (324)..(324): n is a, c, g, or t
ggccgagtgcctggccgaganccaccagcacctctccaaggagtcgctggcggggaacaagccggccaacgccgtcctgcacaaggttctgaaccagctggaggagttgctgagcgacatgaaggcggacgtgacccgcctgccagccacgctgtcccgaataccccccatcgcagcccgccttcagatgtccgagcgcanatncctcagccggctggcagcaagggcacggagcctcaccccacaccggcctacccgccgggtccctacgctacacctccggggtacggggcggccttcagcgccgacccgtaagggcacctnggccgccgcaggccaaatttacagccagattgccttgcagggtccttcatcacagccgccaccaacggccctccagttgcttgttgaagaagga

SEQ ID NO: 7785 - DNA, 418 bp, Homo sapiens
  III.1413 (W92346)
  misc_feature (318)..(318): n is a, c, g, or t
gtaactgagccagtgaacggcacctttattctgaggctgaacagcagttgacttcctccctcataactgctccaccctccacgtggggagaggtaggggacggtaacatgcagccacccctcctcgtcccttcctccctcccagggctcattttcatccctctctaaagtccccctcctctcttcaaagctctcttccccacaaaagttcctaaaggccaggcaaggctgattctccacttccacatgagacagagctgattctgcagggaaacggctggggaggctccacctctttcctccccacaaccatttactngggaagttgtgtatacttggcagtgtgggaggaaggtacttggaagaccctgccagccatctcccacccagacttcttctcaccagcacagtcttcaagg

SEQ ID NO: 7786 - DNA, 352 bp, Homo sapiens
  III.1414 (T86146)
agaaaccgtatttttcatttctaaaatttccatttgattctatctcaaacctgtccattctttcatatggtagattcttattttaaaatttcttattttgtctttaatcattttaaacatgtgtctgtagtttcttttagctgactctattatctgaaattgctgaggactaatttcatgtctaactgcttactcttcatggtagattgttttgtcacatgttttataattgcgggctgtgagcttatcttcagtgggtacttgatctgtgaggaatcctatggtaggtctagggttgaagggtatttcttgccagaggaaatttgccctttgccttctgccctgctgcccc

SEQ ID NO: 7787 - DNA, 248 bp, Homo sapiens
  III.1415 (T86255)
  misc_feature (128)..(128): n is a, c, g, or t
  misc_feature (235)..(235): n is a, c, g, or t
  misc_feature (240)..(240): n is a, c, g, or t
agaacagatcatctaaaatatgtagttttatatgctgtagtacattttaacaaaggtttcataatataaagcagaaataaacagacaaaaagaagccattaaaaaaaaaaaagaaatttatactaccngtgtggccagaaattcacaagccaagagatcaaaataaaagtattcctcagctagggatactcctggggcagcaggcaggaagcaaaggcaaatttctctggccagnaattnccctcaac

SEQ ID NO: 7788 - DNA, 332 bp, Homo sapiens
  III.1416 (R87909)
  misc_feature (268)..(268): n is a, c, g, or t
  misc_feature (315)..(315): n is a, c, g, or t
  misc_feature (324)..(324): n is a, c, g, or t
gagatggaattttgctcttgtcacccaggctggagtgcaatggcgcgatctcacctcactgcaacctctgcctcccgtgtccaagtgattctcctgcctcagcctcccaagtagctgggattacaggcatgcgccaccacacccagctaattttgtatttttggtagagacagggtatctccatgttggtcaggctggtcttggattcccgacctcaggtgatccgcccacctcggcctcccaaagtgctgggattacagggcgtganagccatgcctgcccagcaataccaaccatttgtcttttaaattcgtnttgggtttntcagacag

SEQ ID NO: 7789 - DNA, 400 bp, Homo sapiens
  III.1417 (H93462)
  misc_feature (258)..(258): n is a, c, g, or t
  misc_feature (353)..(353): n is a, c, g, or t
tttattttattgcctcatgttcttgtaagtcattcttaattgaccaatgattgtagaccttgcttgagtattttttctaataaaacaaagcaaatcacatttagcttcaaattgtaacaattcaattgaattttaaaatgacacctgaaaagatacatctgatattttctatatagagcacagtaaataagttttttcattgtgtagaaatacttagatgtcaaaaccagatttcgtgatccttgtattaacttctgngtactcaatcaatccataatccttttgctgcttatctggatgttggtttggatactgttaacacaccaaaaaggaatatgggaattggaaatggngtctagcctttataaactggttatgtattacatatgatacacataac

SEQ ID NO: 7790 - DNA, 419 bp, Homo sapiens
  III.1418 (H93463)
tttccaagactaaacataaagttcatttatatctcacaaacaccttatacacatagactgaaggtaattttatacaacagttttaataattttgtgcatgaaacaaagtcttaattgttttgactatgaccagtcacatgaggtcaggcgtggaattttccacttgcagcatgatgtcagcactcagaaagttttgaactttggagcattttttatgtcagatttttggattagggattgccaacctgtagtaaaaattgggggcttgcaggacctaaggtctcaccactcaattctgccactgcaggagaaagcaggcatagacaacatataaatgggtatgcttgtggagctgtagtttgcttgatgctgaacaatacataaattcctgggaccacagacttattatttcaggtgtc

SEQ ID NO: 7791 - DNA, 426 bp, Homo sapiens
  III.1419 (H79612)
  misc_feature (305)..(305): n is a, c, g, or t
  misc_feature (306)..(306): n is a, c, g, or t
  misc_feature (359)..(359): n is a, c, g, or t
actgataagacagattctttgtaacaataagataccaaactataaacaagaccactgaccataggctaattctggctagtttacaaaaagtacacatttgcatgcctttatgtcctaaaaagaccttttgatgtctagggcctaattataatacattatatgttaagtccccacacaaaaataaacatgagtcatatgttacatacatatttgttccatacacatgtgtcaagactgccttcataaacatttatgacctctcctgtatgtcttaaccaaaagatgtgggaaatataaactaaatnnaaactgttaaatttgtgtattgagtccacctgtccttcatatccccacagganctctgggacacaattgatagtgggggactgtgcctggataatttaaggtaatttaggtctggaatgg

SEQ ID NO: 7792 - DNA, 319 bp, Homo sapiens
  III.1420 (H79613)
  misc_feature (305)..(305): n is a, c, g, or t
gatttactgaaatcgaaagtacactccacagggtgacagcaggcctgagcagcggctcaagggcccagatacagaatcttcttgggtccaaataccccctagaggtttcccattggccacttggtgcttacctcacgtaaatgaagtggtggcccgcaatcagtctgaatggttgcggaaagcaacaattcagaggctgaagtgaacttacaaaggtcacattcctatgcaaacatctggtggttgcagaaagcaaccaatcagaggctgaagtgaacttacaaaggtcacattcctatggcaancatctggtgggttg

SEQ ID NO: 7793 - DNA, 450 bp, Homo sapiens
  III.1421 (R59127)
  misc_feature (350)..(350): n is a, c, g, or t
  misc_feature (400)..(400): n is a, c, g, or t
  misc_feature (406)..(406): n is a, c, g, or t
  misc_feature (422)..(422): n is a, c, g, or t
  misc_feature (433)..(433): n is a, c, g, or t
  misc_feature (447)..(447): n is a, c, g, or t
ttcggtccctgtgcagtggggatgggcttggcgacacagagatatccagaccccaggccccggaccagtcagactccagccagaccctgccgtccatggttcatctcatccaggagggctggcggactgtgggtgtgctggtctcccagcggacagccctcctgaaggagcggcaagtcttgacccagcgcctccagggcctggtggaggaggtggagagacgcgtcctgggatccagtgagaggcaggtgctgatactggggcttcggcgctgttgcctgtggacggagctcaaggccctgcacgatcagagccaggagctgcaggatgatggggggcatcggcagctnctgctgagggagctacaaggccaaacagcaagcggatcctggcaactggncgccanttgggttgaaggaganccaggaacaangtccctccttgttnatt

SEQ ID NO: 7794 - DNA, 512 bp, Homo sapiens
  III.1422 (R59128)
  misc_feature (423)..(423): n is a, c, g, or t
  misc_feature (495)..(495): n is a, c, g, or t
tttttttttagaaggcaatctcatcttttaatacattcctcacccccaacctacactgtccccctcagtggcccttattgcagcacatcctggctcagggcctttgcatgtgctgttgcctccagctgcaagcccttactcagccacccctgttgctcctgctcaccccttgacggagcacgacctgggcagtgtggccctcaattcaaatcacacatcccaccccctgctggatttcccacacagcagttaacttgcaggcatactacatatatattttccttatcttgtaaactctgtctccctggccctaggaacttcaactgctgggaaggacaggggttttctgtttcttttgtttcagtgtgggactccccaggcggcctagagggagggtggttcaattaattttttggttgaggnttgaaagtgatggaggggggtttaggggggttgttttagggggggattgaaagggacaggggtccggggggnttgagttggggggcttt

SEQ ID NO: 7795 - DNA, 411 bp, Homo sapiens
  III.1423 (H06827)
  misc_feature (296)..(296): n is a, c, g, or t
  misc_feature (393)..(393): n is a, c, g, or t
  misc_feature (399)..(399): n is a, c, g, or t
  misc_feature (409)..(409): n is a, c, g, or t
tttagaaacacaaagtttttgactatttttattatattctgaaagcgaacatcttcaactggtaaattacatggtatattaaattattttcaaaaaagatatttttatttatattattatatgtattttttgagatggtgtctcactcccgtcatgcaggctggagagcagtggcacgatctcagctcactgcaacctccaccacctgggttcaagcaattctccttcctcagccttcccagtagctaggattacaggcatgcatgaccaagcctggctaaattttttttgctganttttatatttttagtagagatggggtttcaccatattggccaggctggtctcgaactcctgaccttgtgatccgcccaccttgggcctcccaaagtnctgggnattacagggngt

SEQ ID NO: 7796 - DNA, 356 bp, Homo sapiens
  III.1424 (H06828)
  misc_feature (23)..(23): n is a, c, g, or t
  misc_feature (284)..(284): n is a, c, g, or t
  misc_feature (298)..(298): n is a, c, g, or t
  misc_feature (332)..(332): n is a, c, g, or t
  misc_feature (353)..(353): n is a, c, g, or t
gatcacggagctgaccatctttncctggccctggaactgaaaaactgtagcttgtgtgaaaatgagcctttggaccagtctttattaaaacaaacaaacatgagtagtctgcatatcgaatatctagagctctaaaccccccaatacttaaaagtctaattgcctgtcctgtggtttcattagtctgataggaagatagggatttcctcagtcacagatgatattttgaaggaaagctggcaataaaggccacaatgatttgaggtctttgcttaagtatgagnatacttggatgggnggctttattcatggcaacattagtttgcttaacnttaaggaattggcccaaaatngaa

SEQ ID NO: 7797 - DNA, 422 bp, Homo sapiens
  III.1425 (H16525)
  misc_feature (344)..(344): n is a, c, g, or t
  misc_feature (388)..(388): n is a, c, g, or t
  misc_feature (400)..(400): n is a, c, g, or t
  misc_feature (408)..(408): n is a, c, g, or t
  misc_feature (413)..(413): n is a, c, g, or t
tgtttctcacattagtctaaaaacttgtgaaagacagggagtgtgtctgattcagctttgtgtctctatttcacagctgaaggacctggcccacagtgtgcccagagaagtttgattgaatggttcattcactttactcagtctggcaatgttgggggagatggccatgaattccattgctttccttccctgctaatcttatttaaaggattcattggctttaaggactttgcctcatccaaggcttcatttgtttcagagaaagcccaaagactgtaacctggcagtcatttgtcatttttttgaggtctcaaatgatcagataaacctgggaaggctagtgnagttaggacgtggagttatttttaggcaaggcaaatggaggccntaggctggaccntttcggcntcccnttttcaaca

SEQ ID NO: 7798 - DNA, 219 bp, Homo sapiens
  III.1426 (H16526)
  misc_feature (33)..(33): n is a, c, g, or t
  misc_feature (62)..(62): n is a, c, g, or t
  misc_feature (69)..(69): n is a, c, g, or t
  misc_feature (101)..(101): n is a, c, g, or t
  misc_feature (134)..(134): n is a, c, g, or t
  misc_feature (203)..(203): n is a, c, g, or t
  misc_feature (213)..(213): n is a, c, g, or t
acggaaatttaagaaactgccttgattaggagnttagcaaagacaggccaagaataaatcanttttccngggggatatcaactgaacttggtggctgggtntttacatgtgaagagttaggggagaagaagganttaacagatgattctttgggaaactctcaaagaagagcagtttgggatgagagggtgataagtttggtntttatctttnaaggtt

SEQ ID NO: 7799 - DNA, 417 bp, Homo sapiens
  III.1427 (H41285)
  misc_feature (1)..(1): n is a, c, g, or t
  misc_feature (36)..(36): n is a, c, g, or t
  misc_feature (115)..(115): n is a, c, g, or t
  misc_feature (247)..(247): n is a, c, g, or t
  misc_feature (340)..(340): n is a, c, g, or t
  misc_feature (361)..(361): n is a, c, g, or t
  misc_feature (381)..(381): n is a, c, g, or t
  misc_feature (400)..(400): n is a, c, g, or t
  misc_feature (412)..(412): n is a, c, g, or t
naatattatttccgagcaatctcccttttacttccnctgttctagtttcatttgaggagaaacttctcattactcactctcttcccaaacatctcagggcaaaaccccaaagggnggcagattccatagcagcttagggaatgcccatcacctgggcagagggccctcatggttcaaaacctcctgttgggcaaagctccccccacttgcaacccaccacccctgaagcattccacttaagccactntccaacccttgctgtttgggcaatgtaggactgggcttggggtggggaagcagggcaggggcattcactccatcatgaaattgttgatccttntcagcagcactgctggttttntaaggccagtttttcccctntttttttttaacaaatttncctttggggggngggga

SEQ ID NO: 7800 - DNA, 444 bp, Homo sapiens
  III.1428 (R96738)
  misc_feature (344)..(344): n is a, c, g, or t
  misc_feature (370)..(370): n is a, c, g, or t
  misc_feature (401)..(401): n is a, c, g, or t
  misc_feature (409)..(409): n is a, c, g, or t
  misc_feature (430)..(430): n is a, c, g, or t
  misc_feature (439)..(439): n is a, c, g, or t
atgtgcagggcaatgatgaatgagaatctacccccagatccaagcatcctgagcaactcttgattatccatattgagtcaaatggtaggcatttcctatcacctgtttccattcaacaagagcactacattcatttagctaaacggattccaaagagtagaattgcattgaccgcgactaatttcaaaatgctttttattattattattttttagacagtctcactttgtcgcccaggccggagtgcagtggtgcgatctcagatcagtgtaccatttgcctcccgggctcaagcgattctcctgcctcagcctcccaagtagctgggattacagggcacctgncaccatgcccggcttaatttttgtanttttagtaggagacagggtttcaccatgttngcccaggntggttttcgaactcctggacntcaggtgantccac

SEQ ID NO: 7801 - DNA, 383 bp, Homo sapiens
  III.1429 (R96739)
  misc_feature (5)..(5): n is a, c, g, or t
  misc_feature (20)..(20): n is a, c, g, or t
  misc_feature (73)..(73): n is a, c, g, or t
  misc_feature (94)..(94): n is a, c, g, or t
  misc_feature (115)..(115): n is a, c, g, or t
  misc_feature (146)..(146): n is a, c, g, or t
  misc_feature (150)..(150): n is a, c, g, or t
  misc_feature (159)..(159): n is a, c, g, or t
  misc_feature (172)..(172): n is a, c, g, or t
  misc_feature (235)..(235): n is a, c, g, or t
  misc_feature (266)..(266): n is a, c, g, or t
  misc_feature (315)..(315): n is a, c, g, or t
  misc_feature (332)..(332): n is a, c, g, or t
  misc_feature (355)..(355): n is a, c, g, or t
  misc_feature (372)..(372): n is a, c, g, or t
  misc_feature (381)..(381): n is a, c, g, or t
gtgtncaatgcaaatcaatnccataagaagttactatgaatcaaagcgtaaatacacaaacacaatatacaanccaaaatagatgtacagcatnctggaataaagcaagagtgtncattcacacacacagtagcttcaaaactgtncganctgtttgtncccatgtagtttnctaaagatggaaaaaaaggactttggtcatcaagactactgtggccatattagattactggancatctaaggcatcagtgtgtgaccatgcgancaaaagacttcggggagtgtctatttttaaaaaggtttatgtgtgtcgngggcagttgtaaaaggntttactgccggaatccaggcccncttttagggcttagggncccgggtcnaa

SEQ ID NO: 7802 - DNA, 499 bp, Homo sapiens
  III.1430 (AI822057)
  misc_feature (474)..(474): n is a, c, g, or t
gtatgagcaaagggctttcaggaaggaagaacaaatgcagggagacaagatgaagaaaccaaggcacagactcatgtccaggaccctaaaaccagtgcatggtggagccagcattcaaacccagcacacgggacgccagagtccatgctcctaaccactacattgtgatgccttgaaactcatggcagagaagagtttgagagaaaggtttcagaaagacaaaagtagaaatcctgaaagactctgagcataaagttaatgctgcagcaatagatttagaaaaatgatgcatgatgatctaagtggaaggtgtgacatacccccaaagaaatgctgaattccccaggtagggtggggatccaaacaaagggagacttgtgcctcatttccttagtggaaccgaaggagcaacaagcctccccttgctctctctctatacctccaccagtcacaggcagagaaagtaaaggtggngcctgctgagcacgtcagagcagaa

SEQ ID NO: 7803 - DNA, 519 bp, Homo sapiens
  III.1431 (AI822110)
  misc_feature (494)..(494): n is a, c, g, or t
tttttgctaaggtaaacaagttttatttctttatagccaagcaggtaaaagtctcaggctgcaaaatcctctgtgcaaaaaacaaatataacattattctgtaactgaacttaatttcaatcatattcaactcaggctacctttggtcaattatttattaagtctgttccggagttttttttcccccaccattttctccctgagttgcctctaagttctggggccttaagtcatcatactttgatgtctatcaagagggggacctttgtcctcagaaattcttgtttatttatgatggctcctattggcttccgggcatagtgatctatccttgctggtatcctcaagatggccttgttctcctctggacttgtgtttccagttcatacaacttgcaagactgctagactgcttgaggtcactccagccttgtcttttgcatccctcttgaggtgagaggacagggaagcacaggaaatatttggatgcctttntgtgctgctctggagctctgggaga

SEQ ID NO: 7804 - DNA, 488 bp, Homo sapiens
  III.1432 (N71103)
  misc_feature (425)..(425): n is a, c, g, or t
  misc_feature (463)..(463): n is a, c, g, or t
  misc_feature (488)..(488): n is a, c, g, or t
gcaaaggtaaacaagttttatttctttatagccaagcaggtaaaagtctcaggctgcaaaatcctctgtgcaaaaaacaaatataacattattctgtaactgaacttaatttcaatcatattcaactcaggctacctttggtcaattatttattaagtctgttccggagttttttttcccccaccattttctccctgagttgcctctaagttctggggccttaagtcatcatactttgatgtctatcaagagggggacctttgtcctcaagaaattcttgtttatttatgatggctcctattggcttccgggcataagtgatctatccttgctggtatcctcaagatggccttgttctcctctgggacttgtgtttccagttcatacaacttgcaagactggctagactggcttgagggtcactncaagccttggtcctttggcatccccccttgaaggtganaaggacaggggaagcacaggaaaan

SEQ ID NO: 7805 - DNA, 531 bp, Homo sapiens
  III.1433 (W05846)
  misc_feature (477)..(477): n is a, c, g, or t
  misc_feature (482)..(482): n is a, c, g, or t
  misc_feature (491)..(491): n is a, c, g, or t
  misc_feature (509)..(509): n is a, c, g, or t
  misc_feature (518)..(518): n is a, c, g, or t
  misc_feature (527)..(527): n is a, c, g, or t
gtatgagcaaagggctttcaggaaggaagaacaaatgcagggagacaagatgaagaaaccaaggcacagactcatgtccaggaccctaaaaccagtgcatggtggagccagcattcaaacccagcacacgggacgccagagtccatgctcctaaccactacattgtgatgccttgaaactcatggcagagaagagtttgagagaaaggtttcagaaagacaaaagtagaaatcctgaaagactctgagcataaagttaatgctgcagcaatagatttagaaaaatgatgcatgatgatctaagtggaaggtgtgacatacccccaaagaaatgctgaattccccaggtagggtggggatccaaacaaagggagacttgtgcctcatttccttagtggaccgaagagcaacaagcctccccttgctctctctctatacctccaccagtcacaggcagagaaagtaaaggtggggcctnctganacgtcagancagaatgggcatgcatantccgtcagnctcccagantcca

SEQ ID NO: 7806 - DNA, 379 bp, Homo sapiens
  III.1434 (T98909)
  misc_feature (1)..(1): n is a, c, g, or t
  misc_feature (240)..(240): n is a, c, g, or t
  misc_feature (276)..(276): n is a, c, g, or t
  misc_feature (297)..(297): n is a, c, g, or t
  misc_feature (328)..(328): n is a, c, g, or t
  misc_feature (350)..(350): n is a, c, g, or t
naacattttatgtctaatcaaacactttcttcaaggctgcatatggactttattatcacatctgtgccatattagagctagggagagaatagtaaagactgtctcattctaattcttattaccaatatcataatgtagagtttaatttaaaaaatgtaaatgtctacactaaatatagctttcttccctcatgttttctatttgattttcaaatgcttaacaaggtttattcttttcccnaattaaaatggaaattattcaactgtgcacagggcntaagggtttctgggagagccngcctaatataattcactcctttttcaggtgnggggactgggggcccggggggnaaaggaggccccttgccctatgggggggc

SEQ ID NO: 7807 - DNA, 411 bp, Homo sapiens
  III.1435 (H59594)
  misc_feature (111)..(111): n is a, c, g, or t
  misc_feature (290)..(290): n is a, c, g, or t
  misc_feature (295)..(295): n is a, c, g, or t
  misc_feature (322)..(322): n is a, c, g, or t
  misc_feature (380)..(380): n is a, c, g, or t
  misc_feature (386)..(386): n is a, c, g, or t
  misc_feature (408)..(408): n is a, c, g, or t
aaaagatgtttaaatcaactaggaaatttttcattaggaaaagctgttgaacattgctgtgtgattaatatgcaagaaagcagagaggcctcagtaacactgcatgttgancaaggatgctgttacccagaaatcagagcccctggatctccagaaggataattatacttaaaagcaagacaagctcaaactataccagctgtcagattttttttacaatgagtgtatgtatatttaaatcgtagctattcattgcaggatttgtgatcccaaacagaaggacagcatgnacagngcccaaaccaagtaacaacaaatgggntgggaaaatgacagggcttttcataggctccatagttcagtggtctgattaacatagnttttcncgaaatgcaaagcgtagggtcnggc

SEQ ID NO: 7808 - DNA, 420 bp, Homo sapiens
  III.1436 (H59595)
  misc_feature (379)..(379): n is a, c, g, or t
  misc_feature (391)..(391): n is a, c, g, or t
  misc_feature (398)..(398): n is a, c, g, or t
gatagactcttatctttcccatgctaaagtgcattctgctccttacatccaagagctaatattgttgtaatatgccattttactttacaagacttttgctgaataggaaaattggagacattttatgcgcataattgtgttttgtttagccagctttcttttctcatttgggtcacacttagttctccataacctatagaatttaaatctcagctttttctggttggggaatctagaaaaaatatataggatgtggcaaattgaggattgtacctaggtcaggcactgactgggcctggatatcatgggagtgtgggggttacggtacaaataggtccaaaggcaggcaaaccaaggatggaaggctttctggggttcnggttccccagtnctttgtnacgggattactcccataacaca

SEQ ID NO: 7809 - DNA, 270 bp, Homo sapiens
  III.1437 (H92292)
  misc_feature (146)..(146): n is a, c, g, or t
  misc_feature (147)..(147): n is a, c, g, or t
  misc_feature (248)..(248): n is a, c, g, or t
tggagtgcaatggtgggatctcagcttactgcaacctctgcttcctgggttcaagcaattctcctgcctcagcctcctgagtagctgggattacgggtgcccaccacgcccggctaattttttgcatttttaatagagacagggtnncactatgttgtttaggctggtctcgaactcctgacctcatgattcacccatctcggcctcccaaagtgctgggattataggcgtgagtcaccgcgcccggncctcttggtcttctcttagcct

SEQ ID NO: 7810 - DNA, 413 bp, Homo sapiens
  III.1438 (H92713)
  misc_feature (271)..(271): n is a, c, g, or t
  misc_feature (318)..(318): n is a, c, g, or t
  misc_feature (328)..(328): n is a, c, g, or t
  misc_feature (355)..(355): n is a, c, g, or t
  misc_feature (367)..(367): n is a, c, g, or t
tgtctcaaaagcaaaacaaacagcaataacaatattattattgttataactaaaaaaaaaaaaacaaaaacaagcagcttttgtgactaagaaggaaaatatgcatatagtggcatatttttatatgaatcatctcctctgtggtcttgcccagtaccatccagtggagctttctgcagtgacggaaatgttctgtatttgcgttgtccaacgtggtaaaccagacacatgtgattcttgagcacttggaacaatgactgatgtgattgangaacccatcttttcaattccaattaaattttaaataggccacatttnaacttccagnccttgggggttttggacctggatgggnaaaatttcccangagtagtagtggtctcccaaaccgtttccaaggttggggggtccag

SEQ ID NO: 7811 - DNA, 525 bp, Homo sapiens
  III.1439 (N52824)
ctttagggttataccactatatataaatctgaaacaacctatttagtttgaatatacactatttgtatattccctattaattgctttttctccactacttatattttgagaattcacccttattggtgcatgcagccataatctggcttgttcatagctgtctcccagcacctagtgcagtgggcaaatggcaggcaccctataaatatcagttgacatacagagtagccaccacgtcccaatctaactcctgacttttccccttatattgtatgtgtgtgtgtgtgtgtgtgtgtgtgtgtgtgtgtgtaatcaagtatttctgaaatgcagtataatccaattaagtctattttaggtattcattggctataacattttccctcatcctttttaccactgaatacagaaactgataagctcatatatttgaaattgttaaaagactcctccccgtgtgtggtggaatttggccgtaggaacacaggactcaccgctgtagaatacctggcagaagcactgaag

SEQ ID NO: 7812 - DNA, 179 bp, Homo sapiens
  III.1440 (N72323)
  misc_feature (146)..(146): n is a, c, g, or t
gaccatgatggccaagctggtttcgaactcctgacctgaagtgatttgcctgctttggcctcgcaaagagctaggattacaggtgtaagccactgtgcctggccgactcttgcacttttcttttttttttttttttgagacggagntcgcctctgtcgtccaggctggagtgcaatggc

SEQ ID NO: 7813 - DNA, 283 bp, Homo sapiens
  III.1441 (R17627)
  misc_feature (37)..(37): n is a, c, g, or t
  misc_feature (38)..(38): n is a, c, g, or t
  misc_feature (281)..(281): n is a, c, g, or t
caactgtgtcaactccacagtgagctgtccccttggnnacttggcctcaaccgccaccaatgactgtggctgtaccacaaccacctgccttcccgacaaggtgtgtgtccaccgaagcaccatctaccctgtggccagttctgggaggagggctgcgatgtgtgcacctgcaccgacatggaggatgccgtgatgggcctccgcgtggcccagtgctcccagaagccctgtgaggacagctgtcggtcgggcttcacttacgttctgcatgaaggcgagtnct

SEQ ID NO: 7814 - DNA, 317 bp, Homo sapiens
  III.1442 (R43348)
  misc_feature (144)..(144): n is a, c, g, or t
  misc_feature (206)..(206): n is a, c, g, or t
  misc_feature (315)..(315): n is a, c, g, or t
agcagcaggcacccatgcagctgcagcagcctcacttgctgcacttcctgggggagcatttgcactccatggcattgagaacctcatggtacacaacagagccattggtgcagtgcagggccacctgcatgggctccgtccgtntcggagagcagcaggagcactggtcctgcacatcgttgatgtcaatggagtacatggctttnctggcacatttgccctgggagtagtggatatccacctttacttcagacttacagcttcccaccttgacatactttcagcctgggagtgatgttcgttttcacttaaggntc

SEQ ID NO: 7815 - DNA, 444 bp, Homo sapiens
  III.1443 (R52369)
  misc_feature (387)..(387): n is a, c, g, or t
  misc_feature (396)..(396): n is a, c, g, or t
  misc_feature (428)..(428): n is a, c, g, or t
tcaaaattacttatattttggaaagtctatatagaatatccacaaatttcttcagccctcttgttgatttcatattttcatgaaactttttcccctaataatttgtcttcgctctttaatcagtgctttactacattactcagcctgaaaaaatatcttttccttcatctgacaatgtggaaataaagaactccatttctgtcattctggttctcttcagtgtccattgagaaagtttctcaactgtttgtaaaatacggggggaaaaaaacacggcatttctaaacctggtacttaaggttatactgggattgtttgctacctaattgggagttattggggggaggggccttgtgtctttttatatggatttttggcccaaatccnggatgttcnggatacacctttctggattacccgtctggacngtaaatacggccgtgg

SEQ ID NO: 7816 - DNA, 420 bp, Homo sapiens
  III.1444 (R52370)
tttttttttttagaagcagatacacaaaaacttttattaagtggaagttagacttacttcatggtaattaaccagttacaagtgcatttaaattcatgtgtgtggacactgtagaagtcaaaatggtcttttgaaagtccagtgttctggctctgtttgtgccagtgcaaccccaggtagaaccatccacaaagtaagtacaggtcaacaatgatatcagactagattgggcaacaccatattcattgttacaagcattacagaacagaaaagtccaaggaccaggaaggacgattactaaagtgattctgactataagccttttcttctacttaaatgcttccagaggaccagtgtaggcaaatccttaactctggggggacagagccacttctgcattttacactttaaacggggcca

SEQ ID NO: 7817 - DNA, 246 bp, Homo sapiens
  III.1445 (T78492)
  misc_feature (25)..(25): n is a, c, g, or t
  misc_feature (55)..(55): n is a, c, g, or t
  misc_feature (63)..(63): n is a, c, g, or t
  misc_feature (157)..(157): n is a, c, g, or t
  misc_feature (180)..(180): n is a, c, g, or t
  misc_feature (191)..(191): n is a, c, g, or t
  misc_feature (197)..(197): n is a, c, g, or t
  misc_feature (221)..(221): n is a, c, g, or t
  misc_feature (240)..(240): n is a, c, g, or t
ttttcaagtcgattcttggcttttnattcaaacaccaagagaagcagctcccttnagaaaatnactttataattctctaaagtaaaaacccttatggaggaggtggatagaatcccagactattaaaaatacttaaccaaaatatgcttaaactttncccttgtccacaatctaacaaantgggaagacantgaaantaaacactcctgtctacactcagngaggcaaagaaagctcccnttcagt

SEQ ID NO: 7818 - DNA, 506 bp, Homo sapiens
  III.1446 (T78576)
  misc_feature (2)..(2): n is a, c, g, or t
  misc_feature (14)..(14): n is a, c, g, or t
  misc_feature (84)..(84): n is a, c, g, or t
  misc_feature (93)..(93): n is a, c, g, or t
  misc_feature (117)..(117): n is a, c, g, or t
  misc_feature (325)..(325): n is a, c, g, or t
  misc_feature (354)..(354): n is a, c, g, or t
  misc_feature (360)..(360): n is a, c, g, or t
  misc_feature (399)..(399): n is a, c, g, or t
  misc_feature (457)..(457): n is a, c, g, or t
  misc_feature (466)..(466): n is a, c, g, or t
  misc_feature (478)..(478): n is a, c, g, or t
tngcggggtggccngctccgggtgtggacgggcggtccccctttcacctgccgcctcgggacaagcgttggggaaccgcatcgncgctgtcgncgcttgtggaggagtccgcgcagncgttctaacaggtgatccgcgtcactcccaggccataccgaagcggctgaacgctgtgccagggctccttatgctcttctgttctgggacgtgaaaacgtctttccgccttattggtcgtccaaaaaggtgcaccggttcacagtataagagtcaaaaaccagtattaccaaaaaggacactacgaggcgtcaggggttgcaggagtnggctttctttcggatttaacggaaccggncagganccattcgttaggtcttcttaaaaattcggggtttcttgncagtgggtgggccgaaaacgttaggttaaagttttccaagtttgttaaagttggaagnatggccagnaatttgttaggnataacccctttcagttgttgggtttcca

SEQ ID NO: 7819 - DNA, 470 bp, Homo sapiens
  III.1447 (H79616)
  misc_feature (1)..(1): n is a, c, g, or t
  misc_feature (327)..(327): n is a, c, g, or t
  misc_feature (391)..(391): n is a, c, g, or t
  misc_feature (415)..(415): n is a, c, g, or t
  misc_feature (420)..(420): n is a, c, g, or t
  misc_feature (452)..(452): n is a, c, g, or t
ncctcaggaaataacaaataaaattttaaaagaagaattcagtgcagaagaaaattttctcattttgacggaaatggcaaccaatcatgtacaggttcttgtagaattcacaaaaaagctaccaggatttcagactttggaccatgaagaccagattgctttgctgaaagggtctgcggttgaagctatgttccttcgttcagctgagattttcaataagaaacttccgtctgggcattctgacctattggaagaaagaattcgaaatagtggtatctctgatgaatatataacacctatgtttagtttttataaaagtattggggnactgaaaatgactcaagaggagtatgctctgcttacagcaattgttatcctgtctccagatagncataccttaaagggtaggggggcngtagnggaagcttcaggggccacttcttgatgtgctncaaaagttgtgttaggtt

SEQ ID NO: 7820 - DNA, 286 bp, Homo sapiens
  III.1448 (H79617)
  misc_feature (83)..(83): n is a, c, g, or t
  misc_feature (103)..(103): n is a, c, g, or t
  misc_feature (108)..(108): n is a, c, g, or t
  misc_feature (119)..(119): n is a, c, g, or t
  misc_feature (152)..(152): n is a, c, g, or t
  misc_feature (184)..(184): n is a, c, g, or t
  misc_feature (243)..(243): n is a, c, g, or t
  misc_feature (257)..(257): n is a, c, g, or t
  misc_feature (281)..(281): n is a, c, g, or t
ttatgtttgctttattgccaagattgaatacaactctttaataaaatatatgcaatatggtaagatgagcaaaatgagatttnccctagttcaacagataganttgangtaacaatcantttaattaggcaaacagggcttgccaattagantgcaggattccctggggccttttaaaacacantgtagagaaagttgttctatctagcccaatatttacagttgtggaagttacacatgtanttacaacataaatnttcatcaagttttcttgagtgaanctggg

SEQ ID NO: 7821 - DNA, 567 bp, Homo sapiens
  III.1449 (N46354)
  misc_feature (455)..(455): n is a, c, g, or t
  misc_feature (464)..(464): n is a, c, g, or t
  misc_feature (504)..(504): n is a, c, g, or t
  misc_feature (535)..(535): n is a, c, g, or t
  misc_feature (542)..(542): n is a, c, g, or t
ccttttaatatttatttgttggctccgttagtagggaaaacacaacttataaaatgaaataaataatcagtcttattaaaatttctatggcttacaaaattaaggaaaaagaccaagacttttaaactataacatttactgcttgtatatttaaactgtaacatggtcatagaaatgaaaaaatatattcaaataactgaaaaagaaatcaaatctgcaagtatgttaatccaaatttaataaaagaagcatttaggttgatacaatgttaaagatatcctctgaatacaactttttaccattattaagaatatagatgattatgatacattcaaagcctccctttaggcagatacataatctacagagtatgaaaggaaacagctgttatatcaatggcacaaatctcccattagattcagtacttgaaacctaaatatggacagcaataatcnccaaaggangttaatcctaaaaaccaataaccttttcccttttaggccntatggaccaatttaaattcctaagcattccngcaccgncatatttatccctggcaacatgggg

SEQ ID NO: 7822 - DNA, 229 bp, Homo sapiens
  III.1450 (N48860)
  misc_feature (6)..(6): n is a, c, g, or t
  misc_feature (9)..(9): n is a, c, g, or t
tgtgtnctnttgccctaattgaatttgcaactgttaattacttcaccaaaagaggatgggcttgggatgggaagagtgtagtaaatgacaaggtaagtgagagcttccgtgttatcattattaagaaaataccctaatgaattccgcttgtaacagatatgtttctaaaatcctgacattaaagacatccatatatatatgaatttgaatcatatcaatttcttttaaa

SEQ ID NO: 7823 - DNA, 189 bp, Homo sapiens
  III.1451 (W92547)
  misc_feature (64)..(64): n is a, c, g, or t
  misc_feature (110)..(110): n is a, c, g, or t
  misc_feature (180)..(180): n is a, c, g, or t
ttaaaaccccctttctgggctagtagtagttactgttatttatttttgtccattttagcttcanctacttgccagtcctagaaattaatgggtttaatttcccctcagantttaggacttttctagtaacaacttacactcaaatgtagtctttcttataaatattctccccctctctanttgtaattt

SEQ ID NO: 7824 - DNA, 420 bp, Homo sapiens
  III.1452 (W92548)
  misc_feature (269)..(269): n is a, c, g, or t
  misc_feature (272)..(272): n is a, c, g, or t
atctagattaacgacactacagagctatctatattttggtagtcaccaaactttttaaaatgtcaatatcattatacgtgttatccattctctacaccaggatttttcaaccttggaactattaacactttgggccaattttctgttgtagggtgctgtcctctgtagtgcaggatgtttagcagcattcctggtctctacccagtagataagagttgtgatgactaaaaacgtctccagacattgccaaatgtcccctgggggacaanaanttgtcgctggttgagaaacactgctgtatagtgagttatcactatccaaatattttgattatctgtttaaccatttacctattaccccggccacattaatcatgccatgattcacattgatcacaatgattaaagaaattatagattt

SEQ ID NO: 7825 - DNA, 194 bp, Homo sapiens
  III.1453 (N91041)
  misc_feature (186)..(186): n is a, c, g, or t
actttcttgatatacatatatctatattttaatgaacctgaaattctgttacacatgtgattttgtatgctaattaaaaatttccaacataagtgaaaattcttttaatgcacgatttttaaataactgcagaatattccaatatatggctatgctttgatttatttaaccaatctgtaattaagntattttta

SEQ ID NO: 7826 - DNA, 228 bp, Homo sapiens
  III.1454 (W20243)
  misc_feature (11)..(11): n is a, c, g, or t
  misc_feature (14)..(14): n is a, c, g, or t
  misc_feature (35)..(35): n is a, c, g, or t
  misc_feature (66)..(66): n is a, c, g, or t
  misc_feature (222)..(222): n is a, c, g, or t
ggctgataganggnggagctgggcagttggcactnccattcagtctgccttataccaataacgaantgtttttgcaactgaaaactgacctgagcatgtatgattgggtttactcactaaaaagggaggtctaggagataaaggggaccagttagacctttggagtaccaggatcacttgagatgacaaaagcaaccctggctcatgataattcatttcagnacatta

SEQ ID NO: 7827 - DNA, 425 bp, Homo sapiens
  III.1455 (R25707)
  misc_feature (416)..(416): n is a, c, g, or t
agatttggtggttctgcatgtgtgatgaatctctttcacacaaatagacgagaggatatttagggctagatgagcccagatttcttccccctccatctctcagggagacaaagaacctccttcctggaccaaggaggtgctgccaagttttctagcccagtgcacatacccagtccttaagcagacattggtagtgcccctgccctgggtcccactcctgccccaccccacccttgtccctgggccattgcctgggtgggtctaggaaacacttaaaacttgaagtagtgacaccttacctgcagtcatattgtaggagagatgctcagtgtttaaaactggaaacacacaaacacacacacacacatttttctttttgttaggattttaattttttttaagtgggggaaaggacntcaccttgg

SEQ ID NO: 7828 - DNA, 408 bp, Homo sapiens
  III.1456 (R62451)
  misc_feature (24)..(24): n is a, c, g, or t
  misc_feature (203)..(203): n is a, c, g, or t
  misc_feature (223)..(223): n is a, c, g, or t
  misc_feature (284)..(284): n is a, c, g, or t
  misc_feature (308)..(308): n is a, c, g, or t
  misc_feature (339)..(339): n is a, c, g, or t
ttttttttttgaactgttaaaaantttattaaaatgtccaagaagtacattaatgtccacagtgtcagataccacagacccacagaacactgcagctcacagcaaaaccagcaggacccaaagccgttcacacgcacacacactcatatgcgtgccacgacatggcacacgcagacacacacggcacatccaaaagggaaagntcaaaagacaaaccgcccantttaggaaaagaccagagccccctcccaccatggagccgaggtgggggcagggcaaacggntgaggggttcaagggcagggagcntaaaccaaggaccccccaaaaaacatttgcnttccccaggccccccggcaaacaaagggaaattttttgtgtggacatagtttgaccaaagttgtgttat

SEQ ID NO: 7829 - DNA, 458 bp, Homo sapiens
  III.1457 (H71506)
  misc_feature (298)..(298): n is a, c, g, or t
  misc_feature (433)..(433): n is a, c, g, or t
  misc_feature (439)..(439): n is a, c, g, or t
acagttcggatcttagtccacttagtctatcttagtcagcttgggctgctataacaaataccatacactgggtggcttacacaacagaaacttacttctattaaaggttggaagttcgagatcaggatgccagcattgttgggctctggtgaagtctctctccctggcttgccaatggccacattctcaccctctcactcatgtgtcatcacttgatgccgagagagagcaagcaagctctctggtgtctcttcttataagggtactctaatcacagcatgagggccctaccctcatngacctcatccaaatctaaattgccttcccaaatcctcatatctgaaatgacatgcacattgggaagttaagggctttcaacatatggaatgtgtgggggaagggacataatttcagtccctgaaaagaagtgtcntatttnccaagggacagtatatttc

SEQ ID NO: 7830 - DNA, 309 bp, Homo sapiens
  III.1458 (H71507)
  misc_feature (76)..(76): n is a, c, g, or t
  misc_feature (211)..(211): n is a, c, g, or t
  misc_feature (263)..(263): n is a, c, g, or t
  misc_feature (281)..(281): n is a, c, g, or t
gggatttgtctgttttattcattgcaaaatgaatatctgaatataaacatgaaggcttagcattcattatatacanaaaaattcttcaatctacatagcatcataaaagccaaatatgaaatacttatgttgcctttcacccaacaaattcagttgatgatatatctttctgaaaataatacatcccccaaaactgcagtacaattttaangaagaataaaatacatgtttatattagtttcagttttcttgtttgtattttnctgtgttctaaatttttngccaatggaaaatgtgttactttataat

SEQ ID NO: 7831 - DNA, 424 bp, Homo sapiens
  III.1459 (N64435)
  misc_feature (309)..(309): n is a, c, g, or t
  misc_feature (377)..(377): n is a, c, g, or t
  misc_feature (398)..(398): n is a, c, g, or t
  misc_feature (414)..(414): n is a, c, g, or t
  misc_feature (420)..(420): n is a, c, g, or t
taaattcaaaactccccacacagtaagtctaacataaaaaatatattgtaactagctctaaagagctaaatatgtattgctagagaaaggtaagaatgaaaaaaaagaaccagaaaggtaaatttttagttgtagtatctatagttatcacaaactagccatacaattatcacttaacctttctgggcctcagttttctcacagtaaaacagggatactactacctaaatcaaggttattgtggatataaagataatacaaaccacctagcgtcgtgtgtctgggcatataatagtactccatgaatgnagtaccaattcctataaaatggggggaagggaagggtggttggccattaggatatccaaggtcccaanggtccaaattttcccaggaangcctttccttaattcnatacantttc

SEQ ID NO: 7832 - DNA, 475 bp, Homo sapiens
  III.1460 (W02016)
  misc_feature (358)..(358): n is a, c, g, or t
  misc_feature (455)..(455): n is a, c, g, or t
  misc_feature (461)..(461): n is a, c, g, or t
  misc_feature (471)..(471): n is a, c, g, or t
ttaaattcttgaagtttgagaactttcatatacttccttggcatcttatgtttcctttaaaccttttattaatttcccaatctgtctgcaattctgcctaagacttttctgtcatccttaggaaggtgatgctgatttttttccccatactttggtccacctttctttaacccattactttctagcaattattttggcagttatttcattttcctaagacaaagattggaatgtgttgtcactgatgaaataatagaaatatatggttgagtcatgtacaaaataacttacaggccccaaccagtggccctcttcagggggtatttggaattatttaagtgacagccaccaatttggntgaacttaatactagatctgtgggtacaaaaactgtaatagaaataataaatggtaggatagtccatatgagagttcgtcagaagtttggggcaaantgcgantccggcttgncaat

SEQ ID NO: 7833 - DNA, 437 bp, Homo sapiens
  III.1461 (R52788)
aaatgtaaaactttctttcgtctgcatgtgctcagccatctaaattgagcaaatgatctggtgagcactgggttagaatcaggaatggtggaatacaatctgaacctctcagagcccagaacagagggttcctgacactgtgacactgtctcctggaactaagtatctcttgaatcatgacttggttttagatcagtcaagagagacccaggttttgccaggaatcgaatccctaaataacatgtttttttctcacttagctcatgaatttgcatagtagacagtagttctgaattagattttgaaaacctaatttcagggctcattttttcctgtgggccctaaatccattctattcaaattgtgtgatactgacatggcagtcatctgagggaacttcagcgtaggataacttggaggcagctccttcggcctct

SEQ ID NO: 7834 - DNA, 494 bp, Homo sapiens
  III.1462 (R52789)
  misc_feature (367)..(367): n is a, c, g, or t
  misc_feature (396)..(396): n is a, c, g, or t
  misc_feature (442)..(442): n is a, c, g, or t
  misc_feature (467)..(467): n is a, c, g, or t
  misc_feature (490)..(490): n is a, c, g, or t
ttttttttgactcaaacacatgtcatttttactttgaatagaaaacagatttttagaggctgggcatggtggctcacgcctgtaatcacagcactttggtaggctgagctaggtggaccactttaggccaggagttcgagaccaccctgtccaacatggtaaaaccttctctactaaaaatacaaaaattagctggacgtgatggcacatgcctgtagttccagctatttgggaagctaaggaggatcgcttgagctcaggagatagaggttgcagtgggctgagatcgcaccacagccctctagcctgggtcaagagagagagattccatctctaataaacaaacaaacaaaaaaacaagattttntggaccagggcggcaatggctcacacctnttaattcccagtgctttggggaggccaaggcaggaaggtttttttnaggtccagggatttcgaggccagcntggggcaaacacaggggagaccntttt

SEQ ID NO: 7835 - DNA, 441 bp, Homo sapiens
  III.1463 (H12238)
  misc_feature (287)..(287): n is a, c, g, or t
  misc_feature (412)..(412): n is a, c, g, or t
cttcatccaccacaactgtacacctgaattccaggccaatgaagttcggaaagtgaagaaatatgaacagggattcatcacagaccctgtggtcctcagccccaaggatcgcgtgcggatgtttttgaggccaaggccggcatggtttctgcggtatcccaatcacagacacaggccggatggggagccgcttggtgggcatcatctcctccagggacattgattttctcaaagaggaggaacatgactgtttcttggaagagataatgacaaagagggaagacttngtggtagcccctgcaggcattcacactgaaggaggcaaatgaaattctgcagcgcacaaggaagggaaagttgcccattgtaaatgaaggtgatgagcttgtggccatcatttgcccggacaganctgaaggaaggattcgggattacccatta

SEQ ID NO: 7836 - DNA, 526 bp, Homo sapiens
  III.1464 (H12239)
  misc_feature (454)..(454): n is a, c, g, or t
  misc_feature (478)..(478): n is a, c, g, or t
  misc_feature (518)..(518): n is a, c, g, or t
ttttttttttctttctaaactttttttgaaaaaaaaaccgaggaggtgtgctggatcccttttcagaaaagccgcttctcatacgaatggaggctatggacgccaccttccacctgggctgaggacgttctcttctcaaacttaagctccccagagtacatcatggctcggacttgggtcaagctcttggcaccaatgtcctggcatgagtgttggatgccagcaatcaggtaagggacaaatttgtggattgaccctttgtcctgcacagcaccagacactccctgggccactttgattttgtcagcttcactgaaatatctgttctggctgctgaggtgcttgtccatgggcatcgagagaacccataccgcgatatttctttagccggatcccatcggaaaagaagtattcaccagggggcctcagtggtggcagccagggagagagcccntcattgactttggaaggcccaagnaaagtgcttttcgcaatatgacccacattttgggattccncatcagca

SEQ ID NO: 7837 - DNA, 397 bp, Homo sapiens
  III.1465 (H61742)
  misc_feature (358)..(358): n is a, c, g, or t
  misc_feature (393)..(393): n is a, c, g, or t
gcaaatcaattttattgtttaaaaaaataaacgttacatttgacatagaaaaagacattttaaaaatgttcttaaaaggtttaaaaaggcatttgttctggccaggcatggtggctcccgcctgtaatcccagcactctgggaggccaaggcggatggatcacctgaggtcaggagttcgagaccagcccggccaacatggtgaaactccgtctctactaaaaacacaaaaatttgctgggcatggtggtgtaatcccagctactcgggaggctgaggtaggagaatcacctgaacctggggagggcaaagtttgcagtgagccgagatcgcgccactgcactccagcctggggcgtncagagcgagactctgtcttcaaaaaaaaaaaaggntttg

SEQ ID NO: 7838 - DNA, 403 bp, Homo sapiens
  III.1466 (H61958)
  misc_feature (1)..(1): n is a, c, g, or t
  misc_feature (338)..(338): n is a, c, g, or t
nccgcatggaagcccacgtgtgcacttaggggcccataaatggcagaagggcccctcctttgggagaccttgtcagtcagcatctctagggcaaccgtgattgccatttgtagaggggaaggaatcaagggactttaagctagatcaaaatctggggacaaattctcctgctaactgcaagttaaaataggcccttcttactgaatttccctgtttgtttctctgcagacaatgctttagccctactcttgggcccccaagttagcagagtaatcaaagcttcctaccgtttgggcctactattccagactagtcccactggtttttgtgggaaacantgggaaactttacagatgcctgcctgggggattgatgagggcacatttcaggaacaaatgctttt

SEQ ID NO: 7839 - DNA, 403 bp, Homo sapiens
  III.1467 (N49287)
gaatagtttattaaaggaaaggtgaagcatcagtttcaaattgtacaaaaggaaaaaaaacctcatattgcaaatgtacaatttacagaattactagcaaaaccaatcaaggagacaccgaaaatacaaaaatttgattgacttcaaactgaactggaaacccattggagtagatatttagcctttttgtgtggcatggtagtctacaattctgtcagcatctgttttccatacaagactgtcacgcaaaggatcaatttgtgcatgtgccagggccctcatggcttgctccctggccaaaaccacaggcaggcagggctggggtggacagtccagtcattcctgcaccttcacttccagtgaagcccacaatcctgggagaaaagtgaggccccagctcccc

SEQ ID NO: 7840 - DNA, 451 bp, Homo sapiens
  III.1468 (N49529)
  misc_feature (51)..(51): n is a, c, g, or t
  misc_feature (396)..(396): n is a, c, g, or t
  misc_feature (436)..(436): n is a, c, g, or t
  misc_feature (444)..(444): n is a, c, g, or t
tagcaacttctaccagcaaataaagtattctcagtaaaacgaaaatgatantaaagttatcagtttgctgtttttaccacttatttcatgccctgccaaattcaagttacacagacttccattttcttaagataatcaatcatgaagaaatcctttatcaatcattcaaaagtaattttaagtgtaacataactgtgtttacttcccatgcacttaatacccttatgcgctaattttgtgaattaagtttactgattatagaagtatgtgctgcatagaagtctgtgcttagagggtgaagttcctaagcttaccttgaattacagctacatttcagtgttaaatgtgcatattaagaataattcttttggggaaagaaattatgaatcttcaggncagtctacaatggtttagagttacattcctgcccagactnttatgacnttgcgcg

SEQ ID NO: 7841 - DNA, 324 bp, Homo sapiens
  III.1469 (AA044975)
  misc_feature (263)..(263): n is a, c, g, or t
  misc_feature (272)..(272): n is a, c, g, or t
gaaatggagaatgctttaaggtcatattcaaatattacagttaatgaagatcagataaagttaatgaatgtggcaataaatgaactgaatataaaattgcaagatactaactctcaaaaggaaaaactcaaggaagaactaggactaattttagaagaaaagtgtgctctacagagacagcttgaagaccttgttgaagaattgagcttttcaagggaacagattcagagagctagacagacaatagctgaacaagaaagtanacttaatgnagcacataaagtcccttagtacagtgggaagatttgaaagctgaagattgtt

SEQ ID NO: 7842 - DNA, 448 bp, Homo sapiens
  III.1470 (R53526)
  misc_feature (297)..(297): n is a, c, g, or t
  misc_feature (361)..(361): n is a, c, g, or t
  misc_feature (376)..(376): n is a, c, g, or t
  misc_feature (391)..(391): n is a, c, g, or t
  misc_feature (408)..(408): n is a, c, g, or t
  misc_feature (417)..(417): n is a, c, g, or t
  misc_feature (430)..(430): n is a, c, g, or t
tttttttttttggattcatgcagtctttattaatctgacaaatacagaaaatctgcaatcagctatcaaaattatatcttaccaagaatttgaaaggtatttataaaaaaggtgtattcacagtctgtctgaattaagtacaaagcagtgtccacagaagcagaaggcagacaacatgtgagagtaaatgatcccactgaaaccctcaccccaggcacctccaaggacaccaaaaacaagacagtcctgtacttgctactatatgcagctgactttgaaactgcctagtctcaacanttacgtatttcaaaagggaaaattgctttctggggaaatcgtccctgctacacagacacacagnccaactgggcaatgntgccaccacatgtcnggggctcaggggtgggncccggcacntcctttagggggnacctggttgcccaggttt

SEQ ID NO: 7843 - DNA, 493 bp, Homo sapiens
  III.1471 (R53638)
  misc_feature (414)..(414): n is a, c, g, or t
  misc_feature (446)..(446): n is a, c, g, or t
  misc_feature (456)..(456): n is a, c, g, or t
  misc_feature (486)..(486): n is a, c, g, or t
  misc_feature (491)..(491): n is a, c, g, or t
aaagaaagggggatttaaagtagtaggttctatcatctcaattcatttttttccatgaaatcccttcttccaagattcattccctctctcagacatgtgctagcatgggtattatcattgagaaagcacagctacagcaaagccacctgaatagcaatttgtgattggaagcattcttgagggatccctaatctagagtaatttatttgtgtaaggatcccaaatgtgttgcacctttcatgatacatttcttctctgaagagggtacgtggggtgtgtgtatttaaatccatcctatgtattactgattgtcctgtgtagaaagatgggcaattattctgtctctttctccaagtttgagccacatctcagccacattgttaggacagtgtacagaggaacctatcttttccnttttttttttttttaaagggacgggttttgcngtgttgcccngggtagacttgaaccccgggggtcaggatnccccncg

SEQ ID NO: 7844 - DNA, 418 bp, Homo sapiens
  III.1472 (H73896)
  misc_feature (394)..(394): n is a, c, g, or t
  misc_feature (408)..(408): n is a, c, g, or t
  misc_feature (417)..(417): n is a, c, g, or t
attaacaaagggattttattacctacaacaagtaaggaggacagctggggcagtttcccaaagcagtacctcccaaacaatggtgaaaacagctttcgttaggctagttggctgagccattgtatgcggaggcagagtaaaggcagagactgtgaagtagctgatcatgcttctccatatgtcacatgtgtaggaaatggcagataagctccttcctgggtggggtttttagtatggtaatgaggaaagtttgcaaggttcatctccaactcagggcatctctgggactcaaccagtttttgttcatctagagctgagcttcactctgggaactttctgaaactcaaggatgcaacagttacaagtggggtgcttttttcagggtgcatacccnggaaacccgggggnttcttgggnt

SEQ ID NO: 7845 - DNA, 432 bp, Homo sapiens
  III.1473 (H74088)
  misc_feature (362)..(362): n is a, c, g, or t
  misc_feature (381)..(381): n is a, c, g, or t
  misc_feature (399)..(399): n is a, c, g, or t
  misc_feature (416)..(416): n is a, c, g, or t
tcctagtgattttgctgtttaaaatgcctccctcctccgaagcttggtattgaagtagtgtccagtattcctaagcagaaggctgtgaagtgccttacagagaaaatacgtgtgttagataagctttattcaggtaggagttaaggtgctttagttctgagttcaatggtaatgaatcaataatatattaaataaggtttatttaaacaaacacataaagcaaggttatgtcttgattgatagaaatgttgtgatcgacgtttgcaggaacccaacactgtatttctcctggggatccatggttcagtgttccctaattcagtgtttccattatgtttcagtaggaacataactaccaaggngttgttttttaacaccttnggttgggttcaaaggtantttgattgggacacttncagtgttttctccatc

SEQ ID NO: 7846 - DNA, 282 bp, Homo sapiens
  III.1474 (R00526)
  misc_feature (70)..(70): n is a, c, g, or t
  misc_feature (246)..(246): n is a, c, g, or t
  misc_feature (256)..(256): n is a, c, g, or t
actcatacttgacaactccagttaaacataatactccacccaaatcccaaatttaaatgcattatgtcancctggaatagtaaaattataaaatggtatttctaaattataatatatatacataatgcaccattttaactgtcacatttaccagcagaattatgaaatcaaaaacaaattctacattcaaggggacaaacggataaatgctctttcattgttttaggggtccattccattctttgntggtttctcntcccatattttaaaattatggcccag

SEQ ID NO: 7847 - DNA, 324 bp, Homo sapiens
  III.1475 (R00627)
  misc_feature (238)..(238): n is a, c, g, or t
  misc_feature (286)..(286): n is a, c, g, or t
  misc_feature (292)..(292): n is a, c, g, or t
gaaatacagtaaaatttgactgtttaaaatgttggccaaaaaaaatcaagatttaatttttttatttgtactgaaaaactaatcataactgttaattctcagccatctttgaagcttgaaagaagagtctttggtattttgtaaacgttagcagactttcctgccagtgtcaggaaaatcctatttatggaatcctgtcggtattccttgggtatctggaaaaaaatacccaaatagntacccttacatgagttattttcttaggtttggaaaagttaaaaggaanttggcntcacacttatttaccaaattaccaggttctgg

SEQ ID NO: 7848 - DNA, 358 bp, Homo sapiens
  III.1476 (R24055)
  misc_feature (261)..(261): n is a, c, g, or t
  misc_feature (311)..(311): n is a, c, g, or t
  misc_feature (345)..(345): n is a, c, g, or t
gtttctttcaatttcattttttttgtgctctgatttttgctatttattttctgctgttaactttgggtttagtttcttattgtttctctagttccttgaggtgtgacattcagttgtcaatttgttgttttccagactttttgaggttggcatttagtgctacaaacttttctctttgcactgcttttgctgtatcccagagtttgattacttgtgttattattatcatttatttccaatagtttattaaattttcatctngatttcataggttaacacaaaaattattgagggagggattgtttaccctncccatttatttgtacaggttttgaagggggcccntttgtagggagga

SEQ ID NO: 7849 - DNA, 320 bp, Homo sapiens
  III.1477 (R24105)
  misc_feature (300)..(300): n is a, c, g, or t
  misc_feature (305)..(305): n is a, c, g, or t
  misc_feature (316)..(316): n is a, c, g, or t
ctaacaagaagatgttacaaacataaatttatgtgcacctaacacaggagtgccaagattcataaaacatttactactgaatctaagaaatgagacaggcagcaacacaataatagtggtggacttcaccactctactgacagctctagacagatcatcgagacagaaagtcaacaaaggaaataatgggacttggaactacactctgtaataatggaacaaaacaggtatttacaggacattctacccccaaactgcaggatatacattttctcatccactcctggaagtttcttccangggcnggccctttggntcca

SEQ ID NO: 7850 - DNA, 410 bp, Homo sapiens
  III.1478 (R00037)
agaatctcgcactgttgcccaggctggaatgcagtagcgtgatcttggctcaccacagcctctgcctactgggttcgagcgattctcctgcctcattgggcactgaatttgtggatattcattatattattagtataagtaaaataaaaataagcaaaacagggtcatgcttggatcaatgaggatactatgttatgagccaaggaaaaactgaggagccagagacctcaagaagccaaacatacaatgtataaacaacaaaacagagtaagaagctattttaaaatacagtaaaacaaaagaggattggtttctcaaatgtaaaaccacacgctttctgagggccttgaccctaaggacactagtagttacagaaagctttccctttctacccctaggagtttcaatgg

SEQ ID NO: 7851 - DNA, 400 bp, Homo sapiens
  III.1479 (R02516)
  misc_feature (375)..(375): n is a, c, g, or t
  misc_feature (387)..(387): n is a, c, g, or t
  misc_feature (392)..(392): n is a, c, g, or t
  misc_feature (399)..(399): n is a, c, g, or t
tctgatgcaaatttgcttttatgaaaatttaaaatatggtccaatccactggcaaatgcatctgtaatacagatatgataggatgcaagttccacccccagggacagcaattatatgcacttagcttaggtggttggtatatttgcttcctttcttcccacttagttttttgccttaaaagctttcttgtgcgcgcctctcatcgcaaactgcccttgaatcctgcctttgatgtgaggaacagggactaactgggcgttaaatcgggcattttctacatcagggtctccagcctgctcttgacctgacttccaacacacaaagcagcgggcattttgttgtctggtcattttctgtaagtgttaccggggcccntggcctgggtantaccnttccttnt

SEQ ID NO: 7852 - DNA, 435 bp, Homo sapiens
  III.1480 (R33112)
ttttattttaaaaagcaccactgcttacagacaaaactgtaatagacatggcttgggaggaaaaaatacatatatatgaattatggcttgaaaatttctgaatatcagtatttaacagtgattttaaaactctgccatcacaccaatcttcagtgtaagaaagaaacaaatctgcatcacatcttcaagtcctaaggatccatttcacttcatggtaccctcaaaatacttgccagctctgtgttctcacgcagaaggtgactttcataatctgcaccttcaaaatatattgtcccaaggtacctgggggaacgtgtgtgagggattaacctgccaaaatcctctctgggcaccgggggggtctaaaaaattcttggtaaaccctttggggaatgtttctgaccaccatcaccagggataaccctcttctgggcc

SEQ ID NO: 7853 - DNA, 398 bp, Homo sapiens
  III.1481 (R33260)
  misc_feature (357)..(357): n is a, c, g, or t
  misc_feature (375)..(375): n is a, c, g, or t
ctacctgcaagcattgaattcagggaaagttctgaagattcatttttgtctgccattataaattatactaatagctctacagtccactttaagttgtcccctacatatgtattatatatggcatgccggtatgtattgtccaaccagtacagacctgacatcagccctacagagcgcacacataaagtcattgcagtcgtcaacaagatgggtgaggcatgatgggagggtgtcatccaggaaacaggaaggaatatttgcaggggcacttgccttctgggatgggcaaatgcatctggaacttcttcaactttcattaaggcaaggacccgaggaccttaggtccgggttccacantggggatggctccaaggngtttttagggcacattggggttc

SEQ ID NO: 7854 - DNA, 346 bp, Homo sapiens
  III.1482 (R71156)
  misc_feature (243)..(243): n is a, c, g, or t
  misc_feature (275)..(275): n is a, c, g, or t
  misc_feature (318)..(318): n is a, c, g, or t
  misc_feature (335)..(335): n is a, c, g, or t
  misc_feature (340)..(340): n is a, c, g, or t
  misc_feature (345)..(345): n is a, c, g, or t
cccacttgctcacctcttggagcctttccgacagtattatctccaagccgagcactccctgccagcgctcatccagatcaggcatgattgggatcagtacctggtgccatccgatcatcccaaaggcaacttcgttccccaaggatgggtccttcccccgctccccagcaacgacatctgggcaactgctgttaagctgcattagtaaagatgctccagggagtgttggtccagccagcggtncttttccagctgtaaatattagcgatggttcnatcttttgctgtatactaaactgcaacttttaaattccatgtnggcattcccctaccctngaagntatgnt

SEQ ID NO: 7855 - DNA, 280 bp, Homo sapiens
  III.1483 (R71653)
  misc_feature (39)..(39): n is a, c, g, or t
  misc_feature (40)..(40): n is a, c, g, or t
  misc_feature (96)..(96): n is a, c, g, or t
  misc_feature (117)..(117): n is a, c, g, or t
  misc_feature (139)..(139): n is a, c, g, or t
  misc_feature (143)..(143): n is a, c, g, or t
  misc_feature (156)..(156): n is a, c, g, or t
  misc_feature (173)..(173): n is a, c, g, or t
  misc_feature (177)..(177): n is a, c, g, or t
  misc_feature (205)..(205): n is a, c, g, or t
  misc_feature (208)..(208): n is a, c, g, or t
  misc_feature (221)..(221): n is a, c, g, or t
  misc_feature (229)..(229): n is a, c, g, or t
caacctttgtattaaatttattatatatatatatatccnnactttacacaattataattactgttaatatactttgaaattttttaaacttttcanactgtttttaaatctataccntatttgatttatataatatatncagngaaattgcaagtncatactctggggcatangccnctatgtgacgcaattgtgtgacctaccnctngagtcctctaccngaaagttngactctgaaattatcacttgaaacatgctttgaaaaagtcacagttatcta

SEQ ID NO: 7856 - DNA, 310 bp, Homo sapiens
  III.1484 (N73977)
  misc_feature (69)..(69): n is a, c, g, or t
  misc_feature (179)..(179): n is a, c, g, or t
  misc_feature (273)..(273): n is a, c, g, or t
  misc_feature (275)..(275): n is a, c, g, or t
  misc_feature (293)..(293): n is a, c, g, or t
ttttttttttaccggggcgttcctgagtttatttggggcacacccagacgagggccctgcacctagaanaaggtgttgggcctcttggtggtgaagcgtggcttgtgctgacggcgcaggacccggtgggcagcgggaacttgatcttggagtcgtggaactgcttgacagccggccgngcacttgctggccgcgatctcctccaccttcatgatctgaatggagtgggctcgggcgcggtgccgggcaccaatgtctcggtagcactgggtnanagcgcctgcggtggtcangtcccggtattcccggt

SEQ ID NO: 7857 - DNA, 600 bp, Homo sapiens
  III.1485 (W02233)
  misc_feature (5)..(5): n is a, c, g, or t
  misc_feature (9)..(9): n is a, c, g, or t
  misc_feature (33)..(33): n is a, c, g, or t
  misc_feature (551)..(551): n is a, c, g, or t
  misc_feature (593)..(593): n is a, c, g, or t
gaacngtangagcactgccatgaaggcctcggnacgctacgagagtacaaggtagtgggtcgctgcctgcccacccccaaatgccacacgccgcccctctaccgcatgcgaatctttgcgcctaatcatgtcgtcgccaagtcccgcttctggtactttgtatctcagttaaagaagatgaagaagtcttcaggggagattgtctactgtgggcaggtgtttgagaagtcccccctgcggttgaagaacttcgggatctggctgcgctatgactcccggagcggcacccacaacatgtaccgggaataccgggacctgaccaccgcagcgctgtcacccagtgctaccgagacatgggtgcccggcaccgcgcccgagcccactccattcagatcatgaaggtggaggagatcgcggccagaagtgccgccggccggctggtcaagcagttccacgactccaagatcaagtttccgcttgccccaccgggttccttgcgccgtcagcacaagccacgctttaacaacaagaaggccaacaacttcttctangtgcagggcctcgtctgggtgtgcccaaataaactcaggaangcccggt

SEQ ID NO: 7858 - DNA, 170 bp, Homo sapiens
  III.1486 (AA016016)
  misc_feature (156)..(156): n is a, c, g, or t
tgttacgtcttccatttctcccatttttcatcatctacctgtctacacttatgttcttatatttatgtaccttattcacttttcttctgtctttcctttgttgaacctgaaagaggactctctctagcctcacatagtgatctactaatttcttgnccggctggcctgcc

SEQ ID NO: 7859 - DNA, 463 bp, Homo sapiens
  III.1487 (AA016105)
  misc_feature (178)..(178): n is a, c, g, or t
  misc_feature (334)..(334): n is a, c, g, or t
  misc_feature (340)..(340): n is a, c, g, or t
ggtcttcagttgtttagacgaacgatttggatgatcctaaatttctttgaaacttttacatttagagttccaaaaatttgtttttctccaagattaaagcaattctagcatagtagcagcatgctgcatcaacaagttgatttttttttaaagtgtatgtcttctattgaagagctcngatgaagttcttaactcgttgtctctttaattaaaccagagaacagcaaagcttgtttttttgccaatcgcaaatttatactcaatttaaaccatggcttttaacaaaattcctatactaaaataactcttcacacaagaatcttagtggattttnttatanggttcttcggttaaccagcaaaactcaaccaaaatttgttggcatttagtaaacaaaattactttttaaattatgccttcctaatttctcccattcaggaactttggatttcctcttcaaagg

SEQ ID NO: 7860 - DNA, 266 bp, Homo sapiens
  III.1488 (H98233)
  misc_feature (8)..(8): n is a, c, g, or t
  misc_feature (252)..(252): n is a, c, g, or t
  misc_feature (260)..(260): n is a, c, g, or t
cacgtatnaacattgtattttaataatactctttgtcacttcaatttaaatcattccattatgaaaatttcttaattgaagggagactatttcttcaaaactctaaattaaacagagctttatcaattaagtttacagcaatatagcctttagaaatacatatttcttcattttataataatacttcccctttaaaaatttgccatggtttgtcacagatttaaaatacaaggcacctaatgctataaaagnataatacngtaaat

SEQ ID NO: 7861 - DNA, 486 bp, Homo sapiens
  III.1489 (N73460)
  misc_feature (390)..(390): n is a, c, g, or t
attgaattattttattgaatgatgacacccaaactgagctagaacataattctggctctgctagtacatcttctgtgtgatcttggacaagtcactctactttcctttcaattttcttttctcacagggagataatcataaaaacgactgtaaagtacagcacttcatagagtgctttttgtttaaagagctgacaataaatacgagtctcaaggtctaggaaagcctccctcacaacctgagctgcttgaggacaagggattttcttttgaatcagcagtaccttatttgtgtatctgtgatagagttcctggtacataagaaggtctcaataaatatgtgaatttatgaatattaggcagattgcaaccttggacaggccactggccnctttaaatctcctttctggtgatcttttaatatttaacatctaaaaggccgccggctacttggctttggggataagtatccccggtatggtacttt

SEQ ID NO: 7862 - DNA, 435 bp, Homo sapiens
  III.1490 (R37814)
  misc_feature (424)..(424): n is a, c, g, or t
caaaaaggaattttttacatttattaactgagggcctatttatgagccaggcactgggtccagtcctgggttgatagctgaaagagcttagctttcccccttcttctatatgggaagaggctcttacgtactatgtgtacgaccaatcatagaaggggatagaaggtactagaaaacctgtaagatgcagcacaaaatatgtgaatgtacttcattttgggtgtagaatgttttaagctaatactttctaatgtatgcttactgatataaccaggggacattaaaatattataaaagcacagaggcattgtttttgggagtggcctctgaggcctttctaaggacacagccagtgggtaggaatagccatgggactgtgtttattaacccggaaagcttgcttcccccttcaaaggggcctttntataacccatt

SEQ ID NO: 7863 - DNA, 379 bp, Homo sapiens
  III.1491 (R37884)
  misc_feature (213)..(213): n is a, c, g, or t
  misc_feature (306)..(306): n is a, c, g, or t
  misc_feature (337)..(337): n is a, c, g, or t
agcaaagggaagagcaagtgacactctaacttcaatttttgtctgcagccatgaaatgagaattctctttgcaagatctttatgaggcttgtagtgtgtgttttcatggtgcaatttgaatgtgttttctaaaaagttagcaattagctgtaattctgtttgtaatagaaaaacttgtttgcattcggcctcagtacatagtgacttgcggtncctctgtgatcgatagcagggattactctttaaagggcttagtatattctgctaatgtttatttgaaagacattacagtgatgctttataaangggttttagtcaaccatatggaatgggggtnttttctaggaggacagcttgcctgccaaaccaactaggccac

SEQ ID NO: 7864 - DNA, 407 bp, Homo sapiens
  III.1492 (N73782)
  misc_feature (88)..(88): n is a, c, g, or t
  misc_feature (368)..(368): n is a, c, g, or t
caagtgactagtgtttaatctcagaaacatttgcattcagagtacgttcccttagaattttctcctctccactccatgaggagtggcnatgtgctttattatatcaacaagactaagaagccgcacccgagtggtcccactcaaaaaagagatttctgtttctacctcaaaatgcagaaaccattacagattaaaagagaaacacacacacacactttgagaaactcgcccttcctcatcttcaaagtgtggggtatgcattccagatctctcagcctgatggacagcttggaagtggaagggaccaattgtccagcaagtggactttgccccatggtccattggtggccttgtggtcttcctaagcnaactcagaaactccttcaaatccaagccccccagactac

SEQ ID NO: 7865 - DNA, 164 bp, Homo sapiens
  III.1493 (N99403)
cgtgaatgctttaatctgaagatgactttgagctcattgaccatattaatctttcatcaaacaaactggatgttgtttcattaacaaaaaactcctccacaccaaggagtgtttagtaacttctgcacagaggactcatccatctcttgcttatgtttgggaca

SEQ ID NO: 7866 - DNA, 149 bp, Homo sapiens
  III.1494 (T95334)
attttaacaacagttttaatagaaaaaaaatcaactgacttgaattaagccagtgttcttgacacccactgggccaagagcattaaaacaaaacaagaccggagaagttaataaacacagctaaagacaaaattggacaaaataaaaca

SEQ ID NO: 7867 - DNA, 417 bp, Homo sapiens
  III.1495 (T95424)
  misc_feature (366)..(366): n is a, c, g, or t
  misc_feature (400)..(400): n is a, c, g, or t
aacccaaacctcctaacagcctccaaattccgagcagccaagcatatggccgggctgaaagtctacaatgtagatggccccagtaacaatgccactggccagtcccgggccatgattgctgcagctgctcggcgcagggactcaagccacaacgagttgtattatgaagaggccgaacatgaacggcgagtaaagaagcggaaagcaaggctggtggttgcagtggaagaggccttcatccacattcagcgtctccaggctgaggagcagcagaaagccccaggggaggtgatggaccctagggaggccgcccaggattttttcccctccatggccagggttttccagaagttacctgcgcttcanccggcagcagaattaccacagcttggagagcttncttgcagcacttggctt

SEQ ID NO: 7868 - DNA, 476 bp, Homo sapiens
  III.1496 (R45971)
  misc_feature (336)..(336): n is a, c, g, or t
  misc_feature (343)..(343): n is a, c, g, or t
  misc_feature (410)..(410): n is a, c, g, or t
  misc_feature (471)..(471): n is a, c, g, or t
ttttttttttttttaaaataaaaaatgtaatctttattagttttgcacattttaaatgttggttagcattatttagcataatagtagcattttccagcatgcagttcacgaatacagtttatctaagtagttttaaggaaaagaggagcctatggtttgcttctgtaagaaacacaaaatgtcctgatgtaattgactatataagttgactactctgtttttgtgggaaaaaaaaattatggaaggcccacattctatttaggaacaatctaggaggcaggcattacttccaaaggaaatggaaaacattaaaccggaggtcaggaaaaaaggganccaaaantaacataggcacttaccctttcaatttcggttaggtggcggggtacttacccgggaaattttaattnaattttttaaaccctttttcccattggccaggcttatttgggggtttgggttcgtggaccntttta

SEQ ID NO: 7869 - DNA, 223 bp, Homo sapiens
  III.1497 (T85204)
  misc_feature (219)..(219): n is a, c, g, or t
cagaaattattcccaaattgaccgatgcgttacatttttttttttttgataaaattcattaaaagcaggaagccatagggacttcacatatagcttcctgcctctcacttgcatagttacttacctgtgatggccagctgagtcacaaagaaggtcattcttgacttcttctttctcctccatgtggaaaaaagcacaacggagttttccaacaatggntaaa

SEQ ID NO: 7870 - DNA, 357 bp, Homo sapiens
  III.1498 (T89160)
  misc_feature (255)..(255): n is a, c, g, or t
atgctgctatgacagaatacccaagactgagtaatttataaagaaaagtaatttatttctacagtgccagggtctgggaaggtgctggtatctggtgagggctttcttgctgcatcattccatggcagaaagtgagagggtgagagagggacaagggaggggaactgaactcattcctttatcagtaacccactcctgcaataactaatccactcccacaataacaacattaatctattcatgagggcagagctntcatgacctagtcacttcttaaaggttctaccttaactccattgctttgggggattaaatttcaacatattaaacccttgggagggacacattccaaaccac

SEQ ID NO: 7871 - DNA, 1326 bp, Homo sapiens
  III.1499 (U85642)
ttcaaatataggttttatattctttcagaaattattcccaaattgaccgatgcgttacatttttttttttttgataaaattcattaaaagcaggaagccatagggacttcacatatagcttcctgcctctcacttgcatagttacttacctgtgatggccagctgagtcacaaagaaggtcattcttgacttcttctttctcctccatgtggaaaaaagcacaacggagtttccaacaatggtaaaaacaaagaggacccacagagttatcaattgctcagtctgcaagaaacagagaaaaataaaaccagtgtaccagdgagaactggagttctttacagaatgcctgccccaggctggatttcttcctcctagccacatatccctacttttggaagctctactctcaagaaaacaatgacaaaatggtcttcatttacaccagctgcagagtaaattaatgcaccttttaaaaaacttttggaaagatacgtcaagagacaaaaagtttgtattctttggtcaggtaattgtaacactatgtgaaaagtaggtcaagatgtgaaaaagaacacccctgtcagaaatatgtccatgtttattataaaaagaaattagaaattgtttaaagataatagggtagctaagtaaataaagcacttcaattcagtgaactattacagcatagctattaacaatgacaaccatgaagactatgtagcaatattaaaaatacctataatataatggtaagtgggaaaacatgataaaatcatatactgggtatgattacaactctgtaaaattatatacatagcaaaaaggctgaaatacagtaaaatgttaaaagcagtcatattagggtgtaattatgggttatcttttgttcatttgacagaattttataagacagtaatattaaagttctactgaagaatgtttctgtggtttgaatgtgtcctccaagggtttatatgttgaaatttaatccccaaagcaatggagttaaggtagaacctttaagaagtgactaggtcatgaaggctctgccctcatgaatagattaatgttgttattgtgggagtggattagttattgcaggagtgggttactgataaaggaatgagttcagttcccctcccttgtccctctctcaccctctcactttctgccatggaatgatgcagcaagaaagccctcaccagataccagcaccttcccagaccctggcactgtagaaataaattacttttctttataaattactcagtcttgggtattctgtcatagcagcatgaaacagattaagataaatgattaattagt

SEQ ID NO: 7872 - DNA, 260 bp, Homo sapiens
  III.1500 (N80404)
  misc_feature (258)..(258): n is a, c, g, or t
gaggcctgggcaggatttacagagggctccatgccagctccttcctgccgggtccacttctggtgtagggtaaacacctgcccattcatgtcctagtgttgatagaataatcattttctttcagtacagtttcctttttttttttttttgccccagctttttagatgtagcacttaatgccagttctcgagctccccaaacttaagggacacaggtcaacaagcagtaggtctttggaaagctccgctctctcacatngg

SEQ ID NO: 7873 - DNA, 368 bp, Homo sapiens
  III.1501 (R64109)
  misc_feature (14)..(14): n is a, c, g, or t
  misc_feature (16)..(16): n is a, c, g, or t
  misc_feature (326)..(326): n is a, c, g, or t
aaatttcattaagngntttaatatggtatttggaaaatacgaaaacaattaaaaatcatatataagtatcaaaataatttttaaagtcctttttaaaggcacttaactgttctaatcctaaatgaaagaaaataatcctaaatcaatattgttctccctcccatttagaaaaagccttgaaactcgattgaattttcttccaagcatacttaaaggaccaacaatcagtctacaattctaatcctttcctattaaaattcctgtgggataggatgggtgttaggtttataggcccaaactttgttggggaaataatttggaggggnaaaaaattaaaaccccggggggagggccccctttcacgggtt

SEQ ID NO: 7874 - DNA, 362 bp, Homo sapiens
  III.1502 (R64203)
  misc_feature (283)..(283): n is a, c, g, or t
  misc_feature (297)..(297): n is a, c, g, or t
  misc_feature (327)..(327): n is a, c, g, or t
gagtatttgcattcagggtgtcctgaatatgattgattctgtattagattgtgttctaactttcttactatttaaggattggttctaaatcttcacattataaaagattaaaaacagtgagagggagctatcacacaggtactattaaaagctgtatttggaatatgtgtaccaatatcagttttccttttgtagtactgaatggcagtagaagaatcagcagccaatcctcaaagtttaaatcatttaaggaaatggggaaacaaaattccagggtaaatancaaggactgaaaanctaggattttaaaatagtgggttttagganaacagggatatccacaagtaaccgttttttccaat

SEQ ID NO: 7875 - DNA, 462 bp, Homo sapiens
  III.1503 (H50968)
  misc_feature (73)..(73): n is a, c, g, or t
  misc_feature (396)..(396): n is a, c, g, or t
tgcatagggctcggcgtgggcaggactcatccccaggactgtcatcttctgacctgggttctgctcccaactntttatgatctgctttgaccactggaaatcccagcactccctttgggacatcactgacagagacctgggctgagaggacagcttccatttcacaaacagtttttgcagactcacagctactgatgaatgcgtcctctttgccttttttcagtgtgtcggaactccccaaagaattttgtttctttgattgggtggcaacataagtatctgcaatattttgtaacctgtcgatactacaacccaaacttccagtcagtttttgtggattgcgttagtagtgaagaagtaggggaatgctggtagggttctaggaacggcagcatntggggcggccatctgttgtgggattaatattagagggaattctcttccttcatatgggtgaaggtt

SEQ ID NO: 7876 - DNA, 465 bp, Homo sapiens
  III.1504 (H51623)
  misc_feature (15)..(15): n is a, c, g, or t
  misc_feature (16)..(16): n is a, c, g, or t
  misc_feature (398)..(398): n is a, c, g, or t
  misc_feature (431)..(431): n is a, c, g, or t
  misc_feature (437)..(437): n is a, c, g, or t
caaagagtacatttnntttaaaattgtaatggactttctatgattcatcaggtgttgatcaaacaaaaatgcattgttgggttttacattttgaagacccttcttgaaggatgctgtggtgaagatattatttatatgaatgagaatggagagtttaagttggatgtagactctaatgctataatccaagatgttaagctgttagaggaactattgcttgactgggaagatatggagtaaagcagagcaaggtgtttggggaaactttgctaggcagctctaggaagtcctcatcagaggcagatcaccaccaggcaggatgtttaatattaaggcagttattgaaagctcaagtgggttcatcactttctactgacttgtccgggttttgccggggntacaaggggggggcactcacacccctgcccccnggggtnggccagttcctttccggggggaagtgcg

SEQ ID NO: 7877 - DNA, 326 bp, Homo sapiens
  III.1505 (AA708301)
ttagttttattgtagtgagtagtatttttaattttcttgaaaggcacccaagaataattacttttgtgaaccaaaactatataaaactgtacagaataaatatttcatagaaatctaactatgccttcttgtaaaataaagctacattgtccctctcttgaggcaacttaaaccacttacctttagaagtgccttttgctactgatttatggcatctatcaatgtacatcaataaaaataaaataatttttcctatttactttacaactgtgaattacttgccacaagaaatgtatttctattatggtcattcagatttacaaaga

SEQ ID NO: 7878 - DNA, 388 bp, Homo sapiens
  III.1506 (R21303)
gagctgttggattatcttgacagtattgactgcagtttagaggacttccaggccatgctatcaggaagacaatttagcatagacccagatctcctggttgatcttttcactagttctgtgcagatgaatcccacagattacatcaataatacaaaatctgagaataaaggattaaactaccaagaacaatgtagttcagccagtttcggaagagggaagaaaatctaaatccaaaccagataaggcagcttatccagtataccgcctttccacttcttgcattcctcgatggggaaccctgcttcttctgttgaacagggcgagtacaacaggcatcatcagaagttttgtcctctgtaggataaaccccataggaggtttgatggag

SEQ ID NO: 7879 - DNA, 404 bp, Homo sapiens
  III.1507 (R46149)
  misc_feature (343)..(343): n is a, c, g, or t
  misc_feature (354)..(354): n is a, c, g, or t
  misc_feature (366)..(366): n is a, c, g, or t
  misc_feature (374)..(374): n is a, c, g, or t
  misc_feature (388)..(388): n is a, c, g, or t
ttttttttttactcaacattcattgtatttattttactaaacagtatggttcaaaaaaacacaaaccggaaaacctttatttaaaactagtccaactaactggatggggctcactccatcccatcccacccccgatctttctatatatatggagctggaaccctatcagacagcgagcattcacgtacactttgtctttcctgttgaacatggaataaacgtctttggaacataaatggaacttctctggaaccaaaaggaaacaaatgaaggtttttacaaggatacgggcactttatgtttcccagttttaaaattagggccaggtggaaaaattttttanttaaaattacngggggccggggnaggctttnggggggggttttancccttgggtttccaat

SEQ ID NO: 7880 - DNA, 1869 bp, Homo sapiens
  III.1508 (AF052106)
ctgacacatgggctcctgctcctgaccaaactgagcaagaccagaatagactgtcacagaactctgtaaatctgtctcccagcagtcacgcaaacaacttatcagtagtgacttacagtaaggggctccatgggccttaccccttcggccagtcttaaacgggtgtcagcaagaagaaaaattaacaaaagacagaaggcctgactttggggggttagggcaaggggttcctctggattgcagaccacatcgcacagacccctggctctgaccccctctcatcccggaagaagaggaagaagcagaacagactagttttgagtaaactcagtatgcatgtgtgaatgctgaatcacaggaatggtgttgaggctaccaagaagaaatccatgcagccactttgggttttgttataggcatcagtctaacaagtcattaggtcactcgggaagggggaaaaagtttaaaatgggggaaaaaaagccatctttttaaacaaaaattattttgcctacagaaaggttgtagttttgagcacatgttaatttttttccctctttccccacttttatttttttaaataagggataacatattctttatagaatagtgcttgttctggaagagattcaggtgaaaagttggcgtggcatgtttgaggactctgcggatcagtgctacaggagtacatctgccctgccacatgactccagaagtctctgaccccatttgtttttaatggcatcagccaatgagttatcacccttttcctcctcttttctctttaatcttctgttgatttacacctttgacatttgtattcgtcaaccctgtggcttgttagcatcagaacctctctgaagaccaaacttccctgtgtggccagcagaggaagccttgaggatagatctcgggtgacgtgggattttctaagcctgagaggtgtccttctgcacacccttgtaacaattaaaattgcttttcttccatgtttctcttggcagagagaaatgccatcatgcttactgctcttttggattcttcatgcagtggcttcccatttgctctgggaacagtgcctctgtgctggttatatgtatgcaccacatgtgcacacacgggtgtcggtgcaactcaccagcaggtgtgcagtaggcaagcttgaaggtggcccatgcttctctgttgtcacacaacacctttccctgtttctcttcagttgtcctctgatattttcacagcctgttagtggcggctgatctgtagaggtatgaaaatacagccccaaagggggaatttgtcatggggaagggccagccactgactacttgatcttggagaccacatttagatggaaatgagaggacctccacagccccgcctccctgccaggatgctagattattggctgggaggtgggcaagtggcagcccagctgaagcaagaggctgattgactggctgctcactcaggcaggtggcctgccctggcatcctgtagattctgagcaggttgagatgtggatatctccatgggaagcttgaaccaggctagaacagctgtctgccaaagatacaagaatatgcaaagtccctcttacccccctccttccctcaagtcttagttggtttgagagccagggatatggatccagggtgctgttgcagggtcacctgcctgttaccacacccccatccagctgggtggtgggtgagggtgtgagacaggcagggagaccaggtaatgagtggctgcaaggagtcatatagcctgggtgtgggtgagggtctgcctgcctgtttctgtctgggtgtctgagttccaaaaaatgtgtgttgtttgttcctcctcaaaaaaaaaaaaaaaaaa

SEQ ID NO: 7881 - DNA, 423 bp, Homo sapiens
  III.1509 (R38200)
  misc_feature (68)..(68): n is a, c, g, or t
  misc_feature (127)..(127): n is a, c, g, or t
  misc_feature (230)..(230): n is a, c, g, or t
  misc_feature (246)..(246): n is a, c, g, or t
  misc_feature (274)..(274): n is a, c, g, or t
  misc_feature (296)..(296): n is a, c, g, or t
  misc_feature (326)..(326): n is a, c, g, or t
  misc_feature (348)..(348): n is a, c, g, or t
  misc_feature (367)..(367): n is a, c, g, or t
  misc_feature (376)..(376): n is a, c, g, or t
  misc_feature (420)..(420): n is a, c, g, or t
ttttttttgaggaggaacaaacaacacacattttttggaactcagacacccagacatgaaacaggcanggcagaccctcacccacacccaggctataatgactccttgcagccactcattacctggnctccctgcctgtctcacaccctcacccaccacccaagctggatgggggtgtggtaacaggcaggtgaccctgcaacagcaccctggatccatatccctggctntcaaaccaactaaganttgagggaaggaggggggtaagagggantttgcatattcttgtatctttngcagacagctgttctagcctgggttcaagnttcccatggagatatccacatnttcaaccttgctcagaatnttacaggantgccaggggcagggccaccttgcttgagtttagcaggccagttnaat

SEQ ID NO: 7882 - DNA, 424 bp, Homo sapiens
  III.1510 (T77326)
  misc_feature (37)..(37): n is a, c, g, or t
  misc_feature (52)..(52): n is a, c, g, or t
  misc_feature (53)..(53): n is a, c, g, or t
  misc_feature (349)..(349): n is a, c, g, or t
  misc_feature (384)..(384): n is a, c, g, or t
ccaaactgagcaagccagaatagactgtcacagaacntctgtaaatctgtcnnccagcagtcacgcaaacaaccttatcagtagtgacttacagtaaggggctccatgggcttaccccttcggccagtcttaaacgggtgtcagcaagaagaaaaattaacaaaagacagaaggcctgactttggggggttagggcaaggggttcctctggattgcagaccacatcgcacagacccctgggctctgaccccctctcatcccggaagaagaggaagaagcagaacagactagttttgagtaaacttcagtattgcatgtgtggaatgctgaatcacagggatgggtgttngagggttacccaagaaggaattccatggcagccanttttggggtttttgtttttagggccttccagtcttaacaa

SEQ ID NO: 7883 - DNA, 317 bp, Homo sapiens
  III.1511 (N75041)
  misc_feature (287)..(287): n is a, c, g, or t
gcgaccgcctgcccacctcctccacctgcttcaacctgctcaagctcgcccaactacagcaagaagagcgtcctccgcgagaagctgcgctacgccatcagcatgaacacgggctttgaactctcctagctcctgtcccagccctgcctccagggctcctgggctgccagggaccttcagctcccagaggcagtgtggtcctgggaatgtgaccaacatgccaggtgacattggcccctagaccctctctatagccatgagactccttgtggggtccagaaattttnacgcccccgacaagcactatacaagatctt

SEQ ID NO: 7884 - DNA, 612 bp, Homo sapiens
  III.1512 (W05719)
  misc_feature (291)..(291): n is a, c, g, or t
  misc_feature (380)..(380): n is a, c, g, or t
  misc_feature (413)..(413): n is a, c, g, or t
  misc_feature (427)..(427): n is a, c, g, or t
  misc_feature (453)..(453): n is a, c, g, or t
  misc_feature (467)..(467): n is a, c, g, or t
  misc_feature (512)..(512): n is a, c, g, or t
  misc_feature (542)..(542): n is a, c, g, or t
  misc_feature (584)..(584): n is a, c, g, or t
agtggggtgcatagaggcttggcgaggcttacctgagtaagagatttcagaaacggaaggagaggatctcacgcacagtaggctttgtacactcaacccatgctgcaaaaaccactctagactcttggaactcctgggacttgttcatacacagctcactcagacggctaaggaaagacagactcccaaaagatcaaactagctaaaagaagcccctctgccatcaccaggaagaatggacccgtgttggtggaatctggaggtttattttctgcagccctgtgccttggnatcacctggagatgctgtgtagtgctgtcgtggggcgtctaaatttcttgaaggcacaaggagtctcatggctataagagaaggtctangggccaatgtcaccttggcatgttgggtcacanttcccaggacccanactggcctctgggaagctgaaaggtncctgggaagcccangaagccctggaagcaaggcttgggacaggaagctaggagagttcnaagcccgtgttcatgctgatggggtcgcanttcttcgcggaagacgctcttcttgctgtagttgggaacttnagcaggtttaacagttgaagaagttggc

SEQ ID NO: 7885 - DNA, 457 bp, Homo sapiens
  III.1513 (N93158)
  misc_feature (439)..(439): n is a, c, g, or t
  misc_feature (448)..(448): n is a, c, g, or t
tttttttttattaaaaaactttttaattggtttacaaaggaggctacagactacattgaaactaatctttgtacaaaaggccaaaaaaaaaaaaaaagtcccaaaacaccaagagacaaaaggtaggaggaaagacaagaaaggaagatacaaaaggagcaggaagaaacttacttagggacaagattagcatcatacatacctaagagtggggggtgagggggaagaacaagatgagagagcatttaaaagcatttacccacacagccctggtgataattggattggaatcaaaacaaacacagcatgagattttaagaggttttaaaaggcaccagtggtgtggctggttattgccagtgttaagagagaataacttgggttttagcaccagagattggagcaccacccatccctccagaggtgccagctttggaangggaacagncctggggag

SEQ ID NO: 7886 - DNA, 194 bp, Homo sapiens
  III.1514 (W38739)
  misc_feature (1)..(1): n is a, c, g, or t
  misc_feature (55)..(55): n is a, c, g, or t
  misc_feature (188)..(188): n is a, c, g, or t
nttcggaacgaggcttatgtacaaggatgaaagaaaggtcgcagcagtagctttngggaaagggaggaagatatggcacttctccaaccccggaaaacattgcttttgaaaactgctgataaaatatgagccggttattacttctgtttgggagactgtgctctctgtggtgcctctcttggctctantccaca

SEQ ID NO: 7887 - DNA, 307 bp, Homo sapiens
  III.1515 (R10122)
  misc_feature (192)..(192): n is a, c, g, or t
  misc_feature (246)..(246): n is a, c, g, or t
  misc_feature (247)..(247): n is a, c, g, or t
  misc_feature (301)..(301): n is a, c, g, or t
attgcacttttatttgaatgtaatatttgggacaattattcaaaagggccaatatttcccaatttaatctgaggtcataataaaacaagcaacaaaacagtgtttgggatttcagtttctcacccttatcatcaagactcactgcctcccatcatcaatatttattgagcatttacagtgtactaggcacantagaacatacagaaaacattgtccctgctcttgaggagcttacattctaaaagnnaaaatacaccttttttaaaatgggcatttttgtttgggggttttctgcaaaggnactgag

SEQ ID NO: 7888 - DNA, 324 bp, Homo sapiens
  III.1516 (R10530)
  misc_feature (263)..(263): n is a, c, g, or t
  misc_feature (314)..(314): n is a, c, g, or t
catgaacaatccaagcataattgttaagaacacgtgtattaaattcatgtaagtggaataaaagttttatgaatggacttttcaactactttctctacagcttttcatgtaaattagtcttggttctgaaacttctctaaaggaaattgtacattttttgaaatttattccttattccctcttggcagctaatggggctcttaccaaggttaaacacaaaatttatcataacaaaaatactactaatataactactgtttccntgtcccctggtcccctctcttcctccccaccctggaaaaaatggggttccnattttttcgg

SEQ ID NO: 7889 - DNA, 346 bp, Homo sapiens
  III.1517 (R35518)
caagatggcagtgcaaatatccaagaagaggaagtttgtcgctgatggcatcttcaaagctgaactgaatgagtttcttactcgggagctggctgaagatggctactctggagttgaggtgcgagttacaccaaccaggacagaaatcattatcttagccaccagaacacagaatgttcttggtgagaagggccggcggattcgggaactgactgctgtagttcagaagaggtttggctttccagagggcagtgtaggagctttatgcttgaaaaggtggccacttagaggtctgtgtgccattgcccagggcagagtcttcttgcgttacaaactcctagggagg

SEQ ID NO: 7890 - DNA, 436 bp, Homo sapiens
  III.1518 (R51086)
  misc_feature (405)..(405): n is a, c, g, or t
tttttttttttatagacaacagaaatttatttctcacagttctgaaggctggaaagtgccagatcaggtggccagcagatctggtgtttgatgagggctctctgcttcctaaataatgttttcttgctgagtcttcacatgggagagggaggccaggcaactccctccaacctctcctataaggctctaatctcattcatgagggttccaccctcattccctaaggcaatttaatgccttcccaaaggccccacctcttactacgatcgctttgggtattgggttctgacacatacattacctcatttactttcaaaatagtagtgtgggcatttttaaaaactataaaatattttcatggcattaaaaaaccacacacttatatatttttaacagtttaaaggnttaaaatggtctggtttcccaccaatttagg

SEQ ID NO: 7891 - DNA, 397 bp, Homo sapiens
  III.1519 (R33116)
  misc_feature (11)..(11): n is a, c, g, or t
  misc_feature (12)..(12): n is a, c, g, or t
  misc_feature (13)..(13): n is a, c, g, or t
  misc_feature (14)..(14): n is a, c, g, or t
  misc_feature (374)..(374): n is a, c, g, or t
aattaatatannnntgaaacaatttggtaatgcagactgggacaatgtcactatacccactgaggtaactgagacatgagagctttccaacccaaggtcagaaatcactgaaacagcttatgaaaccctcactattttagtgttttaaattcagaatgctgtatttttctcttgggcaacagataaccttcatttttgacgtaaatgataatggtggcttcacatggcccagggcaaacttcaaaacaaaactgtagggaccacatttttctaacctggaaaataagtcatataaggggtccaaataagggtaaaatttgggaatttaattattcctggggggaaaatattgtgggggtatccctggtatcctngggcccggtaatcccgggtttta

SEQ ID NO: 7892 - DNA, 352 bp, Homo sapiens
  III.1520 (R33265)
  misc_feature (326)..(326): n is a, c, g, or t
  misc_feature (346)..(346): n is a, c, g, or t
tcaatttaaaaaattacacatggaacaagccaaataaatatttttaaaatactgtttttatttagagagagagacagctgtataaactgctctgtgtatgtgtaaaacattgataatacattagacataatttgcagaaactactaattttcacatcatttccaagtagaactgcaaaggtacagtactggtttagctttatggttaaaagcattgggctctaggagccaggataacacaggcttcaaaccctagttctgccgtttactgggttgtgttaccttggggtagggttacttggacctttttgaggcttccaggtttcntaatcttttattttaatggngttttt

SEQ ID NO: 7893 - DNA, 294 bp, Homo sapiens
  III.1521 (H22560)
  misc_feature (73)..(73): n is a, c, g, or t
  misc_feature (111)..(111): n is a, c, g, or t
  misc_feature (166)..(166): n is a, c, g, or t
  misc_feature (269)..(269): n is a, c, g, or t
  misc_feature (278)..(278): n is a, c, g, or t
  misc_feature (287)..(287): n is a, c, g, or t
ttttttttttttttttttttttttttttttataaagaacaaaggggtttaatgggttgacagttccacatggntgcaggggcctccacaatcatgggcagaaacgggaagncaaagctatccctcttcacatgggcagcaacaaggaagtgctgacccaaaggggnaaaagaccccttataaaaccatcagatcatgagaactcactcactgtcatgaggaacagcatggcgttaaccaccaccatgattcagtcacctcccactgggnccctcccanggaattttnggtttta

SEQ ID NO: 7894 - DNA, 582 bp, Homo sapiens
  III.1522 (H24413)
  misc_feature (16)..(16): n is a, c, g, or t
  misc_feature (19)..(19): n is a, c, g, or t
  misc_feature (20)..(20): n is a, c, g, or t
  misc_feature (21)..(21): n is a, c, g, or t
  misc_feature (24)..(24): n is a, c, g, or t
  misc_feature (36)..(36): n is a, c, g, or t
  misc_feature (44)..(44): n is a, c, g, or t
  misc_feature (50)..(50): n is a, c, g, or t
  misc_feature (89)..(89): n is a, c, g, or t
  misc_feature (102)..(102): n is a, c, g, or t
  misc_feature (110)..(110): n is a, c, g, or t
  misc_feature (447)..(447): n is a, c, g, or t
  misc_feature (494)..(494): n is a, c, g, or t
  misc_feature (535)..(535): n is a, c, g, or t
  misc_feature (545)..(545): n is a, c, g, or t
  misc_feature (567)..(567): n is a, c, g, or t
caggatattcctcggnagnnncancccccaggaagnaaacaagncttggnccactatgctatcatgcaagtttccgctgaccactgagntcggccgtgaagnaagatagnaagaaaacaacacgcttgtgttcactgtggatgttaaaggccaacaaggcaccagattcagacaggctgtgaagaaggctctatgacagtgatgtgggccaaggtcaccaccctgatttgtcctgataaagagaagaaggcatatgttcgacttgctcctgattatgatgctttcgatgttgtaacaaaattgggatcacctaaactgagtccagctggctaactctaaatatatgtgtatcttttcagcataaaaaaataatgtttttcataagaatgacaacttaattagaatcaaatctataagctttaagattttacgtttctagtagtatantattagctatttgactagactcaagcagagtagggattttgcttgtntttttcaataatgataattttgaagatatagttgttttttncacccaaggnactatattagtcttatttgctnaggtttatccaaatc

SEQ ID NO: 7895 - DNA, 438 bp, Homo sapiens
  III.1523 (H96908)
  misc_feature (195)..(195): n is a, c, g, or t
  misc_feature (231)..(231): n is a, c, g, or t
  misc_feature (372)..(372): n is a, c, g, or t
  misc_feature (405)..(405): n is a, c, g, or t
  misc_feature (426)..(426): n is a, c, g, or t
  misc_feature (432)..(432): n is a, c, g, or t
aagaaaagatatttattatttacaccactgaaattagtcctgtaagaacaatatacaccatgtttctttaaaaggatcaattcctttcaaatacaagaactgtataaagcaatattgtcaacacaaaacagtggtcacattacgtatctgcaggcttaagcattgcaaataatatatttttttaatcttatggcnagatattttcactgaaacagtgttagcacttagacnagatatagctggaacagaacaaaaactttttgttcatgctttttaggaatgaatcagtgatatgtcccttttaaaaatttattgcctttaactgcttttatgacaatggttttaggaagattcctactgtagccaccaaanaagagactcattccttggttccgtagtttttantccttcagtcttctggcttcncatacnaaagac

SEQ ID NO: 7896 - DNA, 404 bp, Homo sapiens
  III.1524 (H08210)
  misc_feature (201)..(201): n is a, c, g, or t
tttttttttccttttagtagttttgttgttatgtctgcctggctgctgagggaggaaggatgaagggctggcgttgggaccaggaagggggcacagggtggccgggaagggagaagtagttgctgagcaatgccatgggaggagtggttgccgtgcacaatccagagtcttgggtaagagtgaggggcccctcaggggggnaagcagaggcagttcaggccccagagcagtgcctctcccactgctgctgggagcaaggaggggcagccacactctgctatctccaaggggcagttcctatgggaaagggcccggctttgttcattttccggggggaatggggtgagagtccacctccatccttccttttccaaatcttactcttgccttgcagggacccgcgt

SEQ ID NO: 7897 - DNA, 548 bp, Homo sapiens
  III.1525 (H08308)
  misc_feature (5)..(5): n is a, c, g, or t
  misc_feature (7)..(7): n is a, c, g, or t
  misc_feature (405)..(405): n is a, c, g, or t
  misc_feature (414)..(414): n is a, c, g, or t
  misc_feature (486)..(486): n is a, c, g, or t
  misc_feature (491)..(491): n is a, c, g, or t
  misc_feature (506)..(506): n is a, c, g, or t
  misc_feature (514)..(514): n is a, c, g, or t
  misc_feature (528)..(528): n is a, c, g, or t
  misc_feature (535)..(535): n is a, c, g, or t
tacgngncacagcaccagcaacatgggcagctacaaggcctactacaccctcaatgttaatgaccccagtccggtgccctcctcctccagcacctaccacgccatcatcggtgggatcgtggctttcattgtcttcctgctgctcatcatgctcatcttccttggccactacttgatccggcacaaaggaacctacctgacacatgaggcaaaaggctccgacgatgctccagacgcggacacggccatcatcaatgcagaaggcgggcagtcaggaggggacgacaagaaggaatatttcatctagaggcgcctgcccacttcctgcgccccccagggccctgtggggacttgctggggccgttcaccaacccggacttgtacagaggcaaccgcaggggccgnccctcccgnttgcttccccagcccacccacccccttgttacagaatgtctggtttggggtgcggtttttgtaattggtttnggatnggggaagggaggganggcggggngaggggagggtttnctttagncttttcgtgggtt

SEQ ID NO: 7898 - DNA, 396 bp, Homo sapiens
  III.1526 (R13224)
  misc_feature (386)..(386): n is a, c, g, or t
acggttcctgagattatgaatcccaaacactgagcacggcgtctaacacatggcagttgcttatccatattgcttccccctttctctgattccctctaagaacacaagactcccagcctggcctctcctgagccagccttccacccctcaatcctggggcttgggtctccaccagtcagtgcctctcccatcctgacctctggctccatcactgccctccctcttatttctatctcaaaagcttggggatgaacaaagatcacttcgttgtcctcagtgacactgggattccttaaagaataaaagatagggagatgctaggattctttatattaaatgcttttcaccaggggaggccaaaatttaattaacaggcatggaacagngggccggggg

SEQ ID NO: 7899 - DNA, 412 bp, Homo sapiens
  III.1527 (R40306)
  misc_feature (262)..(262): n is a, c, g, or t
  misc_feature (292)..(292): n is a, c, g, or t
  misc_feature (333)..(333): n is a, c, g, or t
  misc_feature (352)..(352): n is a, c, g, or t
  misc_feature (384)..(384): n is a, c, g, or t
  misc_feature (400)..(400): n is a, c, g, or t
tttttttttaacattttaatttcattttatttttagagtaataaagccttctctttatggcaaatgatacagttttctagataaagtagtggtctcaagtgtagtttacaagcaagtcatttaataataaaaatatagcttataaaaaaagaatacttaggatgatttaaggaactatattaaatgaataaacgttcatggggggaaaattatggactatgttataggaaatggattgatatttgggggaatcattaatttntccccaactctatatccacggcttgatccnctttttacccccaggcctacacctctctgtttgcatacctnctgtggacgggggggttcntcgtctctggaggactggtaaaaggcgggctncttgggttttaatganccttctaccgtt

SEQ ID NO: 7900 - DNA, 438 bp, Homo sapiens
  III.1528 (N27933)
aaaactgaaaaatattttaatatgcctatgtatctttcacagagtggattcaactgcacataagaagaacataatgttgaagtcatttcagagtgcaaatatcattgaattgcttcattatcaccagtgtgactctcgatcatcaacaaaagcagaaattctgaaatgtttgctaaacctgcaaattcagcatattgatgccaggtttgctgtcctcctaacaggtaattcacaggcgcattttactcagttaatgccaaaattggtcagctctaggaatgtcaaagttagatacctgatgaagagtatcaggtatctaaatggcttggcatcccatggataccagaatcacccaaatctgctgaagctgaagcccttatataaaatgtagtatttgcaggtaactacacaatcctcctatggtatgtaagtcagttc

SEQ ID NO: 7901 - DNA, 325 bp, Homo sapiens
  III.1529 (N40693)
aaataggtaattttagtagatggttacttcatttagtgataatttaggaattcctatttatgccaaatagcaattccacccctaaacaaacactttaaatttatagcatgaagtatgtaaacaacagtttcccaactgtttcccttagacacaaatgtcaatatttgccatcaacaactccaactcacatgggaaagttacataaaaagtgttcttaccaatagctactcctaaatggagctgctattttttctatgttttctataaagttatttacatctgtaacaaggattccattattttcaaagacttctctggggatagt

SEQ ID NO: 7902 - DNA, 473 bp, Homo sapiens
  III.1530 (N67734)
  misc_feature (468)..(468): n is a, c, g, or t
acagataaatttgtttttaataaaggagttaattttctttcaatcctatataaaacaatagcaattaaaaacttcatttctgaaagtaaaatatttacatatgaacaagtaactgtgcaaaatttacatgaaaaaatggaaagacagggatttcctaaaagacaaaataaaaggtgtaacagttctcaggtgttgataaaaaatactgatcagcgttcagttcacacgcgctcgaattaaagtctaatgtgagaattcacacggagaaagccagagtatttacagtcataaaagtactatcaatagacaatttcatacaataacctctgaaaatagaaagaaccaattagtatatttgtaataaaaaaataggtaccaagaaggggctttgccctgggacgtctggtaaaagtcggcccaaggcttgcatacagtctcctagccaaataattataggttacatagccncttcc

SEQ ID NO: 7903 - DNA, 500 bp, Homo sapiens
  III.1531 (W03580)
  misc_feature (8)..(8): n is a, c, g, or t
  misc_feature (10)..(10): n is a, c, g, or t
  misc_feature (243)..(243): n is a, c, g, or t
  misc_feature (244)..(244): n is a, c, g, or t
  misc_feature (245)..(245): n is a, c, g, or t
  misc_feature (253)..(253): n is a, c, g, or t
  misc_feature (257)..(257): n is a, c, g, or t
  misc_feature (409)..(409): n is a, c, g, or t
  misc_feature (424)..(424): n is a, c, g, or t
  misc_feature (461)..(461): n is a, c, g, or t
  misc_feature (488)..(488): n is a, c, g, or t
cctcgtgncnttcctgccaaacaagccatatataaagactgatggaatcgttagcaaataattagctgccctctgtcaactcatagcagtttctgcattatttgtgcattttggtttagttctacctaacttactatgtaggtgtatgtctacagccgatgacctcatttcgtttattttatttttgtaatagtcagttggcaaagcaaactgattttttagactatttatcttccttccctnnncctcccancccnctctctttctctgccccctgccctcccctcccctcccttcccctccactccgctgagaatcctggaggaatacacaattcatcgttgcacccccacctcagagtgtaatcgcatttctgcttggtagaggcgagccagcaaaggtggccctntgaatgtgtggtcanatctgtacaaatgcattttatttgtatagtttgtaantgtaaagttaaagagagaaactttcancataaatatatt

SEQ ID NO: 7904 - DNA, 361 bp, Homo sapiens
  III.1532 (AA069451)
  misc_feature (234)..(234): n is a, c, g, or t
  misc_feature (257)..(257): n is a, c, g, or t
  misc_feature (296)..(296): n is a, c, g, or t
  misc_feature (309)..(309): n is a, c, g, or t
  misc_feature (329)..(329): n is a, c, g, or t
  misc_feature (351)..(351): n is a, c, g, or t
taagtttattaagctggtacacttaaatttaaaagactaaatttgcaagtttgggtttcctgagaaaatataattcaagtaaataaagtggcaatttattagaatgcagctgcagatttagatgtcaacaatcttgtattccctgaaaactcctgaaaggattctccactgactaaataattttatactatatccaacaaaaaattatatgagtggggctttaaaaccactganaagttaaaactaattatcaagcngaattacttaatcactggctttgtgagtgctcagaatgnaagatatatatcntaacactaacaatccagatngtatggaataaaagggtaaagntttaggggac

SEQ ID NO: 7905 - DNA, 202 bp, Homo sapiens
  III.1533 (AA069489)
  misc_feature (185)..(185): n is a, c, g, or t
  misc_feature (195)..(195): n is a, c, g, or t
gaaaccatataaagaattagattttgctctggcactgctgaacatagcatagtgacaccttaaggcaccagaaagtactgttcagattggctagctagtagctccagcgtgatccctgtttgccactttaatgtccagccttgttttttcatattcccttgagcttcaggtagccaaggctaganagatataccngtcactg

SEQ ID NO: 7906 - DNA, 378 bp, Homo sapiens
  III.1534 (R68609)
  misc_feature (14)..(14): n is a, c, g, or t
  misc_feature (65)..(65): n is a, c, g, or t
  misc_feature (236)..(236): n is a, c, g, or t
  misc_feature (263)..(263): n is a, c, g, or t
  misc_feature (285)..(285): n is a, c, g, or t
  misc_feature (293)..(293): n is a, c, g, or t
  misc_feature (322)..(322): n is a, c, g, or t
  misc_feature (343)..(343): n is a, c, g, or t
  misc_feature (372)..(372): n is a, c, g, or t
ttctcctgtcttgnctgaaatggcttccccacaggacatttttaaatgattcttaattgcagggnagccaagtggagtaggtctgttgctggcacgtgaatactggctgaacctgtgcaatgtagtaattgctaaagtttgcatctgctacataggggtctggctggtaatagcaagtgacattagccacattaggaatgacattttggtcagctaacacccggatagccagcatngtgataaggtttaaagtctgtcttctntcatgtcccatcaggcacactngtctgctnatttaccactccatgaagggtcatgaganactgataactttgcggtcttncaatcccacaaagtggtgtctgcaaatgnggactc

SEQ ID NO: 7907 - DNA, 412 bp, Homo sapiens
  III.1535 (R68610)
  misc_feature (131)..(131): n is a, c, g, or t
  misc_feature (164)..(164): n is a, c, g, or t
  misc_feature (375)..(375): n is a, c, g, or t
  misc_feature (393)..(393): n is a, c, g, or t
  misc_feature (399)..(399): n is a, c, g, or t
ggtgaagggtacttcgccatgtctgaggacgagctggcctgcagcccctacatccccctaggcggcgacttcggcggcggcgacttcggcggcggcgacttcggcggcggcgacttcggcggtggcggcantttcggtgggcattgcttggactattgcgaaancctacggcgcactgcaatgtgctgaactgggagcaagtgcagcggctggacggcatcctgagcgagaccattccgattcacgggcgcggcaacttccccacgctcgagctgcagccgagcctgatcgtgaaggtggtgcggcggcgctgggccaagaagcgcatttgcttccgcgacttgcgccttaaacggcttcggcagccaagccatnttcctgcaacaaggacangcggcntgggttacaaagg

SEQ ID NO: 7908 - DNA, 462 bp, Homo sapiens
  III.1536 (H28701)
  misc_feature (106)..(106): n is a, c, g, or t
  misc_feature (330)..(330): n is a, c, g, or t
  misc_feature (444)..(444): n is a, c, g, or t
ttttttttttttttttttggctttcatggagaaaaccagaaagaatatgacttacgtatgcaaaaccatagtacactaaagcccagagacactcaataatcctggntaatcctggcccactgtatttatgcaaagccaatttagtaatggaagtaaagcagtagactcaatacaaaataacaatcaaaataatatctttttgaccttgtaaattattaataaatattaataaaacatgaaatgtatatatgttctacaccaacggttatcaaaagaccacctgcactaggatttaaatggggatgttggataataggttcttcctagggncccggactgggacttcaatggattccaaactctctgggatatggggtgtccccgaaattattacatttttcaagggggctcccccggtggcctttttatggcatttaggtaccnctggactggagggctgga

SEQ ID NO: 7909 - DNA, 396 bp, Homo sapiens
  III.1537 (H28830)
  misc_feature (324)..(324): n is a, c, g, or t
  misc_feature (369)..(369): n is a, c, g, or t
  misc_feature (390)..(390): n is a, c, g, or t
aggccctacatggcaatggtaacatcatctcaaagccaaggaaatgggcatgttgtttatatcgccacaggattttttttgtgtgcaatagtctacctttttctttccaaagtctatcatactatggcaaaagatgtagtcattcaatagagttatgcaattctagctttccatcaattacaaaaaatatgactatctaccttgattaattggattgttatacaaacagccctgcagtagtaaacgtccagtgtgtgggcagtgggggcatatgtttgtcatatccattagggggagcacttgggggcccagaggactgatganttgggcccacattgtctttactacacagctgtccatagcttcttntgataggcaggtgatagttcntgcaag

SEQ ID NO: 7910 - DNA, 335 bp, Homo sapiens
  III.1538 (R99086)
  misc_feature (1)..(1): n is a, c, g, or t
  misc_feature (2)..(2): n is a, c, g, or t
  misc_feature (3)..(3): n is a, c, g, or t
  misc_feature (8)..(8): n is a, c, g, or t
  misc_feature (70)..(70): n is a, c, g, or t
  misc_feature (130)..(130): n is a, c, g, or t
  misc_feature (219)..(219): n is a, c, g, or t
  misc_feature (284)..(284): n is a, c, g, or t
nnnaatgntgaatatacttcctttatcgagggtgacaaaccaaaaaaaaaaaagaccaaacatgtaaaancccagggttctagaaatacaaactcaattcattcaaattcaagctcatccagaccctggncacaaaccctagtgaggtgcatgtgagcaccaagtcagggagagggggcaggagtgactctgaggccaacagagagggtgggaaggggntctccctaggtcccctgggtgatcaccccccacccaaactggtatctccacattctcaatgactntgaagacataccagggctctgtccttttggcccccaccccatccctgggcc

SEQ ID NO: 7911 - DNA, 374 bp, Homo sapiens
  III.1539 (R99629)
  misc_feature (46)..(46): n is a, c, g, or t
  misc_feature (122)..(122): n is a, c, g, or t
  misc_feature (158)..(158): n is a, c, g, or t
  misc_feature (162)..(162): n is a, c, g, or t
  misc_feature (200)..(200): n is a, c, g, or t
  misc_feature (283)..(283): n is a, c, g, or t
  misc_feature (360)..(360): n is a, c, g, or t
ggtggttgcctgcgggaggccgccgcgggtcatgtgaccggaaggnctcctcacggacgccgtccctcctcggcgcggcctgagccccggcccgaccccggccatggggtgctgctacaganggagaacgaggactcggaccaggaccgagaggagcngaantgctgctggaccctagcagcccccctaccaaagctctnaatggagccgagcccaactaccacagcctgccttccgctcgcactgatgagcaggccctgctctcttccatccttgccaaganagccagcaacatcattgatgtgtcttctgcagactcacagggcatggagcagcatgagtacatggaccgtgccaggnagttacagtacccg

SEQ ID NO: 7912 - DNA, 194 bp, Homo sapiens
  III.1540 (R09746)
  misc_feature (1)..(1): n is a, c, g, or t
  misc_feature (157)..(157): n is a, c, g, or t
  misc_feature (162)..(162): n is a, c, g, or t
  misc_feature (190)..(190): n is a, c, g, or t
ngggaggctgccctgggaagttcgctcctgggtcgcctcgctgtgacccgacgatgacttgcctgctcagcccagtctgatccacgcaccctcagccggacggatccacggtttccccaccgcctccctccagttcctgctcaccggccccccgtcntcggnaccaaagttaccacaaaaggctaaggangttt

SEQ ID NO: 7913 - DNA, 418 bp, Homo sapiens
  III.1541 (R09747)
  misc_feature (4)..(4): n is a, c, g, or t
  misc_feature (6)..(6): n is a, c, g, or t
  misc_feature (7)..(7): n is a, c, g, or t
  misc_feature (357)..(357): n is a, c, g, or t
  misc_feature (383)..(383): n is a, c, g, or t
  misc_feature (396)..(396): n is a, c, g, or t
  misc_feature (414)..(414): n is a, c, g, or t
tttncnntcttattcgtgtatttcttttgacactttacccctctatgaagcctcagaggtgttttaaaattgtgttaggaaacacacagagataagaaaaggcaaatggtcctgatctagtgtctcagggaagagtctggaaaggaaacgcggcgaagtggggtgggagagggggcctgtggttttgcttctgtccgggctaaagactgagtaaggtagggcccctccttctgcggatgggtttctctctcattccaccctccacccacctccggttccgcgtgcacgcgaaggatagtccagtgggcccacagataacgaccatcagagattaaagaaggaaagtcagcgagcttnaacacaggcgtcccgtgttggaaatntccaaggagaccnccagaagttcgcaaaccngagt

SEQ ID NO: 7914 - DNA, 433 bp, Homo sapiens
  III.1542 (R35385)
  misc_feature (390)..(390): n is a, c, g, or t
  misc_feature (423)..(423): n is a, c, g, or t
aagtataactttctaaggagagaagggttgtcacattataaaatctttaggaaaatgtgaactggaaaacgcttcggtcagttttagtgacatagcctgtgatgatgggtctggtgactattattgcggaccgtggtacccagttttaggaatgtggagaaaggaattctgttgattccgttgaggaatctgtagcgtatgcattcgttctgttaagagcaaatctaggagaagtgcttcagctgcccagtgcgccgtggggagtgttttaacggatcgtgtcgcaggagagcacagcccagcgttggggccgggaccgctggcgcccgacgtcggaagcatacaggtatacttatggcaagtgtatttttgccacaacaaccactgtcnttgttaccttttttttgaacaagatatattccntcctggccta

SEQ ID NO: 7915 - DNA, 379 bp, Homo sapiens
  III.1543 (R49686)
  misc_feature (11)..(11): n is a, c, g, or t
  misc_feature (345)..(345): n is a, c, g, or t
ttttttttctngtttccaaagtttattaaaaatcaaagaatagaaaaactttacataaaaatatgtcaattttagcttccatattgttgtccacacacaaaaaaatcgaaacatgatatctttttgtcaaacctgtagcacgcgaccacagtggtagccaggccaattcatttgcttcaccatgacggaaatgggaacatgggtacctgtgtctatgcaatcgagttttaaaatgcacaccccacgggacacggcactgccaggacccgtagtggtttccttaatgtggggtttacagttcaatattgctaatgcgtaggagattaggtacagggcctacagatncagtttttataaaatattcttttatccaataggg

SEQ ID NO: 7916 - DNA, 395 bp, Homo sapiens
  III.1544 (R94490)
  misc_feature (82)..(82): n is a, c, g, or t
  misc_feature (96)..(96): n is a, c, g, or t
  misc_feature (337)..(337): n is a, c, g, or t
  misc_feature (375)..(375): n is a, c, g, or t
ccacagaaagtaaagcaaatccaggcttagaattagacctgtttgtggggagcagaaaggattgggatggggaggcatagtngagcaacacatctnagacaggaagtacggcccctgttctgttggcagtggacctcttcagtcagtagccaaggtcacagccctgagccgatgatgctccatgctgctgcctggatggaaagcattcgaggggaccttttggccaccagcattatgctgacagtcccagctcagacagaaggccttcttgtggcctcttttctgaggtaggaaggaaggttccgggtcaggaagtacatggtttgttgtaggtctnatgtgaacagttttgttgtcactaaaccagcccttggntagcaagaattcccagaaga

SEQ ID NO: 7917 - DNA, 382 bp, Homo sapiens
  III.1545 (R94491)
  misc_feature (35)..(35): n is a, c, g, or t
  misc_feature (143)..(143): n is a, c, g, or t
  misc_feature (327)..(327): n is a, c, g, or t
  misc_feature (337)..(337): n is a, c, g, or t
  misc_feature (347)..(347): n is a, c, g, or t
  misc_feature (355)..(355): n is a, c, g, or t
  misc_feature (362)..(362): n is a, c, g, or t
ggctaaaaaatctgcctacctcagcctcccaaagnactgggattataggtgtgaaccaccgttcccagactaattgtattgttaattttcactgtttttttttccccaaaatgtttttgatttatggtttgttgactccatgnatgtggaacctgcagataccaagggccaactgtttatccttcctcttctaaacagccatttttgtggggtttggggattgtctgagaaccagatgggcattggagggcaaagatgagaaaaggctaccttacattatgcaagaggtaaatggccagaagtaacagcagaggcctccaaaaacanactcatctcngtttttgggngagcaaancccgtcngtgttaggtactatgtgatt

SEQ ID NO: 7918 - DNA, 471 bp, Homo sapiens
  III.1546 (N54161)
  misc_feature (263)..(263): n is a, c, g, or t
  misc_feature (320)..(320): n is a, c, g, or t
  misc_feature (415)..(415): n is a, c, g, or t
tttaactgtattccttctccatttctgaactcagcgtctaaggtgatcctgactgtgcctctggtgaacgcaggaaggactggaaaactggggttgggtggggagttgagcaggggccttgctaagtgtgtggagctggagaccacctatagtttctgggctggattttataaaacacaacaccttaatatgttctgccaggtgtagtgaaaatgtgcctgatgaacttgaattcttacttgcttccaaaagctctatatganggggagcccaaattaggagatgaaaacgcaggagaaaaaaaaactaataataaattncaactggctgagttgtgtgggtccaacaaagagtaacagaattatacatccttcaaagccacgctggtttttgttgatttccatgtggaaccaantggcctaagctgacctccatttcccttccaacgcagtccagctgttggctttcaag

SEQ ID NO: 7919 - DNA, 462 bp, Homo sapiens
  III.1547 (N70642)
  misc_feature (250)..(250): n is a, c, g, or t
  misc_feature (257)..(257): n is a, c, g, or t
  misc_feature (268)..(268): n is a, c, g, or t
  misc_feature (292)..(292): n is a, c, g, or t
  misc_feature (420)..(420): n is a, c, g, or t
  misc_feature (462)..(462): n is a, c, g, or t
gacattaaatcgtttttattgaacaaaaaaagataaaacatggaagttgaatttactgagcaaaagcagctctccaggtgaagctgctatactttgtgctaaataaccttatgaactgagtatacagaatacatataatatgcaagttacctcaacagcaaaggagaaggagtagaatacagtttttgaagataaaatctggtcaagtgacaaattttgttgctcaaaatttctaagcccttatccaccnaaattcncgtatgggtcnacctaaaaggcattccggaatggngcatactgaattcccattttaatggaagctggctttttggaagaattccttttaatttcacatttccttggatgtggccactccaatttttaaaaaaaattatatttgacatatgtgcatgtgtgtangtggatggatggtatacacaccttaaaaacacccaacccctn

SEQ ID NO: 7920 - DNA, 337 bp, Homo sapiens
  III.1548 (R09752)
  misc_feature (226)..(226): n is a, c, g, or t
  misc_feature (261)..(261): n is a, c, g, or t
gcacaaggccaggttcccaagagctcagacagcacaggaaggtcctagaggttcctcagtgcagctggactctcctggagaccttcacacaccctgacatctgggccccgcgccacgagggtgctttcactggtctgcaccatggcccagggcctggggattttgaacagctccgcagtgaatgaaagggaacgggcctggctctggcccctgacgcaggaacatngagctgatccagggacatctcttcgcccgccactnggagttacgtgaagggggtcccgcttcattcaagtacttttgcagaggcacttgggccccttgcagagtttccagg

SEQ ID NO: 7921 - DNA, 421 bp, Homo sapiens
  III.1549 (R09753)
  misc_feature (5)..(5): n is a, c, g, or t
  misc_feature (9)..(9): n is a, c, g, or t
ttttntgtnaaatcatactttattctggagcctcttggtcaggcttgattcgcacactccctctgcagtgactccaggaacccctctcacagctcagagcggaagtgaaggctgcagctgccatcttctccgcatagtccgcatcgaagcgctcattctgcgccacggtgaaggtggtcttccagtccccagccatgcctttcctcatgaagggggagatgctgtggtccatgaactcccggcggacggtggtgtagttggtcatagggttcttcttcatctccttgaacgacgtgtgctcaaccatgaggtccacagtctcctctggcagggagcgccccacaaactccagggatctttttgaatctcccttttgggggttctccttcatgtcttcatagaagaggtagagaacagggtg

SEQ ID NO: 7922 - DNA, 474 bp, Homo sapiens
  III.1550 (H05691)
  misc_feature (166)..(166): n is a, c, g, or t
  misc_feature (169)..(169): n is a, c, g, or t
  misc_feature (401)..(401): n is a, c, g, or t
gaagctgtctgtgaggccatcctgcgcttgtttccctcagacactttgtttttcatgttttggcagaatctccaatgaaaactatgttcctcacgggctgaaggtggtgcagtgtcacagccagggtggcctgcgctccctcatgcagctggagagccgctggctncanacttcctggactccatgcagcccaagcacctgccccagcagtggtcagtggaccacaaccatcagaagctgctccggaaattcggggaagatcttcccatccagctgtcttgatagctgctttcctcccagttaggacaagtgggaagctggagccaaggttgaagagtcacctcttcccattttagtacatcattaattgtcaaagcctgtgtggacacaactcagaatantaacctaggactaatcccaggggtgctttttgctgggagcaaaggtatttttttgaagggagatttatgggtt

SEQ ID NO: 7923 - DNA, 631 bp, Homo sapiens
  III.1551 (H05692)
  misc_feature (407)..(407): n is a, c, g, or t
  misc_feature (440)..(440): n is a, c, g, or t
  misc_feature (447)..(447): n is a, c, g, or t
  misc_feature (472)..(472): n is a, c, g, or t
  misc_feature (489)..(489): n is a, c, g, or t
  misc_feature (512)..(512): n is a, c, g, or t
  misc_feature (525)..(525): n is a, c, g, or t
  misc_feature (540)..(540): n is a, c, g, or t
  misc_feature (551)..(551): n is a, c, g, or t
  misc_feature (562)..(562): n is a, c, g, or t
  misc_feature (569)..(569): n is a, c, g, or t
  misc_feature (588)..(588): n is a, c, g, or t
  misc_feature (600)..(600): n is a, c, g, or t
  misc_feature (606)..(606): n is a, c, g, or t
  misc_feature (631)..(631): n is a, c, g, or t
tttttttttttccttgtgcttacaagtagttttattattaattttagagtaaacatcaccaacttgggcacaattccaaaatagagctcttgttggattctggtcataaaattcttttttaagcttgttaagatcttataaaataagaaagttttcccaatactttagaaaaattactaatcattaataagtcgattttatactcaaagtaatggcctaacattttgaaagatgaaacaacgctcctcttttgaacatctaatgtattaagtaagctcagtgtcccagggcttcagagggagacagaggaagtcctcatattgcaacctggaccaggatgactctggggagtggaattaaatgcttaaaagagggtcagtcttgccaaattcggatggaggcacagntttacagggggaactggatactggatttctggntaaaagntaacttacttttcggaagggggttnaggctaaaaatcttgcngtttcgggggcggaggggtgcancagcggggcaacnaacggcttgaagggnaagctgagtgntttccaagtcnttggggngtggggttttgggtctttngcccccccgggnaaaggntctttcccggaagggttttcccctn

SEQ ID NO: 7924 - DNA, 271 bp, Homo sapiens
  III.1552 (T77816)
  misc_feature (237)..(237): n is a, c, g, or t
  misc_feature (257)..(257): n is a, c, g, or t
  misc_feature (264)..(264): n is a, c, g, or t
tgagactaacccagaaacatccaattctcaaactgaagctcgcactctcgcctccagcatgaaagtctctgccgcccttctgtgcctgctgctcatagcagcaaccttcattccccaagggctcgctcagccagatgcaatcaatgccccagtcacctgctgctataacttcaccaataggaagatctcagtgcagaggctcgcgagctataggaggatcaccagcagcaaggtgtncccaaggaggctgtggatcnttcaagnaccattg

SEQ ID NO: 7925 - DNA, 488 bp, Homo sapiens
  III.1553 (T77817)
  misc_feature (5)..(5): n is a, c, g, or t
  misc_feature (6)..(6): n is a, c, g, or t
  misc_feature (243)..(243): n is a, c, g, or t
  misc_feature (286)..(286): n is a, c, g, or t
  misc_feature (354)..(354): n is a, c, g, or t
  misc_feature (383)..(383): n is a, c, g, or t
  misc_feature (408)..(408): n is a, c, g, or t
  misc_feature (425)..(425): n is a, c, g, or t
  misc_feature (432)..(432): n is a, c, g, or t
  misc_feature (461)..(461): n is a, c, g, or t
  misc_feature (471)..(471): n is a, c, g, or t
attgnngaaatatatttatttggtgtaatagttacaaaatattcatttccacaataatattttagcaatgcattggaatgttaaaaaaaattctttgtattaatgattcttgcaaagaccctcaaaacatcccaggggtagaactgtggttcaagaggaaaagcaatttccccaagtctctgtatctaaaaaacactagtaccatgaaagataaacttaaaacatcaataacttaaataaganttaacattacttaaggcataatgtttcacatcaacaatcaaanttcattataataaaataaaacaggggtgtctgggggaaagctaggggggaaaataaggttaggctgcnggattcttggggttgtggggagtgaggtnttccaggtcttcgggagtttggggnttgccttgtcccggggngggcccntggggaatcccggaccccacttctgcctnggggggtccngcccaggtcctccctgg

SEQ ID NO: 7926 - DNA, 323 bp, Homo sapiens
  III.1554 (H89838)
  misc_feature (306)..(306): n is a, c, g, or t
  misc_feature (320)..(320): n is a, c, g, or t
ggcatcctcactttataacaacctactcttgtgggttcacttctccaagagtgagaactcctttcagaacgacattaatccctcttaacaacctaatcacctcttaaaggtaccacctctcaacactgctacattgcagaccaagcttcaacatgagatttggtgaggacaaatgatattcaaaccatagtagtcatttttttgtgtgtgttagttttgctggaatcttgtcaattttattgatctttacaaacagtcagattttgatttgagtttttaaaaagttgtggtaggaatattacacanatataatttggccntct

SEQ ID NO: 7927 - DNA, 349 bp, Homo sapiens
  III.1555 (H90688)
  misc_feature (68)..(68): n is a, c, g, or t
  misc_feature (102)..(102): n is a, c, g, or t
  misc_feature (142)..(142): n is a, c, g, or t
  misc_feature (259)..(259): n is a, c, g, or t
  misc_feature (261)..(261): n is a, c, g, or t
  misc_feature (347)..(347): n is a, c, g, or t
tattaaacagatatcttcagtttaatacaggagaacattttactgttgtacaatcatgttctcgtggnttgattgtttacagcctattccaaaataaaaggnctgtggaaggttaaaaaaaaaaaatagttaagggccaggngcagtggctcacacctgtaatcccagcactttggaaggccaaggcaggcagatcacttgaggtcaggagttcgagaccagcctggccaacatggcaaaatcctgtctccactaaaantncaaaagttggccgggcatggtggcacgtgcctgtaatcccagttacttgggaggctgaggcaggagaatcacttgaacctggggangc

SEQ ID NO: 7928 - DNA, 474 bp, Homo sapiens
  III.1556 (N29529)
  misc_feature (474)..(474): n is a, c, g, or t
cattaaatagctgtttcttttatagtagtaaatgttcatcactacccggggagagcaaagaaccatggaacggtagctaactttgggcaggttcattaaatttggtcaattcagaacattccaaattgaaatattaatagcaagcatgtattgtttcttctctagaaattttatcctcaatatagtcatcatccaattcataacgaatttataaaaatagcttttttatccaataattccagcaaggtaaaaataggagtttctttttctatatagcaaatgaaacaggctcactgaacatgaggggacttaggcttgctaagcttgccgtccatccactcacgacgaaaccacactcagtctaggcgtgtgccgttagtcaccgcacactggcagtttcgggtggcagcagcttctttcaaatccatgggccacacaaattcaaccaggcccactgagatctggctgggaacn

SEQ ID NO: 7929 - DNA, 436 bp, Homo sapiens
  III.1557 (N57468)
  misc_feature (21)..(21): n is a, c, g, or t
  misc_feature (57)..(57): n is a, c, g, or t
  misc_feature (304)..(304): n is a, c, g, or t
  misc_feature (358)..(358): n is a, c, g, or t
  misc_feature (391)..(391): n is a, c, g, or t
  misc_feature (429)..(429): n is a, c, g, or t
ctggccctgcccacatcagcnggctggtctttggagaacagtgactccctgcagtangggcaggagcagacgcacctgactttttggagtttgcacagcaaacatttttacacagttttatttctaatatgttttatatgtagatatagaagagtgcacttttgtatttcatagtaagcttaaagcgcgtctttgccggtgcagcgacttctttcaagtgtgtgtgtgtgtgtgtgtgcgcgtgtgtgcgtgtgtgtggatttttaaagaaattctttaaaggtttaacgctagaattggtgangaatgacacaccactccctccccaccttggaatccctaattagattaaggaatnagcgctgccattttctaaaccgtgatgcggttntcacctagttctgtggtccagcagatctcagttgtctngtgaatt

SEQ ID NO: 7930 - DNA, 449 bp, Homo sapiens
  III.1558 (H09939)
  misc_feature (431)..(431): n is a, c, g, or t
acttcaacccaggagtttgagtccagcctgggtaacatagggaaaccccatctcaaaaaaacaaaacaaaggacttagtttttatgtggctcataagtgtctctaagttataccaaaagtttgagcacaacagtagtagcagaatgcttagaataaaggcttgacttttaagctgacttttggaaggaccatacccacatagaggcatcttttctgctgtggtaattttttaaattaatacattgctttaggattacatctcaaagtaaataaaaaaatcaatatttaatttgtttttttcctgcaaataaattaaatgctgggaccataatgattatttttgcatagtaatagctggtgaagaagttgttttaaaattaaattgccaaaagtattacctcttggaaaaatttattttcccaaagtttttncatatgtcatggaaaccc

SEQ ID NO: 7931 - DNA, 245 bp, Homo sapiens
  III.1559 (H09940)
  misc_feature (198)..(198): n is a, c, g, or t
ttttttttcaatcccacagttttatttgtaaagaacaaagcatgaaaagtcatatttaaatgtactcccaaacctgaaaaacccacgtcagtttgtctgatatgtatgttaaagtgcttaatatcacaatactctttcaaattttatattatgttcagatgagaaaaaaaatccagttctgatgcattttgctaacantacaaagaaaaacaatataatttaaattcagaaaggctaattaaaaa

SEQ ID NO: 7932 - DNA, 479 bp, Homo sapiens
  III.1560 (H28872)
  misc_feature (339)..(339): n is a, c, g, or t
  misc_feature (375)..(375): n is a, c, g, or t
  misc_feature (464)..(464): n is a, c, g, or t
caaatattcaaaggacttcaagaaaggtttcagactgaaattcaaacagtgaataaacagttcccatgtgagccattcaaatttttggagccaactctaagactagaatattgtgaagcattggctatgcttagggaagctggagtcgaaatgggagatgaagacgatctgagcacaccaaatgaaaagctgttgggtcatttggtaaaggaaaagtatgatacagatttttatattcttgataaatatccattggctgtaagacctttctataccatgcctgacccaagaaatcccaaacagtccaactcttacgatatgttcatgagaggagaaganatattgtcaggagctcaaagaatacatgatcctcanctgcttaacaggagagagctttacatcatgggaatttgatttggagaaattaaggcttacattgattccttccgctttgggagcccctnctcatgctggttgga

SEQ ID NO: 7933 - DNA, 323 bp, Homo sapiens
  III.1561 (H28873)
  misc_feature (163)..(163): n is a, c, g, or t
  misc_feature (179)..(179): n is a, c, g, or t
  misc_feature (189)..(189): n is a, c, g, or t
  misc_feature (257)..(257): n is a, c, g, or t
  misc_feature (266)..(266): n is a, c, g, or t
  misc_feature (273)..(273): n is a, c, g, or t
acttacaaaatcagttggccacaaagttacacaaaaactacaattagctttaaaattttattgaaattcaagtttagaatttaacaaattaatacaatattacactgaatactttctaaccagtagtttagctttacataatttctaggcataacttttaagnactgatactttctggntaattttccntgatatgccaattatacattcattaaaatttcagatgctacctgaattattcttatctcaatgacagnatttaaaanaataagntcaaatactgaaaatctaagggcattaacactgggggcccttgtaatata

SEQ ID NO: 7934 - DNA, 407 bp, Homo sapiens
  III.1562 (W16834)
  misc_feature (363)..(363): n is a, c, g, or t
gagtgggtaaaactttaatatagaagtatagtattacatgaaaatagtatagaagtatagtattacatgaaaatagtatagaagtatagtattacatgaaaatagtatagaagtatagcattacatgaaaatggtattatggcttttttgtatgaaaggcccaaatacaaaagcattttaaaagctgttcctattaccataaccatgttttcacactctacttaataacagacttctcatgcacatgcattacagattgcatccgtaggtgggtccatgtgtggaaaagacccacatacccagtcttcagagatgggttctcttgggggccacagattcagtcttcctagttggaaaactctngcatgtcctttctaatttgcatagaccacaggacacctttctcg

SEQ ID NO: 7935 - DNA, 148 bp, Homo sapiens
  III.1563 (W31837)
  misc_feature (111)..(111): n is a, c, g, or t
  misc_feature (112)..(112): n is a, c, g, or t
  misc_feature (116)..(116): n is a, c, g, or t
  misc_feature (118)..(118): n is a, c, g, or t
  misc_feature (119)..(119): n is a, c, g, or t
gaaaacctgctgtcagcaattgctcctccgtgggctgttcaagggaagtgagatacttttgtactatgcatttcattttttaaggacctagaatttctgtccttcctggcnncgantnnaatacggctccattgggaatttaaaaagg

SEQ ID NO: 7936 - DNA, 432 bp, Homo sapiens
  III.1564 (R55662)
  misc_feature (304)..(304): n is a, c, g, or t
  misc_feature (324)..(324): n is a, c, g, or t
  misc_feature (336)..(336): n is a, c, g, or t
  misc_feature (369)..(369): n is a, c, g, or t
  misc_feature (410)..(410): n is a, c, g, or t
  misc_feature (415)..(415): n is a, c, g, or t
aggctccattgtctctaaattgctggcttccatgatgtgcaaagctggtctaactcatcttattactatggatttacaccagaaggaaattcagggcttcttcaatattcctgttgacaatttaagagcatctcccttcttattacagtatattcaagaagagatcccagattacaggaatgcagtaatcgtggccaagtctccagcctcggcgaagagggcacagtcttttgctgagcgcctgcctggggaattgcagtgattcatggagaggcgcaggatgccgagtcggacttggtggatngacggcattccccacccatngtcagaagtgtngctgccatccaccccagcctgggagatccccangcttgattccttaaaggaaaagcccccaattcacggttgtngggtngatgttgggagggaagg

SEQ ID NO: 7937 - DNA, 368 bp, Homo sapiens
  III.1565 (R55663)
  misc_feature (26)..(26): n is a, c, g, or t
  misc_feature (364)..(364): n is a, c, g, or t
ttttttttttattccttttttagttncagaaaataaatacaatcacatattccatatgcttgtctacaaaagcatctctaaaaatgtcatttactggacttgacagtataatcttttcggcttttcaattgcaggtatcatacagatcattttattttattaactttttaagcacttggctcaagcaactttggaagaaggctttgtgagcttacaaatcttattccaagtgttattttttaaacagttaaaactaaaacgaggtcttaccttttcaaaagaggagaataaagtttttcttttataaaaattgctccccaaactcacaaacacccaaaccgacataaaaagttgggtctatctnctta

SEQ ID NO: 7938 - DNA, 501 bp, Homo sapiens
  III.1566 (H29776)
  misc_feature (90)..(90): n is a, c, g, or t
  misc_feature (299)..(299): n is a, c, g, or t
  misc_feature (366)..(366): n is a, c, g, or t
  misc_feature (391)..(391): n is a, c, g, or t
  misc_feature (397)..(397): n is a, c, g, or t
  misc_feature (415)..(415): n is a, c, g, or t
  misc_feature (426)..(426): n is a, c, g, or t
  misc_feature (477)..(477): n is a, c, g, or t
  misc_feature (484)..(484): n is a, c, g, or t
tcaggacttcccaggcagcaacttgaatttgctcaccaacaattctgggacgcccaaagaccacgactcccctgagaacggtgcggacancttcgagagctcagactccctcctccagtcctggaacagccagtcgtccttgctggatgtgcaacgggttccttccttcgagagcttcgaagatgactgcagccagtctctctgcctcaataagccaaccatgtctttcaaggattacatccaagagaggagtgacccggtgggagcaaggcaaaccagttatacctgcagctgtgctnggccggctttcacagggaagtgggacctatttcagctgtgggcagtttctcctggggagctgctatncagacaaatccttgccagtcatttnatcagntgggatttggagacgggntggggattttnaaggtttggccgaccccgattgaggttgggcccgccggttgggggaaaganggaaaanttaaggcccaagattga

SEQ ID NO: 7939 - DNA, 466 bp, Homo sapiens
  III.1567 (H29777)
  misc_feature (215)..(215): n is a, c, g, or t
  misc_feature (331)..(331): n is a, c, g, or t
  misc_feature (365)..(365): n is a, c, g, or t
  misc_feature (400)..(400): n is a, c, g, or t
  misc_feature (414)..(414): n is a, c, g, or t
  misc_feature (422)..(422): n is a, c, g, or t
tttttttttatttcaaatacagttatataattattttaaattacaatatacaatttctgttaaatacaactgttaagggattctgagaacaattataagattataataatatatacaaactaacttctgaaatgacatggttgtttccttcccaccctcctaccctctcaaagagtttttgcatttgctgttcctgggttgcaaaaggcaaaagnaaaatctaaaaatagtctgtgtgtgtccacgacatgctcgctcctttgaggaatctcaaacaggccaggaaccatcccgtcccacggactgccggggcgccggggacgggcttccngggtgcctctttctcgaccatttttcacttaaangcactgtggggtaggaattagggctgtgccgttgnctggccacaggggngggcagcngggggtcaggagggcctgggttttggggttggcattaagggcca

SEQ ID NO: 7940 - DNA, 442 bp, Homo sapiens
  III.1568 (H81693)
  misc_feature (410)..(410): n is a, c, g, or t
  misc_feature (437)..(437): n is a, c, g, or t
ctttggcacatagaggatttgggggtctccatgttcagggcacaatggctttaataagtgctggaaaatcactgaagctaaaccaagagcaccagatcctctttacctaaatacccagtctttaacatgagctagtccctgtaccatagtattgtttcagctgtagttggttgtcatgttaataagacagctgcacgtctaccttcttttcttttgatttccattgtcttggtaagttattgttagggttatttttaatgtgccttccagccagaaaaatcagctgtctaaagaaggcattgcaattgtaatggggactcttacctcttaggaatgcaagattttccctcctccctccctcttctccatctctttccctcatgatttgaggaactgtaataatcctccanggtgggcatttacctacctgggaaacnggctt

SEQ ID NO: 7941 - DNA, 103 bp, Homo sapiens
  III.1569 (H81694)
  misc_feature (70)..(70): n is a, c, g, or t
gataataaaacataattgatatttgcttaagtaacaaaaaagttaagaaattgggttataagcaaaggancataagtgtaaaatgtgtagaaagataaatatt

SEQ ID NO: 7942 - DNA, 427 bp, Homo sapiens
  III.1570 (T84667)
  misc_feature (4)..(4): n is a, c, g, or t
  misc_feature (350)..(350): n is a, c, g, or t
  misc_feature (359)..(359): n is a, c, g, or t
  misc_feature (391)..(391): n is a, c, g, or t
  misc_feature (405)..(405): n is a, c, g, or t
  misc_feature (413)..(413): n is a, c, g, or t
  misc_feature (424)..(424): n is a, c, g, or t
catncttttatccacagccaaaagagaaatcctcagacacatctgaaggatccggacatggtctgggacttctggagcctacgtcctgagtctctgcatcaggtttctttcttgttcagtgatcgggggattccagatggacatcgccacatgaatggatatggatcacatactttcaagctggttaatgcaaatggggaggcagtttattgcaaattccattataagactgaccaggggcatcaaaaacctttctgttgaagatgcggcgagactttcccagggaagatcctggactatgggcatccgggatcttttttaacgccattggccacagggaaagttacccntccgggganttttttacattccggggtcatggacattttantcagggcaggaaantttttccnttttaattccnttc

SEQ ID NO: 7943 - DNA, 497 bp, Homo sapiens
  III.1571 (T90919)
  misc_feature (395)..(395): n is a, c, g, or t
  misc_feature (495)..(495): n is a, c, g, or t
gttaaatcctaaccttcattttcccctgggaaatagcattaaaattgttacacaatctgctatagaaagtgggattctctattttgaagccactagcttgcatttgcacatctagcacaggagaatcttcatccagtgatgagcgggttacacggatgaacgctaagcttcgctgcacaggtgcagggccccggctcacagatttgccttctcccttgccgccaagtgagatccggactgcacaaaggtgtgaatcgcattcttaggcttctcagcattgtacttgtccagaagagcctggggatgtgggctcccgtaggtcaggggtgggaccctcagtggaagttcttgacccgctttcttctgggatgaaaatttggtgcatccttcaggtnggcccgcaatgttctcacacagacgtttcctctgttcctcattcagcacgttcacataggaatgcccgcacctgagtaacgttatcatcattgggcagtntt

SEQ ID NO: 7944 - DNA, 399 bp, Homo sapiens
  III.1572 (H67025)
  misc_feature (231)..(231): n is a, c, g, or t
ctattcttgctgctctccaacttcacaggcctgaagcttcatttcttggccccttcggaagaagatgagatgaatgataaaaaagaggcagaaaccactgatatcactgaagaagggactagccatagtcctcctgagccagagaataatcagatggccatcagcaacaacagccaacagagcaatgagcagacagacccagagccagaggaaaatgaaacaaagaaagantcaagtgttcccatgtgccaaggggaactgaggcattggaagaccggtcactacactttaattcatgaccatagcaaggctgaatttgccctagacttaattctgtactgtggctgtgaaggctgggagccagaattatggcggttttacttcttaacattgccaaag

SEQ ID NO: 7945 - DNA, 364 bp, Homo sapiens
  III.1573 (H67026)
  misc_feature (20)..(20): n is a, c, g, or t
  misc_feature (161)..(161): n is a, c, g, or t
  misc_feature (223)..(223): n is a, c, g, or t
  misc_feature (294)..(294): n is a, c, g, or t
  misc_feature (303)..(303): n is a, c, g, or t
  misc_feature (330)..(330): n is a, c, g, or t
ttaaagactttatgctaagngaaaccagtcacaaaaggacaaatactgtatgattccacttacatgagaaatatgagtagtgaagttgatgatagagacaaaaagtatggctgttgctaggggaaggggaggtggggagttattgttcaatgggcacagantttgggaagatggaaaacttctggagatggatgatggtgatggctggacaacaatgagaatntacttaatccactgaattgcatatttaaaaatgggtaagctggtcagttttatgttataaatattttaccncaataaaancaaattgaaccttaaaaattcactganggaggcccatatgggaaaaagggctaaatgttaa

SEQ ID NO: 7946 - DNA, 601 bp, Homo sapiens
  III.1574 (N21479)
  misc_feature (165)..(165): n is a, c, g, or t
  misc_feature (488)..(488): n is a, c, g, or t
  misc_feature (526)..(526): n is a, c, g, or t
  misc_feature (542)..(542): n is a, c, g, or t
  misc_feature (568)..(568): n is a, c, g, or t
  misc_feature (577)..(577): n is a, c, g, or t
  misc_feature (590)..(590): n is a, c, g, or t
gttttgttttgtttttgtttttgagatggagtcttgctctgtctcccaggctggagtgcagtggcatgaccttggctcatcacaacctccctgtcgcgggttcaagcgattctcctgttcagcctcccatgttgctgggactgcaggtgcataccaccacccctnggctaatttttgtttttgtatttttagtaaagacgaggttgcaccatgttggcccggctggtctcaaactcctgacctcaggtgatccgcctgctttggcctcccaaagtgctgggattacaggggtgagccaccgcccggcaagttatttaacttctttgtgcctgagttttttttggctctaaaagtgctacactgaaataaagaatagtgaatataaaccttttcatgataacttacaaataacaagccatatctggttatggctaaactatcaatagcacctaccttatgaatttgttaatgaggattaaataagtgcntaaaagctcctagcatgtagtaagtacttaataaagcnccgatattatcatcantactggtaatccacaagcttttcccnagtactacnatgaacccttgcncattctggtct

SEQ ID NO: 7947 - DNA, 403 bp, Homo sapiens
  III.1575 (T87794)
  misc_feature (1)..(1): n is a, c, g, or t
  misc_feature (328)..(328): n is a, c, g, or t
  misc_feature (363)..(363): n is a, c, g, or t
nttcggcacagaaaaaaaaaaaaaaaaaattacagggataaatttgcagtggtaacattttacacatatgcaaaaagtgctgtatctcaaacagtttaggtggaaatgagtatgatttgctttcagaatgtgtgttaggtgactcagaaagtgacttcaatgataaggaatgcactggtttcgaatatatgcataaagattttgaatgaaggtgttttgtgaaacgttaagtaaggtaggagaaaaatcagtattttgaaattatgatttattattttaagcctcctaaattaatttgcatttcagaagtaaacatctggtgtttggnctatatcccctaaaagtgtatagtccaagttggtncaggaaacccttggtttttttatggttccctatttggaaa

SEQ ID NO: 7948 - DNA, 302 bp, Homo sapiens
  III.1576 (T87795)
aaaactaataattggatctagataagactaaaaactgtaaagcagggatttttctttcttcttcatttattgggtagaagtgtttttctaaatagtaagcaaattataccacttttaaagctatttatactaacatgttctttgttgagaattattagagaaatgagttgtctcacaaaattaagttctttcaggataaccaaaacttttttgtttaagccaaaacatttttaggcagaactctcaaaatattgtattatagtattagatattctttaccttaaatggaaggtacaataagg

SEQ ID NO: 7949 - DNA, 354 bp, Homo sapiens
  III.1577 (R06159)
  misc_feature (20)..(20): n is a, c, g, or t
  misc_feature (34)..(34): n is a, c, g, or t
  misc_feature (318)..(318): n is a, c, g, or t
  misc_feature (331)..(331): n is a, c, g, or t
  misc_feature (351)..(351): n is a, c, g, or t
tcaaaaaaaaaaaaaaaganttaaaaaaataaanatttaaggaagtataatttcaaacatgagaatattctgctagcaccagcaagagaaagacctgcaaggcagaaacgaagcatgatctgactttgttttagtaaagatttaagattagcagtgagaaagccatgcaaccacaggctttgcaagttgttagagttagttccccggaatgtgtatgaagcaggaaaaggaacctgtttgggcactgataccttcagttcacctccgttcgcacaatcactgttcaggaaacatcatcttcatctggaccacctgttntctggtcttccancacctttttggtcttttggnttg

SEQ ID NO: 7950 - DNA, 382 bp, Homo sapiens
  III.1578 (R06160)
  misc_feature (248)..(248): n is a, c, g, or t
  misc_feature (297)..(297): n is a, c, g, or t
  misc_feature (313)..(313): n is a, c, g, or t
  misc_feature (353)..(353): n is a, c, g, or t
tttaagaaacataaacgatacttctcaattttgtggtactttttcatttttaaaacagctaatgaggaatgtttcatgcttaagtatattggtctatctctagatcgaacttcacatttacaaacatggcttttaggagttcccacatatgtttgggaagtggagtgggcaaaatcctgggagaagacagaattgttgaaagcggggctgataccccagaatgtgcctaatatactagaccataggtnccacagagagctggagagggagtgggcatcaacatgtatgtgtactttncccgggctttcgtccncatctgatatttacctaattccaacactatttccctgganaatctgggtttgtgttctgtctctggggg

SEQ ID NO: 7951 - DNA, 495 bp, Homo sapiens
  III.1579 (H08368)
  misc_feature (380)..(380): n is a, c, g, or t
  misc_feature (407)..(407): n is a, c, g, or t
  misc_feature (483)..(483): n is a, c, g, or t
  misc_feature (488)..(488): n is a, c, g, or t
gagaattagagtatattgttactgaatgttccagagacttctagtgattttaacacttattaagtatagcatgttgatggggagatttgtttctctaaagatcactttgttttattaaatcctaatagaaaatacccttgaaaatcctatctcatttattcctgtaacaaatttattgagcacctacctactatatgccaagaaatgtattagccatcaggcaggagagctgttcaaatggtagatatgatctgtgctcctgtgaaacttctagtggggagagccaaacaataaacaatattcctttttaactctaggttaatgcagaaatgggataaagcccatgttgcttttggggagaggtgagttgtgtctctggnatcacatgtcatttcataggggggganaaatgccccaaatacttagggagtaggctctttagcctatgtccggtcggcctcagcttaaggttgtttttccctncccantggctgg

SEQ ID NO: 7952 - DNA, 408 bp, Homo sapiens
  III.1580 (H08369)
  misc_feature (174)..(174): n is a, c, g, or t
  misc_feature (345)..(345): n is a, c, g, or t
  misc_feature (377)..(377): n is a, c, g, or t
  misc_feature (398)..(398): n is a, c, g, or t
ttttttttttttttacactcaaagcaagtaaagattacttttaattataaactggccataaacccaaatgaggatatagtcattgtagagcaaaatgatacaatgcacccaacccgatatttacattaaaatatttccagtcacattaactttcaaacaaaaagacttaacgantttacaaatttttccaagacgtgagaagtgaaaaatgtttttgaatgccatctgagcaggatagtaaaatcactagaatagtctttttaagttctcagttactgggactgaaaagataaagctgatgaaaattggtgaacaatttgttcctttccataactactattcagnattaatttaaaaaaggattatttttaaatctntggccaactatggggagtagntcacaaggac

SEQ ID NO: 7953 - DNA, 382 bp, Homo sapiens
  III.1581 (H68353)
  misc_feature (161)..(161): n is a, c, g, or t
  misc_feature (169)..(169): n is a, c, g, or t
  misc_feature (177)..(177): n is a, c, g, or t
  misc_feature (189)..(189): n is a, c, g, or t
  misc_feature (197)..(197): n is a, c, g, or t
  misc_feature (246)..(246): n is a, c, g, or t
  misc_feature (248)..(248): n is a, c, g, or t
  misc_feature (287)..(287): n is a, c, g, or t
  misc_feature (292)..(292): n is a, c, g, or t
  misc_feature (311)..(311): n is a, c, g, or t
  misc_feature (346)..(346): n is a, c, g, or t
  misc_feature (360)..(360): n is a, c, g, or t
  misc_feature (372)..(372): n is a, c, g, or t
  misc_feature (378)..(378): n is a, c, g, or t
tccctcccgcccgcgctctaagccatctccgccttcaccctgacgcctgcctcttcccctcacctttccccctcccctgttctaccatgcccggcatgatggagaaagggcccgagttactggggaagaaccgatcggccaacggagtcgccaagcagccnggcagcgncggtcggnaggcctgcggtnccaccaanggcgggctgcactactcagagcccgagagcggctggcagcagcgagcgnangagcacggtgatgttgggatgagagtcggagccgaatancaagntcggattccctggaatttngatccaggtggttacaaagttacacagataaaganaatgggaggggatngttgtcttggtnttcctnttca

SEQ ID NO: 7954 - DNA, 448 bp, Homo sapiens
  III.1582 (H68354)
  misc_feature (366)..(366): n is a, c, g, or t
  misc_feature (379)..(379): n is a, c, g, or t
  misc_feature (397)..(397): n is a, c, g, or t
  misc_feature (414)..(414): n is a, c, g, or t
  misc_feature (432)..(432): n is a, c, g, or t
  misc_feature (446)..(446): n is a, c, g, or t
tcataatcactatcattcccatccattggatgtgtttcttctacatcatcatcactgtcaccctgattatgtctattagctagtttacgagcctggcgatccatcaaacttgtcctagagcgagtttttttccaagaatagtaatattttacaaggcttgcaattgtcttatctggaagcatttgctgaatcctgtgaaagctctttccatgaaaactaaaggcttgttcaaatagggactttatcttccactgtccactcatccggaaaggggagtgaaattaggggagatcaggcaaggggacttctcaatgttatgtttatggccaggaacaacatgccaagtgcctgttccacattgtaggncatggtttttccnttggcaattggcaatggnattcatcccattggggnatcggggggtaccgtggnaagggggggcccanac

SEQ ID NO: 7955 - DNA, 454 bp, Homo sapiens
  III.1583 (R55664)
  misc_feature (416)..(416): n is a, c, g, or t
  misc_feature (435)..(435): n is a, c, g, or t
aaaagggactgaactagcctctggtaggattgcaggggtccagccttgcctgtttccgaagcccccacactgcctttcgccctactgagactggtcccctcaaaaggtagacaaaacagcagctccctgtggagctgaagggcggcctcaaagtggctttttgttagacaaggttaaggtttcctcatgagcaaggttgcagatcggtccttcctcagctccttgatttgtgaccttgaccaaggggcctgccacccagcccctccagtgccctctcctcgatgcctcgctccttcctgcccccactcccctgggcttaggcaggtaggggaattagggccatgctgggaagaagcttaaccatgtgttcaaagaacggtttcttgcttgcttgggtcctgggaactccccttggntggccccagggcttccttnggcccatgggtgctggggg

SEQ ID NO: 7956 - DNA, 462 bp, Homo sapiens
  III.1584 (R55665)
  misc_feature (406)..(406): n is a, c, g, or t
  misc_feature (455)..(455): n is a, c, g, or t
ttttttttggcgtttataaagtttttattttccattttcttaaaaataacatttgatttcctttatgcatgtgtggagtgtacttgtttccttaggctgagtaataggcagataaagacgacacgaggcagggtccccaagtggaggcagggcgggacgtgagaggatgggggcgcaggggaaaggcagggctgggatgactcacgggactcttgagtgcccatcaacgcacacgcacacagtctaacactttgtttttcaattttttaaaagacatctaaaattactgagagatacaatttcagcagttaaatctacagacggaaatccaaggcacttgaacacaattcctaactctaaggctcagttattggcacatcacacagttttaagcaggctttcaggntgggaaagcagtttgctctgctggggaacttcctcggggttgtttgggnctcctct

SEQ ID NO: 7957 - DNA, 293 bp, Homo sapiens
  III.1585 (R38392)
  misc_feature (67)..(67): n is a, c, g, or t
  misc_feature (75)..(75): n is a, c, g, or t
  misc_feature (126)..(126): n is a, c, g, or t
  misc_feature (208)..(208): n is a, c, g, or t
ttttttttttgatgtaaaaagttatttttattatgacttgcagcaaaaaagtttgaaatacattggncaataagngccaccaaaaataataaacatggagtttccacggaaaataataaacatggngattcctggggttaccgtcaataaggatgagtactgaatgtaaaccagtcttctgctctggaatccaaggtaaagctacagngttctcagtttaccatcaacactaaggttttacttgtttttcctcttaccctacactttcaggcaggggcatgggcaacagaagg

SEQ ID NO: 7958 - DNA, 398 bp, Homo sapiens
  III.1586 (T77686)
cttattagctttattttactttatgtttttaaagtatctgggctgagtgagcttaatggaaccttggatgtttgaggggtggttgtaaaggaaactggcagaaatagttactaaaagagttcaagctgttattaaaggaattaatagacagagttgcagagcaagctggataaaaatcttagaactgcattcaaattagttatttcaggaaggggccctataaataacttattttaacctccctcttacacctgaagaaatagggaagctgtgtcatctcagaggctttctgaggcctgtgccaaagtcaggacccagggtgtttaatgtctggccctgggtactttcttttatgggccctcttgcccaaatccagtgcttaaccccgggctttaccc

SEQ ID NO: 7959 - DNA, 453 bp, Homo sapiens
  III.1587 (N71162)
  misc_feature (73)..(73): n is a, c, g, or t
  misc_feature (445)..(445): n is a, c, g, or t
cttggtgccacaaaaatgattttattttgaaccagaaaggaacagcaatcaagacaatagtcagggccgaggnttggcagtgtgacttaagtaccggggattgaatttgtccaggtgcaaggagtgacataaagagaatcaatttttcatgtccaagccaagctgatacagatgatgatacttatcagtgattcccatttacacaggcttggattgcttttcagatatcagatttttggaactattttataaatatttttaaaggtgatggagccactggagtgtaggtgaattggtgcccctccccttttctttttcgggtgtatcaagcatataatcaatgacaggaaaagtgaaaggtttttatgagagtttttgcattaaaagaaaaccaacgatccagtttctacactggcagcactgttgatatttgagccagaccacnccctccga

SEQ ID NO: 7960 - DNA, 575 bp, Homo sapiens
  III.1588 (W05543)
  misc_feature (444)..(444): n is a, c, g, or t
  misc_feature (464)..(464): n is a, c, g, or t
  misc_feature (493)..(493): n is a, c, g, or t
  misc_feature (506)..(506): n is a, c, g, or t
  misc_feature (530)..(530): n is a, c, g, or t
  misc_feature (570)..(570): n is a, c, g, or t
aaactgattgaggtcacagtattttattatttggggtcctcaccacaggaaacactgcgatacaggggcaaaagagatggcagtgccaattaaattaatacaacaaaatcaatgcagcaccaaccaagactgccaggtctggtgtcatgggtatgcccagagcccaggagttcagaagggccctaagcctgatttaatgctctgctgttgatgtcttgaaattcttaacaatttttgaacaaggggcctgcgttttcacttcgcactgggccttgcaaattacatagcgagtgctcataaaagaactcagaaacgtggtacctctcttcctggtggatacaaataaagaaatctggatccaaagttgaaagttgctggcgatatcattcaagtaggactctaaatagtggattaagatgagggtgggcctgggtgaagatcttncactttaaaagaaagtgctnaaaactgctgcaatattgcgatggttctntggagaaagacanctgaatcagcagcttttattcggnctgttttgccttactgctgagactgctacgctcagtccgngatca

SEQ ID NO: 7961 - DNA, 555 bp, Homo sapiens
  III.1589 (AI668702)
atttttcatatcctttattttcagaaaaactgaaacacaaaacagaacatgcataattaagcagacctatattgtcaatggcaaacagagttgagcaattctgtggcctagtggattcagatagcagagctgtgtgactagtctaaacaattctcactcaagatgacagggtgtatgctatttttacatgtagtgaggataactttaaaaaatggatatatgctttaaatagtctttttcacactccatgttgactatgcacatggcctgaaatgagaattagagtacagtataaataccataggagcagctaattgacaaccaacagctttgaaagctttggattgtaaaattgcaaaacttgccaggagatagaagggaaaacagaaaccattatctaaccaaatgctgccagttcagagtttttcttagtttcagcaatggcccaaaggaacggcaattcagaccacgatgaatctagatgcatctgttgcagtatgaaagatctttcctaggacagggtaatcaatctctctgaagaggttgtgggcaatt

SEQ ID NO: 7962 - DNA, 533 bp, Homo sapiens
  III.1590 (AI734235)
tgttctaataactacattgaaagaggtaaaaagaaataggcaaaattaatgttaataaggtatcttatttaaaccaatttatccaaaatattatcacttcaacatgtgattggtacaaaaaaattattaagatgttttaccttctttgtactaagctttcacatttttgtgtatattttatacctacagcacacctcactttggattcatcactgtcaagtgattaatagccatgtgtgactagtggccccagatctagagcataccatggtagtacattcacagaagggtgagcagggaaaacaacattgtgttaaatactcccaggcatcacactttggaaaacactgccattggcgtttccatagcctgagttcatgatataaagggatccctagtcattttatattaaatgagattccttaattgaccctaaaattgcccacaacctcttcagagagattgattaccctgtcctaggaaagatctttcatactgcaacagatgcatctagattcatcgtggtctgaatt

SEQ ID NO: 7963 - DNA, 401 bp, Homo sapiens
  III.1591 (N93615)
  misc_feature (129)..(129): n is a, c, g, or t
  misc_feature (355)..(355): n is a, c, g, or t
  misc_feature (391)..(391): n is a, c, g, or t
atttttcatatcctttattttcagaaaaactgaaacacaaaacagaacatgcataattaagcagacctatattgtcaatggcaaacagagttgagcaattctgtggcctagtggattcagatagcagantgtgtgactagtctaaacaattctcactcaagatgacagggtgtatgctatttttacatgtagtgaggataactttaaaaaatggatatatgctttaaatagtctttttcacactccatgttgactatgcacatggcctgaaatgagaattagagtacagtataaataccataggagcagctaattgacaaccaacagctttgaaagctttgggattgtaaaattngcaaaacttgccagggaggataggaaggggaaaccnggaacccatt

SEQ ID NO: 7964 - DNA, 418 bp, Homo sapiens
  III.1592 (W25511)
  misc_feature (1)..(1): n is a, c, g, or t
ntgttctaataactacattgaaagaggtaaaaagaaataggcaaaattaatgttaataaggtatcttatttaaaccaatttatccaaaatattatcacttcaacatgtgattggtacaaaaaaattattaagatgttttaccttctttgtactaagctttcacatttttgtgtatattttatacctacagcacacctcactttggattcatcactgtcaagtgattaatagccatgtgtgactagtggccccagatctagagcataccatggtagtacattcacagaagggtgagcagggaaaacaacattgtgttaaatactcccaggcatcacactttggaaaacactgccattggcgttttccatagcctgagttcatgatataaagggatccctagtcattttatattaaatga

SEQ ID NO: 7965 - DNA, 263 bp, Homo sapiens
  III.1593 (R06161)
  misc_feature (175)..(175): n is a, c, g, or t
  misc_feature (181)..(181): n is a, c, g, or t
  misc_feature (230)..(230): n is a, c, g, or t
aggcagctcatctcacgaaacttccaggagcgcacccaacaggacctgatgaagtctctacaggcagcactttccggcaacctggagaggattgtgatggctctgctgcagcccacagcccagtttgacgcccaggaattgaggacagctctgaaggcctcagattcttgctgtngacgtngccattgaaatttttgccacttcgaaccccaccccagctgcagggagtncctgggcagtcttacaaacacaattttccaggg

SEQ ID NO: 7966 - DNA, 369 bp, Homo sapiens
  III.1594 (R06162)
  misc_feature (112)..(112): n is a, c, g, or t
  misc_feature (209)..(209): n is a, c, g, or t
  misc_feature (283)..(283): n is a, c, g, or t
  misc_feature (308)..(308): n is a, c, g, or t
  misc_feature (320)..(320): n is a, c, g, or t
  misc_feature (340)..(340): n is a, c, g, or t
attcgagtatcagtgagatgttctggccagggtacaggagggatgagtgaggcagaaactatcaaagaaaactcatttccccacacccaagaaggagctggatgacccaggnacagatataattttgagatgggaaaattaagggattttaaagaaacagttccagcctcaacaagaagctagagaatgtggtgctcagtgaggggttntcctacttggaggcccagctggtctcccagggttcagccaaacacggaaatctcagatcctcggatgtcatgtngggtggggcagggaagtctcacatntcttcagccctncacaaggcccgggggggctnacttgccaatcccctttcactgcatcctg

SEQ ID NO: 7967 - DNA, 298 bp, Homo sapiens
  III.1595 (R11602)
  misc_feature (104)..(104): n is a, c, g, or t
  misc_feature (223)..(223): n is a, c, g, or t
  misc_feature (245)..(245): n is a, c, g, or t
  misc_feature (281)..(281): n is a, c, g, or t
aacagtgtttaaaggagttttaaaaggtttctcctgcttcactgcttcttaactggtttatggttcctggctcttggaacttccctttcagctcccttctcttncctggttttgtgtttaatcttgacacattgaaccttgatatctgactgcctggggtcggtcatgtgctgtgtcatttgcagtaaggcaatatgtcctcctgtccatcctgctttgtctnctgggcatctgggttgggtggntttcttcctgtttaccgcattcagtccttgtgggangatgacgggcatcaaag

SEQ ID NO: 7968 - DNA, 394 bp, Homo sapiens
  III.1596 (R19392)
  misc_feature (315)..(315): n is a, c, g, or t
  misc_feature (327)..(327): n is a, c, g, or t
  misc_feature (333)..(333): n is a, c, g, or t
  misc_feature (342)..(342): n is a, c, g, or t
  misc_feature (363)..(363): n is a, c, g, or t
  misc_feature (380)..(380): n is a, c, g, or t
  misc_feature (386)..(386): n is a, c, g, or t
taaagcctcagtagaagagtgcagagttacactgtcctgtttggggtgcccccctcccccttccgacctaagtgctgccaaggcttgtcagctctcagtccctgccactgtcattttcatcctcccacagcgtcataccactttctgttttttcaaacccatcacataagtgctggagcttggtaacgtttttagtggcttaatgttctcttttagaaattccagcacttctgtcacatatcaaataatacattcttcaaatacacacataataataatacattcttcaaataaatctcaaggcatccaaagccnggggggaacctntaaggncaaaagctnaggatcttaggggagggaccngggggcccaattcaatngggggntatggcct

SEQ ID NO: 7969 - DNA, 344 bp, Homo sapiens
  III.1597 (R86286)
  misc_feature (7)..(7): n is a, c, g, or t
  misc_feature (242)..(242): n is a, c, g, or t
  misc_feature (334)..(334): n is a, c, g, or t
tattctnaatcataacactttatttcctgtatagcacatatcaaaatttgtgatcatttcatttgttgaatattttacctcgtggcaaaatcacacgccatcctccaaggggcgagacccctcagtgtgaaaggggcaagagacacagaacaagagtgacaaacgcataggaaagcccagaggccgctgccttgaccacagtgggtcggtctgagcagttcagtggttaggtctcttcaccncgaaagatagagcaaaccattcatgcttcatgctggacttctggtttccttctttttagttcaactaggttcaaccctggatggtccaagangggtatggcc

SEQ ID NO: 7970 - DNA, 429 bp, Homo sapiens
  III.1598 (N70092)
  misc_feature (349)..(349): n is a, c, g, or t
  misc_feature (425)..(425): n is a, c, g, or t
ttactacaaccaaagagattcaacatttattttatcataaaagttaagcaaataaaactatatacaagatccatgcaaggaatccagttacacacaagacacatttaaaacctggttaaaacacaatctccacgatagcagggaataaaaccagtaagaccaagtatctttagtgagaaacataatcgtgtttatattttggatgctgcttgaatccaattctctccccaacaatgaggcactggatcacccactcttgtgacaccacaggcagctgcaatgcttcagcacacttcagcacccgaggctgggcatgaggggtccgtcaccaccacattcaaataccccntaaagcaatatctttgttatgggcacttgaatggtgctgcttcacagaggctggcaccaccagtcatgagggatcncagg

SEQ ID NO: 7971 - DNA, 353 bp, Homo sapiens
  III.1599 (W00922)
  misc_feature (1)..(1): n is a, c, g, or t
  misc_feature (72)..(72): n is a, c, g, or t
  misc_feature (88)..(88): n is a, c, g, or t
  misc_feature (101)..(101): n is a, c, g, or t
  misc_feature (108)..(108): n is a, c, g, or t
ngaaagatcacagaaagtcctcgtgcctccatgggagttctctcaggcaaaagaaaacttatcacttctgangaggaacggtcccctnccaagcgaggtcnaagtctnccacagtaaaacctggtgcagtaggggcaggagagtttgtgagcccctgtgagagtggagacaacaccggtgaaccctctgccctggaagagcagagagggcctttgcctctcaacaagaccttgtttctgggctacgcatttctccttaccatggccacaaccagtggacaaagttggccagcccgctccaaacttgcaagatggtcctacaaggaaagcagtgaagaagaaggagggaatttt

SEQ ID NO: 7972 - DNA, 472 bp, Homo sapiens
  III.1600 (R39824)
  misc_feature (85)..(85): n is a, c, g, or t
  misc_feature (86)..(86): n is a, c, g, or t
  misc_feature (89)..(89): n is a, c, g, or t
  misc_feature (274)..(274): n is a, c, g, or t
  misc_feature (362)..(362): n is a, c, g, or t
  misc_feature (426)..(426): n is a, c, g, or t
  misc_feature (446)..(446): n is a, c, g, or t
  misc_feature (458)..(458): n is a, c, g, or t
  misc_feature (465)..(465): n is a, c, g, or t
ttttttttagcaaaataaatgtcactatatcaagataaagaataacattaggtgtgaactagcataaggtgattcatgggaaacnnaantggcaaattccgaaaggaattctgggaccatcgtactaggttacattgcctttttgcctgtagagaacccatgaggagaggggttctcagccttcccagtggaacccttctcttagttgcactggcattgggggatctcattgctgggcctaggtccaggcagggcagctcctggggcccaaggncgggctcactcaccagctgtcttccagtgtctgtgtgctgctcctgccctcctgcctcttctccagctccactgctgtctgttccaanagagcagacacagcgtcctatagagacaaaggttgctggggtcatttgggtacaatttagggtnccaccctaccttccagggantcagagcatctnagagctnttaccct

SEQ ID NO: 7973 - DNA, 296 bp, Homo sapiens
  III.1601 (H64103)
  misc_feature (205)..(205): n is a, c, g, or t
  misc_feature (207)..(207): n is a, c, g, or t
  misc_feature (209)..(209): n is a, c, g, or t
  misc_feature (230)..(230): n is a, c, g, or t
  misc_feature (246)..(246): n is a, c, g, or t
  misc_feature (287)..(287): n is a, c, g, or t
  misc_feature (292)..(292): n is a, c, g, or t
cgaggtgttgggggacacaggggtgctctagaccctgtgagcactgactctgcccctctctcctcttagctggctccagtgcccagacccaagccccccactgctcaatggacacccccagcccagacccgttgccttcgcctttgcccggggaggaagagaaacctctggccttatctcctcctgttccccggggccgccgagngntncgttcctgggggagccacctnctcaaatcggacactnaaggcctccctccctcgcaagcggggccgtccccccaagtnagggnagga

SEQ ID NO: 7974 - DNA, 178 bp, Homo sapiens
  III.1602 (H64152)
  misc_feature (1)..(1): n is a, c, g, or t
  misc_feature (38)..(38): n is a, c, g, or t
  misc_feature (85)..(85): n is a, c, g, or t
  misc_feature (136)..(136): n is a, c, g, or t
  misc_feature (152)..(152): n is a, c, g, or t
ngatttatttccacagcccctgcctccaagggtctgtnagtctgggggaggggggctgaaggcagctggaccccaaagtttaggnctccaccctccacctgctcccacaacgggaagaccaccggaaacaagggtntcccggcccccctggntcaggcccagcaccagccaaactccc

SEQ ID NO: 7975 - DNA, 260 bp, Homo sapiens
  III.1603 (H78841)
  misc_feature (82)..(82): n is a, c, g, or t
  misc_feature (83)..(83): n is a, c, g, or t
  misc_feature (157)..(157): n is a, c, g, or t
  misc_feature (186)..(186): n is a, c, g, or t
  misc_feature (196)..(196): n is a, c, g, or t
  misc_feature (209)..(209): n is a, c, g, or t
  misc_feature (232)..(232): n is a, c, g, or t
  misc_feature (257)..(257): n is a, c, g, or t
catcaaaatagtttattgtgttcagaaaaatcacagtttgaggaaaccttaaacaataagtacacaagagatgccccatggnnttgccatagcagagacagactcctgtatgttttattccagaggcattgcatggtgataataaaatgataggaantagaggaaaatagatacaggaaaaggcantagacagggnagccagctagatnttagagtacggagcattcgaggnggcataaccacacttggggtggctntag

SEQ ID NO: 7976 - DNA, 440 bp, Homo sapiens
  III.1604 (H80088)
  misc_feature (432)..(432): n is a, c, g, or t
gtctgttctgcctcactcccgagctctactgactcccaaaagagcgcccaagaagaaaatggccataagtggagtccctgtgctaggatttttcatcatagctgtgctgatgagcgctcaggaatcatgggctatcaaagaagaacatgtgatcatccaggccgagttctatctgaatcctgaccaatcaggcgagtttatgtttgactttgatggtgatgagattttccatgtggatatggcaaagaaggagacggtctggcggcttgaagaatttggacgatttgccagctttgaggctcaaggtgcattggccaacataggctgtggacaaagccaacctgggaaatcatgaacaaaggcgctccaactataactccgattcaccaatgtacctccagaggtaactgtggttcacggaacagccctttnggactgtt

SEQ ID NO: 7977 - DNA, 477 bp, Homo sapiens
  III.1605 (H15811)
  misc_feature (8)..(8): n is a, c, g, or t
  misc_feature (47)..(47): n is a, c, g, or t
  misc_feature (102)..(102): n is a, c, g, or t
  misc_feature (209)..(209): n is a, c, g, or t
  misc_feature (276)..(276): n is a, c, g, or t
  misc_feature (319)..(319): n is a, c, g, or t
  misc_feature (358)..(358): n is a, c, g, or t
  misc_feature (388)..(388): n is a, c, g, or t
  misc_feature (409)..(409): n is a, c, g, or t
  misc_feature (414)..(414): n is a, c, g, or t
  misc_feature (433)..(433): n is a, c, g, or t
  misc_feature (438)..(438): n is a, c, g, or t
  misc_feature (446)..(446): n is a, c, g, or t
  misc_feature (460)..(460): n is a, c, g, or t
  misc_feature (469)..(469): n is a, c, g, or t
gcacgtgntttattcagtgcattccagaggggacccctcaacagcgntggccaagcccttccctgtgcactggcgggcatgagggaaggatgggaggcagtntgtgtgtgtgtgtgtgtgtgtgtgtgtagggagggggtgatacagggaggggaggctccctacccctacccctgctgcccagctgcagccaggccagtgcgtccatntctaggggcaggctgcagcaagaagacgtgggaatgcacagccccagggattgtgtcatccacatgnttcccatgaggtacctggggaacaaaagtgacccgggagttgnggcagctgagagcaaggggctgcagctggtgggggaatntgtgagttgcggtcaatttgaatgcacgtnggttcagagcccggctacctntcatntcaggacagctccagtatnctggncccatttncctgggcatcagtntccactttnagattttt

SEQ ID NO: 7978 - DNA, 399 bp, Homo sapiens
  III.1606 (H16112)
  misc_feature (230)..(230): n is a, c, g, or t
  misc_feature (330)..(330): n is a, c, g, or t
  misc_feature (343)..(343): n is a, c, g, or t
atcattgtaggcagcaccctggggggcctcctactgctggccctgctggtcctggcactgtggaagctcggcttctttagaagtgccaggcgcaggagggagcctggtctggaccccacccccaaagtgctggagtgaggctccagaggagactttgagttgatgggggccaggacaccagtccaggtagtgttgagacccaggcctgtggcctcaccgagctggagcgnagaggaagccagctggctttgcacttgacctcatctcccgagcaatggcgcctgcttccctccagaatggaactcaagctggttttaagtggaattgccntattgggagattngggacaccttttaacacagacccttagggattttaaagggacacccttacaacatt

SEQ ID NO: 7979 - DNA, 381 bp, Homo sapiens
  III.1607 (R89356)
  misc_feature (5)..(5): n is a, c, g, or t
  misc_feature (226)..(226): n is a, c, g, or t
  misc_feature (239)..(239): n is a, c, g, or t
  misc_feature (259)..(259): n is a, c, g, or t
  misc_feature (276)..(276): n is a, c, g, or t
  misc_feature (304)..(304): n is a, c, g, or t
  misc_feature (364)..(364): n is a, c, g, or t
aaatnatcccctccctctctgcttctctctccttctccctcccttcacctccttccttgcttattcaaccaatatgctactataaataccaatcgggaactgtgctagattctggggatacacggatgaataaagtaggcatgatgatatcataccagtgcctttgtttcctccaattaaattagtatattatgacctagaatgcaaattttgtatgaatttttangtaaacacaaaangcttttggagactcctgggnttatgccataatttccnaggtcgaagtgatattgtattgtatttncaaattgggttcttaggcttcaggaatctgattttcaggataaaagctccagcttttccntgaaaacactaacttac

SEQ ID NO: 7980 - DNA, 502 bp, Homo sapiens
  III.1608 (N30016)
  misc_feature (276)..(276): n is a, c, g, or t
  misc_feature (435)..(435): n is a, c, g, or t
  misc_feature (452)..(452): n is a, c, g, or t
  misc_feature (475)..(475): n is a, c, g, or t
  misc_feature (493)..(493): n is a, c, g, or t
gagatgaagtctcgcgctcttgtcccctaggctggagtgcaatgatgcgatcttggctaactgcagcttctgccccttgggttcaagtgattctcctgcctcagcctcccgagtagctgggattacaggcgcctgccaccacgcccggctaatttttatatttttagttgagacagggtttcaccatgttggccaggctgatctcgaactcctgacctcaggtgattcgcccgcctcagcctcccaaagtgctgggattacaggcatgagccaccngtgccggacctatttaaaaatctttttgaagtacagtactaataaactaaggactacctagagattcacacttttagatattatctattttaacatagattaaaaatactggtttatatggaaaattaagcttaaatacacgtatagggtaataattantttgcccatatacaagnaatggtaacagaggctatcaggnggaccccttatctactcnaatttatat

SEQ ID NO: 7981 - DNA, 284 bp, Homo sapiens
  III.1609 (N36363)
  misc_feature (234)..(234): n is a, c, g, or t
  misc_feature (270)..(270): n is a, c, g, or t
accatgcatattcaaatgtttatatacataagtttattataacataaacagtaaaagtaatgaatactgtttaaaataactaatatagtattttttaatttttgtggggatggattctcaaatacttgtgattttaaaagattctaaagctaaaacacaacttgattttaaaaagaatgattctccttacacaattataaatatttgcagtaaatattttccttataatactgntttgaccccatttaaaaagtattagattatattccnttgatccaatggaa

SEQ ID NO: 7982 - DNA, 436 bp, Homo sapiens
  III.1610 (N89738)
  misc_feature (233)..(233): n is a, c, g, or t
gaagtatacttccaagcaaaatttattagatgtctattcaagaaaaacacaatgacctttgcttgtaagaattcaaagtcaattacctggaagccaggtatgaatagttttttcttttaaaatcagatacagagagtagaaacagtaatttttcttaaatatgacaggcaacagatattgaagtcttttctcataaatggcatcaaagagaattattcatttatcagcaaagngcatgcagttgacttaatttcaaacctgaagcctttaaaatatgaagctggttatgaacttgacagaaatcaaggtaggctactcaacgatgtttctttaccttcttcctaatggaaattcccttgtcatcagtcagtagatatgtacatttcatttgggcttctacggatctttttaaccttcataggatttttggcataaa

SEQ ID NO: 7983 - DNA, 493 bp, Homo sapiens
  III.1611 (W17232)
  misc_feature (419)..(419): n is a, c, g, or t
  misc_feature (462)..(462): n is a, c, g, or t
  misc_feature (475)..(475): n is a, c, g, or t
ctctttcatggacagtgattgatcttttcacaatgtatgtagcctctagaattttgtacatatgtttgctctttttttgtacagactatttagttgttgagaaaacaggggcgtttcctaatttggtctttatcctgcgacaacactttcagcagactagcctctccttatctcacagatcacaagcacccctagatagtgtgattctgtcagatagcatttatgcaaaaatctatgaagttaaaagatcgtagaagccaaatgaaatgtacatatctactgactgatgacaagggaatttcattaggaagaaggtaaagaaacatcgttgagtagcctaccttgattctgtcaagttcataaccagcttcatattttaaaggcttcaggtttgaaattaagtcactgcatgcactttntgataaatgaataatccctttgatgccatttatgagaaagctnaatactgtgctgnatattaagaaaattctgt

SEQ ID NO: 7984 - DNA, 452 bp, Homo sapiens
  III.1612 (AA707785)
aatttataaaggaaaagtttaataactcacagttcagcatggctggggatgcctcagaaaacttataatcatggcagatggggaaacaaacacacccttctccacgtggcagcaggaagtgccgaacaagagggaaaagccccttataaaaccatcagatctcgtgagaactcactcgctatcacgagaacagcacggaggtagccgccccgaggattaaattacctcccactgggtccctcccatgtcacgtggggattacgggaacaattcaagatgagatttggatggggacacagccaaaccctatcaactagggatttgttgacttaatgcacacgagccaaccataccccaacaaagcaggtactagccttatagtacacgtgaggaaactgaggaatgaggcatctcattcatgttgggaatattaattgaaaaacctgtcagct

SEQ ID NO: 7985 - DNA, 417 bp, Homo sapiens
  III.1613 (H20824)
ttttttttcacatcattggttgtccatgaatcccaggttgacaatttttgctctaccaggacaaacagtatgtttatgaagatacacacgattcactaatttcaatattatgtgccagggactatgactggactaatttataattctgaacaagaaacatgctcccttgtcctcacagaggttaaacgtagtatgggatacagaaattaggacaaaccaccaaatacatgtttacaaaatttgtgttaatgttatgaaaggaatatgggcaacttgaaagtttgtaacaggaactaatttaaatgagggattagaggaaagcttcagggtaggccatttaatgctgagggcctgcaattcttaggtttaaggtggaaagttttgggaaatgaggtattgtaggggccccaggggaac

SEQ ID NO: 7986 - DNA, 433 bp, Homo sapiens
  III.1614 (H20874)
  misc_feature (225)..(225): n is a, c, g, or t
  misc_feature (269)..(269): n is a, c, g, or t
  misc_feature (346)..(346): n is a, c, g, or t
  misc_feature (420)..(420): n is a, c, g, or t
  misc_feature (429)..(429): n is a, c, g, or t
ccagatcctattcttcaacattcacagattctccagcatctcccatgtctcccattttatacaaagtacagcctttaattccatctcttcttgtagtaaatgccttagtatcctctagctaccaacaacccctttttttttttttttttgagatggagtttcactcttgttgcccacgctagagtgcaatagtgggatctcagctcactgcagcctctacctccngggttcaaacgattctcctattcatcctcccgaatagttggganttacagacacccgctaccacgcctggggtaatttttgtatttttagtaggaggacaggggttttggccatgttgggncaggggtgggtcttcaaactcctgactttcagggcgattccgctggccttggggcttttcaaagtgttgggggntttaggggngtga

SEQ ID NO: 7987 - DNA, 360 bp, Homo sapiens
  III.1615 (N68644)
  misc_feature (324)..(324): n is a, c, g, or t
  misc_feature (339)..(339): n is a, c, g, or t
tttttttttttttagcaaccaggtgtctttatttttcggaaagttcgtcgctgggttaacaaaatcgcacctgccggtttgggtgacacctctggccaccatgcactgggccccaagaagagaccaccctgagccatggccctgcaggcaagcaagggacagctgcccagactcagggcccagtaacagtacagaacgaaccaactgaattcacggcttccctccaagctttgaaaggtagcagtccaggctataaaactctagaaagcattgcgtaagaaagtgttaagtctacaacaaatacatctttgtaaaaactcaatnaaattatatatatangatatatataaaacttggtaa

SEQ ID NO: 7988 - DNA, 356 bp, Homo sapiens
  III.1616 (N91660)
  misc_feature (63)..(63): n is a, c, g, or t
  misc_feature (64)..(64): n is a, c, g, or t
  misc_feature (89)..(89): n is a, c, g, or t
  misc_feature (118)..(118): n is a, c, g, or t
  misc_feature (199)..(199): n is a, c, g, or t
  misc_feature (202)..(202): n is a, c, g, or t
  misc_feature (213)..(213): n is a, c, g, or t
  misc_feature (230)..(230): n is a, c, g, or t
  misc_feature (233)..(233): n is a, c, g, or t
  misc_feature (234)..(234): n is a, c, g, or t
  misc_feature (243)..(243): n is a, c, g, or t
  misc_feature (255)..(255): n is a, c, g, or t
  misc_feature (262)..(262): n is a, c, g, or t
  misc_feature (264)..(264): n is a, c, g, or t
  misc_feature (272)..(272): n is a, c, g, or t
  misc_feature (277)..(277): n is a, c, g, or t
  misc_feature (280)..(280): n is a, c, g, or t
  misc_feature (286)..(286): n is a, c, g, or t
  misc_feature (296)..(296): n is a, c, g, or t
  misc_feature (334)..(334): n is a, c, g, or t
  misc_feature (338)..(338): n is a, c, g, or t
  misc_feature (341)..(341): n is a, c, g, or t
  misc_feature (351)..(351): n is a, c, g, or t
atttcggcacagccagggctttttctgggcaccgagttttgttttaaaactggacctgtatanntgtaaagctatttatgggcccctgnactcttgttccacaccccaacacttccancattaagctgccacatgcggagagtttaatttttaacttattgacaaccgagagggttatcccgccgatagagggacggcnagnatgtacgtcangctgccccggagctganganncccttcaanctaaaaggttgntaatagntngaagtgantccantgnagatantttattttgntttttttttttcaggagaattagatttctataggattnttcntanggagatttanttttt

SEQ ID NO: 7989 - DNA, 367 bp, Homo sapiens
  III.1617 (H01163)
  misc_feature (318)..(318): n is a, c, g, or t
gcttttattaaacacaaatgtaccagacactgtgccaggcacttcacatacagtatttcatttagtgcaacaatcctgcagtactggtcttaacctaatgttgcaaatggggaatctgagattcaacaaggttaattagcttgcccgtaatcataagcacataaatgtgattctcaaggattccaaggcccttgctcagtttactggccatgctgttttcttgcattttatgtaggaagaacaggacccgggcatctccctccaccattgacctccagagaaggaggatgacacagttgggaaggggctgtctaaggncaggacagggaaatgggagtttgggggggccaaatcttaggtttggggg

SEQ ID NO: 7990 - DNA, 372 bp, Homo sapiens
  III.1618 (H01247)
  misc_feature (1)..(1): n is a, c, g, or t
ngaagcctaaggctaatagcggaatgaaatacctgtctgctcagtagaaccttgcaggtgctgttgcaggcgcaagaccgtagatctcaggcctctaacacttccaactccagccaccactttcctgtgcattttcactcctgagaagtgctcccctaactcagatcccctaacttagatttggcccccaactccatttcctgtctgtcttagacagcccttccaactgtgtcatctcttctctgggaggtcaatggtgggaggggagatgccgggggtcctgttcttcctacataaaatgcaaggaaaacagcatgggccagttaaactgaggcaaggggccttgggaatccttgagaatcacattatgtg

SEQ ID NO: 7991 - DNA, 308 bp, Homo sapiens
  III.1619 (H87760)
  misc_feature (153)..(153): n is a, c, g, or t
  misc_feature (247)..(247): n is a, c, g, or t
  misc_feature (284)..(284): n is a, c, g, or t
ctgaaaattgtaatgctaattaaatcactcactataacatagcttctatggagatgcatgctagcaattatacataattctgtttaaatttttgaagacatgatgagtctctgatcataaattctgccatggagccatattcctaagctaganggatatcccaaggaacttgcaacaatctgtaggctgctgctgatctttatccagtttttttaataggtgcttcaaatgggaaggtaacacctgncattttaaatttaccttttctgaagttaggatttttnaaaaatatggcataaggaggcatg

SEQ ID NO: 7992 - DNA, 404 bp, Homo sapiens
  III.1620 (H87809)
  misc_feature (379)..(379): n is a, c, g, or t
  misc_feature (388)..(388): n is a, c, g, or t
  misc_feature (399)..(399): n is a, c, g, or t
  misc_feature (404)..(404): n is a, c, g, or t
atacaaccggtgcaagcatgctgctgcaaattcaagccctcctgagaatagcaacattacaggattgtacgcaactgctaaccctgttccaaggtatttccttttttaaaaaaaatatataaacattgtaggggacacattgtttaaaaattgaaagtttttaccatccagactttatatttatgtaagttatcctcattctctactaattctccccacctctattctttcctagtagacttttcattacatcatattctaattaaatctaatttttaatatttattggtccacaaagcccttcagtagacggtagtgagaaacttgaaggagtcctgattttttagtccgggttcttctttaccaagtatgtaatttnctaaaaccngttttttcccnctcgn

SEQ ID NO: 7993 - DNA, 409 bp, Homo sapiens
  III.1621 (N27121)
  misc_feature (346)..(346): n is a, c, g, or t
  misc_feature (356)..(356): n is a, c, g, or t
  misc_feature (367)..(367): n is a, c, g, or t
  misc_feature (381)..(381): n is a, c, g, or t
  misc_feature (401)..(401): n is a, c, g, or t
agtgaataatggtgtgtttattttgcagaatattcgtgaatgtgttttttttctcttttcctgttataaaaagcagacaaatcaatagattagactatttaagcatggaataatagagaataaaatcgtaagactgtagaattctttaaggccataggaactattgacctacttttcttgattatagggtacattttttcaacaatagaaacatttgcattcccagaatattgctctctagataatcagttttttaaaaattttgattttctaatcctcctctttgccctgagatcataattattatcctttatttgcattgacgtcattcttctcttcaaaccgntattagtggnttttaataagnatttatcccaagcnttattacatgccagacattnccccaggg

SEQ ID NO: 7994 - DNA, 532 bp, Homo sapiens
  III.1622 (N40057)
  misc_feature (466)..(466): n is a, c, g, or t
caaaactgaagggtagaaggaggcaggagtttttgcaaaataaccagggaattttaatttcaaattaaatataagccaatagtgcaatgcaaccgataaagggaaaaatcaaatacaactgatcaagttggaaaacagtgagctattgggcttcattaatccacaaaaggaaatatgtggtaaagttggaatcacacctggcctatttatacaactttcaggccacacattaaggggaacattggcaaactgatcttctgcctggatgttttatccattattaaaaggggaatattgaagtctaccactgttattgtattgctgtcaatttctccattcagatgtgtcgatatttgctttgtatatttgggtgctctagtgttgagtatgtgtgtacttataattgttatatcttcttactgaattggatcattttgtccatatggtgacctttatcccctagagnacaattttccaattttaagtctggttttgccctgaccataaatataagcccatttctgctttcctt

SEQ ID NO: 7995 - DNA, 226 bp, Homo sapiens
  III.1623 (AA015967)
  misc_feature (215)..(215): n is a, c, g, or t
tcctttatttataataaatatttaatatcacagtgacatactaagatataacaggtacatttcttgctgtccaggaggagcttcttttgagtaataattttatttaaagttgtgagtaacaattttatttaaaattgtaacaattttcacttttatagtacaattgttatagacaagggttaaggtatttaagaggaggataatcattgaggtcntcatggtagag

SEQ ID NO: 7996 - DNA, 320 bp, Homo sapiens
  III.1624 (AA016094)
  misc_feature (11)..(11): n is a, c, g, or t
  misc_feature (69)..(69): n is a, c, g, or t
attcggcacgnggagagaagaggaggtagaagagggaagatatcttaggagctactccagcctgggtgncagagtgagatcccattaaaaaaaaaattcacaaattagagaataagaattagtcaaatcttagattcataactgtgtacagtggacatagaaataatttaaatatatatcatcattaaactgaaggaacagacatggtctttgagtattcattaaatacacaagtaactcagattaagccaagcttcttaatccctttatgcctaagtgttccattattgggaaccgcctaagccattgtgggagttatt

SEQ ID NO: 7997 - DNA, 291 bp, Homo sapiens
  III.1625 (H90225)
  misc_feature (153)..(153): n is a, c, g, or t
  misc_feature (176)..(176): n is a, c, g, or t
  misc_feature (183)..(183): n is a, c, g, or t
  misc_feature (188)..(188): n is a, c, g, or t
  misc_feature (202)..(202): n is a, c, g, or t
  misc_feature (229)..(229): n is a, c, g, or t
  misc_feature (272)..(272): n is a, c, g, or t
  misc_feature (286)..(286): n is a, c, g, or t
ctgtgtttgcgaaacaggtatctcgtgatttcagaaaagcttgaggagattaagtctttccgggagctgacctgcctggatctttcctgttgcaagcttggagatgagcatgaacttctagaacatctcaccaatgaagccctgtctagtgtnactcagctccacctgaaggatanttgtttntctgntgctggggtgcggnagatgacagcaccagttcgagtgatgnaaagaggccttgagaatctaacattattgagacttatcatgtnaccctgagatcacngatgc

SEQ ID NO: 7998 - DNA, 237 bp, Homo sapiens
  III.1626 (H90879)
  misc_feature (144)..(144): n is a, c, g, or t
atttttaaggacagcaaaaatgtttatttgaaaaaattactatgtattgaaaatatacattagaaattattacatacttccatagcattcccctcccacaccacaaaagtagaaatatctgcttactatgctaatgccataggnaaattcaaacaaaaggtaaatcatcctcagtctcctttactcaaacactagagctgggggccagagaaaggtcaacttgtatctactaatcaa

SEQ ID NO: 7999 - DNA, 214 bp, Homo sapiens
  III.1627 (N81092)
  misc_feature (32)..(32): n is a, c, g, or t
  misc_feature (183)..(183): n is a, c, g, or t
  misc_feature (204)..(204): n is a, c, g, or t
gtgtccccgttcagcagcgcacagctcgcatncccgccaagtctgaatctgaccacacctgcttccacctcccaggatgccagccagtgccagcccagcccagacttcagccatgatcggcagctcaggctgttgctgagccagcccatccagcccatgatgcccgggtcctgtgacgcaagncagaagtagtacttcgaaatnagcaggacgg

SEQ ID NO: 8000 - DNA, 199 bp, Homo sapiens
  III.1628 (W07453)
  misc_feature (162)..(162): n is a, c, g, or t
  misc_feature (172)..(172): n is a, c, g, or t
  misc_feature (181)..(181): n is a, c, g, or t
  misc_feature (188)..(188): n is a, c, g, or t
  misc_feature (198)..(198): n is a, c, g, or t
ttttttttttttttttttaaaaataatgaaaaataatctctttattctctctctccaacagatctctgacccagtccttctccaatacaaaggaaagacgatcaagagcgtgaaggccagctagcgcagatgggcgggccgcaggtggctagagcaaccggngtactcctcngggggattnagccganaatggccaant

SEQ ID NO: 8001 - DNA, 468 bp, Homo sapiens
  III.1629 (AA707794)
atgatccataagttccattcttaagtttatttcaaacaggagtgaatatatttgttcaccaaaagacatgtaatagaatgttcataacagcactgtttgtagtagttccaaaccggaaattactcatatgtccatcaacagtagaatggataaactgtggtgtgatcacgcactcaacttccatatagcaccaataaactattgctaagcaatgatgaaactcctaaacataatattaaatgaaagaagccagacacaaaatgaatacatattgtgattgcaattatataaatttttatataaacaggcaaaactaatctttggtgatagaagtcaggatggtagttacccgtgggttcgggggatgggcgttactggaaaggggcataagggagggttctggggttctggtaatgatctgtttattgacctgggtgctagtgatatggatgcgattacatcatgaaa

SEQ ID NO: 8002 - DNA, 381 bp, Homo sapiens
  III.1630 (R21047)
  misc_feature (126)..(126): n is a, c, g, or t
  misc_feature (259)..(259): n is a, c, g, or t
  misc_feature (294)..(294): n is a, c, g, or t
  misc_feature (344)..(344): n is a, c, g, or t
  misc_feature (350)..(350): n is a, c, g, or t
  misc_feature (371)..(371): n is a, c, g, or t
ctgtctcagcatctcagccgccatcttggaaatcctcaatgcctgggagaatggggtcctggccttcgagtccatccagaaaatcactgataacatcaaagggaaggtatgcagtctggcggtgtntgctgtggcttggcttgtggcccacgtccggatgctggggctggatgagcgtgagaagtcgctgcagatgatccgccagctggcagggccactgtttagtgagaacaccctgcagttctacaatgagagggtngtgatcatgaactcgatcctgggagcgcatgtgtnccgacgtgctgcagcagacagccacgcaggattcaagtttccctccaacnggggtnggacaacaattgcccttactnggaaacctgg

SEQ ID NO: 8003 - DNA, 340 bp, Homo sapiens
  III.1631 (R46229)
  misc_feature (41)..(41): n is a, c, g, or t
  misc_feature (44)..(44): n is a, c, g, or t
  misc_feature (48)..(48): n is a, c, g, or t
  misc_feature (64)..(64): n is a, c, g, or t
  misc_feature (80)..(80): n is a, c, g, or t
  misc_feature (141)..(141): n is a, c, g, or t
  misc_feature (158)..(158): n is a, c, g, or t
  misc_feature (184)..(184): n is a, c, g, or t
  misc_feature (212)..(212): n is a, c, g, or t
  misc_feature (217)..(217): n is a, c, g, or t
  misc_feature (257)..(257): n is a, c, g, or t
  misc_feature (268)..(268): n is a, c, g, or t
  misc_feature (324)..(324): n is a, c, g, or t
  misc_feature (336)..(336): n is a, c, g, or t
tttttttttttttttttttttttttgggagccacgaggagnttnattnatacatgaacgaaggnagatttccctcacatnttacaaaatacacataaacacacacacacacacacacacacacacacacacatatacacantttgcatctagaaagtncctcagaggtaagactactcctgggntggggcgggcgcacacaggggtgaccantgggnttgtggtccaggttgctcacactcctcaggtgccagcagntggagaggaanttttgaaagaagaaaccgggagacatcctgggaggtcaggagtcaggagcgggganctgggaagccgntaga

SEQ ID NO: 8004 - DNA, 421 bp, Homo sapiens
  III.1632 (N24350)
  misc_feature (375)..(375): n is a, c, g, or t
ggaaggaaaacagaaataacttgctggcttgtctggagtcacatgtacttaggtgacaatttacagaaagtcatctctgcagcttgatgggcgacaacccttttcaaccaaaaagtaattcaaaaatggcagaactgtttatggaatgtgaagaagaggagctggaaccatggcagaagaaagtaaaagaagttgaggatgacgatgatgatgagccaatctttgttggcgagatatcaagttcaaaaccagcaatttcaaatattttgaacagagttaaccccagctcatattcaaggggactaaagaatggtgcactcagtcgaggtattactgctgcattcaagcctacaagtcaacactacacgaatccancatcaaatcccagtgcctgcctcaccaataaaattttcatcctgga

SEQ ID NO: 8005 - DNA, 495 bp, Homo sapiens
  III.1633 (R13248)
  misc_feature (335)..(335): n is a, c, g, or t
  misc_feature (443)..(443): n is a, c, g, or t
  misc_feature (452)..(452): n is a, c, g, or t
  misc_feature (467)..(467): n is a, c, g, or t
  misc_feature (483)..(483): n is a, c, g, or t
ctagctatgtgaccttgacctagccaaaccacggtttccttatctgtaaaatggaggtgatgaaatctctttcttacctaccccccatcatcgcggggagacctgaaggcatgacagatgtggcggtcctttataaaatgctgtatcacctcactagcagaatatggtccacagaccagcaacatggccatctcccagagtttattagaactgcagaacctcaggctcctcccagggcccagtgaatcaggaatctggcatgttaatacgattcccagggcgatttcgtgttgcacattttatgttttgaggaaggcacgtctattcataaggantgttaaaattgtttggacattttacttcaggcagctgttctcttccagcacttggggggagcttttgcccgggggtttaaaggggagcaggaattttgttgattcccnggcaaagtncctcccttttgggtncccacttttttggggnaagaggagaggc

SEQ ID NO: 8006 - DNA, 372 bp, Homo sapiens
  III.1634 (R40328)
  misc_feature (182)..(182): n is a, c, g, or t
  misc_feature (187)..(187): n is a, c, g, or t
  misc_feature (194)..(194): n is a, c, g, or t
  misc_feature (222)..(222): n is a, c, g, or t
  misc_feature (240)..(240): n is a, c, g, or t
  misc_feature (281)..(281): n is a, c, g, or t
  misc_feature (299)..(299): n is a, c, g, or t
  misc_feature (306)..(306): n is a, c, g, or t
  misc_feature (317)..(317): n is a, c, g, or t
  misc_feature (369)..(369): n is a, c, g, or t
tttttttttttttttttgcccatagtacagttcatctttatttggggcaagaagtattgggaaggattattcttactgtatttgtccccatatcccaggaagacctagggcaacacgaaatttgtttcccactaaacaaacaaacaaacacgcacacacacacacacacctcctgggcagtntggtntggtggnaaggaacaccagactgggaagacagggncacttgtgcttttgccgnttactgggccgtgcgaccttagggaaaagtcacttcacctnttcagggcttcgggcccntcatccntaaaaacagtntgtgatttaagacttaactgagggttcagatgggcttttccagcccgttggntta

SEQ ID NO: 8007 - DNA, 553 bp, Homo sapiens
  III.1635 (T84542)
  misc_feature (363)..(363): n is a, c, g, or t
  misc_feature (376)..(376): n is a, c, g, or t
  misc_feature (438)..(438): n is a, c, g, or t
  misc_feature (469)..(469): n is a, c, g, or t
  misc_feature (510)..(510): n is a, c, g, or t
  misc_feature (551)..(551): n is a, c, g, or t
ttttttttttttttcaccttctgtatcaaaagactaagaacattactgtatattagaaatgtcagagaaaggtatgtttaaggtaatggagaagaaaattttaatgaccaaggaattaggctgttaacatgcagagtagggcttaacattgtctcattattaaaaaataaaagttgatttaaaacaatattgtgtgtgattgtgaagctggtgtctgttgtgtgatcagtggtaaagcacgtgagttgctaggcacaggtgttgagatttcgtgtttgatcagacttctcttttaagtttaagcctggttgaacacaatctctgtccaggtaccgtgggaaatccttaatgtggaaccatttncatggaaaccctncactatttgtccagtggtgggcgatgctattttatttaaccacattttttcaaatgaggagnatggggagttttatagggcctaaggttcagntggccatcccccagacgcctgccttggatgccagttttccngttgccacccccaccccctcctgttccgtttagggccgggngt

SEQ ID NO: 8008 - DNA, 529 bp, Homo sapiens
  III.1636 (H72516)
  misc_feature (363)..(363): n is a, c, g, or t
  misc_feature (384)..(384): n is a, c, g, or t
  misc_feature (476)..(476): n is a, c, g, or t
  misc_feature (499)..(499): n is a, c, g, or t
  misc_feature (512)..(512): n is a, c, g, or t
  misc_feature (518)..(518): n is a, c, g, or t
actgaaaaaataaattccaagaggcttagttaggtatggcagggcaaagatattttataaatattttggcaagtagagacaagagaaaatgatgcgtgaggtattttcaatagaagccaattgagcttcctcatttgcatgaagcatctgagctgttttcctaagttccagttcctcctcctcaggtgggcagccttacagcctctgcatttgactctgtcaagatgagactgtagtaaagtgagctctttgtatcattgatgaaagaaagaaaggatttaaattaaccattgggactgagttaaaataaaataaagctataaaaagatcatggctgcttgaccatgaggaaaaacctagganaatagtcatttgcatgagtcntttgttccccgaggaacagccttctgttgaatggtgttcctggagggaaattgctcaaataggttaccttggttttttaaaaattatttctncgttagcatggcatttgggtacngccgatctgcggnacgtcnggctgccgcct

SEQ ID NO: 8009 - DNA, 488 bp, Homo sapiens
  III.1637 (H72914)
  misc_feature (110)..(110): n is a, c, g, or t
  misc_feature (117)..(117): n is a, c, g, or t
  misc_feature (328)..(328): n is a, c, g, or t
  misc_feature (399)..(399): n is a, c, g, or t
  misc_feature (409)..(409): n is a, c, g, or t
  misc_feature (422)..(422): n is a, c, g, or t
  misc_feature (433)..(433): n is a, c, g, or t
  misc_feature (445)..(445): n is a, c, g, or t
  misc_feature (455)..(455): n is a, c, g, or t
  misc_feature (464)..(464): n is a, c, g, or t
  misc_feature (476)..(476): n is a, c, g, or t
  misc_feature (483)..(483): n is a, c, g, or t
ttggaaaagaaatattcctaataattcatttaatcatctggagagtgggttgaagttttgtaaaatttaatttcttcattatagactgtattattttaataaaagctttnctttggngtcacccattgtgtgcagcactgagctggggccctgggagctctcactattgtccatctggccgcaccactgtcagcactgctttcaatgaactgtaacagaatactgatgactcaggcatttctgctggctgacagggaaggtccttgaggcgaggtctctttgtaggttcctccaagaaagggatgctcagggcactccttgggggtgnaaccagctggcaggccatgggaggagggacaacccgggttgccagtaggtaaggtttgcactggggctatncccagaggcnaggaacaaggggnacagggtcagncccccaggagtncccagagggncacagactnggggcaggtccnggggggnttttt

SEQ ID NO: 8010 - DNA, 470 bp, Homo sapiens
  III.1638 (N49912)
  misc_feature (445)..(445): n is a, c, g, or t
ttcacagttattgttttattcttgttctcttgtgtcgtttacagtgtctctcacaaaagaagaactccctctggcaggggatgtgactagggactcattgggccagcaacaaccacaaaagaatctaggcattagaatgaactactggaacctgagtcaaagacctgttagtgataatttgcccattttctggcctctagttgcttgaataggggtaagacagggaaatattaaatgattgtgtactgagatggagacgtggaagatctggccctgatggaggatcagagggagcaggttgggtgaaagcccggttttaagcctcttgttctagggaccacgttgagtgacagggtgggaaaagatgcatcaataaggaaatgtggcagtgttgaagagggacccagctgtggacaggggaggagggacagggtgctgaaacacncctgagagaattcttccggtgggca

SEQ ID NO: 8011 - DNA, 489 bp, Homo sapiens
  III.1639 (N50012)
  misc_feature (20)..(20): n is a, c, g, or t
  misc_feature (23)..(23): n is a, c, g, or t
agcactgaataaatagatcnatngtgactgaaaaagccccagagccacatgtggaggaggatgacgatgatgagctggacagcaagctcaattataagcctccaccacagaagtccctgaaagagctgcaggaaatggacaaagatgatgagagtctaattaagtacaagaaaacgctgctgggagatggtcctgtggtgacagatccgaaagcccccaatgtcgttgtcacccggctcaccctggtttgtgagagtgccccgggaccaatcaccatggaccttactggagatctggaagccctcaaaaaggaaaccattgtgttaaaggaaggttctgaatatagagtcaaaattcacttcaaagtgaacagggatattgtgtcaggcctgaaatacgttcagcacacctacaggactggggtgaaagtggataaagcaacatttatggttggcagctatggacctcggcctgaggagtatgagtttt

SEQ ID NO: 8012 - DNA, 449 bp, Homo sapiens
  III.1640 (N62993)
cacattttaatttcattttaaaggaagttcattttgttctttttcaatcataactgtaaaattaatcaaaaacagagtcaatgagaaaatattatcttttaggcaactcttcaagactataagcccagttcacttactcctacactctcctttccctcccctcactctctattaaatataaagtagctgatttctttatgtctttatagtatcattggcttcacaggtgtgtgctggggtgggggaggagaagttaattctatccatcaatcaacaacattttcagtgtctaccacaaagcgttctgctataatattttactcacattgtggttccaagtgtttttctttttaaagtgaggatactataatagtgccttgggccatatggtacttacacaaattccaagcagtcaaattacaatataattccattattatttttagggt

SEQ ID NO: 8013 - DNA, 412 bp, Homo sapiens
  III.1641 (N79901)
tgccttactcaccttgcaattttcttctcatctacttaactggttatcttgcctgtgtaagatttaattaatattgactaccttttcttggtgatgaacaaaatgatatcctatacagaaatgaatttcctaagggtttaaaccctgttttcactaacattttctactttttcctttttcagaacaggctattctatttcttagctcataggctttctttttaaagactatatgatcattcactcctttttctctggaagaactgtgtaagttgcttaaaatgcatagcagttagctagaaatatcagtgccatggatggatcaaaaatttggaataactaatttttaaaagataaaaattctttggcatggattttttttcctaaggggccatacccttttgggtggcaac

SEQ ID NO: 8014 - DNA, 469 bp, Homo sapiens
  III.1642 (R59015)
  misc_feature (439)..(439): n is a, c, g, or t
gaactttttttttggatacagcacaaactccagttgacagtaaaatgaagcttctaggtattttgtattgtacatatttcctcctactgggtgttcaaaagaaatttaaattcaagtaccttttgtgataaaatgttttagatttgtgcacccattggcaaaacaggaaagtttccagataggtattgtatcattgagaatgcagcacagatagtgtgggcttcacactatagacacagaatatagctttttcttaaagccaaatttgggtgataggacactttaaatatccttaattttggcaaccactagcaaaaaaacttgtcagaataatttaaccaagcccctctccacttcttttatttaaaagcactgattcaattgctagggaatatttttgccagatttttctttacagtattcccttagggcaggtccnctgggaaaacttgcagaaaaatgtggagct

SEQ ID NO: 8015 - DNA, 281 bp, Homo sapiens
  III.1643 (R50018)
  misc_feature (208)..(208): n is a, c, g, or t
  misc_feature (270)..(270): n is a, c, g, or t
atgatatcctatttatattaacttattggtgctttcagtggccaagttaattcccctttccctggtccctactcaacaaaatatgatgatggctcccgacacaagcgccagggccagggcttagcagggcctggtctggaagtcgacaatgttacaagtggaataagccttacgggtgaagctcagagaagggtcggatctgagagantggggaggcctgagtgggagtggggggccttgctccacccccccccatcccctactgtgacntgctttagggt

SEQ ID NO: 8016 - DNA, 384 bp, Homo sapiens
  III.1644 (R50354)
  misc_feature (15)..(15): n is a, c, g, or t
  misc_feature (18)..(18): n is a, c, g, or t
  misc_feature (95)..(95): n is a, c, g, or t
  misc_feature (256)..(256): n is a, c, g, or t
  misc_feature (271)..(271): n is a, c, g, or t
  misc_feature (298)..(298): n is a, c, g, or t
  misc_feature (322)..(322): n is a, c, g, or t
  misc_feature (356)..(356): n is a, c, g, or t
  misc_feature (375)..(375): n is a, c, g, or t
caagagtagattctnttnttcatttctcttttttttcttaaaaaaaaaagtattcatttggtataaaaaataaatattttaaatatgacattgantaaataaaaataatctgtcagtatgaaacatccccacagggtacattcatcaaagaggattttgtcacccaaggccatgtgcttttcagtggaagggaaggagggaaacctctaaggccgcacggtgggcccacggagctagcacgtgggcggggactganggctggatgcccggnttgagggtggggaactagagatgactntaagggcagggaacatctgtaccntctgcagggaaattgctaccctccccgggtgccngaggttccaccccacaaantttgtctac

SEQ ID NO: 8017 - DNA, 240 bp, Homo sapiens
  III.1645 (H85345)
  misc_feature (45)..(45): n is a, c, g, or t
  misc_feature (107)..(107): n is a, c, g, or t
  misc_feature (134)..(134): n is a, c, g, or t
  misc_feature (146)..(146): n is a, c, g, or t
  misc_feature (167)..(167): n is a, c, g, or t
  misc_feature (181)..(181): n is a, c, g, or t
  misc_feature (188)..(188): n is a, c, g, or t
  misc_feature (191)..(191): n is a, c, g, or t
  misc_feature (195)..(195): n is a, c, g, or t
  misc_feature (198)..(198): n is a, c, g, or t
  misc_feature (209)..(209): n is a, c, g, or t
tcccaggggacattgcacctaagtttcaaaacacacaaaatagancccctttactaaacagttttcattttggggttacaaaaaagtcaatgtttcacaatcacaangcataagggtacatggttctgaaacantttccaggcagntttctctcattcactgtactngggtagttttgganacccagnccntganccnttccttacaantgatctccaccatgggcctccctggggtctc

SEQ ID NO: 8018 - DNA, 372 bp, Homo sapiens
  III.1646 (H85806)
  misc_feature (184)..(184): n is a, c, g, or t
  misc_feature (358)..(358): n is a, c, g, or t
tcgtgtttttgacattccttgaatctgttttttattccccttccacagaacaggcctgggactttccaacaccctgctaaggaagttctgtgtccaagtcccacccaggctgggttgtccccacctcctccagcccacacagcccaggcagcatccgggccagtgccctgcatgacagagggtntttgttgtgtaatgtttgttcccaagttgcattttctaaccgaatcagtgtgttttcatgaaactgagtgtttctgtggaccagtagttcctctgttgtcttcagtggttttcctgtgtggcttcaagggttctctgtgagagtctggattttcatttctgggaatggctgggncccatcccaatttt

SEQ ID NO: 8019 - DNA, 267 bp, Homo sapiens
  III.1647 (H90903)
  misc_feature (190)..(190): n is a, c, g, or t
aaacagcaagtatgtactatttcacacagtttctgtgggtcaggaatccagaagcggctgagatgggtagtttaggatcagggtctctcacaaggctttggtccaggtgcaggctgcagtcctccagaggcgggactggggctggaggtctgcttccagacggtcactcacatggatgtgggcaggcggnctcagttccctgccacatggccctcctcataggacgcttgagtgtcctcgcggcatagcagctgggctttccccaga

SEQ ID NO: 8020 - DNA, 403 bp, Homo sapiens
  III.1648 (H91015)
  misc_feature (50)..(50): n is a, c, g, or t
  misc_feature (180)..(180): n is a, c, g, or t
  misc_feature (317)..(317): n is a, c, g, or t
  misc_feature (401)..(401): n is a, c, g, or t
tgaatttaaagagtcctttactagcggactttgtttcaggacgaaagcancacagagcccacagggtgtgggagatctgagatctggaactgggatctctgggctctgaacttgttctgttgggcaatctgctgatggagaccttgtcttcgagtgtcaggatgcacactgtggtcagcnccccctaggttgcaaagggcattctatctgggacttgtcttccctgcgcatctgctctccttttcaacagcttcttggttcttttgaaacctatgctgtcttcccaaagccctacctcctattgtgttggcctcctngtaagccatgctttcatctgtccagtcctgctcttggtgggatgaacgagaggccttctacagatctcaaggtggatgaagtanat

SEQ ID NO: 8021 - DNA, 413 bp, Homo sapiens
  III.1649 (R25531)
  misc_feature (367)..(367): n is a, c, g, or t
  misc_feature (402)..(402): n is a, c, g, or t
tcaaagacacagaggtggcgatgagcccatctggttgggacagagtgaaaaaggggttcagctggaggggcctgagaggtgagggtggcagaacgtgtggaggtgtaagctcagcagatggtggacaccctggaggccattgtgaggctctggttctccctctgtgtgatttcaagatccattgcatggttgcagctgagaagtgaacaagccttatgacctggtttctcttgaagaggatctttccggtaggtggccttgagaaaaacacaggagggattgggaggatgtagaaattcctatttgtaagggtttgcgatctgggtatatgtccacttgagccgtgaacttacttgtctcgagttcntgttattctagttggggactgtttctgcttaactnctgggaggggt

SEQ ID NO: 8022 - DNA, 432 bp, Homo sapiens
  III.1650 (R45590)
  misc_feature (339)..(339): n is a, c, g, or t
  misc_feature (378)..(378): n is a, c, g, or t
  misc_feature (421)..(421): n is a, c, g, or t
  misc_feature (426)..(426): n is a, c, g, or t
ttttttttttcaattccaaaaggaatatttattcagaacgcatcaaagggtctactggaattggaaacacagtcatcattcttaaggataagaacagccaattccttagatgcaggtcttctgagtcagtggactccacactcctgggcttgcatccagattatcatcgacttctgtactgatgcttgcaggggaggctccgtgggactccctgtatatcttccgctcctccagctttgattcctgggcacacagcatggaaaaggcaaggcagagggaacacaggcagttaggcaacttttcaccactttttcatctgttctttccccattattggantccatctaagggaggacatcactgtggactgccgggggntgttcgggccttcaggaagggagtttgaaattttgttagggantgagncccgtg

SEQ ID NO: 8023 - DNA, 370 bp, Homo sapiens
  III.1651 (T79938)
cttttctaattcattcgctcatttgtagttttccgatttcatcatttaatgtgtaatatttacattatcattccaaatttataccatgctctaatttctgtttcagttttctcagctcattgatttattgagaagtctgtggcttcatttcaaaaatgcaaggatattagtcatctttgactgcagaatctagtgagtcccagagttcccagggatgtcctgggtggtctttgttagggggtccagggctggctgggggttcattgggtgtccactgggggcagctcctgtgccttctgggagtctctgagtctccttctgttgagtatgagatctggggtcccccgtggggctagtgggatgggccagg

SEQ ID NO: 8024 - DNA, 307 bp, Homo sapiens
  III.1652 (R10081)
  misc_feature (4)..(4): n is a, c, g, or t
  misc_feature (6)..(6): n is a, c, g, or t
  misc_feature (7)..(7): n is a, c, g, or t
  misc_feature (13)..(13): n is a, c, g, or t
  misc_feature (253)..(253): n is a, c, g, or t
  misc_feature (256)..(256): n is a, c, g, or t
ttcntnnaaaganttttatttgtgagtaaaacatgttacactggagaaaggacattcaggacctgtcctcccaagtcggtgtccatatatgcaactatatttcatgttgtaatacaaaggattaaactacaaaagtgaaaattaaaagtcattgcatatgtggggtaaaggaggggataaaggaagagtccacggttaaggacttttcattctgccttggcaaccaaaacgacacagaagagaggcagcacgnttncccgcgtagcaggccctgcggctcagagggagctgggagcggccggtcagt

SEQ ID NO: 8025 - DNA, 411 bp, Homo sapiens
  III.1653 (R10178)
  misc_feature (25)..(25): n is a, c, g, or t
  misc_feature (326)..(326): n is a, c, g, or t
  misc_feature (364)..(364): n is a, c, g, or t
  misc_feature (370)..(370): n is a, c, g, or t
tgaaggcttctgcagctttggctancgttcaccctcctgagcctcacctttcctgccgtccctcctgttgtgaaatcaccacattctgtctctgcttggcttcccctccaccctaaagtctcaggtgacggactcagactcctggcttcatgtggcattctctctgctcagtgatctcacttaaatctatatacaaagccttggtcccgtgaaaacactcgtgtgcccaccagcggccttgaaggaggcaggtctggggccagatgctggggcagggaaaccccaggcgggcagatggggcctgtgtggcacccaacgtggatggntatgcatgttttggaccgacgatccctcggaccaggantcaggnttcagggaggttcagttttttttttttcatttggggttttt

SEQ ID NO: 8026 - DNA, 435 bp, Homo sapiens
  III.1654 (R66219)
  misc_feature (60)..(60): n is a, c, g, or t
  misc_feature (62)..(62): n is a, c, g, or t
  misc_feature (386)..(386): n is a, c, g, or t
  misc_feature (400)..(400): n is a, c, g, or t
cagaacctcccgccatattcctctcacctccatcgacctctgccctaccagcgtgagtgngnagatgtcctctacttacccactagctctcaagaccatacctgggtcacagacaactgccaagagacctgcggtgaaccaaccagctgccagccggtccactgtgagaccgcaattcttgaaacctcttgcggttcttccactgcttactacgtgcccagggccttgccaaggaagcagttttcttcctgcttctttcttctccagttcctgccttccagtatcctgtaggaccacagaggtatgtgtccagcggctgttcgtccattgagggccgttgttcaatagtttaccagcccatagggagattgtgttgcccaatggcntattcggcccccanttttggtttgttccaagagtttgccaggccccaaa

SEQ ID NO: 8027 - DNA, 401 bp, Homo sapiens
  III.1655 (R67568)
  misc_feature (10)..(10): n is a, c, g, or t
  misc_feature (11)..(11): n is a, c, g, or t
  misc_feature (12)..(12): n is a, c, g, or t
  misc_feature (13)..(13): n is a, c, g, or t
  misc_feature (385)..(385): n is a, c, g, or t
aatttggacnnnntcgcatttattatagtgcaaaacaaatacattcttcccagaccagagcaacattgaatagcattgtaaactaatttttttgatgtcaaggaaagatgaaaacaagataaaacatgcgagagaagcagcttgcattagatcaggcacagtaaaactaagaaacatcagttgctactagcaaagaagcaaaagtccatggagtttgaatttttgttgtggatgctcagagtgattattcactggaacaaagaagctgctggtttcacagtccagagccaagatggacgacacgtgctgaacacatggggtcagaggttgggcaaccactgaacagaggccccagaggtctgagggctgctgggcacaacgtganggctttgagggcgtta

SEQ ID NO: 8028 - DNA, 423 bp, Homo sapiens
  III.1656 (T84537)
  misc_feature (395)..(395): n is a, c, g, or t
ttcctctgtcgggtgtggccaagtggggataaagagaagagcaacatctctaatgaccagctccatgctctgctctgtatctacttggagcacacagagagcattctgaaggccatagaggagattgctggtgttggtgtcccagaactgatcaactctcctaaagatgcatcttcctccacattccctacactgaccaggcatacttttgttgttttcttccgtgtgatgatggctgaactagagaagacggtgaaaaaattgagcctggcacagcagcagactcgcagcagatttcatgaagagaaactcctctactgggaacatgggctgttcgagacttcagtatcctcattcaacttggattaaaggtattttgatagttcatcctgttnctggcatgtatgtttggaagggaaggat

SEQ ID NO: 8029 - DNA, 463 bp, Homo sapiens
  III.1657 (T91383)
  misc_feature (1)..(1): n is a, c, g, or t
  misc_feature (3)..(3): n is a, c, g, or t
  misc_feature (120)..(120): n is a, c, g, or t
  misc_feature (343)..(343): n is a, c, g, or t
  misc_feature (463)..(463): n is a, c, g, or t
ngnttgggcaacaatttatctggggtctaatcagagtcatcataactctcatcactatcttgctccttttctccagcacttacttcgtcttcttcaccatcctcagtggctttgctcttngaggcctgggatgacatgtcatcctcactctcatctgctgtgctctcctgggaattttgggacttaatctcttcaccctgcaagtcccggttttttagattgcccagccagaaagcctctctacaattgttgagagtgagcatagctttgactctgcaaactaacagttccaggggtctttttgagcagaggcacatgttggggtgagtctcgtgtcctgggngaaatcttgggaatgcccacacaggtgatggaagcagccttgtgtccaactgggaaggtttccagtaagctcagaacatcttccttcaaacatacatgcagaacaggatgactatcaaan

SEQ ID NO: 8030 - DNA, 191 bp, Homo sapiens
  III.1658 (H85123)
  misc_feature (8)..(8): n is a, c, g, or t
  misc_feature (23)..(23): n is a, c, g, or t
  misc_feature (27)..(27): n is a, c, g, or t
  misc_feature (70)..(70): n is a, c, g, or t
  misc_feature (112)..(112): n is a, c, g, or t
  misc_feature (149)..(149): n is a, c, g, or t
  misc_feature (154)..(154): n is a, c, g, or t
  misc_feature (163)..(163): n is a, c, g, or t
  misc_feature (174)..(174): n is a, c, g, or t
gaagaccnaaaggacagggaacnactntcttgcaatcctaaggagagactccagaagccagagctggctngcagcttagaagaaaactttcctcccatggaattgtgtcccntggcagtcctcataacgcccaggaatgacaaaaatcncagantgacatctngctggaaaggntgcagcgaatgtggcct

SEQ ID NO: 8031 - DNA, 256 bp, Homo sapiens
  III.1659 (H85162)
  misc_feature (2)..(2): n is a, c, g, or t
  misc_feature (201)..(201): n is a, c, g, or t
  misc_feature (231)..(231): n is a, c, g, or t
  misc_feature (251)..(251): n is a, c, g, or t
tnctagatccttatcagagagatgatttgcaaacgttttctccaactctgtgggtagccttttcactgtcttgataatgccctttgatgcacaggcgtatttctcaagtgattttattcccacaaggctaaacgttaccatatttctcatacttcacttttctgacaaaatcctgctgaaaactttaacaatattattgangtttggtttgagccttttcccccaataaancacacagtcctcaaggtttntgatt

SEQ ID NO: 8032 - DNA, 435 bp, Homo sapiens
  III.1660 (H05279)
  misc_feature (239)..(239): n is a, c, g, or t
  misc_feature (380)..(380): n is a, c, g, or t
tttttttttttcaccagaaataaaattttattagtaacatgtcaaatgttttaaaatacaattacctttcttcttcctctcagtttaaaaaacaatccaataaaaactctaaatcatgacccaaatatttttaaatgtgaaaaagacatatttcagattatgtaacagatacacattttcccaaataaatgttgtaggaacaccatctgcttgatatttgagtgcattcccacaggaantaaatttctgcttctcttccttcattaatgggcttatggacaaatttatgacactatatttcacaataggctataccaaaattttatggaccaaaagggggctggacaaaaatcacttggggcatggcttcaaattggggncaatttatggtggactggtcctcattttgacacccaatcctccaccccctttact

SEQ ID NO: 8033 - DNA, 475 bp, Homo sapiens
  III.1661 (H05329)
  misc_feature (415)..(415): n is a, c, g, or t
  misc_feature (467)..(467): n is a, c, g, or t
aatgaacttcggtatttcttaacaccaggtactggagcccaccttctttctctccctctggtttcctctttaaatcacagcctgaccccagtctttatagtccattgtaagtggaagttatagctctattcttcacccacaccttgctccctatcattgatacttagaagaaagtaacaatttgcagtactggctgaactcctttgggaaagtttctggagtgtatcaaataagaattcatcatagtaacatggtcgttactggctgaacaaaattctttttgagactattgtacttagtcattaaataattgtttactaagggcaattttcatgtttctgggaattcagtgtaaatagttaacagctgtatatgtctcacaaaaggaaactacttagggtgggaaacaatgggngggttgtgtataattaatttcattcgggtcctggaatatttaatgtaacctntgggcctt

SEQ ID NO: 8034 - DNA, 402 bp, Homo sapiens
  III.1662 (H21848)
  misc_feature (46)..(46): n is a, c, g, or t
  misc_feature (288)..(288): n is a, c, g, or t
gaaagtctaaagggggtaaagtgagtagctatgctgatattctctngtggaaataaatgttctctagccacactccaaattagagaaatttctccaattagatgcaacttggtgtaggacatttaacaaaatctcaaaagctaacagaattggggtcttacaagaaaaatgacacacttgcctgtagcctctaccgagatctcttccaacacccttgccagctattgctcaggcacaaaatgtgatgagaacacaaaatagccagacctccactcccactgtaacttngtgtgggaaaacaaaatgattctaggcacaaaggacaaaggtaaaccagtcacatggcgttatatcagagccaaatagaatgtccaatttgaggctggcccaattcatggagcc

SEQ ID NO: 8035 - DNA, 361 bp, Homo sapiens
  III.1663 (H21849)
  misc_feature (6)..(6): n is a, c, g, or t
  misc_feature (10)..(10): n is a, c, g, or t
  misc_feature (127)..(127): n is a, c, g, or t
  misc_feature (131)..(131): n is a, c, g, or t
  misc_feature (136)..(136): n is a, c, g, or t
  misc_feature (146)..(146): n is a, c, g, or t
  misc_feature (151)..(151): n is a, c, g, or t
  misc_feature (172)..(172): n is a, c, g, or t
  misc_feature (311)..(311): n is a, c, g, or t
  misc_feature (341)..(341): n is a, c, g, or t
cagtanatanttaattgaatttattttaagttttcctacagcataaatcatgagcaattaattcccttctgccccttgaactataggttaaactctttgtctccttcctttgctccctccctctctncctnatttncttcttcttnttttnagaggttatgaagaccaagancacacagggttaatagcatgagctctggagccagacaccagtgatttgtgtcctgggctctgtcatcattggtatgattttagggcaagttattaaacctccaaactgtacataaaataacaatacctataggggtttncttaaaagggactaaaatatggtatggcanaaaacattaggaacaccacc

SEQ ID NO: 8036 - DNA, 317 bp, Homo sapiens
  III.1664 (R89322)
  misc_feature (36)..(36): n is a, c, g, or t
  misc_feature (122)..(122): n is a, c, g, or t
  misc_feature (213)..(213): n is a, c, g, or t
  misc_feature (258)..(258): n is a, c, g, or t
  misc_feature (308)..(308): n is a, c, g, or t
  misc_feature (313)..(313): n is a, c, g, or t
taaaatttataaaaatgcatctttgagaatactttnctcagcttgaattgttttccttttccacccccaaagaaaatacacaattatcagcacccacacatgtatacactcaaaactacagngacattctctacacagaactatattcgatatagcttgaactgccgaaaaatcaagacaattccaaaaagtgattgcagggttgattttttnctccaaaacacttgaggaaacaggtaaagctatttcaacaaaagnctttcctttgattgtcaaaagttgaaattcacatttaaaaaaaaaggggntcccnaatc

SEQ ID NO: 8037 - DNA, 414 bp, Homo sapiens
  III.1665 (R89407)
  misc_feature (54)..(54): n is a, c, g, or t
  misc_feature (71)..(71): n is a, c, g, or t
  misc_feature (87)..(87): n is a, c, g, or t
  misc_feature (109)..(109): n is a, c, g, or t
  misc_feature (170)..(170): n is a, c, g, or t
  misc_feature (405)..(405): n is a, c, g, or t
caatccttctgccttggccccccaaagtgctggggatttgggcaatgagcttcngttcccaaccttcatgntttaatatcaactctnactcctgaattcagttgctttncccaagataggagttctctgatgcagaaattattgggctcttttagggtaagaagtttgtnctctttgtctggccacatcttgactaggtattgtctactctgaagacctttaatggcttccctctttcatctcctgagtatgtaacttgcaatggggcagctatccagtgacttgttctgagtaagtgtgttcattaatgtttatttagctctgaaggcaagagtgatatactccagggacttaggaatagtgcctaaagtggcttgcagccaaaggacagaggcggaactatgnaaaagtcgg

SEQ ID NO: 8038 - DNA, 564 bp, Homo sapiens
  III.1666 (H16240)
  misc_feature (74)..(74): n is a, c, g, or t
  misc_feature (85)..(85): n is a, c, g, or t
  misc_feature (267)..(267): n is a, c, g, or t
  misc_feature (329)..(329): n is a, c, g, or t
  misc_feature (449)..(449): n is a, c, g, or t
  misc_feature (502)..(502): n is a, c, g, or t
  misc_feature (536)..(536): n is a, c, g, or t
  misc_feature (541)..(541): n is a, c, g, or t
ttttttttttttaggcaatgcactataacaacttttatttctccatttaacatttgtgagatagcttcagtctntttcatttcancattcatctttttggaaatctcgctgctgccacaacagaccatgcatataaattcctcaccatgacctctgcaaatcaaacaaaatgtactttaagcctgcctcacaatcaaaggctctatgtgatttatttccaaacggttcttagagctgggcctaaatgcgacacagctacatgcaaangcacaatgttttggacagggtcagagtccacttagagagagagagacctaggcatagcacangacacacagtagccattctgcattctgtaagtttgttttcgaatgaggatctatgtagagaaatttgctccactctgtcttccttgtctaaaggaggaggcttttcatccttttgggagncatttccgggacgttcaggtggctgtctgcaggtcagggtcacatctagtcangctttagcacccccgtgcatcctagctgggggangcttntggattgaggtcatcataggaca

SEQ ID NO: 8039 - DNA, 645 bp, Homo sapiens
  III.1667 (AF088001)
ggcatattttgtgctgttgtagaaaatgtagggcatagtcagagaagttattctgaagcaagaaaaatttagagtaggattacactgagccttagttgaattcattttcacctcagttctcatttgcatatgtatactgctcacttttctccctttttttttccttccttggccctctaatacttgagtacttcctctttctaaactatacctggccagtaaagcattcttttcagaaaggtgaaagtcactagcatatttctttagtaggaattaaagatatagaaaccacaaagtggacagagttcagagactccagtccctcagaaagaagtaacataggaatgatgtgtgacatgcctgaggtcagggaacttgcccaaatgatctgaggggatgttttgtgctgttgtagaaaatatttagcttgctaaacattgttgcacctctttcaagtaattttcgaactttgcttgatgtttcttctatataaagaccctcttgcaccagcatttgcagaattaaattccttaggtttgtttctttcatatcaactctttaatgcagtattactgttttaaagaagtatctgcactgttttatgtatatcttgaactaataaaaattccaacgtcaaaaaaaaaa

SEQ ID NO: 8040 - DNA, 466 bp, Homo sapiens
  III.1668 (N21327)
acgttggaatttttattagttcaagatatacataaaacagtgcagatacttctttaaaacagtaatactgcattaaagagttgatatgaaagaaacaaacctaaggaatttaattctgcaaatgctggtgcaagagggtctttatatagaagaaacatcaagcaaagttcgaaaattacttgaaagaggtgcaacaatgtttagcaagctaaatattttctacaacagcacaaaacatcccctcagatcatttgggcaagttccctgacctcaggcatgtcacacatcattcctatgttacttctttctgagggactcggagtctctgaactctgtccactttgtggtttctatatctttaattcctactaaagaaatatgctagtgactttcacctttctgaaaagaatgctttactgggccaggtatagtttagaaagaggaagtactcaagtattagaggggc

SEQ ID NO: 8041 - DNA, 456 bp, Homo sapiens
  III.1669 (N27982)
tgtagggcatagtcagagaagttattctgaagcaagaaaaatttagagtaggattacactgagccttagttgaattcattttcacctcagttctcatttgcatatgtatactgctcacttttctccctttttttttccttccttggccctctaatacttgagtacttcctctttctaaactatacctggccagtaaagcattcttttcagaaaggtgaaagtcactagcatatttctttagtaggaattaaagatatagaaaccacaaagtgaccagagttcagagactccagtccctcagaaagaagtaacataggaatgatgtgtgacatgcctgaggtcagggaacttgcccaaatgatctgaggggatgttttgtgctgttgtagaaaatatttagcttgctaaacattgttgcacctctttcaagtaattttccgactttgcttgatgttt

SEQ ID NO: 8042 - DNA, 275 bp, Homo sapiens
  III.1670 (R37599)
  misc_feature (168)..(168): n is a, c, g, or t
  misc_feature (240)..(240): n is a, c, g, or t
ttttttttttcagagagattttaatttgggctgagtttcaaatacagtcatgcaccacataatgacattttggtcaagtgatagacctcatataccacagtggtcccttaagattataatggagcagaaaaattactactgcctagtgacagaacaattgtaacattntagcacaacacattactatgtctgtgattatactggtgtaaacaaacctactgagctgtaaaaagtctaggntatacacttacgtacagtacataatacttgatagt

SEQ ID NO: 8043 - DNA, 446 bp, Homo sapiens
  III.1671 (T79880)
  misc_feature (286)..(286): n is a, c, g, or t
  misc_feature (413)..(413): n is a, c, g, or t
  misc_feature (442)..(442): n is a, c, g, or t
tacatgcataagtatgagaatatataccccttcctcagcaattagcacagagaattgaattaagcagtacaaaggttttcagttttaggtttacctgattaccccttactatactcaaatgcatcccaatacttctgtactcttaaatcaactgacaacctttaagcatatgctcttttgctaggtcttgaagaggaggcacaactgccttcatatgagtccagtgtgtgttgtcaaaatgtaacttttgaattgttctaaagccacagtaagagaagtaagtggntcaagtttcgtgcctttacatttccaccattgtgctttcctctccctttaccccacatacaaaactgagccgggggaatgcctaggtttttgtgtgctggaacacagctgttactttacatccaccntcctctgggacgtgtttggcttaatgggntttt

SEQ ID NO: 8044 - DNA, 267 bp, Homo sapiens
  III.1672 (H87622)
  misc_feature (264)..(264): n is a, c, g, or t
attgcggcacaggaaggttgtaattccaactggtgacataactcctgtgagggataagaatgtgtctgcttatagtaataacatcagaacctctttgtgaaattgcggcctttaatgtacattttaatgaaagggtgcattagtattgtacaggggtcttgtaaagtcatcaaaacttgctatgaactctaattgccatttgaagctactgattggcagtggctctactctaaaactgctttttagcaattgtatttttttccngaa

SEQ ID NO: 8045 - DNA, 227 bp, Homo sapiens
  III.1673 (H87623)
  misc_feature (115)..(115): n is a, c, g, or t
  misc_feature (124)..(124): n is a, c, g, or t
  misc_feature (145)..(145): n is a, c, g, or t
  misc_feature (190)..(190): n is a, c, g, or t
  misc_feature (207)..(207): n is a, c, g, or t
  misc_feature (226)..(226): n is a, c, g, or t
cttgtgattaacaggacttttattggtagtaaactagagcaaacaatcagaataatacatatgcagtattcagtacacacaataaaagttaaagaaattcaaaacctgtataaancaaactggngaaaaatcatacagcttaagngatacagtggtaaaggtcctctccatcctttgattacagcttgtnctctgtactcaatggancttaccgcacttactgaant

SEQ ID NO: 8046 - DNA, 427 bp, Homo sapiens
  III.1674 (N67006)
aatctctgcatagcacaatggaaagagaaaagattcagagtccagaaacctggaattgtgtcctaatttcacctcttattgagtgacactgagactgagcctccattttctcatttataaaaaaagatattaatacttattcttgaattttcatgaagataaattagatcatttatgtcaaagaactccctaaactataaatcacacaagttagttgctgctcttagtgatggagaactgaacacccttcgaacatctcttccattccttagaagcagtaatcatcagaaagttttttcatgcatatgcccaaatccacctcctgtaacttctaattattaatctcagatttactccttctaactctgggcaatggtttttaatgacaatacttagttgttgagagtgtgagaaatcagtattccta

SEQ ID NO: 8047 - DNA, 589 bp, Homo sapiens
  III.1675 (W04275)
  misc_feature (338)..(338): n is a, c, g, or t
  misc_feature (393)..(393): n is a, c, g, or t
  misc_feature (417)..(417): n is a, c, g, or t
  misc_feature (451)..(451): n is a, c, g, or t
  misc_feature (496)..(496): n is a, c, g, or t
  misc_feature (532)..(532): n is a, c, g, or t
  misc_feature (555)..(555): n is a, c, g, or t
gatgcaccattggctcctgtttgaaatgagcaggcactccttggagcaaaagcccactgacgctccaccgaaagagtcactggaactggaggacccgtcttctgggctgggtgtgaccaagcaggatctgggcccagtccccatgtgagagcagcagaggcggtcttcaacatcctgccagccccacacagctacagctttcttgctcccttcagcccccagcccctcccccatctcccaccctgtacctcatcccatgagaccctggtgcctggctctttcgtcacccttggacaagacaaaccaagtcggaacagcagataacaatgcagcaaggncctgctgccaatctccattgtcaacaggggcgtgagtccaggaagttgccaaaantagacagatcccgtttctgacatnacagcagcttcaacacaaggctcaagactaggcnatggacgagattggaagcacaaggagaaggatacctaaaccaganccaagctggaatgtgatgtctttccctcagctttgnttggtttttagctaattactgangtgggaatttttcctttccaggattattccaagg

SEQ ID NO: 8048 - DNA, 374 bp, Homo sapiens
  III.1676 (R07823)
  misc_feature (260)..(260): n is a, c, g, or t
  misc_feature (288)..(288): n is a, c, g, or t
  misc_feature (292)..(292): n is a, c, g, or t
  misc_feature (296)..(296): n is a, c, g, or t
  misc_feature (327)..(327): n is a, c, g, or t
  misc_feature (345)..(345): n is a, c, g, or t
  misc_feature (353)..(353): n is a, c, g, or t
gcccaccaagcaggtcttcacctcagacactgaggcctccagtgagtccgggcttcacacgccggcatctcaggccaccaccctccacgtccccagccaggaccctgccggcatccagcacctgcagccggcccaccgtccaggcgccagcccacagtgtcctccagcagcctgggtgctgttaccagagcttcagactccaggcaatgggccagaggcacctggttggccattccaaccacagggttcattcgaggacntttcatttttccacccaggatgggcttntttncttnccagttaaaccacggggcactggggggcctnggggtttgttaatttggnttgttttnggggggggttgatggaggggg

SEQ ID NO: 8049 - DNA, 94 bp, Homo sapiens
  III.1677 (R07824)
  misc_feature (16)..(16): n is a, c, g, or t
  misc_feature (21)..(21): n is a, c, g, or t
  misc_feature (63)..(63): n is a, c, g, or t
tgccactcgccccggntggcnacaagctgcagggggtgccgggtcaccacgggccttttcctnaatcccagggtagacgcggtacactgaaggc

SEQ ID NO: 8050 - DNA, 421 bp, Homo sapiens
  III.1678 (H65241)
  misc_feature (405)..(405): n is a, c, g, or t
tggaagaataattaaagatctttttttttttttttgaatattcacaaagtgtgcaactattaccactatttaaatctaaaatacttcatcaccctcacgtcccattcccattagcacttactccctattcccctctccccccagtttctggcgtcctattttctgtctttatggatttgcctattcaggacattttgtataattggaatcatacaatatttggcttttgtgtctggtgtctttcacttagcataatgttttcaaggttcatccataatgtaggcatgtatcagaagttcatttctttttatgggctgaacaaggattccattgtgtgattaggattggcattttctttatccgtctgttgatgggacgtttggggggttgttccactttttgggnccattgtgaaggatgg

SEQ ID NO: 8051 - DNA, 367 bp, Homo sapiens
  III.1679 (H65242)
  misc_feature (3)..(3): n is a, c, g, or t
  misc_feature (8)..(8): n is a, c, g, or t
  misc_feature (16)..(16): n is a, c, g, or t
  misc_feature (21)..(21): n is a, c, g, or t
  misc_feature (333)..(333): n is a, c, g, or t
gtnatcanacggagcnaacgnaccaggctggagcgcagtgggtacaatctcagctcactgaaacctccgcctcccaagttcaagcaatcctcccacctcagggccaccccaccacccccccagctgggactacaggggtgccccaccacacctgggctaatttttgtatttttgtagagatggagtttcaccatattggccaggctggcttcaaactcctaacctcagataatctgcctgtctcggtctcgcaaagtgagagattacagggtgtgagccactgcacctgggccaaatatagggcaatagtttcttaggggatgacaaaagganaaaataaacaggtaaattgggctttcatcaaaat

SEQ ID NO: 8052 - DNA, 287 bp, Homo sapiens
  III.1680 (H87793)
  misc_feature (18)..(18): n is a, c, g, or t
  misc_feature (74)..(74): n is a, c, g, or t
  misc_feature (75)..(75): n is a, c, g, or t
  misc_feature (76)..(76): n is a, c, g, or t
  misc_feature (77)..(77): n is a, c, g, or t
  misc_feature (78)..(78): n is a, c, g, or t
  misc_feature (79)..(79): n is a, c, g, or t
  misc_feature (275)..(275): n is a, c, g, or t
ttctgtattacaaaagangaaattagactcaattgccctattataaatttgctaaaaatacatatatatatatnnnnnncctgaacagaaaaatagactactctgagatgcgtggacattctatgacatagtcgcgcatcagatacttctagagccagaaaaatggcaacagaaaatgcagaggtaactcttatttctgggtgtagccagggactggtttgggttgcctggggctgagtgacatgaaagcatttgggatgctgtcctataaggcngtgatagggtga

SEQ ID NO: 8053 - DNA, 413 bp, Homo sapiens
  III.1681 (H87847)
  misc_feature (13)..(13): n is a, c, g, or t
attcggaacgagnggcacacttcaaggggaaagaaaaaaggaggagagaacatttgttcccgtgaagtccctttctccaaaggactggggatcaagaaggaagaagagtaagaaggaaaaacaacaaaatcctgaggaggccatttcttttaacccacccagcttgcccctgaaaactgctggtgatacaaactttttcaaactgacttccagcttctccatgtgtcttggtaactgtagcctcgtctctgccctttctcctaataagatccatgtttctaaggagaaaaacaaaacagtattctcttctgtaaaactgtaatgtattgttgatatttgtaactattgtatatttctgtcttgctccagtcccagctgggagtgtctagttccatgggacaaggggatatttt

SEQ ID NO: 8054 - DNA, 478 bp, Homo sapiens
  III.1682 (T87522)
  misc_feature (26)..(26): n is a, c, g, or t
  misc_feature (30)..(30): n is a, c, g, or t
  misc_feature (43)..(43): n is a, c, g, or t
  misc_feature (309)..(309): n is a, c, g, or t
  misc_feature (317)..(317): n is a, c, g, or t
cctgacctcatctccacagccatggngcangactgctggagangttctgagcctgacaagggccaagctggtccctggggctgttgcaggctgacgcttatgacccctgccttcagtgcaggccagaacagtatgggtccttagacataccctctgctgagccagtggggaggagccctgacctttccaagtcaccagcacataatcctctcttggaaaacgcccagagttctgagaaaacggaagaaaatgaattcagcggctgtaggtctgagtcatccctcggcacctcttcatctcgggcacccntccagcgntacctcgaaaaacaaggccttttgcagaagagtgggagatgattcctcagaagagggaaggaagggggaagttaggttagtgaagtttgaattttccacggaggacaggaggccccttcggttgtattcagcaggttgccagttcatatttcaactttttt

SEQ ID NO: 8055 - DNA, 526 bp, Homo sapiens
  III.1683 (T87523)
  misc_feature (105)..(105): n is a, c, g, or t
  misc_feature (522)..(522): n is a, c, g, or t
ttgcaagaaattattgtctctctatctcatatatagttcactctttgcagtacaaagtgttaaaatgtcaaacaaaaataaatatcaatgttacagtagctagantattcaataaaatagatccctgccattcttgattgaaatgttcagtgagacttaatttcatttggatattattttccagagatttgcgaagtctcatgttcctgttattgcagctcatttctagggggtggtaaagatggggtagtctctcttcccagacaaaatgctgggagagagtgggatgagtctgggggtggggtggatctgaaatgccagtatagtcacgagatcttcagggatgtgtattccttcattaccagggtaggcagagctgttaggtgtttattgggccctaactgtgggcatcagaacactccccatctggaaggagtcacagtccgattcttcaaactgcatgggggttctcatagccacgttcctccacacacagcttgcccagagacatctgagtctttnacac

SEQ ID NO: 8056 - DNA, 421 bp, Homo sapiens
  III.1684 (N62685)
  misc_feature (137)..(137): n is a, c, g, or t
  misc_feature (212)..(212): n is a, c, g, or t
  misc_feature (313)..(313): n is a, c, g, or t
  misc_feature (421)..(421): n is a, c, g, or t
taaggcttgttttattttaatggctgatctatgtaatcacagaggccagtatgtacagacaaagtgggaggttttatttcttggtctcttcctccttggataaagtcttgatgatctcctccttcttggcctggagncgctcttcacggcgcttgcgtgcttccttggtcttagacctgcgggcctcagcctggtcagccaggagcttcttncgggccttgtctgccttcagcttgtggatgtgttccatgagaatccgcttgtttttgaacacattccccttcaccttcaggtacaggctgtgatacatgtngcgatcgatcttcttagattcacgggtatcttctgagcagccggcgcaaaatcctcattctcctcatcccatgtgaccttctctgggcattcgggcaatggctgtaan

SEQ ID NO: 8057 - DNA, 561 bp, Homo sapiens
  III.1685 (N80459)
  misc_feature (449)..(449): n is a, c, g, or t
  misc_feature (499)..(499): n is a, c, g, or t
  misc_feature (511)..(511): n is a, c, g, or t
  misc_feature (535)..(535): n is a, c, g, or t
  misc_feature (550)..(550): n is a, c, g, or t
  misc_feature (556)..(556): n is a, c, g, or t
gcttcaagaagaggctcgcctctgagtgtcctccgctgtggcaagaagaaggtctggttagaccccaatgagaccaatgaaatcgccaatgccaactcccgtcagcagatccggaagctcatcaaagatgggctgatcatccgcaagcctgtgacggtccattcccgggctcgatgccggaaaaacaccttggcccgccggaagggcaggcacatgggcataggtaagcggaagggtacagccaatgcccgaatgccagagaaggtcacatggatgacggagaatgaggattttgcgccggctgctcaagaagatacccgtgaatctaagaagatcgatcgccacatgtatcacagccttgtacctgaaggtgaaggggaatgtgttcaaaaacaagcggattctcatggaacacatccacaagcttgaaggcagacaaaggccccgcnaagaagctccttggcttgaccaggcttgaggcccgcaggtcttaagaccnaggaagcacgcnagcgcctttaagaacgccttccangccaagaaaggaggngatttnttaaa

SEQ ID NO: 8058 - DNA, 416 bp, Homo sapiens
  III.1686 (N68922)
  misc_feature (218)..(218): n is a, c, g, or t
  misc_feature (221)..(221): n is a, c, g, or t
aatcctgccacaatatttttaattacgtacaaagatctgacatgtcacccagggacccatttcacccactgctctgtttggccgccagtcttttgtctctctcttcagcaatggtgaggcggataccctttcctcggggaagagaaatccatcggtttcgttgcccttgccaataacaaaaatgttggaaagtcgagtggcaaagctgttgccattgnatnctttcacgtgaaccacgtcaaaagatccagggtgcctctctctgttggtgatcacaccaattcttcctaggttagcacctccagtcaccatacacaggttaccagtgtcgaacttggatgaaatcagtaatcttggccagtctccaaatcaatctgaatgggtatcattcaccttgatgaggggatcggggtagc

SEQ ID NO: 8059 - DNA, 495 bp, Homo sapiens
  III.1687 (W00563)
  misc_feature (37)..(37): n is a, c, g, or t
  misc_feature (417)..(417): n is a, c, g, or t
  misc_feature (442)..(442): n is a, c, g, or t
  misc_feature (455)..(455): n is a, c, g, or t
  misc_feature (457)..(457): n is a, c, g, or t
  misc_feature (464)..(464): n is a, c, g, or t
  misc_feature (477)..(477): n is a, c, g, or t
  misc_feature (489)..(489): n is a, c, g, or t
ctgaggaacagacttaagtatgccctgacaggagatnaagtaaagaagatttgcatgcagcggttcattaaaatcgatggcaaggtccgaactgatataacctaccctgctggattcatggatgtcatcagcattgacaagacgggagagaatttccgtctgatctatgacaccaagggtcgctttgctgtacatcgtattacacctgaggaggccaagtacaagttgtgcaaagtgagaaagatctttgtgggcacaaaaggaatccctcatctggtgactcatgatgcccgcaccatccgctaccccgatcccctcatcaaggtgaatgataccattcagattgatttggagactggcaagattctgatttcatcaagttcgacactggtaacctgtgtatggtgactggaggtntacctaggaagaattggtgtgatcncaacagagagagnancctgganttttgacgtggtnacgtgaaagatncaatgg

SEQ ID NO: 8060 - DNA, 378 bp, Homo sapiens
  III.1688 (R14341)
  misc_feature (36)..(36): n is a, c, g, or t
  misc_feature (361)..(361): n is a, c, g, or t
ggcccaaaaaagattgcagaactaaatctagaagcnctagctaatcaccaagaaatacaagcagcaggccaagagcctaaaaacacagcagaagtacttcagcacccaaacacaagtgttttagaatgcttggattcagtgggtcagaagcttctttttttgacccgggagacagatgctggtgaacttccatcttccagaaattgtcaaactattaagtgtctttcaaataaagaggttcttgaggcaggccagagtgggaaatccccctgtttccctttcagcattgtttcagttctctttttaaggcctttttcacctgtccttcactgagggaggatggaacaaaagggtggagggntccaagtggggacagga

SEQ ID NO: 8061 - DNA, 495 bp, Homo sapiens
  III.1689 (R40668)
  misc_feature (198)..(198): n is a, c, g, or t
  misc_feature (229)..(229): n is a, c, g, or t
  misc_feature (438)..(438): n is a, c, g, or t
  misc_feature (472)..(472): n is a, c, g, or t
  misc_feature (481)..(481): n is a, c, g, or t
  misc_feature (487)..(487): n is a, c, g, or t
ttttttttttttttttttttttatgcttgaactttaggcatttattgaaaacttatacatgccatataaacaaactaaactcttttagctgctataccaagtttccataaagctgtctgctggttggggaggctacagctgaccacattctttgccattgcctacaaggggtaagaaatggcacatgggaaacatggncaggccgactcacggaacacaggacctgggncagacgctttcttcttcctcttttattcccatcagtcctaggaccagagagtgaaccatgagtgctcttgggttcccgggcagcagggatgagggcagagagtgcccggggcacaagctgttgtaggagctttccaatcttccgggctccagcgccagggtgctatcttcggggtgggtccagttttcaggagtctgcaaggcctcctntttcaaaggggggggagggtacaacacgaagccncggggagcntttttngatttcag

SEQ ID NO: 8062 - DNA, 317 bp, Homo sapiens
  III.1690 (R19011)
  misc_feature (19)..(19): n is a, c, g, or t
  misc_feature (210)..(210): n is a, c, g, or t
  misc_feature (232)..(232): n is a, c, g, or t
  misc_feature (242)..(242): n is a, c, g, or t
  misc_feature (249)..(249): n is a, c, g, or t
  misc_feature (252)..(252): n is a, c, g, or t
gatagaaagaaattttttncatgtaggtaaaattctgtgacagatgtaagagattttaaaatatctatactatgagtttgcgtgtgtgtgtgtgttggagtctcactctgtcacccaggttggagtacagtggcacgatctcggctcgctgcaacctccgcctcccgggttcaagcggttctcctgcctcggcatcccgagtagctgggnctgcaggcaactgccaccacgnccggctaatnttttgtnttnttggtagagatagggtttcaccgcgttggccggggatggtcttgatctacttgacctggtgatcc

SEQ ID NO: 8063 - DNA, 406 bp, Homo sapiens
  III.1691 (R44082)
  misc_feature (67)..(67): n is a, c, g, or t
  misc_feature (279)..(279): n is a, c, g, or t
  misc_feature (295)..(295): n is a, c, g, or t
  misc_feature (322)..(322): n is a, c, g, or t
  misc_feature (327)..(327): n is a, c, g, or t
  misc_feature (336)..(336): n is a, c, g, or t
  misc_feature (380)..(380): n is a, c, g, or t
  misc_feature (395)..(395): n is a, c, g, or t
  misc_feature (401)..(401): n is a, c, g, or t
ttttttttatttttccattaagcacaactttattgatatggtgagataatacttcactttcttgttntatcgcagcatgcacgtcagggccatgtgtcatttctagtatcacacacaaacacatcgctattctattcagggacaatagattgattcagatcaagtgatttctgtgcagtgatgaaacattatgatatgtttactatgcagagagcatgaattacagtgctagctacaaataccacaattgggactaaggtgaaataggaatttcttccnagttaaaaaaatattngggacaaaactttaaatttaaaacgangggcntactgctgncgtgggaattgaggtaggggccacagttgtctaggacctatggncaagggtccagttanggaggntttta

SEQ ID NO: 8064 - DNA, 329 bp, Homo sapiens
  III.1692 (T84183)
attacttatcattcatgtgttcactggagtcacacttttaatttccttcaagaacttttcctttgttttcactgcttggctaactgtcaggtataagagacctagctttcagtctgtctctgcttctgtcctatcttagctttcaacatgccttcctcaataagctcaatcatttctatcttttgatttaaaatgaggggcatgtgactcttcctatcagttgaatagttagagcccactgtagggtctattaattgggcctaatttcaatattcttctgtttcagggaactaggggagggcctgagtaggaaataggagagatggagg

SEQ ID NO: 8065 - DNA, 468 bp, Homo sapiens
  III.1693 (T85111)
  misc_feature (34)..(34): n is a, c, g, or t
  misc_feature (171)..(171): n is a, c, g, or t
  misc_feature (184)..(184): n is a, c, g, or t
  misc_feature (185)..(185): n is a, c, g, or t
  misc_feature (186)..(186): n is a, c, g, or t
  misc_feature (187)..(187): n is a, c, g, or t
  misc_feature (286)..(286): n is a, c, g, or t
  misc_feature (381)..(381): n is a, c, g, or t
  misc_feature (434)..(434): n is a, c, g, or t
  misc_feature (451)..(451): n is a, c, g, or t
  misc_feature (465)..(465): n is a, c, g, or t
tttataatttttattaaaaatgtctattattttntaattatgctgttttggattatagattttttattctattaatatatttagatgttcttcaaatattttccaacatatgtgctcactttcggtttgggtgtcacatttttataatccttgcaaaatttcaaagttttnattattattatannnntcatggtgatctgtgatcagtgaccctcgatgttgtcatcaaacccaggttcagctgctcacctgtcaaaagccaaacacaggagaggagcgatggcgngtaagaaagcaggtttatctggagagccagtaatctgagaagatggtggactagtatcctaaggtgctgtcttaagtcaaaacatatttcagggnctttttatgttaaggggtgggcaaagcggaaagagggttgttatccaagaggntgaccaacaaccacagncatctgggcaccantga

SEQ ID NO: 8066 - DNA, 210 bp, Homo sapiens
  III.1694 (H90572)
ggcacgagctggatggattgtgcttggagaggtccacaggcccagtgagctctgagaatttgaactggtttatttacacaccctgtccctgcccttctattaggagcacttcctgatgacagggtgaaattgtcccatcccgttccccagggcttaacctttcctcttagaattctccctattctacatgcttttcttcaactcaagtta

SEQ ID NO: 8067 - DNA, 354 bp, Homo sapiens
  III.1695 (H90573)
  misc_feature (158)..(158): n is a, c, g, or t
  misc_feature (177)..(177): n is a, c, g, or t
  misc_feature (249)..(249): n is a, c, g, or t
  misc_feature (346)..(346): n is a, c, g, or t
gatgcacagtgtctggagtccctaaaatatttattggatgaattgattaaaacacatctgctcctgtgactccattgctctacaccttctgattgcttccttccctctccagcctccttccttgcctataaaatcaaggcccagcttcccagcatggnattcaaggtattccagggnttccgtcctgggcacccaacctttttttcagccccgatcttcctcacacacaccctcccttaacagccgggngcatgtgtgggaaacagggaggggagctctggggaggggctgggctcccaaagggtgccccgtgcttttgctgttccggggctggggtgggcctttnctacccca

SEQ ID NO: 8068 - DNA, 388 bp, Homo sapiens
  III.1696 (N68258)
  misc_feature (2)..(2): n is a, c, g, or t
tntagaggggcgctggagcagggagttctccctatgttgcccaagctggtcttgaactcctgggctcaagcaatccttccacctcagcatcccaaagtgctgagattacaggcatgagcaacactcccagctaattaaaaaaaaaaatccttttactaattactagccatggagccctgggaaaattaaccttcttgagcttcatttttctccttcagggataaaaattcttctcagatttatgaggaagattaggtgagataatgcacataaaaacacttagcacttactcactgggaagaaaaagaaggaaaaggaggaagaggagagaaagaaaaaagagaaggaaaaaaaaaaaaagaggggagggaagaggaagaagaaccag

SEQ ID NO: 8069 - DNA, 172 bp, Homo sapiens
  III.1697 (N80951)
  misc_feature (162)..(162): n is a, c, g, or t
agttaacaaagtgctgtcacctatattgtttcatttgatcctcacaaaaagtttatgagattgtttaactctccttcagaggcaggacagcctaggcccagagaggacaagtggcttgccaagaggaatacagtttcttagtggcagaagctcaaatccagnttttctcacc

SEQ ID NO: 8070 - DNA, 479 bp, Homo sapiens
  III.1698 (R33099)
  misc_feature (417)..(417): n is a, c, g, or t
  misc_feature (441)..(441): n is a, c, g, or t
gagttagatattttctgttgttgcccagactcagtttcaaaaaataaagaaaaaagataactccaaaatttatcaaagacattagtgagtagaagtcagtaatacatttgatagtgactaaaatccccattcacaagcaaggcccagagtgctgctgaatctgcggcctcagttcctctgcctgcacgttgaggggttacacgggctgatgcctcactttcttttatttcactaagtattaatagtagtggctccctattatgggctaaattgtgtcttcccaaaatctatctgggtgaagtcctaacccccagtatctcagaatggggactctatttgggagacagtgactttaaatggggtgacataggttaaatgagggttgttaggggcaggctttgtaatcccaaaggactnggtgtccttccgagggagccggtnagccagggacacagacacatacagaggggagggccctt

SEQ ID NO: 8071 - DNA, 332 bp, Homo sapiens
  III.1699 (R33193)
  misc_feature (1)..(1): n is a, c, g, or t
  misc_feature (89)..(89): n is a, c, g, or t
  misc_feature (315)..(315): n is a, c, g, or t
  misc_feature (328)..(328): n is a, c, g, or t
nattcggaacgaggggatcacctatgaaatcagcaccacaaagccagactgtggcaacgtattggttttctaggactgccagagcagangtataaggggcagggtggctcaaccaccggttcctcatagttccggagccagaagtctgagaccgaggtgtcagcagggtgggctccttctgaggctcctctcctggggcctgtagatgccctcttctccctgtgtcctcacacggccctccctctgtatgtgtctgtgtcctgctcaccgtttcctcgaagggacaccagtccttttggattacaagcctgcccntaacaaccttcanttta

SEQ ID NO: 8072 - DNA, 502 bp, Homo sapiens
  III.1700 (H20410)
  misc_feature (388)..(388): n is a, c, g, or t
  misc_feature (400)..(400): n is a, c, g, or t
  misc_feature (416)..(416): n is a, c, g, or t
  misc_feature (446)..(446): n is a, c, g, or t
  misc_feature (451)..(451): n is a, c, g, or t
  misc_feature (461)..(461): n is a, c, g, or t
ggctacaccttctaccatgaggcttccaaggtaaagatccttcaaataactgtaatcccagctacttgggaggctgaggcaggagaatcgcttgaacccgggaagtggaggttgcagtgagcacgatcgtccattgcactccagcctgagcaacaagagtgaaactctgtctcaaagaaaaaacaacaacaacaaaactgtgattctccatctaactttttacaattatcctttcacaattcaagaaagtgtgaatgcaagtcattactaacagtatctcagtaaaagtagtccagggagcaaatattttctttttaactgggttcccagctagttccattcccttgaattcagtgggcaaagtcactgttcaattaaaaggtttttnatctttcttccntttttggattgttaanttgctttactggatttcagggatttgggtnattcnaaaggtaacnggcttattttttggtaagggtaaccttgggggccggactat

SEQ ID NO: 8073 - DNA, 476 bp, Homo sapiens
  III.1701 (H20411)
  misc_feature (12)..(12): n is a, c, g, or t
  misc_feature (255)..(255): n is a, c, g, or t
  misc_feature (369)..(369): n is a, c, g, or t
  misc_feature (413)..(413): n is a, c, g, or t
  misc_feature (430)..(430): n is a, c, g, or t
  misc_feature (476)..(476): n is a, c, g, or t
aaaagtgaggantaggttttaatgggtcttgtgtgttttttattattcaggtttttaatcacagttctgttccaaggttatcttactataataagcagttatcttttgatcacccaattcctgaattcagtaagcaagttacaattcaaaaaggaagaagagtaaaaaccttttattgacagtgactttgccactgaattcaagggaatggaactagctgggaacccagttaaaaagaaaatatttgctcctggnctacttttactgagatactgttagtaatgacttgcattcacactttcttgaattgtgaaaggataattgtaaaaagttagatggagaatcacagttttgttgttgttgtttttnctttgagacagagtttcactcttgttgctcaggctggagtgcantggcacgatccgtgctncactgcaacctccacttcccgggttcaagcgatttctcccgcctcn

SEQ ID NO: 8074 - DNA, 575 bp, Homo sapiens
  III.1702 (N52903)
  misc_feature (535)..(535): n is a, c, g, or t
  misc_feature (545)..(545): n is a, c, g, or t
  misc_feature (550)..(550): n is a, c, g, or t
aacaaatttatttccctaattgggtaacgtatctcagtgcttgactcaagggcatcgtaataggtttccatactgcagaagaaggaattaattagaactgtttgttcttattccatatttacacttgtccaccagtcttgtaaacattgcccctggtttcctccgtcctccaggttcttctgactccccaacccacccccaaaataaataaatagaaagcagagagtagagcaggacgtcagtggtccctttttatgtgcgttcacccccactgcaagccgcgtctcatggtcagaatgtggcagaatggggaactccaaagtctgctaagagattcctcattttaagagattttgggggaaaaaaaggaaaaaaaagcctgtaaagggaccctcctttccacaggcaaaaatgggagaatctggggtcttgctttgccagagctcatgcctgggcttggctttggtccacttagaagctgggtgcagagcagatgagatgggtagatctcctctgcttcatcctgtgtcacctnaaactccgcntaggnagataagaggcattcatgagctctg

SEQ ID NO: 8075 - DNA, 312 bp, Homo sapiens
  III.1703 (N78710)
  misc_feature (278)..(278): n is a, c, g, or t
  misc_feature (286)..(286): n is a, c, g, or t
  misc_feature (292)..(292): n is a, c, g, or t
tctaagtaagaaatttatttgatcaaatggcaatatatgaagatattttaaactataaggctctatccagacaaaaagcatctttttataaagtaagtgttatcaatttaaatggcacctaaaatcaaagaatgagtttcctataaatgtctgtataaagctttcataaaatcctcatgtattttaaaactaggttgcaagtataacagaaaaacctataaatagtacttaaaagcaggtttcttaaaatttatgacaccctacagtgtggtccaccnataggacnagaggnattcggggggcccctgtgac

SEQ ID NO: 8076 - DNA, 476 bp, Homo sapiens
  III.1704 (W07599)
  misc_feature (209)..(209): n is a, c, g, or t
  misc_feature (325)..(325): n is a, c, g, or t
  misc_feature (430)..(430): n is a, c, g, or t
  misc_feature (457)..(457): n is a, c, g, or t
gcacaggcacttgtctgaagctctcctgatcttagaacctggagctgcagattcctccatgtcagctcccatcacggccccaaagacagagtcacttggttgctgagtcacttggttgctggaaaaatctttggggaaagctggtataagctacacactgacctgtccccagtgtttccaggtaatgacttggcactccagagaaagtntcatgctgttgcgtgtggtggctccaagccaagcacctggcatgcaggtcagcccttcccagcggcgtggcgtcgtcctcttcacagatgcacgttgcagcccaagggctcaccanttttgcgttttttaagaaacccattttcttggtcatttataaagctgctttatagatatctttgatcctggcatgccttgggtttcctctcccttccctctttcnaatcctgggtttcctaacctcctcctngtagtaaatcctcaactca

SEQ ID NO: 8077 - DNA, 336 bp, Homo sapiens
  III.1705 (R08414)
  misc_feature (5)..(5): n is a, c, g, or t
  misc_feature (194)..(194): n is a, c, g, or t
  misc_feature (196)..(196): n is a, c, g, or t
  misc_feature (221)..(221): n is a, c, g, or t
  misc_feature (280)..(280): n is a, c, g, or t
  misc_feature (318)..(318): n is a, c, g, or t
cagtncaggcccagccaaagccccctcctcagtctccacagacccacatgtgagcagcccaggcccatcggtgctcctcagaggcagggctctgcaggtccatatgggctcaatgtcaccaccctctgcatggccctgtgtgctggatggtcctgaaaccagacaagacctctgccagccacctaagccctgcntnacatttcacatggcacacacgggangaatgtttattcggctgggcttgcagtgcccccaccctcaccttttcctgggtggattntttgttttcatccctgtttttgggattttgggggttancctcccaatttgccacat

SEQ ID NO: 8078 - DNA, 412 bp, Homo sapiens
  III.1706 (R08415)
  misc_feature (2)..(2): n is a, c, g, or t
  misc_feature (391)..(391): n is a, c, g, or t
tngttgaactgttgtcattttcttgtcatgccctaacaccatgatcaatgaatagtgtgaaccttactaaagaggcctgtgtgctgccaaggagtcaggatggaagcggaggatcccaatttcctctgcaaatagttgtattggggagcagagccaatcctgggaggcagatatcaccttctgtataggctcaggagctgtcccctgggtgatcaggggtgggcgcatctagatgaagcagactagtcatagctccccagggctggcccgttccccaagctctttgacaaagagggtcaccacattgggggcttgggggaagagggcccagatagggattttggccaattttggggagggtaccccccaagttccagaagccaggggattnaaaccaagatttcaccccggg

SEQ ID NO: 8079 - DNA, 382 bp, Homo sapiens
  III.1707 (R32979)
  misc_feature (266)..(266): n is a, c, g, or t
  misc_feature (325)..(325): n is a, c, g, or t
  misc_feature (364)..(364): n is a, c, g, or t
  misc_feature (369)..(369): n is a, c, g, or t
  misc_feature (376)..(376): n is a, c, g, or t
agtggccatctatgtacctggagagaagccaccgcctccctgggctcctcctaggctgcccctccgactgcaaaggcggctcaagcgcccagaaacccctactcatgatccggaccctgagactcccctaaaggccagaaaggtgcgcttctccgagaaggtcactgtccatttcctgggctgtctgggcagggcggcccaggcgcccgccaggccctggggagcagcttgctcgggatcgcagccgcttcgcacgccgcattcgnccagggcccagggaggagctgagccccttgccttacccttgttgcccgggccagagctngggaacggttttagggaacccacttttaggcccccattncttgnctttaanccagaa

SEQ ID NO: 8080 - DNA, 343 bp, Homo sapiens
  III.1708 (R32980)
  misc_feature (5)..(5): n is a, c, g, or t
  misc_feature (16)..(16): n is a, c, g, or t
  misc_feature (18)..(18): n is a, c, g, or t
  misc_feature (155)..(155): n is a, c, g, or t
  misc_feature (332)..(332): n is a, c, g, or t
ttttnttttacaattngnttggctttattccttatataaacccacacttagaaaaaataaatagttaataaattataggcaaaccagttggtctcagccacgcctcccactgaggtccagggcagccgctgcagcagcagaggagcgggaaggtntagccacagcttggctcaagggcgtggtctggactggggacgaagggacagaggaggaaggcaaggtctgggtgagggcagggatgggggctaaaggtgggttcctgaggcgtgccaggctctggccccgggcagcaggggtgaggcaggggctcagctcctcctgggcctggggcnattcggcgttc

SEQ ID NO: 8081 - DNA, 531 bp, Homo sapiens
  III.1709 (T79942)
  misc_feature (519)..(519): n is a, c, g, or t
  misc_feature (525)..(525): n is a, c, g, or t
ttttttgttttttgattttgctttaatgattttaattagtatccaacatcaattcttaatctgtatacaacagttctggagtgacctggataacaatttgtttgctcatacaccttaagtactccccaaatagaatgtataaaagtactaatttagattggttttgtgtaatctgtgaataaataatattttacagcagttctctgggtaatgagagtcactctgtacagatagtaggtatgtacttaaatatttatacatttccctctgagctagtaagtcattgaccctgaagctgggaatgaggctgggtttgcaccttgggaaaacttaatcgttcccatgggtaacacagaggactcttgccctaccactttcttccccacatctttggttatatttaaaggcaaggaaattggttatttacttcatatttaatatggttggatacattttcaggggggcacaattccctaacctcaggcccattcttgtggtaataaaatattgccctagggnaacccnttaaaa

SEQ ID NO: 8082 - DNA, 499 bp, Homo sapiens
  III.1710 (T87591)
  misc_feature (361)..(361): n is a, c, g, or t
  misc_feature (400)..(400): n is a, c, g, or t
  misc_feature (416)..(416): n is a, c, g, or t
  misc_feature (485)..(485): n is a, c, g, or t
  misc_feature (495)..(495): n is a, c, g, or t
gcaccacaacacccagctaatttttgtattttcagtagagacagggtttcaccatgtttggccaggatggtcttgatctcttgacctcgtgatctgcccgcctcggcctcccaaagttctgggattacagacgtgagccaccatgcccggcatatatgaagttttaaaaaatcagaatacagaacaaaatttattgggagatgagcttctttctttctctcttcaacaccatcgccacatcacctccacatatacacacactgaaaagatactgaaaagacataataaccatggggaaatgggagattactgggattgttaaaatgttctttttggcctgtctttattctctaactttggntataatggaacagaattattttttggttaggcaaaaatnttttaaccttaaaacngttaaagtaacttggtaggtgtccttttcaaatttgtagggttccatggttccccggttgggttaatanggtttttatnccca

SEQ ID NO: 8083 - DNA, 528 bp, Homo sapiens
  III.1711 (W49594)
  misc_feature (27)..(27): n is a, c, g, or t
  misc_feature (523)..(523): n is a, c, g, or t
ggccatcttgagcactaagcctccagnaccttcctgctaagattcagtgaaagcagcaaagaaggaggcgtcactttcacttgggtggagaaggacatcagcggtaagacccagatccagtccgtggaaccatacacaaagcagcagctgaacaacatgtcatttgctgaaatcatcatgggctataagatcatggatgctaccaatatcctggtgtctccactggtctatctctatcctgacattcccaaggaggaggcattcggaaagtattgtcggccagagagccaggagcatcctgaagctgacccaggtagcgctgccccatacctgaagaccaagtttatctgtgtgacaccaaccgacctgcagcaataccatttgacctgccgatgtccccccgcactttaagattcatttgatgcagtttggaaataatggtgaagggtgctgaaccctcagcaggagggcagtttgagtccctcacctttgacatggagttgacctcggagtgcgctacctncccca

SEQ ID NO: 8084 - DNA, 490 bp, Homo sapiens
  III.1712 (W49595)
tttttgagacagagtctcagactgtcgcccaggatggagtgcagtgtgcagtggtgcaattttggctcactgcaacctccgcctctcaggttcaagcgattctcctgcctcagcctcccgagtagctgggactacaggcgcccaccaccacacccagctaattttttgtacttttagtagagacggggtttcaccgtgttagccaggatggtcttgatctcctgaccttatgatccgcctcggcctcccaaagtgctgggattacaggcgtgacaaccaatgcccggctgcttaagtttcttaaatacagaaaggctatgctgatacagtgttttttgccctttaattgttattatttcttaatttaaaaagaaacctaagggcttagatagtcctatcttctatttggatgtcagcaaggttaaaaagtgcatgccaggagtatgtagctataaggtggcctgtggatttgcttacagaaacaggcaga

SEQ ID NO: 8085 - DNA, 360 bp, Homo sapiens
  III.1713 (R50085)
  misc_feature (53)..(53): n is a, c, g, or t
  misc_feature (106)..(106): n is a, c, g, or t
  misc_feature (161)..(161): n is a, c, g, or t
  misc_feature (240)..(240): n is a, c, g, or t
  misc_feature (263)..(263): n is a, c, g, or t
  misc_feature (269)..(269): n is a, c, g, or t
  misc_feature (299)..(299): n is a, c, g, or t
gtggactgctggctttcccagtacctgccaggagggaggcacaagggtgaatnatggactattgaggcgccctgcaaagcgttgcactgctggctgcaggcagctncactttgggcaagtccccccccatgagctggggagactcagtcatggggagggangagagggcaagcccccaagggacttctgaacctgggcaggtgctgcacggggctggcagttgcttgtggagctgacgtnagggcccgttctcagcagatggntgctgncccctgcaacagcagctgcagatgtctttnagtcagtcgtgcggtgctcctgggggcttcacccgacccaactttcccagcccaaggcaca

SEQ ID NO: 8086 - DNA, 238 bp, Homo sapiens
  III.1714 (R50086)
  misc_feature (17)..(17): n is a, c, g, or t
  misc_feature (83)..(83): n is a, c, g, or t
  misc_feature (89)..(89): n is a, c, g, or t
  misc_feature (96)..(96): n is a, c, g, or t
  misc_feature (144)..(144): n is a, c, g, or t
  misc_feature (185)..(185): n is a, c, g, or t
  misc_feature (209)..(209): n is a, c, g, or t
  misc_feature (218)..(218): n is a, c, g, or t
  misc_feature (229)..(229): n is a, c, g, or t
aacacagcaagactttntctttattaaaaaagaaaaaaatgcagggccggtgacactcatacagcagccaaacagctctgctntcacanaggtctntggcagggctcacactgtcttttcagggtttctcttctgggtcctggngcgctgtgcttgggaggctggctggggaacaggatggcctntctgtcacctgggctcctggggtntttcaacancgccctctggngcacaactt

SEQ ID NO: 8087 - DNA, 457 bp, Homo sapiens
  III.1715 (H09970)
  misc_feature (316)..(316): n is a, c, g, or t
  misc_feature (413)..(413): n is a, c, g, or t
  misc_feature (430)..(430): n is a, c, g, or t
  misc_feature (447)..(447): n is a, c, g, or t
  misc_feature (452)..(452): n is a, c, g, or t
gggaaaaaaaaaaaatgacagtgaagcagacttttagaatccgagatgtcattgcagaattattggtataaaattcagctgcaaagtgaagaaattgaaatggcccacacgttgatatcctgtggcaggttatacccttcatgttagcaaagacgaagccacgtcgctgtgttaagagggacaggctgggccgactgcagctgtagtggaagtgagggacacagggaaggaatggggagcagcaatttggggacagtagactggagtcactttctgactcaaaaaaggtcaagtacttattaaaaactatcttggntttctgttcagactttaggcttcattttggatccattttaaggtcccagttgtccaaaaatattcaagttgaatttgtcctcaggtttttcaggagncaaaattttacagggangggaagcaaaagccctnttcantagtt

SEQ ID NO: 8088 - DNA, 442 bp, Homo sapiens
  III.1716 (H09971)
  misc_feature (294)..(294): n is a, c, g, or t
  misc_feature (438)..(438): n is a, c, g, or t
tttttttttttttttagtttccatttttattaaagttgtgtttttctaaggaatatatcacacttaaagttcaataccataaatattagttcttaaatcttctattttacttattaaaaatgtaaacataaaacaaccactccatccctgtccctgacccaatatatattaaaaaaatattactcctctcaggtaagttcttttcttcagaatgagtaacacagacttcattaaaatctttttagtcctcctgggctgcaaggacatggcaggaatgactagtgtccactgtgnacaagggtctgtgacactgtggactgaggcccgtctcctcctgccacggacggactcatgtggccctggaggaggacaggctcctctctgttccagtcaggcgtccaagggacacgggacagtggtaagggcaccgagcacagncatt

SEQ ID NO: 8089 - DNA, 372 bp, Homo sapiens
  III.1717 (H48772)
  misc_feature (305)..(305): n is a, c, g, or t
  misc_feature (318)..(318): n is a, c, g, or t
  misc_feature (361)..(361): n is a, c, g, or t
taaaccactgagtttgtgataaatttgttccagcagccccaggaaacacaaatgtaaattgtattacctactagaggttttgtttgtttgtttagtgtcagggtctctctctgttgcccagactggagtgcagtggcgtgaccatggctcactgcagcctcaaactcctgggctcttacaagtgatcctccctcttcagcctcctgaatagctaggactataggcactggctttataatttttatttttaaagatgggggtctcagtatgttgcccaggctggtcttgaacacctgggcctcctngcaatcctgcctncagcctcccaagttaggctggggattctagggcatggagtcantcacacctagc

SEQ ID NO: 8090 - DNA, 366 bp, Homo sapiens
  III.1718 (H48773)
  misc_feature (143)..(143): n is a, c, g, or t
  misc_feature (159)..(159): n is a, c, g, or t
  misc_feature (162)..(162): n is a, c, g, or t
  misc_feature (191)..(191): n is a, c, g, or t
  misc_feature (226)..(226): n is a, c, g, or t
  misc_feature (251)..(251): n is a, c, g, or t
  misc_feature (269)..(269): n is a, c, g, or t
  misc_feature (306)..(306): n is a, c, g, or t
  misc_feature (321)..(321): n is a, c, g, or t
  misc_feature (334)..(334): n is a, c, g, or t
  misc_feature (344)..(344): n is a, c, g, or t
  misc_feature (355)..(355): n is a, c, g, or t
gacttacaagagacaaaactaaaccatcaacacgtaggaggtaaaaggatttaaagatatacactaaataccaaccaaagctatattgagataacagaaaacagatttttatttgctaaggcaaaaagcattagcaataaggnagtcactacataacangangagttcaactcaccggggcaacacaaganttccacactttattcactcaataggaatgtataangttaaaactggataaaggggggggnaattgtccaaatctaccnttacgtggggggatttccaaaatacctttatccattnttaataggggtcggncaaaggttgggtnagggtttggnagggtttttgnaccaccccatt

SEQ ID NO: 8091 - DNA, 482 bp, Homo sapiens
  III.1719 (N79241)
  misc_feature (328)..(328): n is a, c, g, or t
  misc_feature (365)..(365): n is a, c, g, or t
  misc_feature (378)..(378): n is a, c, g, or t
  misc_feature (438)..(438): n is a, c, g, or t
  misc_feature (450)..(450): n is a, c, g, or t
  misc_feature (478)..(478): n is a, c, g, or t
aatgaaaaattatgaaatttatgttactgcataatggtttgatttttttttaaagggattgataaatacgctttctaatttctcagttttaatatcgattattctaaatatggagagagagaatccacagggacatggccgagcacagtggctcacgcctgtcattccagccctttgggggcccgaggtgggcggatcacttgagctcaggagtttgagaccagcctgcgccaccagatgaaaccctgtctctacgaaaaaataaaacaaaacattagccgaatgtggtgtcgcacaccgctagtctcagctactcgggaggctgccngagggaaggctcactttgaacctggggaaattggaantttgccagtgaanccgagatcgtggccattgcactccagcctggggtaacagagcaagcctcagctcaggggnaaaaaaaaaggnaagaatcccccccggacaaagccccttngggt

SEQ ID NO: 8092 - DNA, 460 bp, Homo sapiens
  III.1720 (W03758)
  misc_feature (1)..(1): n is a, c, g, or t
  misc_feature (369)..(369): n is a, c, g, or t
  misc_feature (391)..(391): n is a, c, g, or t
  misc_feature (410)..(410): n is a, c, g, or t
  misc_feature (416)..(416): n is a, c, g, or t
  misc_feature (429)..(429): n is a, c, g, or t
  misc_feature (452)..(452): n is a, c, g, or t
ntttttttttcttttacaggattctaaatgttccccttgccaacttttttgttgttcatcatcaccatcctccaggagcctttttaaacttttttttcgtggatcacctcctcatgaaatatgaacacaaaagtcacatgacatatctatgttctgtacattacatctgtgattatacagtaaaaaataacaagatttcactcccaagaatcaatttctcttccttagggacaccgtgtcctatgtagagaatgcagactctagaattattcattcccaaggtgattctcagattctccaattttcatttataggcatatcttctggaagcaagtgaatttcacaggctctggtcccctcaaccttganccctttaggaacccaaagagcntttgtccgtggtggaatcnttcccnttttttttctccngagctgaggcttgctccggttanccaggctg

SEQ ID NO: 8093 - DNA, 218 bp, Homo sapiens
  III.1721 (R07271)
gctaccacaaggcctactaagcagtcatttccctctcttcctgaagacacaagaatcaaagcctttgacaagctccgtacctgttcctcggccaccgtggcttggctaggcactcaggaaaggaacaagttttgcatctacaaaaaagaagtggatgataactacaatgaagaccagaagaaaagagagcaaaaccaatgtctagggaccaggatata

SEQ ID NO: 8094 - DNA, 197 bp, Homo sapiens
  III.1722 (R07272)
  misc_feature (6)..(6): n is a, c, g, or t
  misc_feature (121)..(121): n is a, c, g, or t
  misc_feature (139)..(139): n is a, c, g, or t
  misc_feature (158)..(158): n is a, c, g, or t
  misc_feature (179)..(179): n is a, c, g, or t
  misc_feature (191)..(191): n is a, c, g, or t
ttggangaaatgaacagtatataatctaatctctttaattttatgtacatgaatataatgtatgtcaactttgtacatgagatacatatagtatttaaccattttactcaacaaacaagantttacaatagcaatatanctgactagagggctatcancttaataatacttagattagntctgtactttantaggaa

SEQ ID NO: 8095 - DNA, 400 bp, Homo sapiens
  III.1723 (R18556)
  misc_feature (330)..(330): n is a, c, g, or t
  misc_feature (373)..(373): n is a, c, g, or t
aaggataaatattatgcttactgaggagaaaaaaaaaagcgatcacagaaaaatttcacagctaatatttttacaaaagttgtgccagacattacagagtgaaaacgtctctcaaggtggaatgctttagagagcaaaggcttagcatagacctagacccttgtgtgggtatgacatgacatgacatgtccatgtcaaaattcactttagtcaggaaccagagtattgacaaacaaaatgtcagttaccggggagcagtcctgggagaggttaaggacattcttattactgttcttacggttcaaccattttcttacaagtttgttcccngacaccttaaaggcagctttcttgggtttttcccaggtggccnggattcaaccttgttttcttggacatt

SEQ ID NO: 8096 - DNA, 254 bp, Homo sapiens
  III.1724 (R41423)
ttttttttcaaatggaaaagtcatttaattcaaaaatcatacgtccactcatttcatagggattgtcacataaaccaaccacatgtaaggaaagccaagtttcagaggcctctggaacagaaattttgttttctttataggatatatttgggtgacacaaaaggcattttttaaaagcctggaacatgggcaacaggggctactaacaggggacaaagggtctattctaggtcacaggattactttctaattac

SEQ ID NO: 8097 - DNA, 167 bp, Homo sapiens
  III.1725 (R52487)
  misc_feature (19)..(19): n is a, c, g, or t
agagaggaggcactgccanctgacagcaactgcacccacgatgcagagacagagttgcgtggtggtgggtgatggggctgtgggcaagacgtgcctgctcatctgctacacaactaacgctttccccaaagagtacatccccaccgtgttcgacaattacagcgcgc

SEQ ID NO: 8098 - DNA, 434 bp, Homo sapiens
  III.1726 (R52488)
  misc_feature (277)..(277): n is a, c, g, or t
  misc_feature (290)..(290): n is a, c, g, or t
  misc_feature (339)..(339): n is a, c, g, or t
  misc_feature (348)..(348): n is a, c, g, or t
  misc_feature (422)..(422): n is a, c, g, or t
  misc_feature (428)..(428): n is a, c, g, or t
ttttttttttcactggagacaggaggttttattgatgctgatgggggtaggaaaggtccccagaagcatgggggctgagtcagtcagcaaatgcgtaaggcctaggcacagaggagcaggttagggcacattcaccttctcaggattctgtggctccctcattggagaagggagagagcatcttgggggcgcaattccaagagcagcgagggcagaggttagagatggctgagagcccctaacctgaggcggcaccacaatagggcagcaacaactntttgggaaagctnggatgaactggttcagtaggcggaaaatggggaggggggcactgggttngcctctttngggggagggggtccaacctttggtttttggattgagctcattgagatttaccccagttttttcccaaggcagangggggngcagag

SEQ ID NO: 8099 - DNA, 363 bp, Homo sapiens
  III.1727 (R66268)
  misc_feature (325)..(325): n is a, c, g, or t
  misc_feature (359)..(359): n is a, c, g, or t
tactggacgaatccaaatttttactggattacacagaatacgtttttaaaaaatccaaagagttttagatgttacaacagggttccatcaaataccacgtttccaaatcttaccaccagaatgtgtatccatttcaactgcaattattttgtgtctaaaactgtgtactctgctttgcaacaggataaacccggtggataaaagctgaaatccgaccctgtcctaattaagaggctaagaaaaatggagaaccgcgctggctgggagttgatacagaaacactgcaagggctggggacagggcttagttcgtgggaatacacagngcagcaccaccaacccggtttttccggaaaaggngaaa

SEQ ID NO: 8100 - DNA, 465 bp, Homo sapiens
  III.1728 (R66269)
  misc_feature (454)..(454): n is a, c, g, or t
gccacgcttggctgcctgcttttctctgattttcttccgccttggaccctgctctatttgcattgtctttttttcagcaagtcggagaacggtgccttgtcagttttcacctttctcactggactttctcttttccggagagccgggttggtggtgctgcctgtgtattccacgaactaagccctgtccccagcccttgcagtgtttctgtatcaactccacgccagcgcggttctccatttttcttagcctcttaattaggacagggtcggatttcagcttttatccaccgggtttatcctgttgcaaagcagagtacacagttttagacacaaaataattgcagttgaaatgggatacacattctgggtgggtaaggatttgggaaacgtgggtattttgatgggaaccccgtttgttaacatctaaaactctttgggatttttaaaaacgnaattctgtgta

SEQ ID NO: 8101 - DNA, 312 bp, Homo sapiens
  III.1729 (H22365)
  misc_feature (1)..(1): n is a, c, g, or t
  misc_feature (2)..(2): n is a, c, g, or t
  misc_feature (30)..(30): n is a, c, g, or t
  misc_feature (43)..(43): n is a, c, g, or t
  misc_feature (78)..(78): n is a, c, g, or t
  misc_feature (86)..(86): n is a, c, g, or t
  misc_feature (169)..(169): n is a, c, g, or t
  misc_feature (176)..(176): n is a, c, g, or t
  misc_feature (269)..(269): n is a, c, g, or t
  misc_feature (304)..(304): n is a, c, g, or t
  misc_feature (309)..(309): n is a, c, g, or t
nnttttttttttaacttgaaacacaaacgntttatttaaaggngcatctcagttacgtgtggcggacaaaaaaaaggngcagactntgacagaccattcccatcggccaagtggtcgaacccgacatccaagacccagcgagcagccaagctcagcgcaacctccgggnttctcgntctgactccaaaagggtgagcacgtcgccctcgcgcacggggccttttacattgcggatgatgggatcggctcgtgtcgtccatgaattccangggcacctgggggcaacttttccctgaggaaccgntcctnccc

SEQ ID NO: 8102 - DNA, 208 bp, Homo sapiens
  III.1730 (H22396)
  misc_feature (52)..(52): n is a, c, g, or t
  misc_feature (54)..(54): n is a, c, g, or t
  misc_feature (197)..(197): n is a, c, g, or t
cgtgtgcagcctatcaagctggccagggtcaccaaggtcctgggcaggacgntntctcagggacagtgcacgcaggtcgcgtggaaattcatggacgacacgagccgatccatcatccgcaatgtaaaaggccccgtgcgcgagggcgacgtgctcacccttttggagtcagagcgagaagcccggagttggcgctnagttggctgct

SEQ ID NO: 8103 - DNA, 425 bp, Homo sapiens
  III.1731 (H75479)
  misc_feature (400)..(400): n is a, c, g, or t
taatctatttctattagattcgaagtattttggaaaatatttcaagtatatctgaactacttataattcttaaaacagaagtagtcagacaatatttgtatcctaagtgagatatggaaaattactctgtatactaaatgtcaggcaatgaaaatgtaagtttttgtgtagaaaacccattaagaagatgtgtttttctttctgaattagtttatttttccatcacataccaaaatataaaaatcagcctcacatttttcagcaagtttagcttatagccttggataaattcctctgtggcttctgagcaggcatccttctgcctctgcttagcggctctgcatttggtgggattggctgttgtgagtcatttcatccaggcactggggccttttaagcnggaagatttcacccgtgtctaaagt

SEQ ID NO: 8104 - DNA, 335 bp, Homo sapiens
  III.1732 (H75480)
  misc_feature (98)..(98): n is a, c, g, or t
  misc_feature (187)..(187): n is a, c, g, or t
gttaagtagctagtaaatataaattcaaagaattctgacaaaatcattattacctttttctcaagtcacatatttatttaggaggaaagatgcttganagctagctataagagaaggacaactttagacactgggtgaatcttcagcttaaaaggcccagtgctggatgaatgactcacaacagccnatccaccaaatgcagagctgcctaagcggaggcagaaggatgctgctcagaagcacagaggaatttatcaaggctataagctaaacttgctgaaaaatgtgaggctgatttttatattttggtatgtgatgggaaaaataaactaatt

SEQ ID NO: 8105 - DNA, 397 bp, Homo sapiens
  III.1733 (R48251)
  misc_feature (1)..(1): n is a, c, g, or t
  misc_feature (140)..(140): n is a, c, g, or t
  misc_feature (236)..(236): n is a, c, g, or t
  misc_feature (344)..(344): n is a, c, g, or t
  misc_feature (354)..(354): n is a, c, g, or t
naaaatcaattttttattcaaaagatagtcaaggctgacaacttatgcagtctgtgacaaagagcaagtcaagccaaggaaaaagctctcacaaagaacgtagctctgttctcttaaaatgtgtaactgttttcctgggnagagcaaaatttcttgaaaggggcccagttgcgactttaagcagcgtttaaacagcctgcctccgtgtccaggcatttaaatcaggcacaagagantcgggctgcctgtgggcccctgcctgaggcctcagcctaggcttgggagtctgagggctccaagggagggcctgtgtgtataaggccatcccatggggtcaccctccngggggcacgnccccctcatggggcaggcccccaccttaaggcaggcagggccg

SEQ ID NO: 8106 - DNA, 429 bp, Homo sapiens
  III.1734 (R48348)
  misc_feature (239)..(239): n is a, c, g, or t
  misc_feature (350)..(350): n is a, c, g, or t
  misc_feature (375)..(375): n is a, c, g, or t
  misc_feature (397)..(397): n is a, c, g, or t
acgtcggcttcgtgatcaagaaggggaagattgtctctctggtcaaagggagttctgcggcctgcaacgggctcctcaccaaccactacgtgtgtgaggtggacgggcagaatgttatcgggctgaaggacaaaaagatcatggagattctggccacggctgggaacgttgtcaccctgaccatcatccccagtgtgatctacgagcacatggtcaaaaagttgcctccagtcctgctncaccacaccatgggaccactccatcccagatgcctgaagccactgcagggcaggggcagggcagggggggctttcccgcccttccttgcaggcaaaggggcaaccaccttnggattgatggggtttgcagccggcntgtttgttttaaggttgggggntgccttgagggggggctttttccaggggggtt

SEQ ID NO: 8107 - DNA, 507 bp, Homo sapiens
  III.1735 (AA015675)
  misc_feature (11)..(11): n is a, c, g, or t
  misc_feature (35)..(35): n is a, c, g, or t
  misc_feature (36)..(36): n is a, c, g, or t
  misc_feature (57)..(57): n is a, c, g, or t
  misc_feature (59)..(59): n is a, c, g, or t
  misc_feature (66)..(66): n is a, c, g, or t
  misc_feature (69)..(69): n is a, c, g, or t
  misc_feature (73)..(73): n is a, c, g, or t
  misc_feature (77)..(77): n is a, c, g, or t
  misc_feature (148)..(148): n is a, c, g, or t
  misc_feature (215)..(215): n is a, c, g, or t
  misc_feature (216)..(216): n is a, c, g, or t
  misc_feature (217)..(217): n is a, c, g, or t
  misc_feature (269)..(269): n is a, c, g, or t
  misc_feature (312)..(312): n is a, c, g, or t
  misc_feature (394)..(394): n is a, c, g, or t
  misc_feature (422)..(422): n is a, c, g, or t
  misc_feature (440)..(440): n is a, c, g, or t
  misc_feature (471)..(471): n is a, c, g, or t
  misc_feature (490)..(490): n is a, c, g, or t
  misc_feature (507)..(507): n is a, c, g, or t
aattcggcacntggggggaagggctgctggcgttnngctggctgggtcgtgcggctnancgtgagnatnaganaganaaagcgatcctccaagagtgagaacgggagatctgccgaggataacaacctcccttgtggccgaaggcggntgggatccccacacgagggctccgcttcgagagacggcgacaaaggaaagttcgtagcgcgttccgnnngcccggccacctctgagaagggagaccgacgctgctgggtccgctgagcggngcgacccgaggttaatttgtaacccagccaaagaacctagganggatgggaagggaagactgtttttccctctcctacacctcaagtaacctacttgccaagcttgaaagaaataagaaacattnactaaaagccacctggtacatcttttcntccttttttggaatttancctggcccctccggaaggaaaggttaagggnctaacccttttcccagatnaattccaaccaggttan

SEQ ID NO: 8108 - DNA, 450 bp, Homo sapiens
  III.1736 (AA015676)
  misc_feature (20)..(20): n is a, c, g, or t
  misc_feature (39)..(39): n is a, c, g, or t
  misc_feature (45)..(45): n is a, c, g, or t
  misc_feature (114)..(114): n is a, c, g, or t
  misc_feature (278)..(278): n is a, c, g, or t
  misc_feature (289)..(289): n is a, c, g, or t
  misc_feature (299)..(299): n is a, c, g, or t
  misc_feature (372)..(372): n is a, c, g, or t
  misc_feature (378)..(378): n is a, c, g, or t
  misc_feature (409)..(409): n is a, c, g, or t
  misc_feature (422)..(422): n is a, c, g, or t
cagcatgtacaaagctattnggtttattcagctgccaanctgggngaaaggcttcctttcgaagtgaatagcaaaaatgcattcatgagcaaggcacttttatacacacacagnagagaaaaaggaacgtattatgaacacatgaacataaacatattttaatattcagacctcttccctacctcctcccacctccacttaaacaaacaaacaaaaaaaaaaggaaacagtttcctgtaacattttagaaaccagtttcacagaatacctacataggnacaatttctgntacattcagntacactaacaatatgatatggtttcagggcaataatttccactaacaaatgactttttattctacaattcccncccttntttccctttagggcaagaccaacttaagggntcagcagaaaatntttcactaggggtataaggcatttcttc

SEQ ID NO: 8109 - DNA, 158 bp, Homo sapiens
  III.1737 (AA074151)
aagttacattctctgagtttattttctctagaatctttctactcctgggaccagcagcatctgcatgacctgggagtttgtgagaaatctagaccctcaggccccatcccagacctgctggatcaggatctatatttttagaaggttcccacatgagt

SEQ ID NO: 8110 - DNA, 429 bp, Homo sapiens
  III.1738 (H28735)
tttttttttaaggacacgagagagccatatttatttcacatggacaagcatgattccattgcatgctgaacatgaaagctcgtatgagcaaagtacccgtaacagcagaattatgtgcttttgtccacagggagcagggagaatcacaaagttgttttcagagacagtgtttttcaagcacagttgagaccataggctctggaagtcactggtttatttcatcaccaaagggtctgtctcccagggagtggccggagtgctttcagctttgcaatctctcaatgaattgataaggtctgaggagggctgaggatggtctcccatcccaccacccagagcatctttgaaggaaatgaagctcagaggggaaggttacatgccattgggaatttaacaagggccattcctgggttggacaatgacagggga

SEQ ID NO: 8111 - DNA, 194 bp, Homo sapiens
  III.1739 (H19825)
  misc_feature (5)..(5): n is a, c, g, or t
  misc_feature (41)..(41): n is a, c, g, or t
  misc_feature (100)..(100): n is a, c, g, or t
  misc_feature (131)..(131): n is a, c, g, or t
  misc_feature (191)..(191): n is a, c, g, or t
caggnactcaaaagtgactttatttcctccccagaagacgncccttccagctgggcctgttgcttcacttcccctccggacctgggggtccccccccagncctcatccccaggtcctcctgcccagatggncctggtttcctggagatgtccagctgcctgggactcagagctggcgagagacagggaggnttc

SEQ ID NO: 8112 - DNA, 214 bp, Homo sapiens
  III.1740 (H19856)
  misc_feature (27)..(27): n is a, c, g, or t
  misc_feature (76)..(76): n is a, c, g, or t
  misc_feature (147)..(147): n is a, c, g, or t
  misc_feature (153)..(153): n is a, c, g, or t
  misc_feature (174)..(174): n is a, c, g, or t
gtggactctcactcctcccccgacgtnaaggcctccctgtctctccgggcagctctgagtcccagggcagactggnacatctccaggaaaccagggccatctgggcaggaggcctggggatgagggtggggggggacccaggttccngagganagtgaagcaacagcccagctngaagggcgtcttctgcggagaaataaagtcacttttgagt

SEQ ID NO: 8113 - DNA, 60 bp, Homo sapiens
  III.1741 (H94716)
  misc_feature (55)..(55): n is a, c, g, or t
gaaaagacaagcttcccagagaatgtttcagagcccgttacgtggagcgtggccntttcg

SEQ ID NO: 8114 - DNA, 402 bp, Homo sapiens
  III.1742 (H95082)
  misc_feature (345)..(345): n is a, c, g, or t
ttgactctgtaaataattctttcaaatctctttctggctcaagatcactcaactgtaatctttctggaaacaagtaattgataacataggtgagatcagataagttaaaagagccaccccaagttcattctgttcaggattaagtaaaggtaacactttaggggaaggtgtttagactacaagctgcggtgttgtgagcgcccaagtatcatttaattgtccgaaacgtcaagataaaatatttccgaggggcatcacggaagtttaacagaatgtgttagacttgaacgttcaacagcttgctcatttttgccaaaagccctttcactaaatgtgggaaatttnggaaaatggtacctcaataaataaacaaacaacgatttttaatttaagaacccaggg

SEQ ID NO: 8115 - DNA, 251 bp, Homo sapiens
  III.1743 (H18504)
  misc_feature (154)..(154): n is a, c, g, or t
acgagtggaaatatctatatttaattgccttaaaaatgtggggtggaaaaacacaattatacattgtgataacaaacctgtacagttaatttctgaataatacaaaacaagtgctgaaatttttttcttgatgattgagataattgtccccganttatgacatcagctacccaaatatcatgttgccccatctgcaaatacttgaagaggaatagttaccaattgaatgcatttagattcatccttaataa

SEQ ID NO: 8116 - DNA, 435 bp, Homo sapiens
  III.1744 (H19169)
  misc_feature (135)..(135): n is a, c, g, or t
  misc_feature (200)..(200): n is a, c, g, or t
  misc_feature (226)..(226): n is a, c, g, or t
  misc_feature (252)..(252): n is a, c, g, or t
  misc_feature (286)..(286): n is a, c, g, or t
  misc_feature (311)..(311): n is a, c, g, or t
tcaacgacgctctggacaacttaagaaaagtggtcccctgttattctaaaacccagaaactgtccaaaatagagactttacgactggccaaaaactacatctgggcactttctgaaattctgagaatcggcaagngaccagatctgctcacattcgtccaaaacttatgcaaaggtctttcccagccaactacaaacttngtggcaggctgcttgcagtgcaacgncaggcgtttcctgatgggtcagggtngggaggctgcacaccacacaaggtcaccctactntaccttctacccaccctaccacagncctgagcttcaccacttcccccagggcatgggacttcttgataatttccaagttcatgaaaccctacaatttatttgcagtgcgtatggaatccttgtcttgaaagtacttcccctgagtgttg

SEQ ID NO: 8117 - DNA, 353 bp, Homo sapiens
  III.1745 (R96087)
  misc_feature (2)..(2): n is a, c, g, or t
  misc_feature (94)..(94): n is a, c, g, or t
  misc_feature (147)..(147): n is a, c, g, or t
  misc_feature (219)..(219): n is a, c, g, or t
  misc_feature (224)..(224): n is a, c, g, or t
  misc_feature (235)..(235): n is a, c, g, or t
  misc_feature (283)..(283): n is a, c, g, or t
  misc_feature (288)..(288): n is a, c, g, or t
  misc_feature (304)..(304): n is a, c, g, or t
  misc_feature (334)..(334): n is a, c, g, or t
  misc_feature (348)..(348): n is a, c, g, or t
cntgaagtgccaccaaggatttggaaggtcactttcagcagccgccatttctgccaggaccagtggcaagcacctggcagatggagcccgggtntttctgcgtaaggcagaggaatccagcttttccatgagattcagctgcagttntcgaaaaccctgtgtgagccagcagttccagttcaaaggttgagggggcgaacagctgcgaggtggccaggntcccntgagtcaccantcaggcctgagtacaccgtggagaggagagataaagcagccacggctnttctnttgccagtcccacccntttggcaaacagatgggggaaaacagaganggaaagtcaacaangaagg

SEQ ID NO: 8118 - DNA, 399 bp, Homo sapiens
  III.1746 (R96129)
  misc_feature (106)..(106): n is a, c, g, or t
  misc_feature (107)..(107): n is a, c, g, or t
  misc_feature (291)..(291): n is a, c, g, or t
  misc_feature (308)..(308): n is a, c, g, or t
  misc_feature (332)..(332): n is a, c, g, or t
  misc_feature (360)..(360): n is a, c, g, or t
  misc_feature (371)..(371): n is a, c, g, or t
  misc_feature (376)..(376): n is a, c, g, or t
  misc_feature (391)..(391): n is a, c, g, or t
ggatgaaaactccagcctttcctgactcacctccatcttcggttcttcagttttctgagaagagttgggatatgtgggaaggggcatgggagctcggcagcctccnnctgccaggaaggcagttttcgcctctgcaggaaagagcagagcccgtgggaagccctgggtgagggtggcgcacagcccagcacgcatggtattgccagccacggggggcctgcgtgtagtctctgctccctgcatttcaccttctttgttgactttccttctctgttttcccccatctgtttnccagaggggtgggactnggcaacaggaacagccgtggctgntttattctctaccttttccacggtgtanttcagggcctnagttngtgactcacggggancctgggcc

SEQ ID NO: 8119 - DNA, 434 bp, Homo sapiens
  III.1747 (H11608)
  misc_feature (57)..(57): n is a, c, g, or t
  misc_feature (290)..(290): n is a, c, g, or t
  misc_feature (302)..(302): n is a, c, g, or t
  misc_feature (375)..(375): n is a, c, g, or t
  misc_feature (402)..(402): n is a, c, g, or t
  misc_feature (413)..(413): n is a, c, g, or t
  misc_feature (420)..(420): n is a, c, g, or t
tttttttttttttctggaaggttctcaggtctttatttgctctctcaaattccaggnattgacttatttaattaatccatcaacctctcatagcaaatatttgagaaaacaaatttatattcagattcttattttcagtagggaagtaagaagttgcagctcagtgcacgtaaagttgagacagagatggagacatccagccccacctctctggaacaagaaagatgactggggaggaaacacaggtcagcatgggaacaggggtcacagtggacacaagggtggggctntctctccacctnctcacattatgctaacagggacgcagacacattcagggtgcctttgcaggaaagagatgccagaggtgctttngaagtcacaaaggggagggcttgaagnaatcccgcatnttcagtnccctcacaaggaca

SEQ ID NO: 8120 - DNA, 523 bp, Homo sapiens
  III.1748 (H11697)
  misc_feature (168)..(168): n is a, c, g, or t
  misc_feature (453)..(453): n is a, c, g, or t
  misc_feature (460)..(460): n is a, c, g, or t
  misc_feature (481)..(481): n is a, c, g, or t
  misc_feature (496)..(496): n is a, c, g, or t
  misc_feature (514)..(514): n is a, c, g, or t
atgtatggctgcgacctggggcccgacggcctacctccgcgggtataaccagttagcctacgacggcaaggattacatcgccctgaacgaggacctgagctcctggaccgcggcggacaccgggcttcagatcacccagcgcaagtgggaggcggcccgtgagcgganaggctgagagcctacctggagggcctgtgcgtggagtggctccgcagatacctggagaacgggaaggagacgctgcagccgcggaaccccccaaagacacatgtgacccaccaccccatctctgaccatgaggccaccctgaggtgctgggccctgggctttcttaccctgcggagattcacactgacctgggcagcgggatgggcgaggaccaaattcaggacaccgagctttttggagaccagaccagcaggagatagaactttccagaattgggcagttttngttgttnctttttggagaagagcagagntacacttgccttttncagctttaggggtttccnaagcctttt

SEQ ID NO: 8121 - DNA, 632 bp, Homo sapiens
  III.1749 (T67528)
  misc_feature (512)..(512): n is a, c, g, or t
  misc_feature (560)..(560): n is a, c, g, or t
  misc_feature (588)..(588): n is a, c, g, or t
  misc_feature (603)..(603): n is a, c, g, or t
ggttccagtttattcatgatctatgtggtacaaaatgtcacgcataagtctagcagcctggacagggtacaaggctctgaggcccccttgccctccctctcccaccatcccctccttcccatcactctccgtgctcagccagtgcggggaagactggagaagctctttcctcgagccatgagaagcagggaggagtttgccacttgtttggtgccttgggtgaaaaaagtcactcaagatatcaaaaccctaaaactgcagttcaagagggcaaggagctcagattgacactctgtgcaagccagcttagagctggtccagggagaactgacacctcatgggtgaggtcagaccagaaaaggtcttgagcactatactgtgaagctgagctgagactttaatcctgggaggccagtgactcttcaaggtgagattctgggaaccagctattagggggcaccacctgggcactgttaattaggaattaggaattctcaggacctccctagatnccagtgaatcaggaacttagtgggggccttacacttttttcaaccagncttccagctgatttttttaccaggtttnttaattgtccaaccntaaattcttggtcttaaaggtactttttt

SEQ ID NO: 8122 - DNA, 423 bp, Homo sapiens
  III.1750 (T69526)
  misc_feature (12)..(12): n is a, c, g, or t
  misc_feature (60)..(60): n is a, c, g, or t
  misc_feature (64)..(64): n is a, c, g, or t
  misc_feature (215)..(215): n is a, c, g, or t
  misc_feature (220)..(220): n is a, c, g, or t
  misc_feature (253)..(253): n is a, c, g, or t
  misc_feature (270)..(270): n is a, c, g, or t
  misc_feature (279)..(279): n is a, c, g, or t
  misc_feature (307)..(307): n is a, c, g, or t
  misc_feature (316)..(316): n is a, c, g, or t
  misc_feature (328)..(328): n is a, c, g, or t
  misc_feature (356)..(356): n is a, c, g, or t
  misc_feature (391)..(391): n is a, c, g, or t
tttcggcacagnagctgtcctatgcgttgtaggatgtttagcagcatttctggccttggntctnagacaccataatatcccccagttgtgacaaccagatatgtctgtagacatagccagatgccccctgtaggcagcattcaccccacgtttagagccactgctctagcattgttatagcctttaactggttttctgactcctgtctccccagncaagncctttgcactcagccttccaggagttattcatntgtaaaaatgcaaaggntggccattncgggggcttatagggcttttacgggggntccctggcngcctgcaggtcnatgggttttccaaaccttaggcctggantcaggattcaccggggggggaaaagacattctgtngggagacaggaagttgggttagttggtttgcc

SEQ ID NO: 8123 - DNA, 449 bp, Homo sapiens
  III.1751 (H77478)
  misc_feature (406)..(406): n is a, c, g, or t
  misc_feature (412)..(412): n is a, c, g, or t
  misc_feature (440)..(440): n is a, c, g, or t
tacaacatgtaagaattatgggagctgcaattcaagatgagatttgggtgggaatacagccaaaccatatcaaggatgcgctctctattcttcactttcccagtgacttatctaaaaatgatttctcccttctacgtgcaagacttccactccagtttcttttctccttatattatttgcttccagtttctaaaatatccttgggatcactttgagaacatgggaggagagaagcagagggcttcaggaaatctgatgaccataacttacgttttataagttcttgtacaaagtcaagaacaggtgaaatttccagggaagaatgtagaagacacagtttaattcatggatgttattgggttgcccttaagtggggatggcatggtctccctaggggttcacaggnctggcnttctaaaaagtaactaatttttttctgntttacaatt

SEQ ID NO: 8124 - DNA, 337 bp, Homo sapiens
  III.1752 (H77479)
  misc_feature (116)..(116): n is a, c, g, or t
  misc_feature (126)..(126): n is a, c, g, or t
tgttggacagcacagttatagaccatttaatctaattgcttcagaaggtttctatctcaaactgtgtaagtcaggattcaatcacaggagaaccactaaggtgcgtgcacgcgcgntggcgcacancacacacacatacacacacacacacacacacacacacacacaaagggatttgctacagggatttgtcctaatacaactgtgggagctggttaagcagtctctataaagctctcatcttacatctgatgttggggactcgacatctatcggacagggcagttggggaaggaaggataaatgtaaaataaggggagagccaaggaacaacctg

SEQ ID NO: 8125 - DNA, 416 bp, Homo sapiens
  III.1753 (N68012)
gaagtcaaaaagtttatgtaaccaatcaattaaattctggaaatttcagcagcactttcttcccaaactgctttccaatcaaatcctctttctcccgtaagaattatcacagacataaattgcctaattaataaacttaattcttataggtttacgtatttatgtcatttgataaacagatgctggccaatgttaagactcctaaggacttggtattaaaaactgaaacctctcatcagaatttctatttttatatctgtgactcaccaaacatacttggaaatgtccattttccaagctgactttccagttagattttaatcttaaataaagtgtgtatcgtggttttattaaacaaactgtcacaatgggacaaactgcatgcctttccatgaatgtctggttatcaccctgga

SEQ ID NO: 8126 - DNA, 216 bp, Homo sapiens
  III.1754 (N80440)
  misc_feature (5)..(5): n is a, c, g, or t
  misc_feature (19)..(19): n is a, c, g, or t
  misc_feature (203)..(203): n is a, c, g, or t
  misc_feature (211)..(211): n is a, c, g, or t
gcganaatatttctattcnaaagttccaaaataatcagtggaatttgagattagagcaagaaagatagctctatctaattgtttttgtagcagctgaaactaaaataatttgagtgctgaaaccttagttatgctttgttagagatcatttgaaaatattccacacttaagcattcattgttttgaagaactagacagtttgnaccccagnacctt

SEQ ID NO: 8127 - DNA, 382 bp, Homo sapiens
  III.1755 (R00075)
  misc_feature (361)..(361): n is a, c, g, or t
agtctttctatacaaatatctagttgaaaaatatactcaaaacttttaagaaatagattctggttattcatattacatcacaactgaatgtactaatattagaataacatttaaattaacaatcacatttgtgggatcactacataaatgtgtcaggggcacccagggataaaatattctcctagaggtctgcgtgctcttattcttttttaatcgttacaattaatagtgaagataaacaaaatcaatgaagctgcagaagggcactttctcaagtcaaatgaaccttgaacctaaaaataaaggggacccttaaaatagtgggtggggtaaatgggaagccatctaggtattaaccaanaatttgaggggttgacattcc

SEQ ID NO: 8128 - DNA, 395 bp, Homo sapiens
  III.1756 (R00386)
  misc_feature (323)..(323): n is a, c, g, or t
  misc_feature (333)..(333): n is a, c, g, or t
  misc_feature (338)..(338): n is a, c, g, or t
  misc_feature (351)..(351): n is a, c, g, or t
  misc_feature (365)..(365): n is a, c, g, or t
  misc_feature (385)..(385): n is a, c, g, or t
agttctgaaatcaatggagttaatttagggaatacaaaccagccatgggggtggagattgcctttgcctcagtgattctcacctgcctctcccttctggcagcaggagtctcccaggttgttcttctccagccagttccaactcaggagacaggtcccaaggccatgggagatctctcctgtggctttgcggccactcatgagagtgtttttgtgtaaagtattttttagaatactgttgacttcttcatgatttaataaccatcctttgcgagttttatgaggctttagggggaatgttcaaccctcaaattttgttattantaggatgggnttccnttttacccaccantattttaaggtccnttatttttagggttcaaggnttcatttgat

SEQ ID NO: 8129 - DNA, 430 bp, Homo sapiens
  III.1757 (R17982)
  misc_feature (126)..(126): n is a, c, g, or t
  misc_feature (335)..(335): n is a, c, g, or t
  misc_feature (413)..(413): n is a, c, g, or t
tgaatttgtccgtctccgacttctggagagtgatgatgcgggtgtgctggttggtgagacaggacagccggcaccagcgaatcagacttccacatttggaagcagttgtgattgggcgtggcagangaccaagatcactgataagaaatgttctcgacagcaagtacagttgaaagcagagtgtaacaagggatatgtcaaggtaaagcaggtaggagtcaatcccaccagcattgactcagtcgtaattgggaaggaccaagaggtgaagctgcagcctggccaggttctccacatggtgaatgaactttatccatatattgttaggagttttnagggaaggaggccaaagaaccctgggcctgggaaacacacagggaaggaggaaagagttccagggcaacagttgtttntattaggaaaggggttg

SEQ ID NO: 8130 - DNA, 368 bp, Homo sapiens
  III.1758 (R43471)
  misc_feature (298)..(298): n is a, c, g, or t
  misc_feature (312)..(312): n is a, c, g, or t
  misc_feature (326)..(326): n is a, c, g, or t
  misc_feature (327)..(327): n is a, c, g, or t
  misc_feature (365)..(365): n is a, c, g, or t
tttttttttgtgaaaaagctgcatgttttaatttaggaaatgagtagaagttcacaagcaacccagaataggtgccagcagtttgctccagtgggccacaccacagcagcagctcaggctctgcagaatcactgtgtccagtgcttcctgagatgttctttcagctgaggaatgggaaggcagcagctgctgggcactcatgacaacgaagggggcagcttcaaggagctcagggcatcccatcttcgggacagttacttcttaccagcctcttgtaccatcttcgattcacagcttnttgattctaggggngtattcttgtattnnaaagggattcccatgttttttttgtttttttaggggcnagg

SEQ ID NO: 8131 - DNA, 665 bp, Homo sapiens
  III.1759 (N73758)
  misc_feature (514)..(514): n is a, c, g, or t
  misc_feature (557)..(557): n is a, c, g, or t
  misc_feature (597)..(597): n is a, c, g, or t
  misc_feature (607)..(607): n is a, c, g, or t
  misc_feature (628)..(628): n is a, c, g, or t
  misc_feature (633)..(633): n is a, c, g, or t
  misc_feature (659)..(659): n is a, c, g, or t
ggtagccagccagccaaggtctgtttatgcttttggggggcatatattgggttccattctcacctatccacacaacatatccgtatatatcccctctactcttacttcccccaaatttaaagaagtatgggaaatgagaggcatttcccccaccccatttctctcctcacacacagactcatattactggtaggaacttgagaactttatttccaagttgttcaaacatttaccaatcatattaatacaatgatgctatttgcaattcctgctcctaggggaggggagataagaaaccctcactctctacaggtttgggtacaagtggcaacctgcttccatggccgtgtagaagcatggtgccctggctttctctggaggaagctgggggttcatgacaatgggcagatggtaaagttattcttggaagtcagattgaggctggggagacagccgtagtagatgttctactttggttctgctggttctctagaaagaatatttgggttttccnggtataggaatgagattaattccctttccaggtattttataantctgggaagcaaaaccatgcctccccctagccattttacnggtatcccanttagaagggccatgaaaaggngccgngaaatccccacaacattgatgcggcngtatgc

SEQ ID NO: 8132 - DNA, 466 bp, Homo sapiens
  III.1760 (W03870)
  misc_feature (59)..(59): n is a, c, g, or t
  misc_feature (347)..(347): n is a, c, g, or t
  misc_feature (459)..(459): n is a, c, g, or t
  misc_feature (465)..(465): n is a, c, g, or t
gacatacaaaaagacaatatttattttactcaagctttcctataagaagttaaacaganacaatccctggttgaagactaccaaaaatgttaacattgtttcacatatcccttcagtgcccagatgaagggaaaaacttaactgaacgaaagaataagaattaccatcctgacactgggtttgcttaggtatgttaggaaaaaatccacataggctagacctaaaacagtaaatgagcctactaatttcccacaggggactgggaaatccactgatacagacacctccaagagctcccaagacctagggatcacaaccaccacaggggattcccataacttcctttnccctcccttttccctcagctattttacttgctaaaagaagaggatggggaacaaaagattcactttccccacttcccagactggcattactggtcagcatcaatgtttgttngggaant

SEQ ID NO: 8133 - DNA, 438 bp, Homo sapiens
  III.1761 (R17712)
  misc_feature (253)..(253): n is a, c, g, or t
tgaaagggaacatgtgggctaacaggccacaaatacctttgtaagtacatgccaaggacaaacacatggacgcaaatcctctgagcccttcagggtacttctttatttgtaaactaaggatactgggcatagaatttgaatcaggttcaaagaaccacgctcttttgattcatatcaagttcacaatgtatccatttctattcctccactgcattgccatcctccccaaagccgttggtcacctgtgggtggngggagggagagggcagtttgtagtatttgctgggtcttttttctccccctgggttttgtgtcaactcccaagtgacattctgtagagaagctccccccgcaaccggggcatatgtcccacggccgtccgtctttggaagaggctggtctctagggcatggggcggtagttcacgggtggaatttc

SEQ ID NO: 8134 - DNA, 402 bp, Homo sapiens
  III.1762 (R41782)
  misc_feature (124)..(124): n is a, c, g, or t
  misc_feature (331)..(331): n is a, c, g, or t
  misc_feature (390)..(390): n is a, c, g, or t
tttttttttttttgaatgcaaactttatatttacagtcagtaagtttataaatatatattacattcttacaatctacagtacattctacacgcagatggatttggaagcgggcaggactgcagntattcaacagaacatgacacaggtaagaatggaaagaaatatgaggacgttactgaaagcaaaggattctcattgaaaaggggtgacagcttaatcacccaaccaaacaaggtaggtaagcttgcgtacaggagcaggtgacttactggctgcagaaacctcagtctcaagagcaccacagttgcaggggagagggctaaggttggngaggggtaaactgggtggaatttttacacacacatgatcttaaagaggattttcaattnctatgggagagg

SEQ ID NO: 8135 - DNA, 386 bp, Homo sapiens
  III.1763 (H23516)
  misc_feature (109)..(109): n is a, c, g, or t
  misc_feature (179)..(179): n is a, c, g, or t
  misc_feature (316)..(316): n is a, c, g, or t
  misc_feature (335)..(335): n is a, c, g, or t
  misc_feature (349)..(349): n is a, c, g, or t
  misc_feature (374)..(374): n is a, c, g, or t
tctcctcccaccttctggttcttcctaataatcctggatacttgttggaaaaaaaaaaaacaggaacaccgggagtaggctcagtcaatgggtgctgtctgttccaggngctgctcagagaccctctgtacatcggcctgaaacaccagcgcgtgcacgggaaggcatacgatgacttnctggatgagttcatgcaggctgtgacagacaagtaagtggaccagtctgtccctttttaaagaggacttttaagagatgccgtgactaaagtcaacactggttttggctgatatacaaagtaaaggcagtagatgcntgcttttccagggattctnaaaattccaacttnacccctaggggtgataagacttggnaccaaatggggt

SEQ ID NO: 8136 - DNA, 422 bp, Homo sapiens
  III.1764 (H23545)
  misc_feature (24)..(24): n is a, c, g, or t
  misc_feature (84)..(84): n is a, c, g, or t
  misc_feature (149)..(149): n is a, c, g, or t
  misc_feature (154)..(154): n is a, c, g, or t
  misc_feature (240)..(240): n is a, c, g, or t
  misc_feature (288)..(288): n is a, c, g, or t
tttttttttttttttttacttttncttatttccagaataaggaaacccagaaaagtttagtaacctgacccaaggtcacatatnctgcaaaagtgggggggtcaaaggtcaaattacagtttgacccacccctgtaaggcccacccagntgagnactttgtgcagtagtttgtggggctccagccctgtttctggttggagaagctgagcttgggacaagggagcactttgccaaggatnggcagggccatctctgccaaacctgtgcaatcttcagggcagcaaganggctggagatttgcaagtgagaggggaacatgctttgtcttcagaggcccactgagctgctgaaactctggcttgaccagctcttctctcagagtaaacatgggtttttgagggctgtcatcagggcttcatcc

SEQ ID NO: 8137 - DNA, 449 bp, Homo sapiens
  III.1765 (N63076)
ggttatatcagacttatttagtttattgaacacttctatagcattttctatgccaggcactgttctaaacacttccaaatattcatctaccaaactcttagacagctttacaaggtgaatgttattaatctctccatttcacagatggaaaactcgagggagaggttaatgaaattgctcaaggtcacacattgagtgagcagcagaagtgagatttaaaccaaggccatgtagtgcctgaatctgtgtgcctgccccccaggccacacccagacccggggcctgctctctgtgctgtggacaatctcctcgggctcaggcctcaggagagtcatgtctcactctcattctgcgggacattgcatgtgtcaggatgcacaccacatccggtgctgcctgccatgcggaagttttccttctgggaatccatttcctccacctggaaaaga

SEQ ID NO: 8138 - DNA, 218 bp, Homo sapiens
  III.1766 (R27989)
  misc_feature (143)..(143): n is a, c, g, or t
  misc_feature (198)..(198): n is a, c, g, or t
ggctaaagtattttattaaattaagtatgtaatttgcaaatggcttcataagaaaatttaaaagcaaatttataaaacattttcaatttaaaaagtacagagttaacagcaaaattacattttctatacagtacaaataaaancatttttctgatatactgtctgaaaattttataatatattctccaactgatggcnggcaatattggtattttaat

SEQ ID NO: 8139 - DNA, 490 bp, Homo sapiens
  III.1767 (R28250)
  misc_feature (33)..(33): n is a, c, g, or t
  misc_feature (84)..(84): n is a, c, g, or t
  misc_feature (85)..(85): n is a, c, g, or t
  misc_feature (128)..(128): n is a, c, g, or t
  misc_feature (164)..(164): n is a, c, g, or t
  misc_feature (308)..(308): n is a, c, g, or t
  misc_feature (318)..(318): n is a, c, g, or t
  misc_feature (376)..(376): n is a, c, g, or t
  misc_feature (395)..(395): n is a, c, g, or t
  misc_feature (415)..(415): n is a, c, g, or t
  misc_feature (420)..(420): n is a, c, g, or t
  misc_feature (442)..(442): n is a, c, g, or t
  misc_feature (452)..(452): n is a, c, g, or t
  misc_feature (458)..(458): n is a, c, g, or t
  misc_feature (475)..(475): n is a, c, g, or t
tatttgcaactttatggcctttaaatatagganatattatatagcagaaattttaactttaaatcctcttgagtagtatatttnnagaagaaaagctatactgctcttctggatggtttccatccttnatttaggtctttactttttgaattcaagtgttttgnatgcttagaaagtagacatgtataatattgagatcggttatttctgagctgggaaattgggaaactttgggaaactcagggaaattgctctgacaatgttttaactgctctccaatttaaggaaaatgacggaaatgtattaanaaaagacaanattaacgtgtgctgtttttttcccagtggctttttctaggtgcctttcccttgtggcntggggtggaggtttgggtntttttccggtgtggtggttnaattnttgcccccctttttattttacnggttaagggnaaccgnttttatgttttgttggncccagggtgttccct

SEQ ID NO: 8140 - DNA, 297 bp, Homo sapiens
  III.1768 (N73813)
  misc_feature (287)..(287): n is a, c, g, or t
ttttttttttcctcaaccaaatgttttgaatttattataatcgtgcttctctacaactaatgattcttgtggtttgcaaaccatgtctgcctttatttacctacacaaacacggaacagaatttccaataggagaggttcacacagctaacaaagcatagagtgtgtgacctcaataaggcattcaacaaagacacacgccgtatttccctctgactgcgttcccttaggatgctctgatgttggcgtcgcattcttctaaaagtagaatcaaatcttcaatcaggntgtgttccct

SEQ ID NO: 8141 - DNA, 165 bp, Homo sapiens
  III.1769 (N99721)
  misc_feature (46)..(46): n is a, c, g, or t
  misc_feature (47)..(47): n is a, c, g, or t
cggcacgaggggcttcccgatatcaacatctaccagctgaaggtgnntgactgcgccatggatgcctgcatcaacctcggcctgttggaggaagccttgttctatggtactcggaccatggagccatacaggatttttttcccaggaagccatcccgtcagaggg

SEQ ID NO: 8142 - DNA, 351 bp, Homo sapiens
  III.1770 (R33486)
  misc_feature (249)..(249): n is a, c, g, or t
  misc_feature (275)..(275): n is a, c, g, or t
  misc_feature (318)..(318): n is a, c, g, or t
  misc_feature (344)..(344): n is a, c, g, or t
aagcttaaggatatgcccggaagaaagaaacacaaatccacaggaacaatctatggttcatacctttttagaaagatgattttgagggcttcagtatttaaagggggaaagcaggctggaggggaaagagagaggatatggtcccattgctgactccatgtgttgcaagagaaaaggagcaggctggggaatagtcaattagggtaatcctcttacggctcaataaattgggcactttacataagggtngaacataggagtacctacctatgggnaggatatctgaccttttatctgtaggctattaggcttaggggnaccaaaaggcgaggcagttttctttncatggac

SEQ ID NO: 8143 - DNA, 384 bp, Homo sapiens
  III.1771 (R34025)
  misc_feature (277)..(277): n is a, c, g, or t
cattatctcaggtagagtctgctaaagatgatacttgcttgtcagtacatgagtatccaccctagtaaaaaaccacagaagaagtgggatttatcttcaatgttctctcacttccccttccaagtgcctctcctgccttctgatgctctttcccacaagttgcagggcaaataaaggcatgtatattacttctcttttttattccaggagttgctccttgtccttattatggaggtaggatttccaggaccttcacaattgtattatggcctacccntctacttcccaccccttcaaaaaaaggaggggagggattggaaggattggacaggaggaaggggaggggaggagaggggagagaggggaaggaggggaaggttgggt

SEQ ID NO: 8144 - DNA, 480 bp, Homo sapiens
  III.1772 (R53556)
  misc_feature (181)..(181): n is a, c, g, or t
  misc_feature (275)..(275): n is a, c, g, or t
  misc_feature (419)..(419): n is a, c, g, or t
  misc_feature (463)..(463): n is a, c, g, or t
ttttttttttttttttgagacagggtcttactctgtctcaaaaaagaatgcacaacccagccccaaaggcacagaaatgtcactgtcacttcacaaagctccttgcatccctgcgcagtcaaggtaagagatgatgcagtgagatttaagaggctgaaggcgcgagtgcccgggaagccgngggggggggttgggcatgtgggaccccctccatgttgacagtcgaggcatacggcctgcaggtccacgcttacttgctgtccatgctgtcggtntcacaaagctgcatgttgaccagcctatctcccttttctcctgggcacaccagaagactacatttcctaggccccttgtatcaaggtgggtccatttgggtagttttagccaaagcaaagtatgaaaaggatttttcaccattnagaggtttgacccatttcagggtcacacaagcattttttcgttnttgtccctgggaacttt

SEQ ID NO: 8145 - DNA, 471 bp, Homo sapiens
  III.1773 (R53667)
  misc_feature (285)..(285): n is a, c, g, or t
  misc_feature (453)..(453): n is a, c, g, or t
  misc_feature (459)..(459): n is a, c, g, or t
  misc_feature (465)..(465): n is a, c, g, or t
atcatgagtgataaatgatagtggttttaagtgacaaagttttggggtaatttgttacacagcaatggacaactcaagcacacacataaaattctttcctagacataagctgccttatttccttgctgccttacctccatgcttctctcaatttaatggtagctaccatgaggccatctgggatcatgatgggagagccacccccttaattccatatttaccaaaagaccaagttattttgttcagatgagaagttttattatgcctttattgctgaaagcaatntttgaatcttaccttttctcattagagtttgaggaaagtcttttgcaaccttttgatgctaattttttttaggattgttgcctttccatttctgcttgcaaactagccagttctttcctccttactgtggataggcattccaaaatgcagttcaacagtaggcccaantcacanggcacntccctt

SEQ ID NO: 8146 - DNA, 341 bp, Homo sapiens
  III.1774 (R63962)
  misc_feature (92)..(92): n is a, c, g, or t
  misc_feature (338)..(338): n is a, c, g, or t
gctcatcagctttttgttagtgttagtgtatttttatatgtggcccaacacaattcttccagtgtggccagggaagccaaacaattggacanccttaagggacagcccttaagtaggctgaacttaagttgcaaacattgagataaaacattagtctccacctgcccaaaataccagcatccgtcttagatcattttcccaaacagaagcaaaatctacttggcttatttaagttactttcactaagggtccatctggggcaatagctcctcattctacacaataaggcctggcatcttaggtccattacaaggggaaaaaaaccacattctgggggnaaa

SEQ ID NO: 8147 - DNA, 490 bp, Homo sapiens
  III.1775 (R64066)
  misc_feature (345)..(345): n is a, c, g, or t
  misc_feature (422)..(422): n is a, c, g, or t
  misc_feature (478)..(478): n is a, c, g, or t
  misc_feature (490)..(490): n is a, c, g, or t
gaagaattgtgctttaagatgttaagcaaattgcccaaagtgcaaaaccagtgtgttggagcttgaattccaaaccagatctgcctgagtcaagcttttcttttatgttcttatttactaaaggcttcttgaacagaagtatgtgagagttgggcacatgcagcttggtcaattctatgtaaacccggtcagattctgagtagtgtagatctgataaagtcaatgtgaatttcttatcattcgttgcaagagacttaatgtagcaaaaatcagtatcataggaaacgagatgttactgtggtaggcacactgttctctctcagctacctcatttttgttttattnggtggtggctattgctctggccactacaaaggcagcatttacttggacacggcctgtatggctttaagggcagaacnctgactgctttttccattgctgggccaatcccggacttccatcagtacttggctancccgtaagggan

SEQ ID NO: 8148 - DNA, 172 bp, Homo sapiens
  III.1776 (T70229)
  misc_feature (11)..(11): n is a, c, g, or t
  misc_feature (21)..(21): n is a, c, g, or t
  misc_feature (27)..(27): n is a, c, g, or t
  misc_feature (38)..(38): n is a, c, g, or t
  misc_feature (44)..(44): n is a, c, g, or t
  misc_feature (62)..(62): n is a, c, g, or t
  misc_feature (70)..(70): n is a, c, g, or t
  misc_feature (78)..(78): n is a, c, g, or t
  misc_feature (85)..(85): n is a, c, g, or t
  misc_feature (101)..(101): n is a, c, g, or t
  misc_feature (107)..(107): n is a, c, g, or t
  misc_feature (114)..(114): n is a, c, g, or t
  misc_feature (115)..(115): n is a, c, g, or t
  misc_feature (126)..(126): n is a, c, g, or t
  misc_feature (137)..(137): n is a, c, g, or t
  misc_feature (154)..(154): n is a, c, g, or t
  misc_feature (166)..(166): n is a, c, g, or t
  misc_feature (168)..(168): n is a, c, g, or t
gtcccaatttnctgacttggntcaggnacagggagatncttctnccattttattttacaaanagttctgngagtggangatcccncaaataggggcaaaantttatngggaaanncccgtgtccanaggggtttctntcgctgaagtgtttacnctgaagcccctngngttt

SEQ ID NO: 8149 - DNA, 430 bp, Homo sapiens
  III.1777 (T80111)
  misc_feature (2)..(2): n is a, c, g, or t
  misc_feature (8)..(8): n is a, c, g, or t
  misc_feature (45)..(45): n is a, c, g, or t
  misc_feature (266)..(266): n is a, c, g, or t
  misc_feature (298)..(298): n is a, c, g, or t
  misc_feature (349)..(349): n is a, c, g, or t
  misc_feature (374)..(374): n is a, c, g, or t
  misc_feature (393)..(393): n is a, c, g, or t
  misc_feature (416)..(416): n is a, c, g, or t
  misc_feature (423)..(423): n is a, c, g, or t
antttttnaattagaaagtagactggatatggtctcctgacctangaagataaagtaaaattccttaacatggattataaggataataatcacatagctatctccaatgtcatctgccaatcttcattttatactttgtactctatcacagaattgcttatacttccatgtaaatatcacacctatctgcttttgtttatatacccttcccaattttttcttgctaactgtgtaagacttgggttcagggaacatcccttctaagnggccttctttgaaccctcaacttgggtagggngctcttccttggatttccataactgcagggcatacctctataatacatttnactatactatattggagggtttggnttaaaatccctcaccactnggtttttagggtcccggaggggnggggggnctggggg

SEQ ID NO: 8150 - DNA, 326 bp, Homo sapiens
  III.1778 (R87311)
ccagcctgaagtcacggtcctggcccagcacaggtgggcagcagcgagctggcaggtgaagtgtgagcagcacgcaaagtgtcacgtgggccttagccgtcacccaccagcttcctcaccaggcaaggaggccccggagccttagcagggacttgcccgacggcacagctgattggtgctcgactcccagcatgcatattttgttgtaaaaacccaggtttgtaattcacatccacaaccctaagccttttaaagcggaggcaaacgttaacgaaccccatcgtgggtccatgggagccttttcaaaatgggtgccctgggaaggg

SEQ ID NO: 8151 - DNA, 443 bp, Homo sapiens
  III.1779 (R87312)
  misc_feature (330)..(330): n is a, c, g, or t
  misc_feature (360)..(360): n is a, c, g, or t
  misc_feature (396)..(396): n is a, c, g, or t
  misc_feature (417)..(417): n is a, c, g, or t
  misc_feature (422)..(422): n is a, c, g, or t
  misc_feature (433)..(433): n is a, c, g, or t
cgcccgccagccccaagggaaggtctcaaggaaggccccatggacagtggcccatgctcctggggtaagtctggtgcctggggtgactcagcagatccacactggttaccttgcaactgccgtggactctggaagccgagggagagagctaccagccttgcagacagatgggccttgcccaggttccccgcagattctggggaagagggagccatggcccatgcctgtgcccagggtcagggggacaaagggagccctcaaatctgatagttgtttctatgaaaaagttgggtcagtggcttaacattattaaaaatatataaatgggangtttgaaggctgatgacacctttaacaaantaggagccagggggcagagccctgaaggagtgacanttttggctccaaggttaggantgggnagggagccctnaggccccgag

SEQ ID NO: 8152 - DNA, 466 bp, Homo sapiens
  III.1780 (R99123)
  misc_feature (2)..(2): n is a, c, g, or t
anattgatcaaggttttcattgcttttattcaatgaggtttggaacatgagaggccaaaaatgaggagcacattttggggaatcctctataaagaatataagttaagaaagttgtccaagatgaaaataataggaaattaccccaactcatgccagttgggtcttaagaaatgtccttgatggcaggcttgaagaaaagatgtcacagattagcgtcttcccagagtgtgaatagggcacgttctcctacatgcaaacacacatgcgcacacacacaatacccttacacacataccccagcttctatgaggtaaaacttgctgttgctgactctcttctctcttaacctcttgttgcatttctccggggacagctgggagctgggttctcattaacactgaactctttaaccggggcatcccggttgggcttgcgcaagttctgggggtgtgtcatacaggaaggg

SEQ ID NO: 8153 - DNA, 469 bp, Homo sapiens
  III.1781 (R99665)
  misc_feature (2)..(2): n is a, c, g, or t
  misc_feature (6)..(6): n is a, c, g, or t
  misc_feature (415)..(415): n is a, c, g, or t
tnaganccagtccatcgccatcgagctctctgacctggttgtctactgcaaaccaaccagcaaaaccaaggacaacttagaaaatcctgacttccgagaaatccgctcctttgtggagacgaaggctgacagcatcatcagacagaagcccgtcgacctcctgaagtacaatcaaaagggcctgacccgcgtctacccaaagggacaaagagttgactcttcaaactacgaccccttccgcctctggctgtgcggttctcagatggtggcactcaatttccagacggcagataagtacatgcagatgaatcacggcattgttttctcttcaatggggcgcacgggctacgttcttgcagccttgaggagcatggagggacagaggaaatatggaccccgatggccacccgagttnccagagggaaggttccttgatggacggttgacagttcaaggtttttcggtgctt

SEQ ID NO: 8154 - DNA, 291 bp, Homo sapiens
  III.1782 (R07653)
  misc_feature (30)..(30): n is a, c, g, or t
  misc_feature (71)..(71): n is a, c, g, or t
  misc_feature (76)..(76): n is a, c, g, or t
  misc_feature (290)..(290): n is a, c, g, or t
tcagaaactttaatttccaaatatattgancaaaaatatacaacttcaacagcaactctttatcctaaggngagancccgcagtatatctagggaaagggccataaaagtgagggggtagaggactttggggtatatcccaaacttcccctgcaactaaacagagtttgttctctgcattaacaacacagcgatttcctcatttcctcctacatgtttggagaggctgaaggctctgcagttcttcctgggatgacagcctgggtcccattcctctctaggggatgtccng

SEQ ID NO: 8155 - DNA, 401 bp, Homo sapiens
  III.1783 (R07706)
  misc_feature (301)..(301): n is a, c, g, or t
  misc_feature (318)..(318): n is a, c, g, or t
  misc_feature (363)..(363): n is a, c, g, or t
  misc_feature (368)..(368): n is a, c, g, or t
  misc_feature (384)..(384): n is a, c, g, or t
  misc_feature (396)..(396): n is a, c, g, or t
ggctggaaaaccgaaagagtgtggtcttcacctcagcacaagccacgactgaggcataaattccttctcagataccatggatgtggatgacttcccttcatgcctatcaggaagcctctaaaatggggtgtaggatctggccagaaacactgtaggagtagtaagcagatgtcctccttcccctggacatctcctagagaggaatggacccaggctgtcattccagggaagaactgcagagcctttcagcctctccaaacatgtagggaggaaatgaggaaattcgctgtgttgtttaatngcagagaacaaactctnttttagtttgcagggggaagttttggggttatacccccaaagttnctctnacccccttcatttttnttgggccctttncctta

SEQ ID NO: 8156 - DNA, 312 bp, Homo sapiens
  III.1784 (N75059)
  misc_feature (44)..(44): n is a, c, g, or t
  misc_feature (202)..(202): n is a, c, g, or t
  misc_feature (218)..(218): n is a, c, g, or t
  misc_feature (225)..(225): n is a, c, g, or t
  misc_feature (239)..(239): n is a, c, g, or t
  misc_feature (259)..(259): n is a, c, g, or t
  misc_feature (284)..(284): n is a, c, g, or t
cactttcagttttattaaagacacattgttttaaattctaccanagacaatattccattgaatagtctaattgttttgacagggtgataagactgtaacctctggcagttaaaaagagaatgatgacttagtaagagtcagaatctgaggtaatatctctcagttccaaatatttagaggggaaatggtttatttaaacccnctgatgtatcactggnatctgtnaatctcattaagtngaaaatctccacagcctggnatactaaatttctgcactgtcaggntgcccattctctgcagtgtcctcctgga

SEQ ID NO: 8157 - DNA, 442 bp, Homo sapiens
  III.1785 (W05795)
  misc_feature (50)..(50): n is a, c, g, or t
gtattttttagacctcatctttctcatttgtaaaatgaggagttggatangcagtcttttaagaaagtatttttcaaataatatgcctcagttcattttcatcagaatcagctgttaactaacaatggaaatgtctgggtttcacatgtattatcatctctggagtgaggcctggcagtttggacatgttttagacctggaggtggattcttaggaacttaaaagtttaaagtcattgcattaagttactttttatgctgtaactttctccagctctaactctacagttggtgttctaaagtaccaatacaggtaagttcttgggtacctatataagaatgaggtaaatattatagataaacctcaaatttctggcacccctgaggcttaactctgaagtccatcattgacgcagtaatggctctattttcctataaactgg

SEQ ID NO: 8158 - DNA, 392 bp, Homo sapiens
  III.1786 (W47416)
  misc_feature (390)..(390): n is a, c, g, or t
aaagtattcaaatatttttatttttaataaactaaagtgacatcagtaattgaaattatgagatatgttccctaaaacatattcagaacaaataagagttcttccactttctaactctaattggtcttggacaggtcaatttgatctctctaaagccaaatctatcttcatttgtaaattcagcacaatagcaaccacctcagagttgttatggggtctgaataggttgacaaatagaaggatactttgcaaatgaaaaatctctatgcaaatttaaactataatctttccactctgactaaaagcaactaaaggttctttccattttaaaactatcaaaagctttatatgtgaatattgaatattaaaactaaaaactttatttaatcntg

SEQ ID NO: 8159 - DNA, 442 bp, Homo sapiens
  III.1787 (W47611)
  misc_feature (220)..(220): n is a, c, g, or t
  misc_feature (410)..(410): n is a, c, g, or t
  misc_feature (420)..(420): n is a, c, g, or t
aacaaacccaattcctggtgtcccctagtcttggcggaggagccttttagatgagccccgaaaggccgggcagggaggacaagctctttggggctaccaaacagaagcagcaatgcctgttgtgtggccaacccttctggatctcagcagggatgaatgcaaaagaattcttcgaaaattcggaattggaggcatatgctggagttatcagtgcacttcnggcacagggggatctcaccaaggaaaagaaagatcttcttggagaactatcaaaagttcttagcatctcaacagaacgccaccgtgctgaagttcggagagcagtaaacgatgaacggttaacaacaattgcacataatatgtctggacctaatagctcttcagaatggtccattgaaggtcgtcgattnggtaccactngatgccccggctcgttccccaa

SEQ ID NO: 8160 - DNA, 249 bp, Homo sapiens
  III.1788 (R06746)
  misc_feature (15)..(15): n is a, c, g, or t
  misc_feature (16)..(16): n is a, c, g, or t
  misc_feature (44)..(44): n is a, c, g, or t
  misc_feature (47)..(47): n is a, c, g, or t
  misc_feature (168)..(168): n is a, c, g, or t
taattaaagatcttnnaaattttttttttttttaaaaagcgacnaanacatttattgagagctgtaaaatgtgtttcacccaattgtaatgtaaagaatcgaaaattttaaaaaatttccaaaaaaattacatgattgtagttggtaaaaatgcacccatttcagganggcccctgtgcctgtgtataaatgatgtgtcttgaacgctgctgggaagctctattgctgagattgagaagaccttagaaa

SEQ ID NO: 8161 - DNA, 446 bp, Homo sapiens
  III.1789 (R06795)
  misc_feature (3)..(3): n is a, c, g, or t
  misc_feature (5)..(5): n is a, c, g, or t
  misc_feature (22)..(22): n is a, c, g, or t
  misc_feature (417)..(417): n is a, c, g, or t
  misc_feature (429)..(429): n is a, c, g, or t
ggnanattcggcacggacaganataggggttacagattaacttccatggggatgaactccacccgatgaaggctgctgagcttggggctgaactgggagcgcaggcaatcagccacctggaagaagtgagtgatgaaggcatcgttgccatggcaacgaccaggtgctctgccatccttctgcccaccacagcctacatgctgagactgaaacaacctcgagccaggaagatgttagatgaaggagtaatagttgctctgggaagtgatttcaaccccaatgcatattgcttttcaatgccaatggtcatgcatctggcctgtgtaaacattgagaatgtccatgcctgaggccttggcccttggccaccatcaattgcagctttattgcacttgggaaagttttcacacacacggnttcctttggaantttggccaaacagggag

SEQ ID NO: 8162 - DNA, 341 bp, Homo sapiens
  III.1790 (AA020757)
  misc_feature (283)..(283): n is a, c, g, or t
  misc_feature (308)..(308): n is a, c, g, or t
  misc_feature (315)..(315): n is a, c, g, or t
  misc_feature (331)..(331): n is a, c, g, or t
agattccaattatatttatacataaattgtgcatttataaaaaccttacaaatacttctatttttccaggaagatattataggtaacaatttaacacatgtagtaagaaaacgtcttaaattcggaaaatcacaactaggttaattaaacaattcaatacgttaatggctatcataagtattctatttataaagactttaccattttttatgctgaaacagcagcatgtcctttaaattattcattctaacatgtagtttgtgttttaattggcctaaatgcnagggaaagtaaaccagtttggaatnatgggtnggaaggtttaaccccnttcccatccc

SEQ ID NO: 8163 - DNA, 442 bp, Homo sapiens
  III.1791 (AA021552)
ttgagtcagaatcttgctctgtcacccaggctggagtgcaatggtgtgatctcggctcactgcaaccttcacctcccgggttcatgcaattctcctgcctcagcctcccgagtggctgggactacaggtgctcaccaccatgcccagctaattttttgtatttttagtagagaccgggtttcaccgtgttagccaggatggtctcgatctcctgacctcgtgatccacccgccttggcctcccaaagtgttgggattacaggcatgagccaccgtacctggcccaggttttcctttttttttatgtcttctgtacaatagagttggccctccatatccacaggttccacatccctggattcaatcaactcctgataaaaaatattggaaaaaatttttataacaataaaaaccaataatacaacaataattacaaataatac

SEQ ID NO: 8164 - DNA, 373 bp, Homo sapiens
  III.1792 (R55721)
  misc_feature (220)..(220): n is a, c, g, or t
  misc_feature (274)..(274): n is a, c, g, or t
  misc_feature (282)..(282): n is a, c, g, or t
  misc_feature (288)..(288): n is a, c, g, or t
  misc_feature (293)..(293): n is a, c, g, or t
  misc_feature (324)..(324): n is a, c, g, or t
  misc_feature (345)..(345): n is a, c, g, or t
ttttttagacttttgccaattccacaggagtaatgatttacaaccaaaataacagtacacaggccagtcctgcgccacaggggttcacagctctgaatactgggaaagggtgagatcagtcatttcgtgtcccctcacgagatgtccccacagtaggatgcactgagtcagagctaagggagggtgggacaagcgctgaactctgcccgcagcacccggnaccctccagtggacagcctgcatgctggtgcccttccttgcaggcacaagcctncgcccggnaacagnaacgncctgaggaggcagaccttcgaacgggcgtgnaggcttccagggggcctcttncttgggatgggcagtcagccgaacgttg

SEQ ID NO: 8165 - DNA, 501 bp, Homo sapiens
  III.1793 (R55931)
  misc_feature (95)..(95): n is a, c, g, or t
  misc_feature (96)..(96): n is a, c, g, or t
  misc_feature (213)..(213): n is a, c, g, or t
  misc_feature (351)..(351): n is a, c, g, or t
  misc_feature (404)..(404): n is a, c, g, or t
  misc_feature (422)..(422): n is a, c, g, or t
  misc_feature (442)..(442): n is a, c, g, or t
  misc_feature (450)..(450): n is a, c, g, or t
tgtgtgtgatggctctggctcggaccaaccagatgagcctcctgaagcccccttccctgcctgcctgctgacccgtggccccagctcactcattnncctcagcagccacccgaggctgtgcagaagggtaggttcaggttgaccaggaagctgccaaaagggacatggatatgaggatacatctggacgtgcttaggaacagggtgctggttnagggcccccagctgacccctactgcagatccgcatgtggaccatgagccggctgccagcactaggtcctggggcagctttgtttgtcccacttttctttgtttcttcttcacttaaaatgatcacggaaggacctttnacaaggaggagagatattgcactgtggatgatttaaatttaggaaataatttnattcaaaatcaggacctnttccttaaaaggattaaggnaatttcanttgtttttgggcccttcctgaaaggtgaggttggcgagacagttggggtgc

SEQ ID NO: 8166 - DNA, 464 bp, Homo sapiens
  III.1794 (T79928)
  misc_feature (34)..(34): n is a, c, g, or t
  misc_feature (88)..(88): n is a, c, g, or t
  misc_feature (246)..(246): n is a, c, g, or t
  misc_feature (253)..(253): n is a, c, g, or t
  misc_feature (261)..(261): n is a, c, g, or t
  misc_feature (284)..(284): n is a, c, g, or t
  misc_feature (331)..(331): n is a, c, g, or t
  misc_feature (390)..(390): n is a, c, g, or t
  misc_feature (404)..(404): n is a, c, g, or t
  misc_feature (442)..(442): n is a, c, g, or t
  misc_feature (461)..(461): n is a, c, g, or t
ttctctttgtccagttcctttattgggggcaggnaccaagaagaggccctccgctccccaaacccagaggcaaaaggggttggcacgntccctcccagcctagtccttgcgtcactgtccatgggcaattcctctgccctgcatcttcaggccatgtcaggtagaggtatccatctcagggacctcagtggacacttccgtgggcactgccagccgcctggggggcacataggatcccatacccgntgccctntccgcctnttcctgactgtagggctcgacgntcagctgcttcagccttttcttgtggtctttggatcggaagtgggtnttcaggttggtgggaatcgatgaagtacctcgcgcaggccagacagcggtgcaggccgncccctgggcaggtncggggtcgaacttggcgtttaggttcgggcttggggtncgttgcggatccctgaggncgc

SEQ ID NO: 8167 - DNA, 402 bp, Homo sapiens
  III.1795 (T87585)
  misc_feature (41)..(41): n is a, c, g, or t
  misc_feature (53)..(53): n is a, c, g, or t
  misc_feature (116)..(116): n is a, c, g, or t
  misc_feature (136)..(136): n is a, c, g, or t
  misc_feature (168)..(168): n is a, c, g, or t
  misc_feature (242)..(242): n is a, c, g, or t
  misc_feature (254)..(254): n is a, c, g, or t
  misc_feature (261)..(261): n is a, c, g, or t
  misc_feature (356)..(356): n is a, c, g, or t
  misc_feature (361)..(361): n is a, c, g, or t
  misc_feature (391)..(391): n is a, c, g, or t
ccgggtgtttctggccatgggtcgctcccgccggacagcgncaccgagagctnctctagcccggcagatgaaggcgacggcggcgccgaccttggatgagattcaccgcgagctgngcctcagggatccgcacgancccagcccgacccaaacgccgagttcgacccngacctgccagggggcgacctgcaccgttgtctggcctgcgcgaggtacttcatcgattccaccaacctgaaganccacttccgatncaaagancacaagaaaaggctgaagcagctgagcttcgagccctacagtcaggaagaggcggagagggcagcgggtatgggattctatgtgccccccaggcngcttngcagtgccacgggaagtttccattgaggtnccttgagatgg

SEQ ID NO: 8168 - DNA, 432 bp, Homo sapiens
  III.1796 (T77745)
  misc_feature (390)..(390): n is a, c, g, or t
  misc_feature (401)..(401): n is a, c, g, or t
  misc_feature (423)..(423): n is a, c, g, or t
aaatatattgcagcttaagtgatttagccagattctcctccccacatctctccaggacacaattgtggttatcagttaggacactcttcactttgttttgataattctgagtgtgcaaggatgcttagaagacagttcttcctcctcgctccataggcttcccaaggagcacacaccaggacatcaggatgagagtcaagccaggttccctgtgcacacacatacacatgcatacactcatgcacacacacaccaccaccaccaccaatctccagccttggttcatcacccagaatgactggatagagttagatgtagaattagatgtctaggaatttccagggttattctagggcagaggtattcaaactggtggccacctgtggactntggcctgcctnacaattgaaatgttgtttggtntttcagaat

SEQ ID NO: 8169 - DNA, 441 bp, Homo sapiens
  III.1797 (T77746)
  misc_feature (147)..(147): n is a, c, g, or t
  misc_feature (403)..(403): n is a, c, g, or t
  misc_feature (420)..(420): n is a, c, g, or t
gggatctaataggaacattcaaaacattgatattagcactgtgtgtgaaagaagtactgctgccctgaaactgtccataaatttgggattgcaaggctgcagtgaactcagaggacgtgctttgcctcaaaagggctgaaccaagtntcaccataaggaaatgtggcccaggattgctgcagcttccagattttccaaattgaaaattcaggtttctatgtaaaaccttgccatatttaaatgtgggctcctaactgaactttatcagaagcattctgaagaccaaacacatttcatttgtaggcaggcagagtcacaggtggcaccagtttgatacctctgcctagaattaatcctgggaaattccctagacatctaattctaccatctaacctctatcccngtccattctggggtgangagccaaggctgggagattgg

SEQ ID NO: 8170 - DNA, 342 bp, Homo sapiens
  III.1798 (N71151)
  misc_feature (266)..(266): n is a, c, g, or t
  misc_feature (281)..(281): n is a, c, g, or t
  misc_feature (302)..(302): n is a, c, g, or t
  misc_feature (331)..(331): n is a, c, g, or t
aaagaaacttggattgttttaattggtttaaatgcagggtatatgtaaacaactccccagaaatgagaggcacttctcggaaatacaataacccatatcactagactagcaaaacactcagtgcttttgacttgatgaattgaatgagttcatgattcaactttctaatgttgtctacttgaaaaatagcaagattcttatctgcagcatttaatgcattaagatgtattagataggcatatcagatatcataaaattaaaattgngcttatgttaattcngtaatagacctaactttaaanacacctcatggttattccactaaggagcnaatgatcccag

SEQ ID NO: 8171 - DNA, 278 bp, Homo sapiens
  III.1799 (W05494)
cttgtaaacttttcagacagcagtaaatgtctgaaaaaatatcaaaaacagcataaagacaagattatgtagctctaattatacgtatataattataaaaaacaatgtgcaagggttatattttaaggtcttttaaaatctgattttgatcataccaaatgacataatattttttatggtagccttttactttcaagacttaattttcagacttgtacaagttccttcttacattctttccctctcacaccatcctactggaggaaagcatactttta

SEQ ID NO: 8172 - DNA, 461 bp, Homo sapiens
  III.1800 (AA020756)
gaagtccccttcacaagcttcgcagctctgtgcagtagcagccctttaatagctgtaacttcaccactgggaaaggaaaggaaaggaaagcctctctgctttcatgctgattgctatggaagcttgcccaagatacttccccttgcatgtgcagggctgtgtgcaaaacagagaaattgctttccacttaaaagcgttggcctgttattactctatgaacctttgaggaaatcagattcagaggtttcctaaatgtagaaagttcctttctctcttgttattaaagccacaaacaatctaggggtaattttttatattattttgaggttgcattaaaattaagaggaaggacagtactgcagagatgcctggttgtttgttgggtttcttaaaaaggactaaatatgaataaattacgaattcttgcacgttaggaaagggaccttttgttgttgttgttg

SEQ ID NO: 8173 - DNA, 451 bp, Homo sapiens
  III.1801 (AA021551)
  misc_feature (4)..(4): n is a, c, g, or t
  misc_feature (6)..(6): n is a, c, g, or t
  misc_feature (308)..(308): n is a, c, g, or t
tggngntgatagatatgtttattatctcgactgtggtggtggtaatacaatacaagtgtatacatatgtccaaactcatcaaattgtatacattaattatgtgaaggtttttgtatacaaattatatctcaataaggctagggaaaaaacaaaagcaagaaagctatggcccaagcataaatacatttccaataccttctgaaaggctttttaagttccacagaaaatcaaaacagaaataaagcaaagaagtataactgttcatgctaacacatgtttctgatcttcccagagctgttttactcccnagagccctagccccattcacatcctgcctgagctatgtccactacagcaccaacctcagcggcatctgccttgcctcttcctttccctctgggcatcacttcccatggttagagagagtggaaccctacagagactttcccag

SEQ ID NO: 8174 - DNA, 322 bp, Homo sapiens
  III.1802 (R34370)
gtttattgttttaaaccacctagtttgtggtaccttattatggcggctctgggaaattaatcaatcccctcaggcctctgttttgagcttcaatgtcacgtttccaacggctccacaacatttttccttgacagcatcataggcagatattatttaaatagccaatgctgattttgcaagcttgccttctctcccttccatgatcatcttccagtgcttcctcttctctgtgcatcacaccaatatccacacaggtaactttacacttggacaggatttcccacttactttttcaaatatgggattgcggggggcttcaagg

SEQ ID NO: 8175 - DNA, 444 bp, Homo sapiens
  III.1803 (R34490)
  misc_feature (283)..(283): n is a, c, g, or t
  misc_feature (352)..(352): n is a, c, g, or t
  misc_feature (384)..(384): n is a, c, g, or t
  misc_feature (406)..(406): n is a, c, g, or t
  misc_feature (411)..(411): n is a, c, g, or t
  misc_feature (421)..(421): n is a, c, g, or t
  misc_feature (426)..(426): n is a, c, g, or t
  misc_feature (441)..(441): n is a, c, g, or t
gtatattcactcacttataaagtactttcttaaatattttagctcctctacaaggatgtataatccttgaagcaggagctgttcccacccaagaaaatgaaaatctcagtcattaagtacacaaacacgggtccagattgcttggtttcaaatcttggttctgctactggccagctgtgtgatccaaggaaaagctactcgactttctctgtgtcttcatctgctcatctgtcaaatgggatatatggagtagtcctactttcagggagttgttgcgagggantccattagtacctctcctaggtgcctggcaggccacggcaatacatattttggaaaggtagtggggaantctgttcaagtgttaggttactgtgtgggggnattggggtgttgaaggcacagnggagnggggaggcanggggnaggaggtccaggggnagg

SEQ ID NO: 8176 - DNA, 399 bp, Homo sapiens
  III.1804 (T86484)
  misc_feature (90)..(90): n is a, c, g, or t
  misc_feature (158)..(158): n is a, c, g, or t
  misc_feature (196)..(196): n is a, c, g, or t
  misc_feature (328)..(328): n is a, c, g, or t
  misc_feature (351)..(351): n is a, c, g, or t
  misc_feature (389)..(389): n is a, c, g, or t
  misc_feature (399)..(399): n is a, c, g, or t
gacataaaccaataacatagtcactcactatgactatgatgattatgtactgtatgtaattgtacgtgctgtcatttatacagctggcanacaataggtttgtgtacaccaagcatcaccacaaagatttgggtaatgcattccattgccctaacggngtacaacatcactaggcaataggaatctttcaggtccngttgttgtcttctgggacttctgtcatatatgtggtctgcctttgaccaaaatgttgttatgcagtgcgtgactatacccactatatgttcaagttctaaattgggattctggggaagctgattaaagaggnaaataatgtgtagtctattgggnagagggtaggataaacaatttttaaggtgaaataattnctaatttttn

SEQ ID NO: 8177 - DNA, 419 bp, Homo sapiens
  III.1805 (T86485)
  misc_feature (13)..(13): n is a, c, g, or t
  misc_feature (14)..(14): n is a, c, g, or t
  misc_feature (16)..(16): n is a, c, g, or t
  misc_feature (19)..(19): n is a, c, g, or t
  misc_feature (31)..(31): n is a, c, g, or t
  misc_feature (384)..(384): n is a, c, g, or t
  misc_feature (416)..(416): n is a, c, g, or t
ttggagacagagnnanccntgttgcccaggntcatgtgattctcatgcctcagtcacccaagtagctgggacaacaggcgtgtgcaccaccacacctggctaattttttgtatttttagtagagacggggttttgccatgttggcaggttaatcttgaactcctgagcttaagtaatccacccgccttggcctcccaaagtgctgggattacaggcatgagcaacggacctgggccattcttcaattttagtggcaattatctattatgaaaaaaacaaacaaacaaaaggggtatctgcaaacatttttccactatttttccatcaaaatgaatttaggagatgtaaggcaaatgaccttttcatggtccatttactataagngaatttttattaaggctaccatatctttaggnaag

SEQ ID NO: 8178 - DNA, 438 bp, Homo sapiens
  III.1806 (AA024662)
  misc_feature (173)..(173): n is a, c, g, or t
ttgtgtgactcactttattgcgatatccactttattatggtggtctggaactgatcctgtaatatctccatggtatgcctgtgctgtacagggggtaaagtgtgaggggtcaagaattttcatgccagaaattccatagcagcctactagaactctggaagtatcgcctttgntgcagtgccagattctggtgaggatttcctggaccccgatttatatctgaaaaaacactaaaaataacagaagcagggcaggaagtggctatgataacaaagctgggcttggtactttctctggcttttgtggccaatattactggactcccgtggtatcaagtttcataaaagaaactccatacaaagcagagatatcttaattattttcagactgggcatttccaaaagtggtccatttaagtaagtattataaggtaattgg

SEQ ID NO: 8179 - DNA, 442 bp, Homo sapiens
  III.1807 (AA024968)
caagtgagcccggagtacttctccatgcttctagtcggaaaagacggaaatgtcaaatcctggtatccttccccaatgtggtccatggtgattgtgtacgatttaattgattcgatgcaacttcggagacaggaaatggcgattcagcagtcactggggatgcgctgcccagaagatgagtatgcaggctatggttaccatagttaccaccaaggataccaggatggttaccaggatgactaccgtcatcatgagagttatcaccatggatacccttactgagcagaaatatgtaaccttagactcagccagtttcctctgcagctgctaaaactacatgtggccagctccattcttccacactgcgtactacatttcctgcctttttctttcagtgtttttctaagactaaataaatagcaaactttcacctattcatgag

SEQ ID NO: 8180 - DNA, 400 bp, Homo sapiens
  III.1808 (H02899)
  misc_feature (288)..(288): n is a, c, g, or t
  misc_feature (303)..(303): n is a, c, g, or t
  misc_feature (311)..(311): n is a, c, g, or t
  misc_feature (336)..(336): n is a, c, g, or t
  misc_feature (356)..(356): n is a, c, g, or t
  misc_feature (372)..(372): n is a, c, g, or t
tataagtgatataaaatacagtgaaaagaatttattgttaaaaactgtcagtgaaacatctgatacacatctggctatgaatggtagattcaaacgtgataaaactgccacttgaaatgcatcacagtaccagcaggcacgtggcaatcttacctccttacttctttgattacaatgatacgatattcactatatccctctgtggttgtccttttgttaaaatttgttctggttttcatagttccttttgtacttcaacaatcacattttgggcaacttactctgggnaattaaaagttgggnttcaaggnaaactatggacctcccacatttggntcattctcctttccatcccngaattctgtcttttgnaatgtagggcctggtgtgacccacacag

SEQ ID NO: 8181 - DNA, 464 bp, Homo sapiens
  III.1809 (H03801)
  misc_feature (1)..(1): n is a, c, g, or t
  misc_feature (356)..(356): n is a, c, g, or t
  misc_feature (361)..(361): n is a, c, g, or t
  misc_feature (409)..(409): n is a, c, g, or t
  misc_feature (420)..(420): n is a, c, g, or t
  misc_feature (453)..(453): n is a, c, g, or t
ngaagaccttcaaagacaacttgccgtcttggacaaagcaatgaaagcaaaagtggccacatacctgggtggccttccagatgttccattcagtgccacaccagtgaatgccttttataatggctgcatggaagtgaatattaatggtgtacagttggatctggatgaagccatttctaaacataatgatattagagctcactcatgtccatcagtttggaaaaagacaaagaattcttaaggcatcttttctctgcttataataccttttccttgtgtgtaattatacttatgtttcaataacagctgaagggttttatttacaatgtgcagtctttgattattttgtgggtccnttccngggggatttttaaaagggtccctttgttccaggggaaaaaaaatttcnggttgtggatnttaaatccacagttaaaggaatttcttaacttncccttggccat

SEQ ID NO: 8182 - DNA, 435 bp, Homo sapiens
  III.1810 (R55723)
  misc_feature (210)..(210): n is a, c, g, or t
  misc_feature (281)..(281): n is a, c, g, or t
  misc_feature (392)..(392): n is a, c, g, or t
  misc_feature (403)..(403): n is a, c, g, or t
  misc_feature (430)..(430): n is a, c, g, or t
tttttttttttttttttttttagaagtctcactccctcacccagggtggaagtgcagtatcacgaactcagctcactgcaaccgctgcctccgggttcaagcttcagcctcccgagtagctgggattacaggcatgtaccactacatccaattaatatttgtatttttagtggagacgaggtttcatcatgttggccaggctagtctggnaacccctgacctcaagtgattcaccagacctctgcctcccaaagtgctgggattacagggcgagacacggncgcctgggtcccacggattacttcttgccttgcaccctgaggcttctggggatagggctggcagccactgggaggaccctggaatttgaaataattgggggtaaaaaatgnatttttacttnaattttaataattcatttcatatatantaagg

SEQ ID NO: 8183 - DNA, 430 bp, Homo sapiens
  III.1811 (R55933)
  misc_feature (282)..(282): n is a, c, g, or t
  misc_feature (344)..(344): n is a, c, g, or t
  misc_feature (384)..(384): n is a, c, g, or t
tcttgagctcctgacttcaggtgatccacctgccgcggcctcccaaagtgctgaaattacaggcatgtgccactgtgtctggccaaaataataaatcttatgttagctttaaggagttctgaacttagtatctgtcatgtagtaaataaataaacatgataatcttctaggaattttgggtaaataattttaaacaaattcttaatctcactacactataatctgcctcaacgttgttgttagacgtgtataatgaatattaggaagtactgggacaaaatnccatttgatctcattttcttggaaatgagttaagttattgttgttgccacatttttcatctngaagtcattctgtaataaaacccctttggtaggttgttanccaccggggacctgttacactgggacccttgggtgcctattaaggg

SEQ ID NO: 8184 - DNA, 358 bp, Homo sapiens
  III.1812 (R24664)
  misc_feature (300)..(300): n is a, c, g, or t
  misc_feature (312)..(312): n is a, c, g, or t
  misc_feature (341)..(341): n is a, c, g, or t
  misc_feature (349)..(349): n is a, c, g, or t
  misc_feature (355)..(355): n is a, c, g, or t
atggaggcagagccagtggtaggggacagagctgctggggcctttccttgcctgggaatctgtcccaggaagagcttccccactcccatcccccaaattggaaaaaccgtacattcaagcctgtttggccctgaaattcttaagaatctggttaagaattaactcactaatgtcaaaagtcaaaacctcctaggggttgtcctggggagtcaggttcacggggtacagaagatgaatctcagatgttcactcaacctgagccgtcatttcttctgttggcagggctgccctggggttttntcttacttcatncctgggaattttaagcatttgggattgtnttcacagnttaccnttt

SEQ ID NO: 8185 - DNA, 204 bp, Homo sapiens
  III.1813 (R25166)
  misc_feature (84)..(84): n is a, c, g, or t
  misc_feature (135)..(135): n is a, c, g, or t
  misc_feature (150)..(150): n is a, c, g, or t
  misc_feature (155)..(155): n is a, c, g, or t
  misc_feature (163)..(163): n is a, c, g, or t
tacataaatcgaggcttttatttacatcataggacaagaaaaggatacaaaagaagtctcttggtcaagcacatcaagcgaaantcctaaaactcaatactcagtaaggtgtgggcactgatattgaaaaaaagnaaaaaaaagaaaganaaggnaaaaaggnaatctgtgacacaatccaaatgcttacactcccgggggttg

SEQ ID NO: 8186 - DNA, 245 bp, Homo sapiens
  III.1814 (H00660)
  misc_feature (132)..(132): n is a, c, g, or t
  misc_feature (149)..(149): n is a, c, g, or t
  misc_feature (174)..(174): n is a, c, g, or t
  misc_feature (241)..(241): n is a, c, g, or t
attaagtatatataatattacagggtaatatttacaaagttatgtttttttttaaataaaaaagtaccttggcaaagattgcagatattcaaagctttaaacagtgataaattgatttaatacatataaaanaaaaaacctttaacggnaacacagctgtaaaacaactttggncttcaaatcactggcaaaaaaatgggctactgacaaatgggcacacctttaattgctatgcaaaaangctc

SEQ ID NO: 8187 - DNA, 424 bp, Homo sapiens
  III.1815 (H00752)
  misc_feature (345)..(345): n is a, c, g, or t
  misc_feature (395)..(395): n is a, c, g, or t
tttactcctccatctcagtaataaaaattaagctgtaatcaaccttctaggtttctcttgtcttaaaatgggtattcaaaaatggggatctgtggtgtatgtatggaaacacatactccttaatttacctgttgttggaaactggagaaatgattgtcgggcaaccgtttattttttattgtattttatttggttgagggatttttttataaacagttttacttgtgtcatattttaaaattactaactgccatcacctgctggggtcctttgttaggtcattttcagtgactaataggggataatccagggtaactttggaagaggatgagcagtgagtgaccngggcagtttttctggcctttaggcttttggacagtttcttaatttaaggntccattgaaggacccagcttttctcatta

SEQ ID NO: 8188 - DNA, 169 bp, Homo sapiens
  III.1816 (H93716)
  misc_feature (13)..(13): n is a, c, g, or t
  misc_feature (16)..(16): n is a, c, g, or t
  misc_feature (35)..(35): n is a, c, g, or t
  misc_feature (74)..(74): n is a, c, g, or t
  misc_feature (79)..(79): n is a, c, g, or t
  misc_feature (80)..(80): n is a, c, g, or t
  misc_feature (121)..(121): n is a, c, g, or t
  misc_feature (146)..(146): n is a, c, g, or t
  misc_feature (150)..(150): n is a, c, g, or t
cgtctgaggttancancaagctcctagtccagacnccatgggtcatttcacagacgaggacaaggctactatcncaagnntgtggggcaaggcgaatgtggaagatgctggcggagaaacnctgggaaggctcctggttgtctacncatngacccagaggttctttgac

SEQ ID NO: 8189 - DNA, 422 bp, Homo sapiens
  III.1817 (H93717)
ttgggacagagttttgctcttgtcacccaggctggagtgcaatggtgtgatcttggctcactggaacctccgcctcctgggttcaagtgattctcctgcctcagcctcccaagtagctggtattacaggcacttgccaccatgcccagctaattttttgtatttttagtagagacagggttttaccattttggccaggctggtctcgagctcctgacctcaggtgatccgcccacctcagcctcccaaagtgctgcgattacaggcctgagccactgcacccggccaggtgctgttattctagaaggtatgataaatagtttataaaagacacataaaagtaagtttcagagatctgctcatgtctatagttaacaccactgtactgtacacttagaaatctgtgtagaggataggtctcat

SEQ ID NO: 8190 - DNA, 442 bp, Homo sapiens
  III.1818 (W23506)
  misc_feature (34)..(34): n is a, c, g, or t
  misc_feature (36)..(36): n is a, c, g, or t
  misc_feature (39)..(39): n is a, c, g, or t
  misc_feature (77)..(77): n is a, c, g, or t
  misc_feature (108)..(108): n is a, c, g, or t
  misc_feature (176)..(176): n is a, c, g, or t
  misc_feature (183)..(183): n is a, c, g, or t
ccaatctgaagtgggacatcatcacccgcaatgntngangcagcacctacacccagctggtgcggctcatcattctngatgagattcatcttctccacgatgacagangtcctgtcttagaagctttagtggccagggcatcccgaaacattgagatgacccaagaggatgaccgnctcattngtctcagtgccaccctacccaactatgaagatgtagccacctttctacgtgttgaccctgccaaggcttctttttactttgacaacagcttccgtccagtgcctctggaacagacatatgtgggtatcacagagaaaaaagctatcaagcgtttccagatcatgaatgaaatcgtctatgaaaaaatcatggaacatgctgggaaaaaatcaggtgctggtgtttgtccactcccggaagagactggaaagacagccag

SEQ ID NO: 8191 - DNA, 344 bp, Homo sapiens
  III.1819 (T99200)
  misc_feature (127)..(127): n is a, c, g, or t
  misc_feature (138)..(138): n is a, c, g, or t
  misc_feature (142)..(142): n is a, c, g, or t
  misc_feature (253)..(253): n is a, c, g, or t
  misc_feature (271)..(271): n is a, c, g, or t
  misc_feature (315)..(315): n is a, c, g, or t
  misc_feature (326)..(326): n is a, c, g, or t
ccaaagtgttccgggcggggaggggggcgagggaggtgagtatgaggagtggagtggagctggacccttacaaagggacagcgacaaacacctcatactcaaaacaaggggactttccgtgtcattngcgccgtcggncatngcaaatgtccgcgctgagatgcctaccttgtcactcgacgcagccgccaaagctcacccggagctgcgtcagtccccactgggttcctccaggccaaggaggtacgacctncgccgcagcatataaagnatatgtccagggagatgggaagaaacccgccgatacagcacccnggtccccaagngccctagaactaggccgg

SEQ ID NO: 8192 - DNA, 375 bp, Homo sapiens
  III.1820 (H89949)
  misc_feature (269)..(269): n is a, c, g, or t
  misc_feature (334)..(334): n is a, c, g, or t
  misc_feature (368)..(368): n is a, c, g, or t
  misc_feature (373)..(373): n is a, c, g, or t
gtaatatttagttcctttttattcatgatttgtttcatctgagaataaacttcctgtctaattttccaacactatgtttaatgtatgactcagtacctataatgagactggaaatatattacctggcaaatgaatgaggtgtctcttttgtaccccctgttagaaatgacaggcttttgtgttaattagaaacacatcttggtcagtaaagctgtgctcccttctgactgtagattgtgttgaaattattaatcaggagaataattaancattcttagagtggaaaatacttgttgagcaaaaagcccatttgaaaatgagaatgcctcgtccngctgcaacagtttagaattgcgagttttccgaangcagnta

SEQ ID NO: 8193 - DNA, 195 bp, Homo sapiens
  III.1821 (H91998)
  misc_feature (1)..(1): n is a, c, g, or t
  misc_feature (13)..(13): n is a, c, g, or t
  misc_feature (186)..(186): n is a, c, g, or t
  misc_feature (191)..(191): n is a, c, g, or t
natctccaaaaanaaaaaataggcagtttcagagcttataaccatgataaggaacaggggctccccacggcatatcatttcttatatgaaagaaggccctaatagtaggaagtatcttagtgctgtcagaaaactatctgaattcacaagtgtcattaaatgttcccggccagaagggtttcctcnttggnaagt

SEQ ID NO: 8194 - DNA, 445 bp, Homo sapiens
  III.1822 (N70658)
  misc_feature (407)..(407): n is a, c, g, or t
gcaatcagaagatagattttatgtcaggtcatctagttacatagatatttccctgttgttattcctgagtccttagtaaaaaccttaattaaatgttccagccttgtctcggctgtgctataggaggtaaagcacaagtttatgtcatgattggttcagtgacaaaagggaacagactctttccaagagcaaactgggtgacaaggataaacttagtggtctagcagatgtgtttcagtggagtctcccaccgtccatggtgaaagcatgcaggttttattttctcagggtaaaagcttaggacagaatttcctgaagaaaggtacttccaccacatacttaagaatcacgtgagattaaaaatgcagagatctgagacccatcacagatacagtgaatcagaatcnttgtggtaggtggcaggaatggcatttttgaaaagctg

SEQ ID NO: 8195 - DNA, 508 bp, Homo sapiens
  III.1823 (H09061)
  misc_feature (393)..(393): n is a, c, g, or t
  misc_feature (450)..(450): n is a, c, g, or t
  misc_feature (455)..(455): n is a, c, g, or t
  misc_feature (482)..(482): n is a, c, g, or t
  misc_feature (496)..(496): n is a, c, g, or t
gttatttgctgtgtttaaatctagatatctgcctcataaaaatggggtaacaaaagtaatacttgcctcatagaggtgtggtgaagtctaaatgaaactgtgttacagggtagagtatggagtgcaggacctgtaatgtagtaaatgctcaagaaatgttcattctcctctgcacaaatgttatgtctggtataaagtcgatgcacagtaggtgcttcaataaatattaactgactgattatacttacctttttaagcgttgctttgcttttgggatcccagccatatcctctttcaataagtattttttaactcccaaaacataattttcaatgtattccaaccagttcaactgggcgcacgtcaaagttggaatacctgaggaggcaaggngaggattataggattgccagaattgccagtgctgggacagttcactttgtccacttngaggntttcttctacataggacgagtgacctncatttggggagacnagggtgggactt

SEQ ID NO: 8196 - DNA, 262 bp, Homo sapiens
  III.1824 (H09062)
  misc_feature (66)..(66): n is a, c, g, or t
  misc_feature (199)..(199): n is a, c, g, or t
  misc_feature (230)..(230): n is a, c, g, or t
ttttttttttttttttttttttcactgatgcaatcttttatttgataacagggtcataccaaactntccaagaatacctaatacttgaaatatttccagagatgataccagaatcttcttgacactctttctactaacaagttttagtgccctaagttctttatattcaatcaaaactattttttctaatatatttgangatcatttccctccctttctttctccaattnggccctttatatggagattttgaaaagatccc

SEQ ID NO: 8197 - DNA, 507 bp, Homo sapiens
  III.1825 (H17307)
  misc_feature (468)..(468): n is a, c, g, or t
  misc_feature (488)..(488): n is a, c, g, or t
  misc_feature (505)..(505): n is a, c, g, or t
gcagtcagttgtgttcaaattatattcaaataaggcaaacactaacctgtaaccaatccagctgtttctgtcctcacttctgttttctgtatgtcactttcctttttctgttcataaatcttcttccaccatgtggctgcgctggagtctctgaacctactctggctcgggaggctgcctgattcatgaattgttcattgctcaattaaactcctttaaatttaattcagctgatgtttttcttttatcatgtctaaaggatatacttcagaaagaatgcaattcattcattcaacaaatatatactgagccaggcacatttctctgtgctggagatacatccgtgaacaaaatagatgaaaaaaatcttgccctaattaaagcttacattttaatagtccaaataacaaagtagtgggcaaaaaccacaattatttttgcaccaacctaataattaggtaaattacngggatgtctgggtggctggngtggaggctttaacacntt

SEQ ID NO: 8198 - DNA, 443 bp, Homo sapiens
  III.1826 (H17308)
  misc_feature (429)..(429): n is a, c, g, or t
tttttttagtagtttctccaaaaatttaaacacatgcactaaacaagtgccaatatcttcatacctcagtcaaaaggtacaaagttctttatctccaataatgctctctctcctttggcggttgggttattctggttctagatgttaatgttgctgtttaacaccggatattaggcactgttgtttttactaccatcaaagttttattagatttgccagatttctactgtttcctttgccaactgttcaccttttctcatccgatgtgattctcagcttctacaccttacccctttctgtaaagaggcagacagtcatgccattgacacgtaattttgatcatggaccccgctctgctcaaaaccctccaggcaacttccagtgtctttatctctggctacacgcccagctccttttccctcacggtantggaggcctttcta

SEQ ID NO: 8199 - DNA, 210 bp, Homo sapiens
  III.1827 (R94488)
  misc_feature (14)..(14): n is a, c, g, or t
  misc_feature (109)..(109): n is a, c, g, or t
  misc_feature (147)..(147): n is a, c, g, or t
  misc_feature (197)..(197): n is a, c, g, or t
  misc_feature (205)..(205): n is a, c, g, or t
gtagcttgaacctngcaggggttccccaccaaaggtctctgtttccttaattctgattacatgtgtccctaggcctctagggactgaccacagtggagcatgaggcctnatagatcctggtggtcacttgttgggcctgggggcagnacccagggtcttcccagtttcatgagaagagattggtgaggttggaccanagttggcnacagt

SEQ ID NO: 8200 - DNA, 124 bp, Homo sapiens
  III.1828 (R94489)
  misc_feature (58)..(58): n is a, c, g, or t
gctgcattcacgttcaagtcaagtccaaatagggcacactgcagagacaaagccaggncatggttgctcaggaccggaagcctgttgggggcggggggcggggggtggggtggggtgtgtgtgt

SEQ ID NO: 8201 - DNA, 398 bp, Homo sapiens
  III.1829 (H93502)
  misc_feature (245)..(245): n is a, c, g, or t
  misc_feature (306)..(306): n is a, c, g, or t
  misc_feature (328)..(328): n is a, c, g, or t
  misc_feature (343)..(343): n is a, c, g, or t
  misc_feature (350)..(350): n is a, c, g, or t
  misc_feature (361)..(361): n is a, c, g, or t
aaatgagaaaactgaagtatagggagaataagtcacctagccaattgaaaacagtacaacggtgattccatttcaggctggttagttccaggcattatgaacatcatgtaaaatttcagaatataactctctttaatagcagatagatcagctccattttactcagtcaaaagtgaactaaatagacaatcaggctatgtgggcagctctaaatgccatagttgaaccattaacttttggtatgntaaaataggtatataatgcatacaataaaagcaataatttagggccagtaatcccagcacnttggggaagatgaggcaagcanatggcctgagcgcangaggttncagaccacccnggggcaacatgggagggaaccccggccccaccaaagg

SEQ ID NO: 8202 - DNA, 476 bp, Homo sapiens
  III.1830 (N70422)
  misc_feature (249)..(249): n is a, c, g, or t
  misc_feature (352)..(352): n is a, c, g, or t
  misc_feature (382)..(382): n is a, c, g, or t
  misc_feature (458)..(458): n is a, c, g, or t
  misc_feature (466)..(466): n is a, c, g, or t
aaagcatataacaaatgacatgctccaaaatacctcaagagcaatctcaattcaaaatgacttcctagagttgggtgtggtggcatgcacctgtagtcccagctacacaaaaggttgaggcgagagaactgcttgaagccaagagttgaggttgtagtgtgctatgattgtgcctgtgaatagccattgcactccagcctgggcaacagagcaagaccctatctctaacaaacacatataataaataanaacaataaaataacaaaataacctcttagatatctaccagaattgcaatgaacagtcgggcattgggttctcacaaattacaaggtggacacatctcacactncatggagggtatgggcatgaccagctctgnacaccaccatgggttcattcctcctactattaaaaccacaaaatgtggaagatggaaccttggggcaagccttttngcagaacngactggttgg

SEQ ID NO: 8203 - DNA, 457 bp, Homo sapiens
  III.1831 (W69955)
  misc_feature (413)..(413): n is a, c, g, or t
ccccctttgtccgaaatactttggaaagacgaacccttcgctataagcagtcatgcaggtcttccctggctgagctcatggcccgcacctccctggacttggagctggatctccaggcgtcgagaacacggcagaggcagctgaatgaggagctctgcgccctccgtgagctgcggcacggttcggaggacgcccagctccgtggccagactgacctcccaccctgggtgcttcgggacgagcggctccgtggcctgctgcgggaggccgagcggaagacaagacagaccaaacttgactacccgtcatgagcaggcggctgagaagatgctgaaagaaaggcctccaaaggagatctaccagctgcgtggggcagagccacaaaagagcccatccaagttgcagacctttanggagaagatagcattctttcacaaaggccaaggatcaacatacc

SEQ ID NO: 8204 - DNA, 431 bp, Homo sapiens
  III.1832 (W69956)
  misc_feature (296)..(296): n is a, c, g, or t
tacaaaatgtgtatattaatagctttgcacaaatattttaaagacaaattcagctagtctaagaacttcatgaaaataaaacaggtggataaatacttcatgtgcacaatgcactccatcagacgtcgtcggctgggagaggaggtatgttgatccttggccttgtgaagaatgctatcttctccctaaaggtctgcacttggatgggctctttgtggctctgccacgcagctggtagatctccttggaggccttcttcagcatcttctcagccgcctgctcatgacggtagtaangtttggtctgtcttgtctgccgctcggctcccgcagcaggccacggagccgctcgtcccgaagcacccagggtgggaggtcagtctggccacggagctgggcgtcctccaaccgctgccgcagctcacggagggg

SEQ ID NO: 8205 - DNA, 864 bp, Homo sapiens
  III.1833 (AF143885)
attagcaattagagtacatttctgttttcctgtagccccaccaaaactggcattgtcatattaattttccttattttacaagttatttccatattttaaaggaagttgtgcttttttttcctgcatgggaatttgttgtattatatttagctaggttacattgcagtaacaagcaaaccccaagtctcagagacttaaactaacacaaatgtctttctcgcttgatctgtgtgtcccttgtaggatggctgggggtgcggttccacagagtccctcaggccaggctgattaaggagacagcactctctgagagctgccactcgaggcctgctcagtggacaacacagtagacaggagaggctgggggctttgtgtggacttttcactactgatgtggccaggactaccaacacagtctggcttagcaggtagaacttagtgagcattcctgtctctgcccagccatctcctcttctgtttgttcctctccagcaacttctttgtccagtggaattggatcctctgtcttcatatcagctcttaatgtattttaggtaataagatttttatcaattgtgtctttttctttctttgctttccatattgtattgtgcaaaagtttaacgtaagttttggacacattcatgttttcctctgataccttattatcacaaatttcttttctcaaagccagagaataagctgcttttctttgagttgcttaaaatggattttatttggctccttatgacacttgaaattcatcaaaatatataatgtcaggtggttttaatctaagttaattaggtccttggtgatgcctgttctgcaacattaaaacaaaacaaaaaaaaaaaaaaaaaa

SEQ ID NO: 8206 - DNA, 460 bp, Homo sapiens
  III.1834 (T97930)
  misc_feature (381)..(381): n is a, c, g, or t
  misc_feature (402)..(402): n is a, c, g, or t
  misc_feature (416)..(416): n is a, c, g, or t
  misc_feature (449)..(449): n is a, c, g, or t
tttcggcacagagttagcaattagagtacatttctgttttcctgtagccccaccaaaactggcattgtcatattaattttccttattttacaagttatttccatattttaaaggaagttgtgcttttttttcctgcatgggaatttgttgtattatatttagctaggttacattgcagtaacaagcaaaccccaagtctcagagacttaaactaacacaaatgtctttctcgcttgatctgtgtgtcccttgtaggatggctgggggtgcggttccacagagtccctcaggccagggctgattaaggagacagcactctctggggagctgccacttcgaggcctggctcagtgggacaacacagtaggacagggagagggnggggggcttttgtgtggggantttttcactaactngatgttggcccagggtttacccaaccacagttntgggctttagc

SEQ ID NO: 8207 - DNA, 329 bp, Homo sapiens
  III.1835 (T97931)
  misc_feature (8)..(8): n is a, c, g, or t
  misc_feature (92)..(92): n is a, c, g, or t
  misc_feature (211)..(211): n is a, c, g, or t
  misc_feature (244)..(244): n is a, c, g, or t
  misc_feature (249)..(249): n is a, c, g, or t
  misc_feature (280)..(280): n is a, c, g, or t
  misc_feature (290)..(290): n is a, c, g, or t
  misc_feature (321)..(321): n is a, c, g, or t
taaattantttgttttaatgttgcagaacaggcatcaccaaggacctaattaacttagattaaaaccacctgacattatatattttgatgantttcaagtgtcataaggagccaaataaaatccattttaagcaactcaaagaaaagcagcttattctctggctttgagaaaagaaatttgtgataataaggtatcagaggaaaacatgantgtgtccaaaacttacgttaaacttttgcacantacantatgggaaagcaaagaaagaaaaagacacanttgataaaantcttatttacctaaaatacattaggagctgntatggagg

SEQ ID NO: 8208 - DNA, 409 bp, Homo sapiens
  III.1836 (H47895)
tgcacattctgtttttacctctgtcactgactctgtgggtctagccatgtcatttaaccacacttgaatttcaggtattttgtctgtaaaatgaggataataacgcctgtctactacattaaaccacaagatggtttaaaggttagcataataaattattagagtatgacctaggagttacctaatctgacctctttattttacagatagaagtacagaaaggtaaattgaattgctcaaggtcacccagtgtgtggcaaaatcagaactggaaacttaggtcttctgccagtcccattcaagggctttttccattgtacagttaaattatatgttgtgtgtaaggcatagtataaactgtaaaccattcatgccaaatgttcaggtggattgtttttccctcagtttt

SEQ ID NO: 8209 - DNA, 389 bp, Homo sapiens
  III.1837 (H47896)
  misc_feature (303)..(303): n is a, c, g, or t
ctccttctcttcttgttattattatcattattattattttgagattgattactttcccataaaagtggaatatactttgctttggttgagtaatgctctaattatctgaggtcttacagtaattgattcagactgatgaccacctgctgcccattccacatgggcagggacacagcaataatgagaattagggttaggctcataggggatggaagccagcagggaagggactaaagctttgggagaaagctgaagggtgactactgcccgggggcttgaactttctaatgggccatggccttnctctgaaaatgtaattactatgaccactgggttaggtgatgtatttttcatttcttacccactctccatcccttttaaacactgca

SEQ ID NO: 8210 - DNA, 395 bp, Homo sapiens
  III.1838 (R96349)
  misc_feature (83)..(83): n is a, c, g, or t
  misc_feature (116)..(116): n is a, c, g, or t
  misc_feature (201)..(201): n is a, c, g, or t
  misc_feature (331)..(331): n is a, c, g, or t
  misc_feature (379)..(379): n is a, c, g, or t
ctattttgcatcatatcatttctgtccataattgtactgaaatagaaaagtgaccgctcttgctcttggtaaaatatagagtngtcagtagccttatgcacctaattcaaaaggtngaatatagttctgtcagggcttttacgtaaacctccacttgtacatgcaatttggacagttatgtgttgagggaagtacagtttngtaccttgtttatttcaaatatcagaaaaacccagaggtgatcatttctcatgaagatgcttataaatggttgcttaacccattctaggatgtagggtctgcttaatgtgtgtacttttctaagtgggtnggcacgtgcctgtagtcccagctactcaggagggctgaggcagggagnatcgctttgaacccgg

SEQ ID NO: 8211 - DNA, 400 bp, Homo sapiens
  III.1839 (R96350)
aaataatttaatgatagaacactgaaatttctttagacacagtattttcaagttatatttctgcctggagtacagatatgaaatagcacaaactgtactctgaattaagcaaacagaatgaataaaaaaaaaatattctcccaacctaagtttccgttcctcatttccacttgcctcagactctttctattgaacatatctagttaaatctctaatggacggcctgtgggaagatttactgccaacagggatgactgacttctttccggacactgaggcaggggactgtggggctctgaagcaggtttacttcctgtgggaaagccaggtcccatttctattttacttcgatccggggcctattcaggtaaaggcaccactcagtaggctactgaccttt

SEQ ID NO: 8212 - DNA, 424 bp, Homo sapiens
  III.1840 (N81012)
acagttctgctcacggccatgatttattacagtgaaaggatacaaaacaaaatcagcaaaggaaaaaagacacatggggtgaagtcaggggaaactaagtgcaagcttccaagaatcctccgccagtggaatcacagaggatgagcttaattctcccagcaaccagttgtaacagcacttgtgaaacactgtcaaccagaaaagcttgttagagactgagtgcctggggtttttactgggagctggtcacaaaggtagtctctgcctggcacataccaaaattccagactcccagaaggaaagcaggtgttcaggagaaactatattgttttacagtttagatatagtaagctactttgatcagttctgggaatggtggaagccccctgaactccaagttcccagatgccaatcaagggccaac

SEQ ID NO: 8213 - DNA, 390 bp, Homo sapiens
  III.1841 (W07840)
  misc_feature (169)..(169): n is a, c, g, or t
  misc_feature (176)..(176): n is a, c, g, or t
  misc_feature (285)..(285): n is a, c, g, or t
  misc_feature (374)..(374): n is a, c, g, or t
  misc_feature (387)..(387): n is a, c, g, or t
atagacagaaatttgtaacattacttctgatttgaaaatgcaattcacaaaatatagggaaatttttattgaagtaaatttgaaatgatggagaaatttcagaagcataataaagttcacaataaggataatactttatataatgtataaagtatatataatataatanatatgtnatataaactgcacattatattcaaacttaaaattgagctttttttttaaaggcccaaaattgtacagtgatacaacggagctatttctaaaatttggcttatgtataanatatttaaatgggggaactttcatctaaaacaatgatgtagtatttttaatattctgattgggtaaaaattaaagagggaaattaatcnttatatattattncct

SEQ ID NO: 8214 - DNA, 610 bp, Homo sapiens
  III.1842 (W92686)
  misc_feature (586)..(586): n is a, c, g, or t
  misc_feature (608)..(608): n is a, c, g, or t
gagttactctgatgtttattttaatgcatcttagtccacacagttggtataaaatcagaaaatgcaaagcaaaaacaaaaggtctggagtcttagcatcagaagggcaccatatatacatctacagttggtggccaatacaagtcattgccagacagtccttggaggcacagaacagcctagacccagccaagctctaggaactcacggtcccaaggagtctagacgcttgttctgatgctccgaccgtaagaaaaatgtgggagtgatgaaggctttatgatttactcattatagtaataatagcagcctagctaggtacaaaagcagttataaaccatttatattacacagaattattcaggtctccattctatcttatgttgtaaaattgttaattggatttccagtggagttggtttagatgattagtgataataagggaatgggtaaatcccatagcaccatttcaaagacttgttggtcactggattccccattttagatggtggtgacgaagatactcccacctgtaagggcaagtatgccaatggccacaagccgtgtttttgcagggctccagtttngggcattttgtccgtgtgcgcngt

SEQ ID NO: 8215 - DNA, 455 bp, Homo sapiens
  III.1843 (W92829)
  misc_feature (133)..(133): n is a, c, g, or t
  misc_feature (261)..(261): n is a, c, g, or t
  misc_feature (280)..(280): n is a, c, g, or t
  misc_feature (314)..(314): n is a, c, g, or t
  misc_feature (411)..(411): n is a, c, g, or t
  misc_feature (418)..(418): n is a, c, g, or t
  misc_feature (419)..(419): n is a, c, g, or t
  misc_feature (420)..(420): n is a, c, g, or t
  misc_feature (422)..(422): n is a, c, g, or t
  misc_feature (423)..(423): n is a, c, g, or t
  misc_feature (444)..(444): n is a, c, g, or t
gccatctacacggtgaggcacccggagtggcatctcaactcggattactcctacggtttcgcctacatcctggcctgggtggcttccccctggcccttctcagcggtgtcatctatgtgatcttgcggaaacngaactgaggcgcccagacggtctgtctgaggctctgagcgtacatagggaagggaggaagggaaaacagaaagcagacaaagaaaaaagagctagcccaaaatcccaaactcaaaccaaaccaaacanaaagcagtggaggtggggnttgctgttgattgaagatgtatataatatctccnggtttataaaacctatttataacactttttacatatatgtacatagtattgtttgctttttatgttgaccatcagcctcgtgttgagccttaaagangtagctnnngnnctttacatcctaacagtatantccagctcagt

SEQ ID NO: 8216 - DNA, 258 bp, Homo sapiens
  III.1844 (R10658)
  misc_feature (240)..(240): n is a, c, g, or t
gagcggattaagttcctggtcatcgccctcaagagctccgtggaggtgtatgcctgggcccccaaaccctaccacaaattcatggccttcaagtcctttgccgacctcccccaccgccctctgctggtcgacctgacagtagaggaggggcagcggctcaaggtcatctatggctccagtgctggcttccatgctgtggatgtcgactcggggaacagctatgacatctacatccctgtngcacatccagagccagat

SEQ ID NO: 8217 - DNA, 312 bp, Homo sapiens
  III.1845 (R10659)
  misc_feature (202)..(202): n is a, c, g, or t
  misc_feature (213)..(213): n is a, c, g, or t
  misc_feature (250)..(250): n is a, c, g, or t
  misc_feature (258)..(258): n is a, c, g, or t
  misc_feature (266)..(266): n is a, c, g, or t
  misc_feature (277)..(277): n is a, c, g, or t
  misc_feature (290)..(290): n is a, c, g, or t
agctggttgaattgtctttattaacaaacaggatatccaaggccactacattgaggaggggtggggggggagggaggagaagggttacttgctgctcacactatatacagatgcaagcaaggggcgtggagagtgagggctccctgctccctccctccaccggggaagggcatgggctagaagaggagatgggggtcgggantggggggaatnttttggctggcggggtcccccctccattccctgggantttggggnaaggggantcattaaagtnctttcagaaaatnaagaaatggtccctgcccctgg

SEQ ID NO: 8218 - DNA, 346 bp, Homo sapiens
  III.1846 (R34603)
  misc_feature (6)..(6): n is a, c, g, or t
  misc_feature (8)..(8): n is a, c, g, or t
  misc_feature (10)..(10): n is a, c, g, or t
  misc_feature (262)..(262): n is a, c, g, or t
cgcggngngnagcaagtctgggaccgctggtcggaccggagagtcgcagctgtgtgttagggctaggatggctccgggatgcgcgtgacgaagtgaccttgcgtgtaaagggatacatgatcccttaattcaggctcaggctgaagaactgacccacttacgacagaagacacaggaagggagaggtgtctgctacctttttacccagcatgttgaaggaacacagttcaagtctttttgaggggccttcttcagggaacanttgacattggcttacttacccaggaggacagagattctgttgaggcaaatgggttacaagggaagcccagcttgacagagattc

SEQ ID NO: 8219 - DNA, 383 bp, Homo sapiens
  III.1847 (R34604)
  misc_feature (315)..(315): n is a, c, g, or t
  misc_feature (320)..(320): n is a, c, g, or t
  misc_feature (349)..(349): n is a, c, g, or t
tatgtgtgtaaaataaactttattgtcagaggtttctaaacgctcatccttcaaggaaaacggacatatgctgaagagctgataaacagtctacagcagtgtttttctaacttaatcttgattacaagtccttgccattttcctccagctgctgttgactccagttatatataggttggggggaaagggggattatctatgggatgtagggcatcactgtctcttgggggcagttatcacatttgcagggctggagggggatgtggatttttataatccaaactatcccatttgggggatacaaactggggagtnggccngttaaaatttgcttctcgggaggatgggnggcctttccaaatttgggggccttttccaattgg

SEQ ID NO: 8220 - DNA, 419 bp, Homo sapiens
  III.1848 (R84776)
  misc_feature (218)..(218): n is a, c, g, or t
  misc_feature (270)..(270): n is a, c, g, or t
  misc_feature (308)..(308): n is a, c, g, or t
  misc_feature (348)..(348): n is a, c, g, or t
  misc_feature (362)..(362): n is a, c, g, or t
  misc_feature (389)..(389): n is a, c, g, or t
  misc_feature (416)..(416): n is a, c, g, or t
gatttgaatcctgtcatttactagcgttttgaccttgaacaattatgctcagagtctcagttttttcttgtaaagtgatgatgatactacttaactcacagggttgtagtgaagatcaaatgagatcatgtctgtagaacaccctgcccggcactcaataagtattaataggaacccatatacctcttttgaaaattttaattgtcagacaaataaanaaaaaagccagtgctttgtaaatattcgtgaatatttagtgttcattctgtntttttgtcatgatggagagagagttgggtttctgtganttactgttacagctttacattaatatttttgaaatcactntttggggatgaagnattcaaatgaaaggtgatagagtagtntagtgaaatccccaagtactcatcagncgg

SEQ ID NO: 8221 - DNA, 300 bp, Homo sapiens
  III.1849 (R85519)
  misc_feature (10)..(10): n is a, c, g, or t
  misc_feature (13)..(13): n is a, c, g, or t
  misc_feature (219)..(219): n is a, c, g, or t
  misc_feature (229)..(229): n is a, c, g, or t
  misc_feature (270)..(270): n is a, c, g, or t
taatataatngtnacgtaattaatttttggacacaggagtcattacagtaatcaaaaatggtaattgcttaaaataatttttcttcaaatggaaaacaaaacccagatagagttaagaaacacctctccagcctacttacttagaatagctagacctgcttctttggcttcaacataatggatccttatagatcaggttccgccttcaactcttaattntaaatttttntccaatatcctcatggcaacattccttatacaaaacaaggnactaaaaggcataggggataagggcatgta

SEQ ID NO: 8222 - DNA, 630 bp, Homo sapiens
  III.1850 (N58318)
  misc_feature (390)..(390): n is a, c, g, or t
  misc_feature (485)..(485): n is a, c, g, or t
  misc_feature (509)..(509): n is a, c, g, or t
  misc_feature (525)..(525): n is a, c, g, or t
  misc_feature (540)..(540): n is a, c, g, or t
  misc_feature (549)..(549): n is a, c, g, or t
  misc_feature (562)..(562): n is a, c, g, or t
  misc_feature (574)..(574): n is a, c, g, or t
  misc_feature (598)..(598): n is a, c, g, or t
  misc_feature (620)..(620): n is a, c, g, or t
  misc_feature (627)..(627): n is a, c, g, or t
tactggaactttattgtgaggataagcaaagtaagataaaagaagacctggaagaacaagaagctttagaagatggtgtggcctgtgcagatgagaaggcggagtctgacggagaagagaaggaagaggtgaaggaagagctcggcaggccggccacgctgctgtggttgatccagaagctgtcccggattgcaaaactggaagctgcttattcgccgagaaaccccttaaaggtgcgatgaatgcacagaatgactgacagtagtcatttctctttaaaaagtattttaatgatattagtgatcctcctaagtccctagaaactttatctttgaaccccaaactgcagcaataacatccgtcccaaaattagactgagccctgttttcncaattaatgctgtgtctatgattgagtgctaaagagaagtcctttccaaatgaaaaaatgatcctgtactttcaagggaacatgcatccttaagntcccccgggcgccgttagcaaatnggatctttggggatangaccaagggtaaagnccggatccncccaatggttcanaggccccctttntttcgggaccccaacagcaccttnttcaggagcaaggtaacccggnctcggtntgt

SEQ ID NO: 8223 - DNA, 293 bp, Homo sapiens
  III.1851 (N77684)
  misc_feature (42)..(42): n is a, c, g, or t
  misc_feature (47)..(47): n is a, c, g, or t
  misc_feature (234)..(234): n is a, c, g, or t
tgggacagcagaaagcatacagaagagggcaatcaaatatantacanatatgcctatttgttaattatcttgatataagttttctttttaaaaataaactctggctgggtacagtggctcacttctatagtctcaacactttgggaggctgaggttggaagactgcttgaagccaggagtttgagaccaagaccagcctggcataacatagaccactattcatctctctctctnttttaaatgtatgtgtgtgtgtgtgtgtgtatatatataaatataaacatatataagta

SEQ ID NO: 8224 - DNA, 431 bp, Homo sapiens
  III.1852 (N66064)
ttttgcggagagaaatgaccagtactatttatttggaagtctgcgccatggtgggtacaaactacatcccctgctctgtgggaccaaaatcaaaacagggcaaaaacaaatgaacaaaaatacccccatcccaaaaaagcagcagaaggaatgcaagaagtcttacaggacacactggcccagccctgggtgcagccagctctgcatccaccgctgcgctcgccaacttcagctaccgcccccatgggaactccagagggccgggctgcttaaccattttccctgcctctccacgacttccctttccctttatttcctcctccaggattcgagtccacttcctccacgaaggaagttgctgttgctggacagtggggagagcgagctgggatctccaggggcactggacgcttcctccaagccttgctgca

SEQ ID NO: 8225 - DNA, 316 bp, Homo sapiens
  III.1853 (N95657)
  misc_feature (88)..(88): n is a, c, g, or t
  misc_feature (91)..(91): n is a, c, g, or t
  misc_feature (254)..(254): n is a, c, g, or t
gcagaagcgaacaacctgagctttcccttggagcccctgagcagggagagggctcacaagcttgaggccatctctcgcctctgcgagnacnaagtacaaggacctaagaagatccgcgagaagcgctcagccagtgcagacaacctgactctgccccggtggtccccagccatcatctcttaactacggaggcccgccggaccacaccatcccttagtttctcctttagtttgagaaaagacagacttggggtnggtttgtttttgttttttctttccttttctttttttacgcatagctcccgtcaaagctgcct

SEQ ID NO: 8226 - DNA, 537 bp, Homo sapiens
  III.1854 (N94814)
  misc_feature (478)..(478): n is a, c, g, or t
  misc_feature (485)..(485): n is a, c, g, or t
tacaaatacaagttaattagctctattaagttgcaattttatttttataaagctttgtaaagttatgaacatggaaaccctaagaatcacctaagctttttacataagtaaatttcaagttgacagtctgtccattttgaactatttataattaacaggacacttaacacagtaatatcttagacaaggaagagggcattaattctgcaggcaggtagcaatgaaaatgccaaacctgaacaatcagtcactatttccttatacagtttgagtaaaagaggtagactacagaaagaaaaaaaaagtgaatataaaatgtatcttccccaaatacaactctacttcaataagtcttgaagattaccgatgacatcaacaaaaatgaatgaactcagggaatgagttctttctcccccatccaaagaaaaaaaccagccatgtgtaattttaaatttggaaaaaaaaaaaggaatgggcnatttgcnagccaaaggaaaacccagattccccattctactaatttccatttgggtccta

SEQ ID NO: 8227 - DNA, 151 bp, Homo sapiens
  III.1855 (W23873)
  misc_feature (46)..(46): n is a, c, g, or t
  misc_feature (76)..(76): n is a, c, g, or t
  misc_feature (78)..(78): n is a, c, g, or t
  misc_feature (82)..(82): n is a, c, g, or t
  misc_feature (124)..(124): n is a, c, g, or t
ccctggtacccaacaggtccgaggtccccgggtcttccaggatatncggcttctcccttctctcctgggagccccngnttgnctcgttctccctcaaagccggggtcgccccgacgccccggangtcctcttgcaggctggcattcgaagg

SEQ ID NO: 8228 - DNA, 441 bp, Homo sapiens
  III.1856 (W65430)
  misc_feature (1)..(1): n is a, c, g, or t
ngtttcttaaacaaatagtatcacctgcttcccatagccatatctcactgtaaaaaaaaaaattaataaactgttacttatatttaagaaagtgaggattttttttttttaaagataaaagcatggtcagatgctgcaaggattttacataaatgccatatttatggtttccttcctgagaacaatcttgctcttgccatgttctttgatttaggctggtagtaaacacatttcatctgctgcttcaaaaagtacttactttttaaaccatcaacattacttttctttcttaaggcaaggcatgcataagagtcatttgagaccatgtgtcccatctcaagccacagagcaactcaccggggtacttcacaccttacctaagtcagagtgcttatatatagctttattttgggtacgattgagactaaagactgatcatgg

SEQ ID NO: 8229 - DNA, 407 bp, Homo sapiens
  III.1857 (W65479)
ggatttcgcatttgagatgctttttataataaagttatgccaaaaatacagcaacaaatacagaaaaagtattaacaaacggagaagccccagatacacgtacagtaacaatacaaaaatgtgactggtcaaacagctcaagttcacatttaacactttcaattatttttaattacactatttctgttcaaaagaatgttttccttacatacaaccatgatcagtctttagtctcaatcgtaccaaaataaagctatatataagcactctgactaggtaaggtgtgaagtaccccgtgagttgctctgtggcttgagatggggacacatggtctcaaatgactctttatgcatgccttgccttaaagaaaagaaaagtaatgttgatggtttaaaaagtaagtacct

SEQ ID NO: 8230 - DNA, 311 bp, Homo sapiens
  III.1858 (R24333)
  misc_feature (151)..(151): n is a, c, g, or t
  misc_feature (157)..(157): n is a, c, g, or t
  misc_feature (161)..(161): n is a, c, g, or t
  misc_feature (166)..(166): n is a, c, g, or t
  misc_feature (181)..(181): n is a, c, g, or t
  misc_feature (188)..(188): n is a, c, g, or t
  misc_feature (193)..(193): n is a, c, g, or t
  misc_feature (201)..(201): n is a, c, g, or t
  misc_feature (226)..(226): n is a, c, g, or t
  misc_feature (235)..(235): n is a, c, g, or t
  misc_feature (244)..(244): n is a, c, g, or t
  misc_feature (256)..(256): n is a, c, g, or t
  misc_feature (258)..(258): n is a, c, g, or t
  misc_feature (276)..(276): n is a, c, g, or t
  misc_feature (277)..(277): n is a, c, g, or t
  misc_feature (279)..(279): n is a, c, g, or t
ccagctgagaagaagtctgtgtcgctgtgtggtgagctctccaggccaggtgccgcgcggcctccacctctgcgtgtcaaagacattaggtgtacagaacaaaggaaacgtgtacagaacaaaggaaacatctacaactgggtatccacanccaggngttngtganctagcaggtcctttnccgtgtntactncgagagtnaagaccattctcattaatcagactntcgacattncagaaaatntcaacattactntnaagggacacaaagttatnntnaattggcccagaggaaccctgcggagggactt

SEQ ID NO: 8231 - DNA, 467 bp, Homo sapiens
  III.1859 (R44927)
  misc_feature (229)..(229): n is a, c, g, or t
  misc_feature (280)..(280): n is a, c, g, or t
  misc_feature (291)..(291): n is a, c, g, or t
  misc_feature (323)..(323): n is a, c, g, or t
  misc_feature (354)..(354): n is a, c, g, or t
  misc_feature (373)..(373): n is a, c, g, or t
  misc_feature (378)..(378): n is a, c, g, or t
  misc_feature (435)..(435): n is a, c, g, or t
  misc_feature (458)..(458): n is a, c, g, or t
tttttttttttttttatattgcagatattgtaaatgtttattttctcagcttaccatttgtgtacttatatctctgtacaaggtgttttttctccatggagaaatgttaaatctttgtgaggttaattttattaatctttgcctttatggttttgacagtttgtgtctttcttcaaatgtttttctcattccaaaataaaaaaaaaaatttcccatgatcttatctagncttctctagacagtacttgtatggatttcacctttctttctttattctttncttccatattngggggttttgaggacaggggtctcactctatngtccggggctaggagtgcagtaggtttggancatggactcactctaaccnggggncctccggggggcctaaggtaatcttccccacctcaggcctctcaagtaggcgggggnctacagggggtgtaccaccaggncgggggtaa

SEQ ID NO: 8232 - DNA, 328 bp, Homo sapiens
  III.1860 (N30730)
  misc_feature (1)..(1): n is a, c, g, or t
  misc_feature (77)..(77): n is a, c, g, or t
  misc_feature (118)..(118): n is a, c, g, or t
  misc_feature (131)..(131): n is a, c, g, or t
  misc_feature (172)..(172): n is a, c, g, or t
  misc_feature (204)..(204): n is a, c, g, or t
  misc_feature (220)..(220): n is a, c, g, or t
  misc_feature (228)..(228): n is a, c, g, or t
  misc_feature (254)..(254): n is a, c, g, or t
  misc_feature (270)..(270): n is a, c, g, or t
  misc_feature (278)..(278): n is a, c, g, or t
  misc_feature (288)..(288): n is a, c, g, or t
  misc_feature (300)..(300): n is a, c, g, or t
  misc_feature (311)..(311): n is a, c, g, or t
nttttttttttttgagcttccaaaataacttttattactatataaaagaagtcaagaaaaaatagatgcatattttncctacaaaattataaaatattcaggatagttaatatttttnccataaatgcgcnaagataaaaagatagaaatctttttcacttaaggttttcgngtaccttgtaggaattaaagaataataatgtnctttcttctacatttncctaaagncatagcagttacagtttcctgctggngttatctaaaaaaggncataccangataaatttnctaccatattgnaaataaaattngcataaagctttacttc

SEQ ID NO: 8233 - DNA, 374 bp, Homo sapiens
  III.1861 (N41342)
  misc_feature (19)..(19): n is a, c, g, or t
  misc_feature (337)..(337): n is a, c, g, or t
  misc_feature (367)..(367): n is a, c, g, or t
acaaaattccagggttttnggaggaagggattagatagtgactaagccgccagaattgaggtggccattcctttttgtataggctaagaaacaggttatcagtgaaaagttaattatggctttggcactagaatagcactgttgcaaagtatttaagcaccccccatctcagccctttattttatctttcatgtgggctaatgtgaggataatcttacagatattataggaatttcttttctatctttatgaaaacaacgtatataaaatatatctagaaaacctttgtttgagactcttatttaatgggcttttgattctaatgataattgtaccntttatctttcaaaagcctgatatttccttncccaagc

SEQ ID NO: 8234 - DNA, 343 bp, Homo sapiens
  III.1862 (H51423)
  misc_feature (2)..(2): n is a, c, g, or t
  misc_feature (276)..(276): n is a, c, g, or t
  misc_feature (291)..(291): n is a, c, g, or t
  misc_feature (300)..(300): n is a, c, g, or t
  misc_feature (310)..(310): n is a, c, g, or t
  misc_feature (324)..(324): n is a, c, g, or t
  misc_feature (332)..(332): n is a, c, g, or t
gngtgaggccgtagacgtccaccagggcccagagcgggtcggccgtgcggaccccgctgaagaacagcataacagccgagtcgttgatgcggtggaagacacggcccttcttgtccacccagaatgcgatgatgttgccctcattggcaaactcctcaggcagcgcttggcccagaagccactctgggacaccagggtcggggcaggcgtacttgggcagcgagtcagggtggatgcgggacgggtccttgctgggtgaagcccagccgcaggccnccgctccagcagcantgctttttnggtgatcttnagcctgatttgctngtaggatnaggacccggcg

SEQ ID NO: 8235 - DNA, 410 bp, Homo sapiens
  III.1863 (H51467)
  misc_feature (63)..(63): n is a, c, g, or t
  misc_feature (64)..(64): n is a, c, g, or t
  misc_feature (391)..(391): n is a, c, g, or t
attcggcacgatggaccagccggccgcccagcagaggtggctgcactgcccgtcgccggaganngggggacagatcacccggagcactctccacgactctatcgggggccccttccccgtcacttctcaccgatgccaccacaagcagaagcactgtccggcagtgctgcccagcggggggctcccagccacgccgctgctcttccacccgcacaccaagggctcccagatcctcatggacctcagccacaaggctgtgcaagaggcaggccagcttctgcaacgccatcaccttcagcaaccgcccggtcctcatctacgagcaagtcaggctgaagatcaccaagaagcagtgctgctgggagcggggccctgcggcttgggctttcancagcaagggacccgtcccg

SEQ ID NO: 8236 - DNA, 715 bp, Homo sapiens
  III.1864 (U69206)
actaaagggaataagcttgcggccgcagacagtccgggagcaccagctcgctatcaagcagctggacgccccgcgtgaggccgtagacgtccaccagggcccagagcgggtcggccgtgcggaccccgctgaagaacagcataacagccgagtcgttgatgcggtggaagacacggcccttcttgtccacccagaatgcgatgatgttgccctcattggcaaactcctcaggcagcgccttggcccagaagccactctgggacaccaggtcggggcaggcgtacttgggcagcgagtcagggtggatgcgggacgggtccttgctggtgaagcccagccgcagggccccgctccagcagcactgcttcttggtgatcttcagcctgacttgctcgtagatgaggaccgggcggttgctgaaggtgatggcgttgcagaagctggcctgcctcttgacagccttgtggctgaggtccatgaggatctgggagcccttggtgtgcgggtggaagagcagcggcgtggctgggagccccccgctgggcagcactgccggacagtgcttctgcttgtggtggcatcggtgagaagtgacggggaaggggcccccgatagagtcgtggagagtgctccgggtgatctgtccccccatctccggcgacgggcagtgcagccacctctgctgggccggccggctggtcatcgtgccgaattc

SEQ ID NO: 8237 - DNA, 483 bp, Homo sapiens
  III.1865 (H52294)
  misc_feature (422)..(422): n is a, c, g, or t
  misc_feature (443)..(443): n is a, c, g, or t
  misc_feature (454)..(454): n is a, c, g, or t
  misc_feature (475)..(475): n is a, c, g, or t
ggtttttaaatatttccaaactgaccaacccagtttctcttaacttcttccttctccaattttcttttccacttttaccaagttaacttcacattcttatctccagataagttctttagtataatctattactttgtcttcccgattaattacctaaatctcgtttgatgtttgtccttttcataccactcataggtcagattctcctaatacagctccataattaataagaaacagtcatcaattacaagttttaaggactattctctcctccctgtcctctgtctctccagggtcaccccagctctgatctttgccatcacagttggctacaatcggctctttccagtttgggctacaacactgggggtcatcaatggctcctgaggacggtgagtgccggggcacaagaattaggattngggattggggaaattattccnttaagtagggntttcaaggattcaggattttnagggccgg

SEQ ID NO: 8238 - DNA, 493 bp, Homo sapiens
  III.1866 (H52531)
  misc_feature (384)..(384): n is a, c, g, or t
  misc_feature (418)..(418): n is a, c, g, or t
  misc_feature (424)..(424): n is a, c, g, or t
  misc_feature (455)..(455): n is a, c, g, or t
  misc_feature (489)..(489): n is a, c, g, or t
gaaaagtaatcaactttggaccttgtaaattaagtatgttcctggaaaccccatagttgagcttactagggaataattctgaactatccctaactggactgcaaaggccaatcactcacacagttcatctcttgcacagctgggtgggagctatccagggtagtagagctccaagcaagggcagtcatattcggggccagttgggctagtttcccttgattagaattcaaggtgttcttattcaaagggcatcatcacctccctgccctaactctccacacttgtccccaatgcatctgggtaggagcccacttccttgcccagtttctaggtcaatacctggccaaagcgggttaacaaagagtcccgacgggaaaagggagnccgattcataccccccgacgggaaaatttggggncacagncaaggggccagagtttcgtggaggcaggcanctcagaggggaggggggattttgcctttgtcccnttaa

SEQ ID NO: 8239 - DNA, 327 bp, Homo sapiens
  III.1867 (H66028)
  misc_feature (293)..(293): n is a, c, g, or t
  misc_feature (315)..(315): n is a, c, g, or t
  misc_feature (321)..(321): n is a, c, g, or t
ccgaaaaaagccagtagctttatgtattattacttcctctcttacacagaaagtagtagcatactgtatttttttaatattgtcgttgtcactttaatgatgtatcttagagagatcactcccataccaacacatagaaatcatcttcactctttctttggttttagggtattctatgaatgtttattcaatcattcttctattggtaggtattttactaagaatgacattaatgggaacagtgtaactaatctatgatagaaataaaaccttgaagatatgaataaatgggncacaggtgccaatagtccaggncagggngggtta

SEQ ID NO: 8240 - DNA, 391 bp, Homo sapiens
  III.1868 (H66073)
  misc_feature (270)..(270): n is a, c, g, or t
  misc_feature (360)..(360): n is a, c, g, or t
  misc_feature (372)..(372): n is a, c, g, or t
  misc_feature (378)..(378): n is a, c, g, or t
  misc_feature (389)..(389): n is a, c, g, or t
tagagacagggtcttgccctgttcccacgctagagtgcagtggcatgatcatagctcactgcagcctcaaactcctgtgctcaagcaatcctcctgcctcagtctctacagtagctggcactacaatagtgggtgccaccatgcccgactaattttttttattttttattttgtagagatgaggtattgctgtgttgcccaggctgaactggaatgcctggcctcaagaatcctcccaccttggcctcccaaagtcctgggattacatgnccaaatcttcttttagttgtttctaatagttgttagccattgagatctaaggttgcttcttaagttgaattgataatattctttccagangttgatgtgcantagaanactaattttcntt

SEQ ID NO: 8241 - DNA, 509 bp, Homo sapiens
  III.1869 (AI668638)
  misc_feature (436)..(436): n is a, c, g, or t
ttttttttttactgaaagcaggtatatttattggctgtaaattatgcccccataaagttaatgtttagaagctaaaaatgcctttagatggcctacattcatttcaaaatgtgtattctggcacctaagttataatctttatggaagtctaattcatgtacactggcagtaggggttcctggtcaatttgcaagtgttctcttcaagacaaagtaagttctctaattttggtgccaccaatttaggatctggaggtctgtagcctgctttatcaaagacaacaattgtaatttggctgaataaatggtttgctaagcaaagagtagacatatgtatatgcttgtatgtgcacatatttctgggaagaaacggtagactgaacagtggtcacctatgaggagtaagaagactcgggagcatgggggggacttaattntctttttttctttttttgagatggagtctccctctcttgcccaggtgatctgtctcgtgattcgcctgcctcg

SEQ ID NO: 8242 - DNA, 533 bp, Homo sapiens
  III.1870 (AI734212)
tttttttagtagagacgggatttctccatgttggtcaggctggtctcgaactcccgaccacagttgatccgcctgcctgggcctctcaaagtcctggaattacaggcttgagccactgtacccggcaacattctgtcttaaaaaaaaaaaacacgggccgggctcagtggctcacgcctgtcatcccagcactttgggaggccgaggcaggcgaatcacgagacagatcacctgggcaagagagggagactccatctcaaaaaaagaaaaaaagaaaattaagtcccccccatgctcccgagtcttcttactcctcataggtgaccactgttcagtctaccgtttcttcccagaaatatgtgcacatacaagcatatacatatgtctactctttgcttagcaaaccatttattcagccaaattacaattgttgtctttgataaagcaggctacagacctccagatcctaaattggtggcaccaaaattagagaacttactttgtcttgaagagaacacttgcaaattgaccag

SEQ ID NO: 8243 - DNA, 430 bp, Homo sapiens
  III.1871 (N89573)
actgtaagcaggtatatttattgtctgtaaattatgcccccataaagttaatgtttagaagctaaaaatgcctttagatcggcctacattcatttcaaaatgtgtattctggcacctaagttataatctttatggaagtctaattcatcgtacactggcagtaggggttcctggtcaatttgcaagtgttctcttcaagacaaagtaagttctctaattttggtgccaccaatttaggatctggaggtctgtagcctgctttatcaaagacaacaattgtaatttggctgaataaatggtttgctaagcaaagagtagacatatgtatatgcttgtatgtgcacatatttctgggaagaaacggtagactgaacagtggtcacctatgaggagtaagaagactcgggagcatgggggggacttaattttc

SEQ ID NO: 8244 - DNA, 252 bp, Homo sapiens
  III.1872 (W16815)
  misc_feature (14)..(14): n is a, c, g, or t
  misc_feature (16)..(16): n is a, c, g, or t
  misc_feature (211)..(211): n is a, c, g, or t
tagtagagacggantntctccatgttggtcaggctggtctcgaactcccgaccacagttgatccgcctgcctgggcctctcaaagtcctggaattacaggcttgagcactgtacccggcaacattctgtcttaaaaaaaaaaaacacgggccgggctcagtggctcacgcctgtcatcccagcactttgggaggccgaggcaggcgaatcncgagacagatcacctgggcaagagagggagactccatctca

SEQ ID NO: 8245 - DNA, 174 bp, Homo sapiens
  III.1873 (W37098)
cccaagggaaccatcagcaccaacctgctaaatgcctgtatttgaagtctctccccttcctgaagtgaccttttatgaggctctttccttcctaagggacctttccctggtagtagtggtctcattcacaaaaaagaataatagatgtaactggagtcactttgcagttttcaa

SEQ ID NO: 8246 - DNA, 476 bp, Homo sapiens
  III.1874 (W44740)
  misc_feature (326)..(326): n is a, c, g, or t
  misc_feature (390)..(390): n is a, c, g, or t
  misc_feature (473)..(473): n is a, c, g, or t
tttttttattttcaattctcctttattaacaatgatacaggcattcatcagcatagataattaaatgaaattaagtattccagatttcttccctctccaaatcatggcttatatctaatttcactaacaaggaggtaaagatttacatctaggaaaggctagaatattgaaaaagaagtccaggggagagcaggtaccaaatctagtgaagtacagtaaactgcttgggaccagcaaactaggtagcatatgggataatattaggagacaactgcttaaccaagaaaatgaaaatacaagttctattgagagaaggaggcaaactnggtaatgtctctgaattcacaaaccatatattgtattaatgtaatataattaatggtataattngtattaatggacttgatacaattttttttttccttaagcaaattcagtcatgcaatcttttgagtaagggaatatgttccggnccc

SEQ ID NO: 8247 - DNA, 458 bp, Homo sapiens
  III.1875 (R00049)
  misc_feature (212)..(212): n is a, c, g, or t
  misc_feature (275)..(275): n is a, c, g, or t
  misc_feature (371)..(371): n is a, c, g, or t
  misc_feature (423)..(423): n is a, c, g, or t
  misc_feature (437)..(437): n is a, c, g, or t
gtctcactctgtcacccaggctagcatgcaatggcatgatcataactcactgcagcctcgaattcttgggctcaaatgatctacctgcataggtggtactacaggtataggcctctatgcctgactaattttatttatttttgtttttcatagagttggggtcttgttatgttgcccaggctagtctcgaactcttggcctcaagtgatccncccttcttggctttcccaaatgtcgagattacaggcgtgcgtaatggcatctggccaaaactngccaacgttgaatgagtatgttaattcaccaatttaaaaatccagccgggcgtgatggctgatgctgtaatcccagcactttgggaggctgaggtnggtggatcacagggtcaggagttcgagaccagcctggccaatatgggtgaanccccgtctctactnaaaatacataaaattagctgg

SEQ ID NO: 8248 - DNA, 390 bp, Homo sapiens
  III.1876 (R02531)
  misc_feature (194)..(194): n is a, c, g, or t
  misc_feature (269)..(269): n is a, c, g, or t
  misc_feature (368)..(368): n is a, c, g, or t
  misc_feature (374)..(374): n is a, c, g, or t
  misc_feature (384)..(384): n is a, c, g, or t
ggtaatttaattataaattaataaaatcaagttgttacagtttgaggcacacagaatgaaatgcacaaatctttaagtatataccttggtgaatttttacatatgtatatccactcttctataactaccatataaacagctgtttggatttttatttatttatttttatttatttatttttttagacggagctncgctctgtcgccctgactgaagtgcagtagcgcaacctcgggcttactgcaagctccgccaccacggcccagctnaattttatgtatttttagtaggagacgggggttttaccgtattaggccgggggtgggtctccaatcttctggaccttcgtggatccgcggcctatagtncccagntagccggggnctatag

SEQ ID NO: 8249 - DNA, 504 bp, Homo sapiens
  III.1877 (R17972)
  misc_feature (397)..(397): n is a, c, g, or t
  misc_feature (418)..(418): n is a, c, g, or t
  misc_feature (436)..(436): n is a, c, g, or t
  misc_feature (467)..(467): n is a, c, g, or t
  misc_feature (482)..(482): n is a, c, g, or t
  misc_feature (488)..(488): n is a, c, g, or t
  misc_feature (500)..(500): n is a, c, g, or t
tcttagtggtgcctggtgcattccgaggctacatccaggctcatggaaggagtgtagtattcatttagccatgtctgccatgggtccagaaatgggaaagggaattgctgtccttgccctgtggtatgctgccacctctttgggaagcaggccttgcccctgtcccaccactcattctcagctttgaatgggaggcctttctatagtggaggcctttccttgaagcctatgaactgcaggcccccttttgccattgatctcaaagcacttgtcctcaggatagggaagagcagggggatgcaggaatagcagggatagcttgctcccagccccctccccaatttggttccgtttgacatagggaattttaacgatttcccaaaccatggcagggggntgagctttccttatggatgantttgtttttccctcccantggggggaattcctccttatggccttaaaantgccgagccccattncatgtnaatagggattcncggg

SEQ ID NO: 8250 - DNA, 368 bp, Homo sapiens
  III.1878 (R43462)
  misc_feature (317)..(317): n is a, c, g, or t
tttttttttttcagatacaaagcagtatttatacatttatttatatatgtatatttacttcagaagaaacgaacatttcggggacaggaagcaagcaggcccggggctgcttccctcactgcccacctcagagtcagagttggcacatgacaaataccaagctcagggagaaggaactggggagttaactggggaagtaggggggcgctctatgcacacggcagggcttcttaaggggtgcacggtatggggcagggaggattttgcactggggagggccctatgttacagctttgaagctagggggggagattagncccagtgacttacagggaccaaacggcccaagggagagagaagaagggagg

SEQ ID NO: 8251 - DNA, 474 bp, Homo sapiens
  III.1879 (N78903)
  misc_feature (406)..(406): n is a, c, g, or t
  misc_feature (414)..(414): n is a, c, g, or t
  misc_feature (424)..(424): n is a, c, g, or t
  misc_feature (469)..(469): n is a, c, g, or t
gtatagtagtagtttattccttttaatttttgagttgtattacacaatacggaaataacagacttatttaactgtttacctggtgaataacatgtgagttgtttccaggttctgactattacaaataaaatttctgtgaacagtcaagtgcaggtttggtctacacataaattttcatttctatgaaataggccatgacagcaattgctaagcctaactaactgtatgtgtgtgtttagctttaaaagaaattgccaaattattttccaatgtggtatacagttttatattcccatcagcaataaagattcaattttttctgcatgcttctcagcctttggaatcattatgttttaactatttcagctactggaaataaatctgctgtaggccaggtgtgggtggntcacaccncttaattccnggcaccttggggaggctgaggcaggtggggtcacccccaggtcangagtt

SEQ ID NO: 8252 - DNA, 566 bp, Homo sapiens
  III.1880 (W06971)
  misc_feature (534)..(534): n is a, c, g, or t
tagattcctttatagacacgtcagcctaaaaatcagcctattcgggtgttcttttgaatatctcctggcatttttgtatctaactttgttgaatctgggaatttcagttttcaatatccttgaaaatggcttaagtgataacttcccgtttcagttaaaaggaagcccgaagttgtgtttgtgctgcccacaggacagtgggagttacagttcatatcaggatgaccctacatacccaggtcagattgacgggaccagaagggaacatcgacttctaatccagctttcttgtttaattatgacctaaatctaatttacttccactgaaccatccaagacctctggcaggcagggaaatgggcagtgatgcaaaaaagggagactctttggagcttttatgaatagttcatgggtgaggacagaacttttctactttcagacagactgcttgctagttttatgaattcagcacacgaattatgctggtggttgctcacattcaaaccaaaccaacgactatggtttatggactcngtattccaatttaatatatatgcgtatatatg

SEQ ID NO: 8253 - DNA, 366 bp, Homo sapiens
  III.1881 (AA056059)
  misc_feature (10)..(10): n is a, c, g, or t
  misc_feature (12)..(12): n is a, c, g, or t
  misc_feature (50)..(50): n is a, c, g, or t
  misc_feature (224)..(224): n is a, c, g, or t
  misc_feature (227)..(227): n is a, c, g, or t
  misc_feature (354)..(354): n is a, c, g, or t
aattcggcangngggggaaaaaaagatttatgtaacattgtaactatgtntgtaatctactcttatcctaagtagaaatctagacttagaatctaatgctgccactgatctgacaggaggcggaactcagacagtaatgttcccttgcctgctactcacctcctgctgtgtggcccagtttctaacaggccacagactggtactggtttgcggcctgggggttnggnaaccctgggttatcagatagaattgcaagcctcatggtaacctcaaaccaaaaaacattcaatgaatacacaacaaataaaaagcaagaaagtaaattatatcaccagagaaaatcagcttcacttnaggaagacagga

SEQ ID NO: 8254 - DNA, 624 bp, Homo sapiens
  III.1882 (AA058577)
  misc_feature (435)..(435): n is a, c, g, or t
  misc_feature (507)..(507): n is a, c, g, or t
  misc_feature (523)..(523): n is a, c, g, or t
  misc_feature (540)..(540): n is a, c, g, or t
  misc_feature (547)..(547): n is a, c, g, or t
  misc_feature (560)..(560): n is a, c, g, or t
  misc_feature (586)..(586): n is a, c, g, or t
  misc_feature (601)..(601): n is a, c, g, or t
tttttgatgtatctttctctggttttgatatcagggtaatactggcctcacagaatgagtgtggcaatattccctcctcctctgtttttcagaacagtttgagtaggattggtattggttctttaaatatttggtagaattcagcagtgaagctattgggtcgtggacttttctttactgggagactttttattacagcattgatcttgttacttgttgttggtctgtttaagtttaggaagattgaattcttcctaattcaatcttggtaggttgtacgtgtatatgaatttatccatttcttctagattttccaatttattggcatgtacttactcacagtagccactaatgatcctttgaatttctgcagtatcagttgtaacatctcctttttcatttctgattttgtttatttttaatcttcttgcctcntttcttagtctggctagaggtttgtcaattctgtcaatctttttaaaaagcaactttttggttcattgaacntttggaatgttttccncattcatttacgcttcnccggatnttaataaggcctncctccactaattcggggggagttgcncctgctttctagtcnttaagatgcaccgtaaatggtaa

SEQ ID NO: 8255 - DNA, 626 bp, Homo sapiens
  III.1883 (N21223)
  misc_feature (520)..(520): n is a, c, g, or t
  misc_feature (567)..(567): n is a, c, g, or t
  misc_feature (603)..(603): n is a, c, g, or t
  misc_feature (609)..(609): n is a, c, g, or t
  misc_feature (621)..(621): n is a, c, g, or t
ggataaacaagtttatttgtaaatttagtcaacatacataattgacctaaaaacttcagtaaattttaaaaccacttggaaggccatctctataaaaatgattttcccaggacagtaaccagatgtaacctaacccaacaccatcttaattggcagaggttcagtgggctggagttttgtgctcctcccccacaccaagtttttataatacaaatgccacaagaaaaagaacttcggtactgtttcctcagcagaggagaaaaactcaacctagttatgagaccaaccacacaacacaatgaaaagctgcactaactagttcagaatgttagttaagatgatgctggtgtgaataactcgttttttctagagcccttataaataaaatcccccagttagtgtttgcattatcagctagagggttaacatgtggtagaatgaggacttatgcaggtataaatgcgcatagcattttactactatgagaacaagtgcagtcagaagaaaaccactggactcnaaattacacacaccttaatgacaagactccccaccactggggatgtnaacatttaattaaaaatggtgatactccatatatanatagcnattataaatgcnctagg

SEQ ID NO: 8256 - DNA, 411 bp, Homo sapiens
  III.1884 (N27501)
  misc_feature (370)..(370): n is a, c, g, or t
  misc_feature (376)..(376): n is a, c, g, or t
  misc_feature (389)..(389): n is a, c, g, or t
  misc_feature (395)..(395): n is a, c, g, or t
  misc_feature (408)..(408): n is a, c, g, or t
agtaaattctgtaaaatactttggtttaatttgtgactttttttgtaagaaattgtttataatatgttgcatttgtacttaagtcattccatctttcactcaggatgaatgcgaaaagtgactattcacagacctcagtgatgtgagcactgttgctcaggagtgacaagttgctaatatgcagaagggatgggtgatacttcttgcttctcatgatgcatgtttctgtatgttaatgacttgttgggtagctattaaggtactagagttgataaaatgtgtacagggtccttttgcaataaaactggttatgacttgatccaagtggtttaaccaattgggggccggttaagtctgggccataccatcncccggngataagaaatgtngggccnttttccaaagggngga

SEQ ID NO: 8257 - DNA, 418 bp, Homo sapiens
  III.1885 (AA707850)
gtagtttttaattgggagcagggagtaggcaggggaagggttcacaggttcctctgaaaatctgatggaaagttattcattctctccccagataaacgaatacaagcacacacacataaaatgttgcgttggaaaatctggcttggtgaactcaaccagctcatgcaacccctagcaggcttctttctccattttaatcttgcctccctcattgttagacctgctctagggactccaggctgatttctaagtcactttcatgaggtagtgtcgtctacagcagccagaactctccctccctcatactttttggttagagtcaggttttcaaagacattcgtgaggttcacctcaatcataggctccttctggcaatgttctgtgttcctttctcaaaacactgtcagatttgtaaagc

SEQ ID NO: 8258 - DNA, 509 bp, Homo sapiens
  III.1886 (R73008)
  misc_feature (373)..(373): n is a, c, g, or t
  misc_feature (400)..(400): n is a, c, g, or t
  misc_feature (417)..(417): n is a, c, g, or t
  misc_feature (461)..(461): n is a, c, g, or t
  misc_feature (476)..(476): n is a, c, g, or t
  misc_feature (486)..(486): n is a, c, g, or t
attgaccatattgatgaaaaggcctttgagaatgtaactgatctgcagtggctcattctagatcacaaccttctagaaaactccaagataaaagggagagttttctctaaattgaaacaactgaagaagctgcatataaaccacaacaacctgacagagtctgtgggcccacttcccaaatctctggaggatctgcagcttactcataacaagatcacaaagctgggctcttttgaaggattggtaaacctgaccttcatccatctccagcacaatcggctgaaagagggtgctgttttcagctggctttttaaaggtctttaaatcactcgaataccttggactttgagctttcattcaggtaggccaggantgccttcttgggtttccctgtcttctntttcttaactctctaanttagggccaacattaggttccaggcaacatccctggtgggggtntttccaggggttttnatggcattgncggtttctggggttttatccttt

SEQ ID NO: 8259 - DNA, 430 bp, Homo sapiens
  III.1887 (R73611)
  misc_feature (285)..(285): n is a, c, g, or t
  misc_feature (375)..(375): n is a, c, g, or t
  misc_feature (382)..(382): n is a, c, g, or t
  misc_feature (421)..(421): n is a, c, g, or t
  misc_feature (427)..(427): n is a, c, g, or t
tgttttattttgctagtagcttattaaacataacatgcaaataatcaaagagaaacatacatgacttagagtgaaaaataattctagaaaagtttcactaggtaagtatgcaaattcttattctaaaaatacttctttaagtgcatgaagcttcatgtattttgcaatattcttggcctcaatatctaccacctattttttaaccagacaaatttgaatgtatcaagataatttgggtgcaagagagtaacatccatatgtatttaatccaaggctttgagggancattaaggatttaagggattataaaacttgggctggatttccatggcaaccaggtaaaagggttttggcacatccatttggacagtaggntttaaanaaacactaaatttacaattaaggcttgagtttggtgtcncttcgngta

SEQ ID NO: 8260 - DNA, 422 bp, Homo sapiens
  III.1888 (H54796)
  misc_feature (341)..(341): n is a, c, g, or t
  misc_feature (396)..(396): n is a, c, g, or t
tctaaagctaaattgtcctgggacactccaaatgtgatttatttgtcccaaggccagtagaagtttccatgtaggtgaaaatggatgtttggctagttgaagagaaatggaaatgagttctgcaagctgacttacccagtggaaatgggtaagtaactcaggaacattatatcactgtacattctgactataaggaattctggataattcatgtcccttatagatacatatgaacttacacatgatctatcaggaaggaagaagacaggagccccatgaagagggtggggcatctcagtgccagggcctttgtgctatgtgctttatttactcacttaggnaattgcaacgggtctaggtgaagctttaggggtcccaaagtcacaggggcacccngtaacactacccctggggtttttttc

SEQ ID NO: 8261 - DNA, 390 bp, Homo sapiens
  III.1889 (H54848)
  misc_feature (86)..(86): n is a, c, g, or t
  misc_feature (297)..(297): n is a, c, g, or t
  misc_feature (340)..(340): n is a, c, g, or t
  misc_feature (385)..(385): n is a, c, g, or t
ctgaatgtaactgatttgatttattcctttcacttaaactgtgtaatgcctcagtttcatgtgtctacagaggacgctcacccttngcaccacctggaaagtgtaacagcagggcattgaggttctggccaaggagccatcagcaatcccattaccaatgcttaaagtgagtctcataaggcagatttggctccaagcaaaaaccacagctctattttcataaactaatttcagttgtttgccccagttaatattaataagcccagggtaatatgcttctacttaccagagcacaangataatagaataatagagtgttagatctggaaatgggaccttnggagatcttctaggaccaacttctccattttgatagatgaggganacagg

SEQ ID NO: 8262 - DNA, 434 bp, Homo sapiens
  III.1890 (T97338)
  misc_feature (376)..(376): n is a, c, g, or t
  misc_feature (431)..(431): n is a, c, g, or t
aagtgtgtgtgctgggggcagatcttgcatggacagtggcgccatcactgcactctagcctgggtgacagagaaagagcctatttctattaggaaaaaaaaaagaaaaagttattggacagaccccaaggcagcacacactaacatcctaaggtatacaaacagctggagagctaggaggaatatgctttcagtgtgaaaggaatcactaagaataaaaataaactcacaaaagaccattcacaagttttaggaatttggggtacaaaggaaggatccctaccctcacacccaccacacatactttctagggtaggattatgggactttaaatttaaggaggaaacttttttaaccattttttggggaaaaaaaanttaaaaggggaaaacgtgttttcttgacttttcgggataggggggggtttttccnttt

SEQ ID NO: 8263 - DNA, 639 bp, Homo sapiens
  III.1891 (AA059473)
  misc_feature (191)..(191): n is a, c, g, or t
  misc_feature (254)..(254): n is a, c, g, or t
  misc_feature (552)..(552): n is a, c, g, or t
  misc_feature (612)..(612): n is a, c, g, or t
gcgaccgcgcgctccaggccggtcgctccaccccccggctcccgggactgtggactccacgaccctgtcctcggccctgtccgcgccgaagcagcccgggactgcgcacgccccgcgtgccggtgagcgaccccggacgtgcagtccccaggtccccttccggagcgaggctgagcggctgccggcgtatngagccgggcctgacaaggaggggaggccgctggggtgctgggccagccgcaggtacggcgggntgcagggctggtgatcgagttgctgtgtcgcctctaatgaggcccagccagggaacactcggcttcggcccaagcccgacctctgggttgcctctaggccctcacaccttgagcgccaggtggccctcttccttttgctgttgatgaatgttcttgccgtggtgccgggatcttattttgcagctttacagagtaggctttgtgctaggtgttgtttatggagcttttcaaagcgcttgtttccttagttctcaagccttttagaactaaaaccagtgttacacagaagatcaggaancacttaaattggagtctgtgatatatttttctctccaaaatgatctgataaccatgttgncttcaataaagtaggaccgctataata

SEQ ID NO: 8264 - DNA, 462 bp, Homo sapiens
  III.1892 (H52360)
  misc_feature (10)..(10): n is a, c, g, or t
  misc_feature (12)..(12): n is a, c, g, or t
  misc_feature (247)..(247): n is a, c, g, or t
  misc_feature (388)..(388): n is a, c, g, or t
  misc_feature (397)..(397): n is a, c, g, or t
  misc_feature (422)..(422): n is a, c, g, or t
  misc_feature (439)..(439): n is a, c, g, or t
acacctttananagccagatctcatgagaactcattcaccatcacaagaacagcaccaagaggttggtactaacccattcatgagaaaccactcttatgatccactcatctcccaccaggccccacctccaacattgagaattacagtttgacatgggatgtgggcaaggacacagatccaaaccatatccacctagcagtggaattactgagtcatatgataacatttaaccctttgaggaactgncagactgtcttccaaagtagctgcacctttttacattcccagcattggggtatgagagttctaatttcctcatattcttgccatttgctattatctgccttttttattatagccatcctaactaagtacaaagtgatatcnttgtgtggntttggatttgtattacccgatgggntagtgagggttgaggcnctttttcatgtgcttgttgggcg

SEQ ID NO: 8265 - DNA, 250 bp, Homo sapiens
  III.1893 (H52361)
  misc_feature (133)..(133): n is a, c, g, or t
  misc_feature (158)..(158): n is a, c, g, or t
  misc_feature (167)..(167): n is a, c, g, or t
  misc_feature (173)..(173): n is a, c, g, or t
  misc_feature (179)..(179): n is a, c, g, or t
  misc_feature (189)..(189): n is a, c, g, or t
  misc_feature (212)..(212): n is a, c, g, or t
  misc_feature (223)..(223): n is a, c, g, or t
  misc_feature (237)..(237): n is a, c, g, or t
gcagtggcatgtgtctgcagtcctagctacttgagaggctgaggcaggaggactgcttgagcccagaagttagcatctagcctgggcaacatagcaagacctggcttctttaaaaaaaaaaaaaaaaaaaaantagaccaataatccaacttaaaatnggcaaaggntttaancaggtncctgtctgangatttagaaatggccaacaagcncatgaaaggangctcaacctcactngccatcaggtaat

SEQ ID NO: 8266 - DNA, 450 bp, Homo sapiens
  III.1894 (R35032)
  misc_feature (402)..(402): n is a, c, g, or t
  misc_feature (417)..(417): n is a, c, g, or t
  misc_feature (432)..(432): n is a, c, g, or t
tcctttctgtatctattcatcttgcaatcctggacatttcatgtaaatagaatcagacaatgtagtcttgcaagtggtttctttcacttagtgtaatgtgttcagtgttgtggcacatatcagaactagttttttttggaggaataatattctgttgtgtggacaggccatgttttgtttacctgttcattagttgacagacatttgggttgtttgcatctttgggtgcctcacctgtgccctcggtgggatgggcgtggtttggtctgcacagctgtgcttttaaagccatttcagctcacatgtatctgtcacaaatgggagactacatacaaatacgtgtctttcagctttgttagggggaagggaaggcagggcaggatgcccctgtgtccttctccntttactccccaaggncacttaggaaggtcntaagggccctttgtgggg

SEQ ID NO: 8267 - DNA, 491 bp, Homo sapiens
  III.1895 (R49419)
  misc_feature (66)..(66): n is a, c, g, or t
  misc_feature (75)..(75): n is a, c, g, or t
  misc_feature (189)..(189): n is a, c, g, or t
  misc_feature (264)..(264): n is a, c, g, or t
  misc_feature (365)..(365): n is a, c, g, or t
  misc_feature (398)..(398): n is a, c, g, or t
  misc_feature (425)..(425): n is a, c, g, or t
  misc_feature (445)..(445): n is a, c, g, or t
  misc_feature (480)..(480): n is a, c, g, or t
  misc_feature (486)..(486): n is a, c, g, or t
ttttttttttttttgtcgcctaggctggagtacagtcatgtgacttcggctcatggcaacctccgntttccaggnttaagtgattctcgtctcagcctcctgagtagctgggactagaagcatgtaccaccacacccggctaatttttgtatttttagtagcgacaaggtttcaccatgttggccaggntgttcttaaactcctgacctcaggtgacctgcccgcctcggcctcccaaagtgctgggaattacaggcgtgacancaacctgggcctatgtctctgtcttaaacagccctcaaattgctgaccccttcattgggtgggaacatcgagccctgttttttacttcagcaggggaactnaggtacaagctgagctgggctttcagggcagcnccccaggaggcagccccttaacctttnaatgtaggatttcgggaagntgttcatcctttcacgttagggacatgggccattnttcaanttcct

SEQ ID NO: 8268 - DNA, 342 bp, Homo sapiens
  III.1896 (H13425)
  misc_feature (211)..(211): n is a, c, g, or t
  misc_feature (247)..(247): n is a, c, g, or t
gtggcaattccagggaatgttctcaaaatgaaatattcatactttattaaaagtaaattgtatgttggaaaagttgctttttttgctgtcttcttctgacttggacggctcacagtttaaaacaaaattagtggtaaaatagaaaaaggaaatgtttagtacagaaagtaccagccacagtaccctcataactccatctccttccccgggnatcactctttccagccacttcaatcctaaaggcagntgaggaccctcattttaacacacaggggcctccctgcctaccctccttccctggtaacggtgaggctactgtaggtccatttattaggttcttcg

SEQ ID NO: 8269 - DNA, 378 bp, Homo sapiens
  III.1897 (H13471)
  misc_feature (55)..(55): n is a, c, g, or t
ggcaatttgtctttggaaaattcagataatggtaatttagtgtatatgtgatttncaaatatgtaaactttaacttccactttgtataaatttttaagtgtcagactatccattttacacttgctttatttttcattacctgtagctttgggcagatttgcaacagcaaattaatgtgtaaaattggattattactacaaaaccgtttagtcatatctatctaatcagatcttcttttgggaggatttgatgtaagttactgacaagcctcagcaaacccaaagatgttaacagtattttaagaagttgctgcagattcctttggccactgtatttgttaatttcttgcaatttgaaggtacgagtagaggtttaaag

SEQ ID NO: 8270 - DNA, 409 bp, Homo sapiens
  III.1898 (H73542)
  misc_feature (279)..(279): n is a, c, g, or t
  misc_feature (407)..(407): n is a, c, g, or t
tatcatgttgtctttatgagcattgagcacacttagtagaaaggctgccacactgtgtttagccttgtcatcctggaacaagatttttcatcttgaatagtctgataccaagactgaacccatctactgcaaagacctgtgttctgggaacgcaaagaatattctgacccccttttccagtattgagctgaaatcacaaagattttgtggtatagtgataagagctgtaagatttgggtttctattcctgggcactaaccttgggagtacggggacttngggagaggtgtggtgtaggggaaacagggcaaggtcagtggctacacagagtgtggatttcttgggatagggcaccatcaaaggggaccacggagctttggtaggaaatacgcattttctagggtttnat

SEQ ID NO: 8271 - DNA, 293 bp, Homo sapiens
  III.1899 (H77949)
  misc_feature (273)..(273): n is a, c, g, or t
aactgaagttacttgttaacccatttaagaaaattcttgcatccttgcaagattgtaggatctgtgctggttggtaaacttgatgcttgtctacagtaagatttactccctccaaggctcattttggttcactcagactctgtatttatgactctctctcatttgcccccacactgtaatcctgtagggtacatcattatcaaccacaatctcctactcactaccattttcctcccataattggcacctctatggagggattaacaaaacctnattggcctaggtggggggtg

SEQ ID NO: 8272 - DNA, 424 bp, Homo sapiens
  III.1900 (H17188)
  misc_feature (28)..(28): n is a, c, g, or t
  misc_feature (297)..(297): n is a, c, g, or t
  misc_feature (330)..(330): n is a, c, g, or t
  misc_feature (365)..(365): n is a, c, g, or t
caaaaaggacttaataactctgtctggnctgccccctggtggacaaaagcattcgaagtatgctggccaccagctcccaagaactcaagatccctgtccaaggccctaggccttagatcacctgcttatgttcagtgacttcctgaactagctctttcgccacaagacccttggaactttcttcatggaatgtaaacgcctgggagggcttcctcttacctaacggctgtaaagtctgtagcctcatccaaaacagtgcctcatgggaaaagtaggatttaggatcttcaaaacggnacagcattaggcaaggaggcagtttcaacccanttttgtttcagggcgtcttttgttatgggcttcgnaaaccacattttccctcatggggtccaaaacatggacttaacttccacttggggaactt

SEQ ID NO: 8273 - DNA, 438 bp, Homo sapiens
  III.1901 (H17964)
  misc_feature (192)..(192): n is a, c, g, or t
  misc_feature (218)..(218): n is a, c, g, or t
  misc_feature (434)..(434): n is a, c, g, or t
ttttttttaagattcaggtgcacgttaaattttaatccagtttcagtttacatattatacataattagacaatgaagtgatggattttcttttcaaaacgtcccatgtttgctgctttgggtaagaccaggcaaagtgttatctcaggaagtttaagagcttagaggatccaagagcgagagtttatctggnaaaatttgttttgtccatgatcaagnaatgtcctgttaaaggccaaatatcacaattcagtgttgggaagtgacaagaagaaaatttccagaaagttccatttgttaggctgacatgtattgtagaggaataattttggggggtaattgggggcccactttctactatgtgtttatggaacgattagaggactgttacagggacacagtgatgggcttaatatcacgatgttaatcaggggncgat

SEQ ID NO: 8274 - DNA, 446 bp, Homo sapiens
  III.1902 (H90218)
  misc_feature (37)..(37): n is a, c, g, or t
  misc_feature (38)..(38): n is a, c, g, or t
  misc_feature (40)..(40): n is a, c, g, or t
  misc_feature (41)..(41): n is a, c, g, or t
  misc_feature (76)..(76): n is a, c, g, or t
  misc_feature (84)..(84): n is a, c, g, or t
  misc_feature (88)..(88): n is a, c, g, or t
  misc_feature (89)..(89): n is a, c, g, or t
  misc_feature (409)..(409): n is a, c, g, or t
agatttgaattctccctgggacagagttcccggaggnngnnggggccaccatctttgctgtttgggcgacttagcngttccggntatnnagcttttggagagcccacaccaaccaggggtggaagcagtgccccagccagcacagctgatctgtgaaagcatggacagactgcttctttaagcagttccctgatcccgttcctcctgactgggtgagacctcccaaccagggtctccagccttgtcctgcaggcgcatttgggctggcaacaggtctgtacctcgctgggccggagctcccagaggaagaggcaggatgacatctttgctgtttcacagccttcactggtgatagctccaggttactggaaaatccaaggagactaggaactgggagaagaagcccagnaaagtacagcagccttacagaaactgggccagactgt

SEQ ID NO: 8275 - DNA, 454 bp, Homo sapiens
  III.1903 (H90873)
  misc_feature (2)..(2): n is a, c, g, or t
  misc_feature (119)..(119): n is a, c, g, or t
  misc_feature (121)..(121): n is a, c, g, or t
  misc_feature (365)..(365): n is a, c, g, or t
  misc_feature (421)..(421): n is a, c, g, or t
  misc_feature (425)..(425): n is a, c, g, or t
cnaacagtctggccatgtttctgtagggctgctgtactttgctgggcttcttctccagttcctagtctccttggattttccagtacctggagctatcaccagtgaaggctgtgaaacananaagatgtcatcctgcctcttcctctgggagctccggcccagcgaggtacagacctgttgccagcccaaatgcgcctgcaggacaaggctggagaccctgggttgggaggtctcacccagtcaggaggaacgggatcagggaactgcttaaagaagcagtctgtccatgctttcacagatcagctgtgctgtgctgggggcactgctttccacccctgggttgggtgtggggcttttccaaagcnggggaggccgggaacagctaaggtcgcccaaacaggcaaagatgggtgggcccttncttncttccgggaatttttttcccagggagatt

SEQ ID NO: 8276 - DNA, 498 bp, Homo sapiens
  III.1904 (N30297)
  misc_feature (413)..(413): n is a, c, g, or t
  misc_feature (435)..(435): n is a, c, g, or t
  misc_feature (441)..(441): n is a, c, g, or t
  misc_feature (454)..(454): n is a, c, g, or t
  misc_feature (471)..(471): n is a, c, g, or t
  misc_feature (491)..(491): n is a, c, g, or t
agcctggcgcggaacggtcgtggagaagaagagctgctgatgaggactgggacagtgaacttgaagatgatttacttggagaagatttgctatctggcaaaaagaatcagtcggatttgtcagatgaagagctaaatgatgatcttttgcagagtgataatgaagatgaagaaaatttcagttctcagggtgttacaattagtctgaatgctacatctggcatggttacatcatttgaactctctgacaacactaaccgaccaatctggagaacaggaatctgagtatggaacaagaacaaggagaggatgaactggtttatcacaaatctgatgggatcagaattgtatactccaagagtacccagaagaaggacagtatgaaggccacgaagctgagttgacagaagaccnaatagaatatgttggaagagcngaggangagcacttttacnctgatgagtgtttagcntccagttccattgacccttngatggat

SEQ ID NO: 8277 - DNA, 313 bp, Homo sapiens
  III.1905 (N42021)
aattatcttaaacattttattcaagcattttaaatccataaacagcaatgattttaaagaatgagttttacagtaccataaacagcactcactccaaagtccggccactctccggacggcagccgcaattacctagtcaaccttctttgcctactttgattaattacagcaatactatggaggaagttgaaatgagagtaaaggaggatgggagacaggcaaaaaagttacccaaagtttctggaatgttccttctctctctagttacatctgagagcctaataattgttccttctttcctttcagttttgaa

SEQ ID NO: 8278 - DNA, 480 bp, Homo sapiens
  III.1906 (AA010313)
  misc_feature (284)..(284): n is a, c, g, or t
  misc_feature (286)..(286): n is a, c, g, or t
  misc_feature (287)..(287): n is a, c, g, or t
  misc_feature (288)..(288): n is a, c, g, or t
  misc_feature (290)..(290): n is a, c, g, or t
  misc_feature (292)..(292): n is a, c, g, or t
  misc_feature (392)..(392): n is a, c, g, or t
  misc_feature (407)..(407): n is a, c, g, or t
  misc_feature (447)..(447): n is a, c, g, or t
actgcaacagctcgctcaacccggtcatctacacggtcttcaaccaggatttccggcgatcctttaagcacatcctcttccgacggaggagaaggggcttcaggcagtgactcgcacccgtctgggaatcctggacagctccgcgcatcggggctgggcagaaggggcggcccggacgggggagctttcccagagacccggggatggattggcctccagggcgcaggggagggtgcggcagggcaggagcttggcagagagatagccgggctccagggagtggngnnnananattggggagacccctttgccttcccccctcaagcaaggggctgcttctggggctccctgcctggatccagctctgggaaccctgccgaggtgtggctgtnaggtcagggttttanaaaacagtggcagaggtaaccccctaaatgggcaagcaangaaccccccaaagacactaccacttcccatccc

SEQ ID NO: 8279 - DNA, 513 bp, Homo sapiens
  III.1907 (H05322)
  misc_feature (379)..(379): n is a, c, g, or t
  misc_feature (414)..(414): n is a, c, g, or t
  misc_feature (438)..(438): n is a, c, g, or t
  misc_feature (450)..(450): n is a, c, g, or t
  misc_feature (459)..(459): n is a, c, g, or t
  misc_feature (494)..(494): n is a, c, g, or t
  misc_feature (502)..(502): n is a, c, g, or t
  misc_feature (509)..(509): n is a, c, g, or t
tttttttttttttttttttttagccaaatgaccaatttattaaagccattagccactgatgggctggggctttcttagtgggctggggctgacatttctgtatcatagtctgttgtcttttatacattcaaaaattaatttccatcgttcagacaggagtacgaagagcagattgataaagtggaaaggaagcacattccagaatcagacctcggagcagttcctcaatctctctgggcctcagtttgcctatttgtaaagatggaaatctccctcatgaggttgttgtaaagggcaacattacataatgggcaccaataccattaggataacattaggataaaacacaaagcctgggcacatgggtatgtgcttcagncatgttttaaaaatgcatagggggtgccctctgtntaccaggacacttttacaaggcantaggaggacacngttttacantaatggcttggaccttgttccctaggacgttgggnaatttatntttattngacc

SEQ ID NO: 8280 - DNA, 476 bp, Homo sapiens
  III.1908 (H05376)
  misc_feature (404)..(404): n is a, c, g, or t
  misc_feature (442)..(442): n is a, c, g, or t
  misc_feature (450)..(450): n is a, c, g, or t
  misc_feature (473)..(473): n is a, c, g, or t
gatcctctggggtttcagcttattgtagcatattttctccgaaaggcaaaaatgtgcccttttggccgggcatggtagctcaagcctataatcccagcatgttgagaggctgaggtgggcagatcatttgaggccaggagttcaagaccagtctggccaatatggagaaaccttgtctctactaaaaacacaaaaattatctggggcaatggtggggcatgcctggtagtcccacttacttggggaggccgaggcacgagaatcgcttgaacccgggaggtgggaggttgccgtgagccaagatcacgccactgcactccagcctggggcaacagagcaagactctgtcttcaaaaaaaaaaaaattacaatattttttaacaatgtggccctctttaagtttngcacaggttacacttacacggtttttccccaaggagtnggttggcnagcttcaaatggatatgtttttnagt

SEQ ID NO: 8281 - DNA, 394 bp, Homo sapiens
  III.1909 (R52316)
  misc_feature (84)..(84): n is a, c, g, or t
  misc_feature (275)..(275): n is a, c, g, or t
  misc_feature (306)..(306): n is a, c, g, or t
  misc_feature (317)..(317): n is a, c, g, or t
  misc_feature (325)..(325): n is a, c, g, or t
  misc_feature (369)..(369): n is a, c, g, or t
  misc_feature (383)..(383): n is a, c, g, or t
  misc_feature (391)..(391): n is a, c, g, or t
caactgaaaatcgtcgtgctgggggacggcgcctccgggaagacctccttatctacgtgttttgctcaagaaacttttgggaancagtacaaacaaactataggactggatttctttttgagaaggataacattgccaggaaacttgaatgttacccttcaaatttgggatataggagggcagacaataggaggcaaaatgttggataaatatatctatggagcacagggagtcctcttggtatatgatattacaaattatcaaagctttgagantttagaagattggtatactgtggtgaagaangtgagcgaggngtcagaanctcagccactggttgccttggtaggcaatgaaaattgatttggngcatatgcgggcgntaggaccnggg

SEQ ID NO: 8282 - DNA, 330 bp, Homo sapiens
  III.1910 (R54480)
tttttttttaatttaaataagtttatttgtgaaagaaaaacatctgaacatcaggtacagtctgatccacaatgtcataactcattctcgggagtactcttatgcagtttgcaagagaaattccacgtggagcatcagctgaacatttatcagaattcagaaagccttcaaacctgagtattacacaatacataacgacaacggtacagtaataaaaatacaatatcaaatattactttgtgagttacaaactacaatataaacaatttaggcccttttttaaaaaatgaaaaaatatttctattacagggcttatttcaaggcattttc

SEQ ID NO: 8283 - DNA, 473 bp, Homo sapiens
  III.1911 (R91398)
  misc_feature (1)..(1): n is a, c, g, or t
  misc_feature (2)..(2): n is a, c, g, or t
  misc_feature (6)..(6): n is a, c, g, or t
  misc_feature (302)..(302): n is a, c, g, or t
  misc_feature (325)..(325): n is a, c, g, or t
  misc_feature (392)..(392): n is a, c, g, or t
  misc_feature (405)..(405): n is a, c, g, or t
  misc_feature (410)..(410): n is a, c, g, or t
  misc_feature (451)..(451): n is a, c, g, or t
  misc_feature (472)..(472): n is a, c, g, or t
nnaaanaattctccacctataaattcaaatgtgagcaatggcaacaaaaatggggggtatgggcttattctttactgctgaatcagcacaaaatcccacttaaggggaaaaggctggactattcagtcatagtcacataaaaatgacctttctaatgaaggcctgggttctctggcaggtaagcaatggcagaccccatgcctgcctcctgagtaaggaatgcaggcagtggctaccgctccctgtatccctgaacttcaaaggaattcaagtgacctaggaccagctgggctgccaaaggnaaacagtgtccaagggactcccngggccagagataaggtgcagggcacagcaggtcctttcaacggcatggggggctttctattttcccngccccttttcatntttgnaaactggcaattttccagggggacaggcaaaaggcttgccngggggaggccttccaagtttna

SEQ ID NO: 8284 - DNA, 467 bp, Homo sapiens
  III.1912 (R92655)
  misc_feature (320)..(320): n is a, c, g, or t
  misc_feature (340)..(340): n is a, c, g, or t
  misc_feature (348)..(348): n is a, c, g, or t
  misc_feature (389)..(389): n is a, c, g, or t
  misc_feature (418)..(418): n is a, c, g, or t
  misc_feature (444)..(444): n is a, c, g, or t
  misc_feature (451)..(451): n is a, c, g, or t
  misc_feature (467)..(467): n is a, c, g, or t
catcttcttgaaatgggctccaagaagcaggtttgtggccagtagagccagctcagaacccaggagtggtacaaaaagcattcagatatcaagattcccctcctggctgcatcttccatgggggaggccatgaaaggggcccctggtgaaccattgagtcatttatagctaatcttagtacactccctgaagtagggaatgacatgggctgcaagaattcttcctaagcaccccagagagaacttcaccgatttaaaatatgagtttctgtaacctgagcaggagcttgcctgggtgcaagggcttatgcagcctgcctnccagggaggccaggagggtncgcacttnattgagctttgagcaaatggggggcttttggggaattcagncagcctccctggagcttttcctgggagcngagctggaactgtaccctgtaacttnggagggnttgctggggcaggttn

SEQ ID NO: 8285 - DNA, 360 bp, Homo sapiens
  III.1913 (R95173)
  misc_feature (153)..(153): n is a, c, g, or t
  misc_feature (176)..(176): n is a, c, g, or t
  misc_feature (269)..(269): n is a, c, g, or t
  misc_feature (303)..(303): n is a, c, g, or t
  misc_feature (314)..(314): n is a, c, g, or t
  misc_feature (328)..(328): n is a, c, g, or t
gggataattggttattaaactgaatagttcaggagactttacaaacctttgtttcaactttcttatctggaaataatatcatttataaagggacacttttatgtttttcccttttttatgttggttgatataacacaaagagatatttagganaatgcttattgatgaggtttatnctatctgtttttaaagcaccgaggttgcattctagataaccttgtttattagcatggcatattttaatcattatttgagactgtcctgtgccngattattttagctaaaattcagggagattgcgtnggggcaggganaggcatgcattganaaattttctaacccacgggtattttaggcctt

SEQ ID NO: 8286 - DNA, 119 bp, Homo sapiens
  III.1914 (R09483)
  misc_feature (98)..(98): n is a, c, g, or t
  misc_feature (104)..(104): n is a, c, g, or t
  misc_feature (115)..(115): n is a, c, g, or t
aacagaaaatcgaaagcaaatgcaggcagtattcctcagttttatcagaagaactcccaaaaagggaactgtctccaaggaaaagagatgtttgaaanttcaantacaaatgtantaaa

SEQ ID NO: 8287 - DNA, 369 bp, Homo sapiens
  III.1915 (R09576)
  misc_feature (310)..(310): n is a, c, g, or t
  misc_feature (341)..(341): n is a, c, g, or t
  misc_feature (357)..(357): n is a, c, g, or t
atttccttagaatgtccttaccaaacacgacatatcttagaatggacttcctagtttccctcatcatatagctaaagccagactaatgacatgttacctgtagccattgaattcctgcacatgcctaacctaagatgcaaaaacaatttttagcagcattaacttcttattaatgaatggtcagtatttatactatgtgaaatgtggatagcaacactaagcctaatgaaagacctttagctaatattgactttagctgagatttgcagtaaatatacacttatgtgtgtgcacatttgctcaggtacanataatcggtagtagggattaactgagttcgnaggggcctccattgtncaactgttaatg

SEQ ID NO: 8288 - DNA, 354 bp, Homo sapiens
  III.1916 (R66203)
  misc_feature (1)..(1): n is a, c, g, or t
  misc_feature (33)..(33): n is a, c, g, or t
nggaacagctccggtctacagctcccagcgtgngagcgcagaagatgggtgatttctgcatttccatctgagaccagtgaccttttctatttcatagtaaacaaacttcatgagtacttgccggagtctagggataagaatgcactacaaaatcaaagccaaagggttgatgagctggtggcatgcattgaaattatacagaccctagtattgatgttcagagaaacagaaaccgagtcatcacgcctgaacacattggcagctaagaagggagcactatttaatctcttgggtaattttaattagtgagcctcagattccaaaatcttgtccttgttttgatatccagttggg

SEQ ID NO: 8289 - DNA, 302 bp, Homo sapiens
  III.1917 (R67081)
  misc_feature (3)..(3): n is a, c, g, or t
atntttatcaaatttattttttaaaattttaaacttctcatagagaggtattgatggaacattcaattaaaatctttgtttataggactcagagatagccagatattaaacaaataaaaaaatgtttctcgtgaatatcaagttgactcttgattaacattttatactcttattaacattgcgtacattgtttgtttctattcaaccaatttcagaacttcatgaaaaagttgaatggtaggttgagtgatggggtaacacaatggggagccttttctgcaaggctgggcatgtgaataaag

SEQ ID NO: 8290 - DNA, 294 bp, Homo sapiens
  III.1918 (R02354)
  misc_feature (122)..(122): n is a, c, g, or t
  misc_feature (233)..(233): n is a, c, g, or t
  misc_feature (266)..(266): n is a, c, g, or t
ttctagactatatgggatagagtacttcaaaggtaacttttctttataaattttcagcattttacgataatgctatattttgtttagatgattcaggactaaagactcaagaaattaaagancctttcaaaacattctgaacttctaagtacagtgatttttgtatgctgcaggccttgtgttagggatattatatactacagggtttttgtacatttataggtaattttccntcagggttactacccataaatttatattgttcnattaaatggttccaataatggtatatat

SEQ ID NO: 8291 - DNA, 348 bp, Homo sapiens
  III.1919 (R02458)
  misc_feature (5)..(5): n is a, c, g, or t
gcatntagaaacacaaattacagatgtctagggttaggatttctcaaagtgacactattggcatttggggccagataattcttgattctgaggggctggcttgtgcgtttcaggatatttagcagcatgcctggcctctaccccttagacgcaagaagtatgcccctgttttgacagccaaacatgcctccagggtattgccaaatgttccttgaggggacagaattgcctctggttgaggaacctctggtctctggggggtaaaggctttgtatgggtgcctgatgtaggagttgggcacttaatttgcccattagttaaaaaatatattaccattatttgaaccat

SEQ ID NO: 8292 - DNA, 480 bp, Homo sapiens
  III.1920 (T86305)
  misc_feature (113)..(113): n is a, c, g, or t
  misc_feature (116)..(116): n is a, c, g, or t
  misc_feature (284)..(284): n is a, c, g, or t
  misc_feature (355)..(355): n is a, c, g, or t
  misc_feature (409)..(409): n is a, c, g, or t
  misc_feature (419)..(419): n is a, c, g, or t
  misc_feature (443)..(443): n is a, c, g, or t
  misc_feature (451)..(451): n is a, c, g, or t
  misc_feature (472)..(472): n is a, c, g, or t
tttactgtgtgccaataaaactttatttataaaaacaggctgtgaaccagatttggcctggaggtgtagtttgctgaaccctgagttaatggatacaaaacaaagcacctggncantagcaggtcttaataacgtttgaggaatgagtgagtgaaatgatcgggcctctttaactctcgctttccccatctgctagaagaaatcattacactgagttgtcatctattgagtgctttccagggccacacagggcttcaggaagcccagcacagccctctcatcgntcctcctcataaaaccctgagatcggggctctcagtgggtcccattttacagggaacaaaggctaaggggnccaaggcaccatggctgggaatgtggccaaagctggggtattgggaacccgggntttccaaggnccagacctcaggctctctgaactnctgggggnttccaagggctatcccgggantttggagc

SEQ ID NO: 8293 - DNA, 355 bp, Homo sapiens
  III.1921 (T86403)
  misc_feature (19)..(19): n is a, c, g, or t
  misc_feature (28)..(28): n is a, c, g, or t
  misc_feature (30)..(30): n is a, c, g, or t
  misc_feature (32)..(32): n is a, c, g, or t
  misc_feature (289)..(289): n is a, c, g, or t
  misc_feature (294)..(294): n is a, c, g, or t
  misc_feature (327)..(327): n is a, c, g, or t
  misc_feature (333)..(333): n is a, c, g, or t
  misc_feature (341)..(341): n is a, c, g, or t
tgggctgggattccagaantcgcactantngngtggggggcagtggatcaatcttttcctggagggagtcaatggtgatggtgggaatgggtcaggggtgctggcaaggaggttccaaggcccccaggagggagggaggcatgggagatgagtttgtccctcttgagttctgtctctctctgtgtctctctgtttctgcctctttctgtctccttgtatttctcagtccctgtcttcgtctatacctcttgctctcttccttgtgtatctgacccactgcccaggaggngatgncaggcagagacccctgggcttgggtcctgggantttggncccacganggggatttgacatc

SEQ ID NO: 8294 - DNA, 405 bp, Homo sapiens
  III.1922 (N63886)
aataatcattttactaaagcaaagattaagtacacattttcccaacataacaatttcatctatggataggcattagctacatgatttttcattttaaaaccccacaatgattatttttcagacataaataaaaaatacactggttctagatgccaacaaaatcacatttgcaaaccttaagagtttggtaagttacaacattaagatgactaacgatatgtgtgcagtattctcagtatagaatacccaaaattcccgtgtacatctgtgttgcttgagtgtcccagtatgggaggaggtagacttggcacatcgaaagccactgctatactaaagaatcattacaaagtctcaggggattcttcagagaatcagctattataaaatccatcttggataattcat

SEQ ID NO: 8295 - DNA, 249 bp, Homo sapiens
  III.1923 (N92030)
taaattacagtatgactatccagtagactgttgtgccatcattataatttatgtttctgaagaatatttgacagcatggcaaagtgcttatagtgttaagtgaaaagagtgatatacaaaattgtatgtataaatccaaaaaatgacttttaaaaagatggaaaggatatgcaaactctgggtagttggattatgggttttcctggttttatgctttaaaaaattttctccagtatattactacttata

SEQ ID NO: 8296 - DNA, 460 bp, Homo sapiens
  III.1924 (N70700)
  misc_feature (444)..(444): n is a, c, g, or t
ggacaattgtgaacgttgttgttccattctttctttctccaatttcttctgcttttcacgttccattttttcaagaccttcgcgaatccaagcgggaagagtcctgcgttttactgcgtctgtttcacgtgggaaaaatatacgcaagtcagttaagtaaaatatttctacaaacttgtgagtaaatttaaaaaatatcccattaaatatcatgcctttcttcaatgccatcacttttagtaacagcagggaccactgctctagtgcttacaatctgccaggacacaatgaaagcatgttaaaccatcatctaatttaatccttacaaaagccctcagagatcactactattactccacttttttccacaggtgaggaaactgagactcgaaaaaattaagtgatttgctagtaagttaaaaaaggagtaaagttagaatcctncctaaaatgtaaaaag

SEQ ID NO: 8297 - DNA, 307 bp, Homo sapiens
  III.1925 (N99838)
  misc_feature (16)..(16): n is a, c, g, or t
  misc_feature (23)..(23): n is a, c, g, or t
  misc_feature (258)..(258): n is a, c, g, or t
  misc_feature (294)..(294): n is a, c, g, or t
  misc_feature (300)..(300): n is a, c, g, or t
ggcacgagcagttttnatgttgnttgaagaaatataatggcagggagcatctgcttaccctacttttgcatggtagatcccatgtaaacaagacaaagagctgtattggcagctggcctagaaaagcctctgaaaatagcaaaattgcagaaaatatttaatgattcattaacttctatctttgcttataaatgaatatatctgcaagattatagaaacagcttaagttgtttagttcactttttggttcactgtaangaaggatgtttgaaattggccaaaaatggtctaggnttaagnggaattt

SEQ ID NO: 8298 - DNA, 463 bp, Homo sapiens
  III.1926 (N80787)
  misc_feature (238)..(238): n is a, c, g, or t
ccagaggagtaaaaataactgcactgagttgacgtgttggtgctggaagtcgccacaacaaaatgagtatttccagaggggaaatagacatttctgagttagacaaatcccttgcagttcatcgacagcacatgatgaaagctggctgcagatccagggagcaggaagccactctgcagcaagacgtctgccacgtggtatcggccaggctcactgcagcacttgagcgcccacaggntccccgacgctgagctagggacgcccccggccgcaaggggctggctaccgaggccaccgtgacatggggtggactgagacagtccggccagggaaggccggtggccttgcgcagaggctctctgctgtaagccttgcctgggtggccctggggtaaactctcctcgccggaagccccagcttccttaacccgtaaagcgggggaaatgggggccgcaactttcca

SEQ ID NO: 8299 - DNA, 462 bp, Homo sapiens
  III.1927 (W07630)
  misc_feature (2)..(2): n is a, c, g, or t
  misc_feature (25)..(25): n is a, c, g, or t
  misc_feature (35)..(35): n is a, c, g, or t
  misc_feature (58)..(58): n is a, c, g, or t
  misc_feature (62)..(62): n is a, c, g, or t
  misc_feature (76)..(76): n is a, c, g, or t
  misc_feature (101)..(101): n is a, c, g, or t
  misc_feature (134)..(134): n is a, c, g, or t
  misc_feature (174)..(174): n is a, c, g, or t
  misc_feature (186)..(186): n is a, c, g, or t
  misc_feature (192)..(192): n is a, c, g, or t
  misc_feature (200)..(200): n is a, c, g, or t
  misc_feature (203)..(203): n is a, c, g, or t
  misc_feature (308)..(308): n is a, c, g, or t
  misc_feature (314)..(314): n is a, c, g, or t
  misc_feature (350)..(350): n is a, c, g, or t
  misc_feature (358)..(358): n is a, c, g, or t
  misc_feature (366)..(366): n is a, c, g, or t
  misc_feature (374)..(374): n is a, c, g, or t
  misc_feature (450)..(450): n is a, c, g, or t
  misc_feature (452)..(452): n is a, c, g, or t
anttcggaacgaggaccaaatggcngggatgacgnggtagcagcgggggggcccgggncagngtcggctcgggatnggggaaccgcggtggcttccgcganggtttcggcagtggcatccgggtccggggtcgngccgtaggacggggccggggcgaggcgcggagctcgcganggcaaggcacgntactcngtggatgnccntcaccaagttgggccgcttggtcaaggacatgaagatcaagtccctggaggagatctatctcttctccctgcctattaaggaatcagagatcattgatttcttcntggggncctctctcaaggatgaggttttgaagattatgccantgcagaancagacccntgccggcnaagcgcaccaaggttcaaggcatttgttgcaaatcgggggactacaattggccacttcggtctgggtaaaaagggntncaaggaagtg

SEQ ID NO: 8300 - DNA, 167 bp, Homo sapiens
  III.1928 (H05409)
  misc_feature (65)..(65): n is a, c, g, or t
  misc_feature (139)..(139): n is a, c, g, or t
gaatgatatttataatttcttctcacctcttaatcccatgagagtacatattgaaattggacccnatggcagagttaccggtgaggcagatgttgaatttgctactcatgaagatgctgtggcagcttatggcaaaagncaaagctaatatggcaacacagatatgt

SEQ ID NO: 8301 - DNA, 199 bp, Homo sapiens
  III.1929 (H05410)
  misc_feature (11)..(11): n is a, c, g, or t
  misc_feature (14)..(14): n is a, c, g, or t
  misc_feature (100)..(100): n is a, c, g, or t
ttttttttttnttntttttccagtttttaaaaggaagatttatttaacaagtttcacttagtacaatacatctaaatggaaatcacaatacaaggaaagntttaaaccaaagcctcagattttcatacaaacggcacgaccaaacttctaaagtattggtattacatcttaaaattgtcccgtatccttaaaaaaaaaa

SEQ ID NO: 8302 - DNA, 473 bp, Homo sapiens
  III.1930 (AI668605)
ggacacagtcttgctgttgtcgcctaggctggagtgcagtggcgcaattttggcctactgtaacctgtttcctgggttcaaacttctgcctcagcctcccaagtagctgggattacaggtgccactgtcaccacgcctggctaattttttgtatttttagtagagacatggtttcaccatgttggccaggctggtctcgaactcctcacctcaggtgatctccccgcctcggcctcccaaagtgctgagattacaggtgtgagccacagcgtccagccccagagttttacttcttaaaaataatttattgtaccacaagtagctattggtagagatgaaagctaaagcagaatgatggaatacagttgatgaaactttaagaagcaatgtagcatgtaatcctcatagcttactgtcaggatgaagcctttatgtttacatccaagaactgagttcactgatgtcaacaccta

SEQ ID NO: 8303 - DNA, 481 bp, Homo sapiens
  III.1931 (AI733540)
ttttcaaaggcagaagagaagaaagttttggaaagcaaaaaacttacaacacataccattaaagaaaggcaagagagttgttagctaaactgatctgtctgcatgatagacagtttaaaaattcatcccagttccatatgctggtaacttacaggagatatacctgtattatagaaagacaatctgagatacagctgtaaccaaggtgatgacaattgtctctgctgtgtggttcaaagaacattcccttaggtgttgacatcagtgaactcagttcttggatgtaaacataaaggcttcatcctgacagtaagctatgaggattacatgctacattgcttcttaaagtttcatcaactgtattccatcattctgctttagctttcatctctaccaatagctacttgtggtacaataaattatttttaagaagtaaaactctggggctggacgctgtggctcacacctgtaatctcagcac

SEQ ID NO: 8304 - DNA, 402 bp, Homo sapiens
  III.1932 (H28364)
  misc_feature (42)..(42): n is a, c, g, or t
  misc_feature (93)..(93): n is a, c, g, or t
  misc_feature (292)..(292): n is a, c, g, or t
  misc_feature (364)..(364): n is a, c, g, or t
caagtagctgggattacaggtgccactgtcaccacgcctggntaattttttgtatttttagtagagacatggtttcaccatgttgggccaggnctggtctcgaactcctcacctcaggtgatctccccgcctcggcctcccaaagtgctgagattacaggtgtgagccacagcgtccagccccagagttttacttcttaaaaataatttattgtaccacaagtagctattggtagagatgaaagctaaagcagaatgatggaatacagttgatgaaactttaagaagcaatntagcatgtaatcctcatagcttactgtcaggatgaagccttatgttacatccaagacctgagtcactgatgnaacacccaagggaatgtctttgaccacacagcagggca

SEQ ID NO: 8305 - DNA, 417 bp, Homo sapiens
  III.1933 (H28389)
  misc_feature (22)..(22): n is a, c, g, or t
  misc_feature (28)..(28): n is a, c, g, or t
  misc_feature (44)..(44): n is a, c, g, or t
  misc_feature (145)..(145): n is a, c, g, or t
  misc_feature (201)..(201): n is a, c, g, or t
  misc_feature (359)..(359): n is a, c, g, or t
  misc_feature (378)..(378): n is a, c, g, or t
  misc_feature (386)..(386): n is a, c, g, or t
cttacaacacataccattaaanaaaggncaagcagagttgttanctaaacgatgctgtcgcatgatagacagtttaaaaattcatcccagttccatatgtcggtaactacaggagatatacctgtattatagaaagacaatctgnagatacagtctgtaaccaaggtgatgacaattgtctctgctgtgtggttcaaagancattcccttaggtgttgacatcagtgaactcagttcttggatgtaaacataaaggcttcatcctgacagtaagctatgaggattacatgctacattgcttcttaaagtttcatcaactgtattccatcattctgctttagctttcatctctaccaatngctacttgtgggacaatanattttttnagatgtaaactctggggctggacgctgtggc

SEQ ID NO: 8306 - DNA, 437 bp, Homo sapiens
  III.1934 (N63669)
  misc_feature (381)..(381): n is a, c, g, or t
gagactgcatagggctcggcgtggtctggaaggaggtaggaaaagaatgaaatccattcccagggactttctcaggtgctgatttaagataaaatgcaaatgaggtagacacagttcctagcctcaggaaggacaaagagaaggggcaggtttggataatctatatgtcagatgacaatttattcaacgaatattttttaaagtaccaactgctagcagaaccctgcactgctcacagcaggtggagcaggtggcagatttcagagtcacttgctgtgctgtgacttggagccaagcccccgatttcccactggacagagataatgaacacctagtttcttcatccatgtggactcagcacacagtggtatttggatcacnaaattatcctggtactataggcgaggtacaaaccctgttaaggttgagaaggggca

SEQ ID NO: 8307 - DNA, 488 bp, Homo sapiens
  III.1935 (N91074)
  misc_feature (86)..(86): n is a, c, g, or t
gctcgtactcgtgcgcctcgcttcgcttttcctccgcaaccatgtctgacaaacccgatatggctgagatcgagaaattcgataantcgaaactgaagaagacagagacgcaagagaaaaatccactgccttccaaagaaacgattgaacaggagaagcaagcaggcgaatcgtaatgaggcgtgcgcgccaatatgcactgtacattccacaagcattgccttcttattttacttcttttagctgtttaactttgtaagatgcaaagaggttggatcaagtttaaatgactgtgctgcccctttcacatcaaagaactactgacaacgaaggccgcgcctgcctttcccatctgtctatctatctggctggcagggaaggaaagaacttgcatgttggttgaaggaagaagtggggtggaagaagtggggtgggacgacagttaaatctagagtaaaaccaagctggcccaaggtgtcctgcaggct

SEQ ID NO: 8308 - DNA, 255 bp, Homo sapiens
  III.1936 (AA058677)
  misc_feature (186)..(186): n is a, c, g, or t
gccattcttgaggaaatatagagatgacatgttttcaccccaactatctggtgctattgaatgactaattcagtccctaaagttctgtgaaaacacaaaagtctaatgatttgagtgagtaaaaggtaatggtgcatttgaacaagtaaatgctgtcgtggtcagcaagatccgggatttgaacangtgatgactggaaaaaggtttgggttatttggaactctggctaaaacttctttcgggtgacatgtgatc

SEQ ID NO: 8309 - DNA, 190 bp, Homo sapiens
  III.1937 (AA058795)
  misc_feature (186)..(186): n is a, c, g, or t
tctgaaaccaaacacaaatactttttattcatgggatatcattttacatcaatgtcattgaaacctaaaaccagtttgctgtactcaagttaggtggcataacagtatttcagttaagctgggagtcacaggacttgcacacttttatgaatgtaatgcaaatactgacgacacgaagcattcacnggtg

SEQ ID NO: 8310 - DNA, 500 bp, Homo sapiens
  III.1938 (H00916)
  misc_feature (373)..(373): n is a, c, g, or t
  misc_feature (378)..(378): n is a, c, g, or t
  misc_feature (406)..(406): n is a, c, g, or t
  misc_feature (419)..(419): n is a, c, g, or t
  misc_feature (449)..(449): n is a, c, g, or t
  misc_feature (457)..(457): n is a, c, g, or t
  misc_feature (465)..(465): n is a, c, g, or t
cttgcttccaccatgccacttttttgctcttctcacaagagcatctgtcccttatagcatcatgtctgaattcctctttctcacttctaattccccaaaacatgcctctgctatttaaaatattccactcctgcaaacattttttttttttttttactagaacctgatctgtccagtaaatagacttgggaatccagggtcctaggacccttcccactgccatggactttgttcacttttgcacaaattttgaatgtgcttcatgtctagggaaccctatctatccttcaagggttatgtggggaattacttacctcttctctggaaacctttcaacctttctctggacttcatccaggccctttcctggaangtttntttttccatattacacagtttgagggcntcaaaggggtttnggggtttgtgggcactttcaaaaaaagggntttttaantctcaacntctacttaataaaattggaaaaccggggggttttg

SEQ ID NO: 8311 - DNA, 422 bp, Homo sapiens
  III.1939 (H00917)
  misc_feature (305)..(305): n is a, c, g, or t
  misc_feature (322)..(322): n is a, c, g, or t
  misc_feature (362)..(362): n is a, c, g, or t
  misc_feature (371)..(371): n is a, c, g, or t
  misc_feature (412)..(412): n is a, c, g, or t
  misc_feature (419)..(419): n is a, c, g, or t
ccagaatggcttttaatctactctattgaaccaaagccatactcgggctgtgttcctaacatggacctactagtaataaacattgatccagatacaagaaaattccatggtatcaggatcctcttatcaagcaatcagaagactgataaatgatcctttcttggtggaggtatccaaaaatattatgaacaccccagggcattatataggtcagtacacacaaaggagccaccagtcagccagggtaactgttctgacaacttttcctagggctcagtaagtcctgatgactcatcacaggaagnttaaaggcccgggtgantttaaatccatccaagtctttattgaggggctactatggngttctaacnctagggttccatttttttaggaggggtggggttaaaaggtnttttggnggt

SEQ ID NO: 8312 - DNA, 450 bp, Homo sapiens
  III.1940 (H57741)
  misc_feature (264)..(264): n is a, c, g, or t
  misc_feature (374)..(374): n is a, c, g, or t
  misc_feature (387)..(387): n is a, c, g, or t
  misc_feature (408)..(408): n is a, c, g, or t
  misc_feature (420)..(420): n is a, c, g, or t
  misc_feature (442)..(442): n is a, c, g, or t
  misc_feature (448)..(448): n is a, c, g, or t
ttgagatggagtttcgctgttgttgcccaggctggagtgcaatggtgcaatctcagctcatcgcaacctctgcctcccaggttcaagcgattctcctgcctcagcctcccgagtagctgggattacaggcatgtgccaccacatccagctaactttgtattttgagtagagatggggtttctccatgttggtcaggctggtctcgaactccagaactcagatgatcctcccccttggcctcccaaagtgctgggattgcaggtntcagccaccatgcccggcctcctctgtcacttttatagccatcctctgctcagaggaaagagctgacacctttttgcccagtttcgagggccccagttccacaatgtttnacaactattttanagccatttttcatacccaatngccaaaagaggnttccccacattagttaaccttnggggtntt

SEQ ID NO: 8313 - DNA, 464 bp, Homo sapiens
  III.1941 (R18346)
  misc_feature (396)..(396): n is a, c, g, or t
  misc_feature (402)..(402): n is a, c, g, or t
  misc_feature (415)..(415): n is a, c, g, or t
  misc_feature (427)..(427): n is a, c, g, or t
  misc_feature (444)..(444): n is a, c, g, or t
aaagatggcatccttcatactggatgctgtatccaatactttgttgtgtctgtgctaacctgggaactggccacctccattgttctttgcttctgcacaagatccatgaaaatccattgatcagaagaacttcacctgcagacctcttcaagtgacactatgtaggaatccttccaaggaatatctatgtacaatgtatatagctgaaatgctcagatgaacaacatattaaaattaaaaccactgcctattgtaactacactggggcatcaggaataaaagggcctctaggaaattggctggaacaatgggttaatttaaggatatttggctaacacaatcggggtggataattacagttttactggcaaaggaaggcactttcaaacctatttnggtccnttggggacttccnggggtgggccantggtttccccgtttaanggtgggggtcagtgggcctg

SEQ ID NO: 8314 - DNA, 394 bp, Homo sapiens
  III.1942 (R42292)
  misc_feature (171)..(171): n is a, c, g, or t
  misc_feature (243)..(243): n is a, c, g, or t
  misc_feature (252)..(252): n is a, c, g, or t
  misc_feature (336)..(336): n is a, c, g, or t
  misc_feature (368)..(368): n is a, c, g, or t
ttttttttttttttttttttctggctaacagaattttattgttaaatcacagaaactttagtgcaaaacaaaaatcacgaagtccatttaatagcaacttcatgtcctgctggctttgcttgctgtctcctggcaaccagaagtggacagaagcgtgggtgcccaagtggncacagacagcttccaacccccacaccccagcatccaatccacacccagcagacccttcggcatgccgccctntaccagggnagccagaggcttagggagctcgccatccatatttatttgaaaaggtcaaaaggagcatctatgagacaagggaggggtgcaggntgaagcagcgccttcaacagccaggggacatntagggcaacacggagcaggtcacagc

SEQ ID NO: 8315 - DNA, 385 bp, Homo sapiens
  III.1943 (R62792)
  misc_feature (140)..(140): n is a, c, g, or t
  misc_feature (182)..(182): n is a, c, g, or t
  misc_feature (314)..(314): n is a, c, g, or t
  misc_feature (338)..(338): n is a, c, g, or t
  misc_feature (351)..(351): n is a, c, g, or t
  misc_feature (362)..(362): n is a, c, g, or t
  misc_feature (377)..(377): n is a, c, g, or t
ctgccagtgaaaaggggcagccccgccagccccaccagccctagcgactgtcccccagcactggctcccaggcctctctcagggcaggcgctggcagcccaccaagcacaaggccgcccccctggctctcagagctcccngagaacacaagcctccaggagcacggtgtgaagctgggcccngctttgaccagggaaggtctcctgtgcccggggagtggatctagaaacgctcactgaaaacaagcttgcacgctgaaggcattcgatcttcacggagggagccgtattcttgattaaggcatggccgctgtngggatttccttgaagccctgggtncagagattacggnagagggatttnggttcagcccgagcngggacttc

SEQ ID NO: 8316 - DNA, 471 bp, Homo sapiens
  III.1944 (R62793)
  misc_feature (13)..(13): n is a, c, g, or t
  misc_feature (15)..(15): n is a, c, g, or t
  misc_feature (384)..(384): n is a, c, g, or t
  misc_feature (426)..(426): n is a, c, g, or t
  misc_feature (457)..(457): n is a, c, g, or t
ctgggtgcagccntntgttctaacttttgaacaaatgagcgtggtcagtaatgtacaataactcttgagtctgttactttggcctagctaagcccatctggccctcgggcatcctgcaagatgacagacagaagagcaagggcactatcagaaatggaacaggctgccccctactcctcccagcctctaccagtacacagagacagactggagatagagcattcgcagccagttggcatcttggttcttttgtcttctgaaaataaaaataagtgcttgtcttgtctttgggaggtcaaagagaaccgcactaatttatttcctcgaggggggcttttctgggagggagaggatcctcagtcctgttgcccaaggtttcacggntgtttgggccacacggcagggcttttcttctgggtcttggtntgcacgttccagagatgatgggagggttttncttcagcttctttt

SEQ ID NO: 8317 - DNA, 431 bp, Homo sapiens
  III.1945 (H96265)
  misc_feature (12)..(12): n is a, c, g, or t
  misc_feature (71)..(71): n is a, c, g, or t
  misc_feature (84)..(84): n is a, c, g, or t
  misc_feature (86)..(86): n is a, c, g, or t
  misc_feature (144)..(144): n is a, c, g, or t
  misc_feature (286)..(286): n is a, c, g, or t
  misc_feature (393)..(393): n is a, c, g, or t
  misc_feature (414)..(414): n is a, c, g, or t
  misc_feature (419)..(419): n is a, c, g, or t
  misc_feature (425)..(425): n is a, c, g, or t
gcaaattaaaanaaattgagcatgtgcatggatacttttctagtgaacaggggcccggagcagcccccggncccggcgcgcccnancatgggcaacgcagggagcatggattcgcagcagaccgatttcagggcgcacaacgtnctttgaagctgccgatgccagagccaggtgaactggaggagcgatttgccatcgtgctgaacgctatgaacctacctcctgacaaagccaggttactgcggcagtatgataatgagaaaaaatgggaactgatttgtgatcnggaacgattccaggtgaagaatcctccccattacatacatttcaaaagctcaaagggctatctgggatccagctgttaaccaggaagaaatttcagacggcgtgttnaaggattctttcacaagtggntaagnaggaanggggaa

SEQ ID NO: 8318 - DNA, 524 bp, Homo sapiens
  III.1946 (N64030)
  misc_feature (371)..(371): n is a, c, g, or t
  misc_feature (395)..(395): n is a, c, g, or t
  misc_feature (428)..(428): n is a, c, g, or t
  misc_feature (462)..(462): n is a, c, g, or t
gctgctaatgggagtatttgcaaaactctgcacactgctgaaaaaacaatgccatttgtggtattaccataaagccatattctgaaattgcaccagtcttgagtatgacagtcacatctgatatacatgaaaatgtcagtatgcccctgttatgcaaattgaacaaagaagcactcaattactcaatacacactcacaaaatgcagattttacatgtgaaaatagtagtaaaagtgcactgtgatagaatctgacataatattcttgaacggggaacccaacggcttctcattgtgtaaaccagaaatgtatattctctacttccactctcccatcagccatcgatttactttggaggcatggcagcttcncatagagaccaccttttgacattnggttttggtctattccagaaatgggcatgggcnccagggtcaaatgggatcacaggtaaaaagtgcnattgggatcaggggtctgcctctgcaaatctgctgtcttagctaaatgcctcttgcctggca

SEQ ID NO: 8319 - DNA, 470 bp, Homo sapiens
  III.1947 (T84663)
  misc_feature (341)..(341): n is a, c, g, or t
  misc_feature (408)..(408): n is a, c, g, or t
  misc_feature (417)..(417): n is a, c, g, or t
  misc_feature (427)..(427): n is a, c, g, or t
  misc_feature (450)..(450): n is a, c, g, or t
  misc_feature (456)..(456): n is a, c, g, or t
ggtttcctaggcaagatcgacgaactgcgcctcttcccgccggagtgagtatcgtccaccatcactgttcctgctaacgccgcctcagcctgggcctaacacacacaatttccttaggcccctgtcgctcttccccgggccaggctgcttgagtggctggtggctggtggatttacttaagacggttgtgttccaggcctacaaaaaaatgcagagaggcagggcaggggctttttggaattaggaaacactggctgttattcttcgggaaattttttttttccgccttaaaattgtggccaacgtgggtcgtttggctttgggggatttaacggcaagantaaccgcagtctgttacgttcgtattattaggttaaaattcccttttttttaaaaaaactggagtantttgtttcntttgcctttnttggggaggaaagggtaacaaanttattncatgcccgtgttta

SEQ ID NO: 8320 - DNA, 490 bp, Homo sapiens
  III.1948 (T90915)
  misc_feature (5)..(5): n is a, c, g, or t
  misc_feature (6)..(6): n is a, c, g, or t
  misc_feature (319)..(319): n is a, c, g, or t
  misc_feature (407)..(407): n is a, c, g, or t
  misc_feature (429)..(429): n is a, c, g, or t
  misc_feature (439)..(439): n is a, c, g, or t
  misc_feature (462)..(462): n is a, c, g, or t
tgggnngttattttattgagcagaaagttaatggttacacgtaccataacagtagattcttagaggattccaatttcctgtttagtatttaagtgacatcataaaattctcaatatatgatatttactgataatgacatttgaattgtcacttctccaccaataattcttccaaaaagcacaagactattattattattccaattgtctgttttagtagtacactttatcttacttcttagcttctttgaactattttttctttacaattcatccacttaatattcttgcggataggaaataattttcaaaataaaagngagggccaaaaaggggtaaaaaggtccatacacctcctaattccaaatttccaaccatttataaaaatcccttcctccaggggccacnggtgggaaatatccccaaatcngggtatattnttccaaccagggggggaatctcngggggtttttaccccggttttttggcca

SEQ ID NO: 8321 - DNA, 355 bp, Homo sapiens
  III.1949 (T78633)
  misc_feature (239)..(239): n is a, c, g, or t
  misc_feature (256)..(256): n is a, c, g, or t
  misc_feature (337)..(337): n is a, c, g, or t
tttcacttttataaactgcatttattgtacagagtctcttgaagaaagaaaaaaatatgtacagccattcattttcattaacacatatattctgtcctgcaatactggagaggtggaatgtgtctggcacagaaataacccctaggagttataaattagaaaaacaacacttttaaaaaagatttttacttttctggtagaaatataaaaactgtggttcatggggaaaaacattaaanttaaaaagtccaatcanttatagaggtggctttaacacttaaagttttctccctcaaaccaacttgtcaacagcagtgttttaaaatctacatataantaatggggccagcgttgc

SEQ ID NO: 8322 - DNA, 527 bp, Homo sapiens
  III.1950 (T79118)
  misc_feature (380)..(380): n is a, c, g, or t
  misc_feature (397)..(397): n is a, c, g, or t
  misc_feature (451)..(451): n is a, c, g, or t
  misc_feature (469)..(469): n is a, c, g, or t
  misc_feature (502)..(502): n is a, c, g, or t
  misc_feature (525)..(525): n is a, c, g, or t
gttttataaacaaaaataagattgtgacaagggattccactattaatgttttcatgcctgtgccttaatctgactgggtatggtgagaattgtgcttgcagctttaaggtaagaattttaccatcttaatatgttaagaagtgccatttcagtctctcatctctactccaacttgtcttcttaggtgctaaagtcagagcagaaatttatgaaggcatttgaaaacatctaccctattctaaaggggattcagggaaggacggacgttaatgggctcttcatgtaccccttgcctccccccacccccttcttttttttttttttaaacaaatcagtttgttttggggtacctttaaagggtgggtgttgtggaggaaggnggggtgttgagttggcngggtgtgggcaccgggggtgaggccctttctgttaaggtggcccaccgcggggngcccggggaggggggccnttatttgtggcactgagggacaccgcgcggggnactgtggaggttgcttcataccntg

SEQ ID NO: 8323 - DNA, 411 bp, Homo sapiens
  III.1951 (N72431)
  misc_feature (265)..(265): n is a, c, g, or t
  misc_feature (271)..(271): n is a, c, g, or t
  misc_feature (321)..(321): n is a, c, g, or t
  misc_feature (354)..(354): n is a, c, g, or t
  misc_feature (367)..(367): n is a, c, g, or t
gctagcaccatgagcttcaataccctgtggcctaagcagaaacttgaacatcatcttcccaatctggagttccctcatctctcctactcccatctctaagaactctgccttctttccatcattgtagttattcacatctcttacctggatcacggtaatagcttctatttgttttttaaactttgtttttaatttttatttgagatggcatcttactctgtcatccaggctggaatgcagtggcatgatctgggctcactgcaanctccanctcccaggctcaagcaattctcatgcctcagcctcctgagtaactgggantacagggcgcgcaccaccataccccagctaatntttttgtactttntgtagaaatggggggttttgccaaggtttggcaaggctaatccc

SEQ ID NO: 8324 - DNA, 484 bp, Homo sapiens
  III.1952 (H70784)
  misc_feature (355)..(355): n is a, c, g, or t
  misc_feature (376)..(376): n is a, c, g, or t
  misc_feature (392)..(392): n is a, c, g, or t
  misc_feature (411)..(411): n is a, c, g, or t
tggtttctccaaggaaatacagaccaattctgtatatgtattaagcatgtcattttgaaagtttatgaatttagaaattaaaagtcaaatgtttgtttttcttttcttccttttttcaaatgaccttaggattttataacagtttagaagctccagatttgaaatctgcagtaagtgtattttggcaatacctaagatagtggaaagcagcacgatagctattcatctggaaagttatgcaggaatataaacgtgtaggggaggttagaccattcctgggaaagaggagagtttagttgagtcagcctcaaagggcggggcaaatttgccatttcattaacaaagttggcagatncagaacaacctcgcagagganacccctgaaaaaggcnggatgttattaggcccttnggtgggtcaggttggggcctttgcagtcctttcacttaggctgatacccttattagggtttttgttttaactt

SEQ ID NO: 8325 - DNA, 410 bp, Homo sapiens
  III.1953 (H70785)
  misc_feature (390)..(390): n is a, c, g, or t
  misc_feature (401)..(401): n is a, c, g, or t
  misc_feature (406)..(406): n is a, c, g, or t
aaagcaaactccatttctctctccaagtactttttagcttctttgtccaagttcactaatgtaagtttttttcaggatcatcatgagcaatacaacaataaattacagtgaccagacctgccatacccctcaaaaatgccaaaaatgttaaaactaggaataggcttttttagacaaaaatggagaactaatttaaattccaagttaaacaaaacctaataagggtatcagctaagtgaatgactgcaatgcccaacctgaccaccagatggctaatacatcaggcttttcagggttcctctgcgagggttgttctgatctgcaactttgttatggaatgggcaaatttggcccgccctttgagggctggacttcaactaaactctcctnttttccggggntgggnctta

SEQ ID NO: 8326 - DNA, 401 bp, Homo sapiens
  III.1954 (H87107)
attcggcacaggatatatgtttggagactgctcgggaagctgtggtcagtgtgtgtggccacctgtactgttggccatgtcttcatcagtggctggagacacggccagaacggcaagagtgtccagtatgtaaagctgggatcagcagagagaaggttgtcccgctttatgggcgagggagccagaagccccaggatcccagattaaaaactccaccccgcccccagggcagagaccagctccggagagcagagggggattccagccatttggtgataccgggggcttccacttcttcatttggtgttggtgcttttccctttggctttttcaccaccgtctttcaatgcccatgagccttttcgccggggtacaggtgtggatctggggacagggtcacc

SEQ ID NO: 8327 - DNA, 125 bp, Homo sapiens
  III.1955 (H87108)
  misc_feature (39)..(39): n is a, c, g, or t
  misc_feature (48)..(48): n is a, c, g, or t
  misc_feature (86)..(86): n is a, c, g, or t
  misc_feature (94)..(94): n is a, c, g, or t
attgaatttgtattaaaggaggtagtgagggggcggaanactgtaagngtcagaatccatattagactctggggagtgaaaaattnaattaaancagtaagatggggagtgggggaagagtcaga

SEQ ID NO: 8328 - DNA, 457 bp, Homo sapiens
  III.1956 (N70615)
  misc_feature (8)..(8): n is a, c, g, or t
  misc_feature (10)..(10): n is a, c, g, or t
  misc_feature (195)..(195): n is a, c, g, or t
  misc_feature (294)..(294): n is a, c, g, or t
  misc_feature (352)..(352): n is a, c, g, or t
  misc_feature (437)..(437): n is a, c, g, or t
gcaaattnanaaaaaattctttttcggtttttttctacatttaaattttgtcagatgataggtgataaaaggatatttagatggtttcattagcattctttaatgtattagtgagctagaatgcattttcttgtgattactggccatttgcgtttcttcacctgtgaaccatatacatattttttcagttttgtnattttgttataggagctgtacatgtgttaaacctaaaacccttcactgatggatgcatgcattatttcaacacatctttgttgggtgaatattatttangagacactctagcaaaatccatgtcctaagatatctcttcctgagatcctgggctctnatatttaaagggagatgtcccccctggcagcaagaaaagtattagtgcccatggtaaacatggcgtgggcttgtcaaaggatcanatggcacaggacagttcagg

SEQ ID NO: 8329 - DNA, 436 bp, Homo sapiens
  III.1957 (W04937)
  misc_feature (56)..(56): n is a, c, g, or t
  misc_feature (58)..(58): n is a, c, g, or t
  misc_feature (154)..(154): n is a, c, g, or t
  misc_feature (178)..(178): n is a, c, g, or t
  misc_feature (257)..(257): n is a, c, g, or t
  misc_feature (309)..(309): n is a, c, g, or t
  misc_feature (411)..(411): n is a, c, g, or t
ggggtgggcagacgatctccactttgcagaggctgctcttgtgagtggagctggtngngagggagtaggagaggcctcgcatcatcctggcattcaggcccttagccatggagaaggacttgaggtggcttcttaaggtactgggatgcggganttgtccaccagatgcacaggtgtnaggacacgatggtgcggcaagaggtcttgcaagctcagtaccttgctcggcctcccgagccaattcatcctgtgccgcngcagcactatcctggccagctccgtgaaagactctatgatgttgaaattgcncagagggctgacctcaaagaaggtcacacccaggcgctcgggtaggctgggcctgctccctgggcactgctcttgaatgcagatgtaggcgattcccaccangattttagggacacaggggatgttc

SEQ ID NO: 8330 - DNA, 261 bp, Homo sapiens
  III.1958 (AA039478)
  misc_feature (260)..(260): n is a, c, g, or t
cgtctacctatactgagagtatatttacaatagaagaacatactgtatgtgactttgtaaagctagacttttgattaagaaatatataatctctggatggtatttttgcattatacactcaggcacaacgtaaaccttgatggctcatcttgctacaattacggagtttgaaaacactacttacgtatttgtatgacctaattagtcagaggaaatcataccatatgctttgtaaatagcctttgcaggataacctaatng

SEQ ID NO: 8331 - DNA, 446 bp, Homo sapiens
  III.1959 (AA039479)
  misc_feature (435)..(435): n is a, c, g, or t
agtttacaatttatatttattatgcccactgaacccacaaaagcagtgtttaattttacagtttaaagtcacacatagggaaatgctttacaaaataggatattgttcctcaatgaaaatattacagtataggtcccaaacggctcagttcaagtcttttacctgaataacagagctgttgtggaatgcaggctacaagacacagtaatgctttaaatagttgattaagatttgaaggttgccaaagctgagagacattttaaacaagacccgtcttagttttccaagatttttggtttttcaactgcattatataccattgcttctgggaaaattgagggtaataagcagcgtacattttacatcttatatacagtatgtaaatcttcaatgattttctctaccatcaaagcaagtttccagggttaaaaatcngttatacccac

SEQ ID NO: 8332 - DNA, 220 bp, Homo sapiens
  III.1960 (AA057337)
  misc_feature (14)..(14): n is a, c, g, or t
  misc_feature (32)..(32): n is a, c, g, or t
  misc_feature (69)..(69): n is a, c, g, or t
  misc_feature (163)..(163): n is a, c, g, or t
  misc_feature (195)..(195): n is a, c, g, or t
tgagaccaagtctngctctgtcacccaggcangagtgcaatggcatgatctcgtcttactgcaacctcngcctcccgggctcaagtgatactcctgcctcagcctcccgagtagctgggattacaggcatatgccaccatgccccgctaatttttgtattttnagtagaggaggggttttgccgtgttggccagnctggtctcgaactcttgacctcagg

SEQ ID NO: 8333 - DNA, 206 bp, Homo sapiens
  III.1961 (R25924)
  misc_feature (40)..(40): n is a, c, g, or t
  misc_feature (43)..(43): n is a, c, g, or t
  misc_feature (124)..(124): n is a, c, g, or t
  misc_feature (130)..(130): n is a, c, g, or t
  misc_feature (172)..(172): n is a, c, g, or t
  misc_feature (177)..(177): n is a, c, g, or t
  misc_feature (202)..(202): n is a, c, g, or t
agcgtacaagaccatgctggagaatgtgcagcaggagctngtnggagagcccaggcctcaggcacctcccagcctacccacacagggccccagctgccctgcagaagatggccccccagccctnaaaganaaagaagagccacactacattgaaatctggaaaaaacatctngaagncatacagtggatgttaccctggganctag

SEQ ID NO: 8334 - DNA, 430 bp, Homo sapiens
  III.1962 (H16179)
  misc_feature (25)..(25): n is a, c, g, or t
  misc_feature (224)..(224): n is a, c, g, or t
  misc_feature (301)..(301): n is a, c, g, or t
  misc_feature (395)..(395): n is a, c, g, or t
  misc_feature (420)..(420): n is a, c, g, or t
  misc_feature (425)..(425): n is a, c, g, or t
tttttttttttattttataataaanagattttgttttatttaatgtaaccttcaagaatttcaacacacaaaaatgcgggggtgggggtgttcacaattttgataagcacagttgtaaatagaaacattcattcatttctcataagattataaatatttgatactggaactgtaaaatgcacatgttttataaactaaaacaacaaaggaaaacaaaaaacagnaaaccaactttgacttcctgctaaaaaggcatgtcatttcattgagtttcctaaggcaggcagatgggttattcagnacttttaaattacaacttttgtttttatactttccttttttaaaagggtttacactattatggtacaacgtaaaactattactggcaatggaantaagggggtttaggggcaaggggcnaaggntcacc

SEQ ID NO: 8335 - DNA, 507 bp, Homo sapiens
  III.1963 (N58518)
  misc_feature (52)..(52): n is a, c, g, or t
  misc_feature (389)..(389): n is a, c, g, or t
  misc_feature (415)..(415): n is a, c, g, or t
  misc_feature (434)..(434): n is a, c, g, or t
  misc_feature (456)..(456): n is a, c, g, or t
  misc_feature (504)..(504): n is a, c, g, or t
aactttaacttttttattttagttgcagctaaagcatttattggtataacanacacaaggactgccacccctgctaacactgctggacccagctcttgccaaaggagatatacggccattaggatttgaaaaggggcagaccagaggagattgaggtttgctgtcaagtccatgagttgctgacatcaagttaataatttccccagtggaaaacttttgtcgagaaacatttgataaaagtaaggcctttttgtagatcaagtccatttacagctgtcttaacttttgctgaggtgagcatgttaaaacgttgatattgctgaagaatcagagtttgcaaaaagactacaacaagaagttgccactgcataagccatagccattccagnccaaaatctgagctgtgttcccaggnaaatggtaatttggcctcnctatgagtggggcagtgaaggncaaaatatcagcaacaccttgaataagggcacttggatcaggatgggntta

SEQ ID NO: 8336 - DNA, 171 bp, Homo sapiens
  III.1964 (N78108)
  misc_feature (105)..(105): n is a, c, g, or t
  misc_feature (166)..(166): n is a, c, g, or t
ctgactctgccggggcggagtgcgtgtcctcccaccgtgctggcgctgaactgactgtccgctgccaagggaagtgacagccgcagccgggctctcagccagcgnccgggcgccccgggaccatgctctccagtacgcagaacgcggggccttgatacacagagtnattaa

SEQ ID NO: 8337 - DNA, 473 bp, Homo sapiens
  III.1965 (N23940)
  misc_feature (436)..(436): n is a, c, g, or t
cttttagaattcacatgcacgtttaatacaaaaatctcatactgcttaggcagtgcaaggcagagcacagagctgtgggaaatcagagctgatgagaagcccgtcgtctctttcccgttgttctctctccgcggccctcaccccaccgccagccgggcaggtaagaacctttcagttgccagaatcctccgctgccgctcacgatggtggcgagtcccttcagcgtgaagcccagatgaagcgttttgcgtttgcagtcatttccatttatttttatttccagcctcttacatctccgccctttattgaaatccctgttctagaaatgttggattggtcttcattttctctaaataaacagtagtaaagtgtactgtgggtagtttaattttgatgttaaatgtattttagagaaaagcggcaaaaaatatgtccnatttttttctcccttggtcaccagaagtacgagataa

SEQ ID NO: 8338 - DNA, 199 bp, Homo sapiens
  III.1966 (N35289)
  misc_feature (5)..(5): n is a, c, g, or t
  misc_feature (120)..(120): n is a, c, g, or t
cgcgnaagtaggcagagaacaccttggctgactaagaggagaagagcaatgaactttttcctctgcctcaactcctctctcttccctagagaggatctcagaggagccccccactaccanccagagctgcattgaaagcaccgccctgttgcagtgggggactctggaagacatcagtgtgtccatttccttatctacc

SEQ ID NO: 8339 - DNA, 450 bp, Homo sapiens
  III.1967 (N32981)
  misc_feature (1)..(1): n is a, c, g, or t
  misc_feature (15)..(15): n is a, c, g, or t
  misc_feature (195)..(195): n is a, c, g, or t
  misc_feature (235)..(235): n is a, c, g, or t
ngagatggggggctnctgctcggagaaggaaaccagaggagccaccgagagagttcatggctctttgggggacacccctcgtagtgaagaaaccctgcccaaggccacccccgactccctggagcctgctggcccctcatctccagcctctgtcactgtcactgttggtgatgagggggctgacacccctgtagngcttacaccactcattggggatgaatctgagaatcttgangggagatggggacctccgtgggggccggatcctgctgggccatgcacaaagtcattcccctcttcccccagcaagggggcttcctgtcctaagccgggccaagatgtcaatgacaggggcgggaaaatcacctccatctgtccagagtttggctatgaggctacttgagtatgccaggagcccagggagctgcagcagcagggtctgaacccccg

SEQ ID NO: 8340 - DNA, 175 bp, Homo sapiens
  III.1968 (N62548)
  misc_feature (145)..(145): n is a, c, g, or t
  misc_feature (166)..(166): n is a, c, g, or t
  misc_feature (172)..(172): n is a, c, g, or t
tttttgaatgccaagtctcttctgtactttcttttattaacatcatagtctttgcatcaagatacatagcaatgatagcaggtttctttttaaagcttagtattaaatattaaatatctttccccatttaaatttttacattacnccggccaggaaaaaaaaaaanttaaanccc

SEQ ID NO: 8341 - DNA, 247 bp, Homo sapiens
  III.1969 (N79216)
  misc_feature (32)..(32): n is a, c, g, or t
  misc_feature (133)..(133): n is a, c, g, or t
  misc_feature (192)..(192): n is a, c, g, or t
  misc_feature (194)..(194): n is a, c, g, or t
  misc_feature (195)..(195): n is a, c, g, or t
ggccactcctaagcaccggcagacaagagcangcgtgttcctgggacttggcttgagtggcgtcgtgcccaccatgcactttactatcgctgagggctttgtcaaggccaccacagtgggccagatgggctangttcttcctcatggctgtgatgtacatcactggagctggcctttatgctgctcgaattncnngagcgcttctttcctggaaaatttgacatatggttccagtctcatcagattt

SEQ ID NO: 8342 - DNA, 408 bp, Homo sapiens
  III.1970 (AA974577)
tttatgtgtagcagtgttttaatctcaaagggctgtgtacatacagacgttggcgtttatgttggtaactgtgccgcagtcatctcatctgatctctaaaatgccccactcttgctcccctgacactgctgagaacttgcatatcttagctgggacacttctggtgtctgtctttcctgcccttcgctgtcttgaagcccaaacagaagtttctgagaacgagactgtagacagatgagacatgcttgaaactctgcgacttctgcctgcagccagcatgggttcctgcaaacaagggcaacaagcagctcaaagcaagaggctttagaacatttaaagaaagtgttctttctccaaaggtgtagtgagtgctcgcctcacgctttcctttagtggcgaacaatagtt

SEQ ID NO: 8343 - DNA, 323 bp, Homo sapiens
  III.1971 (AA869004)
ttttaggggtttataagattagctatttaatattttttaaagataggctttcatgagttcaactacgtttttcattgagaaatctagacatgcatgaacataggagaaagtggcttgcaggcatggaaggctgggggctgtgtttaaacctgcatgcccatgttgcctgatcaaaatccttcacaaacggtttcttcatgagaatctggtctttcatcatggcggtcaccttagtcccatgcttagggaggccccagtgaaaaaggcctcttccagaaatgcccagcatcaggaacaaggactcttccaaaaacactcagtat

SEQ ID NO: 8344 - DNA, 455 bp, Homo sapiens
  III.1972 (AI089524)
tttttttttttttttcaggtgggaattaatctactttaatgcagacaaggtgaattagcaaccatagcatggcatccaagccccaaatggagcttcctgtaacctgctcctggaattgagttcatccagagaactactctccctaggcaggggcagtggcaacagcagagcttaggctgctcaggtgagctcacctctttggcagcattaagcatatattaagagaagcctcagatgtagaatacagagaggagaacctacctgctaaccaagcaggtggagacaaccaaataaaaactaaaacttggctgggcgcagtggctcatgcctgtaatcccagcactttgggaggccaaggtaggtgggtcacctgaccaggagtttgagcccagcccgagcaacatggcgaaaccccgtctctactaaaaatacaaaaaaattagctgggcatgagg

SEQ ID NO: 8345 - DNA, 367 bp, Homo sapiens
  III.1973 (AI241102)
aatgctgtagttattttaatttggtggtgaaatcagattcttggatctgacagtatctttgagtctcaatagtttcttttcaattccatagatagacctaagggtagcgggaatggggtacatcctctgatcctgaggtttgctctccttgtttgttaaataatttcccccataaaagcaaaatgtaaaaggcgagggggaaaagggtgatccttatcctcttccattttttgaacaggatccataaatctacaggtttttattatttttttttgagggtgcttaaatgtcaagaatattatgctatggattaccactactgcatacacatcgcatacatcaaaaactcaaagcaagtaaaaagact

SEQ ID NO: 8346 - DNA, 334 bp, Homo sapiens
  III.1974 (AA005011)
  misc_feature (2)..(2): n is a, c, g, or t
  misc_feature (14)..(14): n is a, c, g, or t
  misc_feature (283)..(283): n is a, c, g, or t
  misc_feature (303)..(303): n is a, c, g, or t
  misc_feature (321)..(321): n is a, c, g, or t
anttcggcacaggnggacttctagatagacgcactcttataatataaggtaatgttataacagacaagggctagaatcagggtacgtgggtgaataggtagttatgtccctcggctgctccactgacatttcattttttagctcttctcttaaaataatatttgctgaagggagcactgggaaggccccatacttcctatatgactggagcacggaattctgcctcccaggggctctggggtgaggggtatcctccctgcaccgctccgggggttaggggtgncccctgagtttgtgccttanctgaggtctgcacaatcntgcacaagagctc

SEQ ID NO: 8347 - DNA, 330 bp, Homo sapiens
  III.1975 (AA005059)
acaaatgtttataacagctttatttgtaataacccaaagctagaaacaatccaaatgtccatcaacaggtaaatgaataaatgaattagtctatccatgtaatggtctactactcagcaataaagaatgcactgttgatacacacaagaacatggatgaatgtcaaaaagcatcatgctgagtaaaaaaaaaaaaaacaggcaaaaaggaacacatactatattattccttcaatacaaatttctagaaaatgtaaactcatccagaaagacaaaaagcaggcaggtggttattaggggacacagagaggaatgggtaacaaaggggcac

SEQ ID NO: 8348 - DNA, 319 bp, Homo sapiens
  III.1976 (AA492138)
gcgtcgacttaaaaaattaaaaaatgttaaggctgggagaattttgagaccttaatacaaggtagtatattgtatcaggcttgttctgtgcctaggcttaattaccagatttctgtgcttctggacttataatgtatagttgtcgttttaatgctaacattctgattggatacgtccagcacttcacttgggtaaatcacaatctttctttcctccctcacaaaggacactttgaaatgatcctaaaataccttcttattcagatagatagaacagctagtggtagaggccctaacaaaaaaaaaaaaaaaagtcgacg

SEQ ID NO: 8349 - DNA, 390 bp, Homo sapiens
  III.1977 (AA862999)
gacatttttcagtttatattgtccatggactattacaacagaagcattttcctaaggataaagctacatataggaatattaattacagatacagctcattggtttatgcagtcccttcctaacaatttgaggtgattcttgtgatcctggaatctaaacatggcatcagtatcatgtcctggacagaaccagacatatggtataggaggggtgcaaaccttctggatgttacataatagcagcagcaggtaggagacaaaatatcatatggttttcataaataggaggagatacattctccttatgttgtgaacatttaaaattcagtctgttgtcaaggcattgggcaggactggtgacattctgtctttcagactctcagctctagtg

SEQ ID NO: 8350 - DNA, 400 bp, Homo sapiens
  III.1978 (AI262860)
ccacagctagtgcaatttatttttcttagtattgtgcaggagttaatatggccagaaggaaccagcattcctttattcacccaatcactcatgaaacattactgggtatttagcagatattcaatcaatatttgttggatgcatatcaatctgctaagtgcctgaagttgtgcagactgagatgtaaaagagcttgtcacgcctgtgcacagcgcagtcggaggagagtcagaatgtctctaggatgaaggaatgagcagtggggagcgtggctggtccccagcagcccagacttggggtccttgtggcagcatgagatgatgtcattgctggatggatcccccgaggaaagaatgagcaggtcttgattcctctgctcggcggccagacgcttcacctg

SEQ ID NO: 8351 - DNA, 467 bp, Homo sapiens
  III.1979 (AI733790)
ccacagttagtgcaatttatttttcttagtattgtgcaggagttaatatggccagaaggaaccagcattcctttattcacccaatcactcatgaaacattactgggtatttagcagatattcaatcaatatttgttggatgcatatcaatctgctaagtgcctgaagttgtgcagactgagatgtaaaagagcttgtcacgcctgtgcacagcgcagtcggaggagagtcagaatgtctctaggatgaaggaatgagcagtggggagcgtggctggtccccagcagcccagacttggggtccttgtggcagcatgagatgatgtcattgctggatggatcccccgaggaaagaatgagcaggtcttgattcctctgctcggcggccagacgcttcacctggaacacaagcaggaccacgtaagttgttgctggacacagctaaacaggctcccttcacctgccaaca

SEQ ID NO: 8352 - DNA, 435 bp, Homo sapiens
  III.1980 (AI792591)
caggaaagttcgtgctgctaggcagaggaactgcagcttgttggcaggtgaagggagcctgtttagctgtgtccagcaacaacttacgtggtcctgcttgtgttccaggtgaagcgtctggccgccgagcagaggaatcaagacctgctcattctttcctcgggggatccatccagcaatgacatcatctcatgctgccacaaggaccccaagtctgggctgctggggaccagccacgctccccactgctcattccttcatcctagagacattctgactctcctccgactgcgctgtgcacaggcgtgacaagctcttttacatctcagtctgcacaacttcaggcacttagcagattgatatgcatccaacaaatattgattgaatatctgctaaatacccagtaatgtttcatgagtgattgggtgaataaag

SEQ ID NO: 8353 - DNA, 550 bp, Homo sapiens
  III.1981 (AA279536)
gactgataatccaagacttctgagcatgaatcttgaaaacccctcatgtaattcagtgttagacccaagagacttgagacagctccatcagatgtcctcttccagtatgtcagcaggcgccaattccaatactactgtttttgtttcacaatcagatgcatttgagggatctgacttcagttgtgcagataacagcatgataaatgagtcgggaccatcaaacagtactaatccaaacagtcatggttttgttcaagatagtcagtattcaggtattggcagtatcaaaatgagcaattgagtgactcctttcgatatgaattttttcaagtataacttgcaagatttaaatccttttaaatcttgatacccactatatagatgcagcgattttgtatttgtctaactggggatataatactatatttatactgtatatataatactgacttgagaatatatactgtatttgaagatatagacacttttttcaagggagaagcatccactttggacatagcgattccaaatttggaactgtcctaaaaag

SEQ ID NO: 8354 - DNA, 409 bp, Homo sapiens
  III.1982 (AA279919)
gagacagagtctcactctgtcacccaggctggagtgcggtggtgtgatctcagctcactgcaacctctgcttcctgggttcaaacaattattgtgcctcagcctcccaagtagctgacagtacaggcacgtaccaccatgctcagctaatttttgtatttttagtagagacggggtttcaccatgttggccaggctggtctcgaattcctggtctcaagtgatccacccgccttggcctcccaaagtgctaggattacaggtgtgagcccctgcgcctggcctctgagttgtctttttatgacagcttccaattttgtattcgctatgtccaaagttgtatgcttcttccctgaaaaaagttttttatattctcaaatacagtattatattctcagtcagtattatata

SEQ ID NO: 8355 - DNA, 420 bp, Homo sapiens
  III.1983 (AA443923)
tttttcaatgcattgtttattgagtactaactagctttgggcccaggctctgggttagcagcatgcgtgaaacaatcagaaacaatcatgagcgcctgcccacatggggcatacagtctggcagggcaagactgtagacacagaaataaatatccgattataagctgtgattagaggcatgatggaaaagagcaaggcttcctgagagaaacagggcgagcacaggaaaacctctctgagacagtgacatgaacttgaaacttgaagggtaaacaggagtgggcacccccaaaggggaaagaaggaatcttccaggcagagagaaagagaaaagacccaggcacggtatagaccagaggaaatttgaggcccccacccccccgcccccccccccccccccccccctcccccaggaaggcg

SEQ ID NO: 8356 - DNA, 414 bp, Homo sapiens
  III.1984 (AA444102)
gtctcgaacaccgtgaccgtcgtggtccacccgcctcggcctcccaaagcactgggattacaggcgtgacgacccggcctggcctagaatgacttttaaaagatcaaattaaatcaggtcactcctttgcttacaacgcagtgcgttgtagacggtacaccccatgtctccacagggcatacagcatccgatttaatctggatccattccggcgccttcctctcccagtcacccagaggccccaaccccggcggccctttcttcctcaaatgtcctcggctctataccgtgcctgggtcttttctctttctctctgcctggaagattccttctttccccttttgtcttgcccactcctgtttacccttcaagtttcaagttcatgtcactgtctcagagaggttttcctgtgct

SEQ ID NO: 8357 - DNA, 475 bp, Homo sapiens
  III.1985 (AI131467)
ttttttctcttctacttttatttgctgttttgaaaaatatacattctgtttttaattgtaccaataaatagcttttaagtttacctttatgcttattttttaactattaaagtgaggaatggaaccgcaattcgagaatttctatttaaaacagaattaatcttgctctcctcaacatcagcccacggttccacccccacccgcttctcagtctttcttgtttgattgaaaacaacatacagcatattccagtagaaacagaaccgcacatacaatcctaaatattataacagccacatttaaagatggcagaaggaacaggtgcaattaatttaacaatagatcttatttaacccggtacatccagaatgttaccatttccacaactggcatgagccacatttcaagcactcaagagccacgtgtggttagcggcctctcacactagcatgcagtaaagtattagaatattatc

SEQ ID NO: 8358 - DNA, 446 bp, Homo sapiens
  III.1986 (AA504115)
ttttttttttgggtcgatcaaatgcttgagtttattaacatgtctcccaagtcttttttactgggagtttcagggtggtctctgaaatccattgctgttgagctccaactccaggccccatggggttgcaccaagctgctcaacctcacctgtttcttgaaattttgctgccttccactaggcagatgggtccagcaggagacattggagcaccaaatggaaaagctcttccttccttcccctcttcctgtacatcagaaagaatgcattagaaactcaaggagtgagcatttgggcttcctaagggtgagacagtgtggggctcctgtggggagatgggtactcctgtacccagtgtggcctcctgctcccaccgctttccagctgtggggcttttccttgtggaaattactgtccaagtttgatttttccatctgtaaaaggag

SEQ ID NO: 8359 - DNA, 403 bp, Homo sapiens
  III.1987 (AA504373)
gccctgagaaatcacagctttggtgcaagaggtgaagccgaactggtaaaagatcaaagtgaattcagagatcaaactgtactagggaaaggagcagaggctgagatcttgctgccagcgtgacctctcacagagtggcccagcagaggctgtgcagagatggccagagccaggacccagccctgtggagcccctgggcacatgtggtcccgagtgaagccgtgcctgttgctctgaacaggtgggatcaatctgtaggtttttccacttttcacagagtgtggctctctttaggtctgcactccctctctgcgcagggcggacctccctgggctctgcagcatgatctcctgtcccaagacagtcgtgctcttggacagttagcttctgtcattaggaagtt

SEQ ID NO: 8360 - DNA, 375 bp, Homo sapiens
  III.1988 (AA931478)
tttaaagaaaaaaaaaacaaacggctgtttatttcagtcaaataaaatgttacgtgctattccccgtttcagcctctaccactttgcccaacaaaaagatgcccaaggtttctctagggcagttcacaatggcttctgcttcctttgcccgcctcactcctattctctctttcaagcacgtttcagtagatcacattttgaagaggttgcttgtgattctgaaagctgtccagttccataaaatataccctcttcatgtcacaggtgatggccaccatttggcttctttggatctaatgagatgagtatcaacttctgcccctccatctgtttcctgcatcaaccatcttgaccattactgaatgttgtaggaga

SEQ ID NO: 8361 - DNA, 506 bp, Homo sapiens
  III.1989 (AI792953)
gcacgaggaattttactacttttgagattgccccaatgtacagaattatataattctaacgcttaaatcatgtgaaagggttgctgctgtcagccttgcccactgtgacttcaaacccaaggaggaactcttgatcaagatgcccaaccctgtgatcagaacctccaaatactgccatgagaaactagagggcaggtcttcataaaagccctttgaacccccttcctgccctgtgttaggagatagggatattggcccctcactgcagctgccagcacttggtcagtcactctcagccatagcactttgttcactgtcctgtgtcagagcactgagctccacccttttctgagagttattacagccagaaagtgtgggctgaagatggttggtttcatgtttttgtattatgtatctttttgtatggtaaagactatattttgtacttaaccagatatatatttaccccagatggggatattctttgtaaaaaatgaaaataaagt

SEQ ID NO: 8362 - DNA, 355 bp, Homo sapiens
  III.1990 (AA757870)
cggtagagatggcggtggtggggtggtctcactatgttgcacaggctagtctcgaactcctgggctcaggtgatgctccttggcttcccaaagtgttgggattacaggcatgaaccaccgtgcccagtgaggaattattcagttaaacccaaagccatgagatgtgttcagtaaaactgaacactggaaggatatttatttcggaccagtttttgactatgtccctagagaacttttgtggatcctttatgtttgtttggtttgtggtttttgtttttgagacagggcccttctctgtccctcaggctggaatgcagtgagactttgtcccagaaaaaaaaaaaaagctgggtgc

SEQ ID NO: 8363 - DNA, 203 bp, Homo sapiens
  III.1991 (AA599563)
aatgcaatcttctataagaagtaatttcaaaagccaaacaatctaacattaaatgggatttcctctgagactgactttctctattagtttctttgtttgttcctcaatcatttgcaatatcagaattactacactggtaatcttcattataaaatgtgatcctatcttatttaacatagcttgactttctgtaactatttcag

SEQ ID NO: 8364 - DNA, 389 bp, Homo sapiens
  III.1992 (AA652424)
aaaacgactgcatgatatgttttcaggctcacacatttaaaaaccgtgactttggcaaagagtaacttcattctgctggggaaaaaaatttaaatggcctgagtccggaagctcgccagggcagaagcgcagggtcgctccgccgggctcgccgggccggggaccccccagccacccgccaccacggcggggagggcagggtgctgactccagggaccacgacagtcggccccggtggtggggattccgcgcgggacccacgcgggaacaaagaggcggctggacggcccagctctccgcacccggaaggacctgttccacctctccggctcccgtacccctctatccgcatctgagtgaccagatcccactgcagtcaacagcccgcg

SEQ ID NO: 8365 - DNA, 445 bp, Homo sapiens
  III.1993 (AA906199)
tttcacagttttttttttattacatttccaaggcttggtagttgaaactaaagtgtggggctttttaattgaagagatatttttattactgccattctttgtgaggttagatgcttaataccaggctggctttccattacactaagaaagctgctgtgtgtcatctgcagaataactccaaaattgatttaattattaattttttactctctttcttccttttcccaaacaggtatctgggcaaagactcctgatcctcttgaaagaatgctagaaaatatgtgaagaatgggtacagcagagagaaactagggactatgccaacagatacgtgaggcattatattgtccacacaataaagtagcaagaaaaattagttcctgaagaacaatccttacagcttcctgaagaccaatcattatggccttttatttcccatttattt

SEQ ID NO: 8366 - DNA, 338 bp, Homo sapiens
  III.1994 (AI016274)
ttttctgattttagcacaattccagttttaatgttcaaatcaacagcaaaaattatgatggatagcaattcattctcactaaaacacagctaatacatgttccttaaatcatgaaggtaaagtggaaaaactaaatagtttgatgaccttagagaaatcatttattctctcttatactcagttaaatgggagcctggttatcacaatagagatgagtaataatgaaggtaaaatgcctggtaaaatgcatcacagtaggcacccatcttattatacacatgtcaataaaaataagcatctattttttaagggaagaaaagaaatgcttcttaataaag

SEQ ID NO: 8367 - DNA, 417 bp, Homo sapiens
  III.1995 (AI187389)
ttttcaggagcaaagcatttaatgtaggcagctcacaaacagaaatttatcttacgcggtgggggggtgtgtgtgtgtgagagagagagatccctcatgcccccaagttcaggtggagcatttgcaaccttggtagtcacagcctcctggagaagagtcctcccattcattagaatgagagatattttactgggagcagagcttttctccatgagttctgaagggcacctccatccaattcctctatcctcagaggttctcactttgattcagtgataatctcctgagctttcccttccatttctgagcattcagccctggccaggcatcctccagaggcttctccaagcttccttgctcaggcctccctccctgcctttctcaacgctgacatgatcttctccattaccaagactg

SEQ ID NO: 8368 - DNA, 296 bp, Homo sapiens
  III.1996 (AA431352)
tttttttttttcacatttactagcttattataaaggatattacaaaggataccgatgaacaccagatgaagagatgcataggacaatgcatgtgggaaggagtgtgaagcctccatctattccattccaatctattcaggctctataaagtttatattcaacctatatattcttatttgtggctctcctttaaacacttttcttcccttgctcagcattgtagaatccaatattgcacaaaccgagtctggagaattttgagtaggatgagtcatcacacagtcctaccacacagc

SEQ ID NO: 8369 - DNA, 447 bp, Homo sapiens
  III.1997 (AA431637)
caagaaccccaggtattcctaatcgcaattgtttaagtctttcgcagtgttaaccaccagacatgtgatggattaaggactccagattattccagttcccagctgtcttagtcagggttctccggagaagttatcacatgattacagaggctggcaagtctgacgtctgcagggtagaccagcaagtcagagacccatggaagttgatgttgcagctcaagtccaaaggcaatctgctggcagaatcctctcttctgtttcctcagtgtgtttttacttaagaaactgattggatgagccccacccacattatggagggaaattgccagtgctctggatgcaaatggatttttccttaggaattcagagttgctgagttttgcatcaagactgaaagaggccaaaaagagaagctgtgtggtaggactgtgtgatgactcatcctac

SEQ ID NO: 8370 - DNA, 382 bp, Homo sapiens
  III.1998 (AI206722)
tttgcaatttcaaaaacatttattgtgtacctattaaatacaaggtgttgagagccacatagtagaattagggataggggccctagagatgtggtatctagcagagttgatccaaggctcagctgggaggcagggggtgggggatagcgcccatactgatctcccctcctgggcagtactggtgcgataccagcgggaggatggcaaagtccacgccgtgaacctacagcaagcgggcctggctgatgggcgcacacacacagttctcctgcgactccgaggtccctccagacccagccctgccctacatctctacgtggactggcaactgggtgaccaacatgcaggccttccagcactggcccccattcctccagcggag

SEQ ID NO: 8371 - DNA, 249 bp, Homo sapiens
  III.1999 (AI220279)
ttacaatagaaaaattgttctttatttccttcaaagaaaacaaatttgtggctgactacttagcagagcttgtcccgtcgccgtcccgaggctgtttgcccttgggaaggaggggcggcccgtccctggccctgcaggcgtccgcgcagccagatggtcacccacacgtttcctcaggcgtggaatccaaacaccagacgtgcacggagcctggtgaaaggaaggctgttctcaggcccgcggtgcacg

SEQ ID NO: 8372 - DNA, 434 bp, Homo sapiens
  III.2000 (AA398813)
tgagattatctgagaaacttgcaaaaaggataccaatggtcagggagtacctcagaccaactcgatcagatttctggtggttggcatggggattgggattgtatggaaatgttctccaggtgactttaatagcagctggccaagtctgcatttgtggaaatctgcagtatttgaagtttggaggagatcaatttttcatcctttccttcgtgggataaagaatatttcaaccacctctggagaccaaagagttctgagaagttttgaaatagcttgggaaatacaccacgtgcttcacacttcatttttctcctctctctttcattgtttgacttaattaaaatattgtaatgcaagaaggacagatgaggcaaacgtttagagaaggaaaaggaaatgggttcatgtttaaactgactctgagcaagcatggc

SEQ ID NO: 8373 - DNA, 345 bp, Homo sapiens
  III.2001 (AA435844)
tttttttttttttttggtgctcacaggtattttaatcacttctcaggcaggaagaacattttgagtttaccttcctacatgctcagaattctttcaaactaccatcgccatgcttgctcagagtcagtttaaacatgaacccatttccttttccttctctaaacgtttgcctcatctctccttcttgcattacaatattttaattaagtcaaacaatgaaagagagaggagaaaaatgaagtgtgaagcacgtggtgtatttcccaagctatttcaaaacttctcagaactctttggtctccagaggtggttgaaatattctttatcccacgaaggaaaggatga

SEQ ID NO: 8374 - DNA, 335 bp, Homo sapiens
  III.2002 (AA634517)
tttagtataaaatggactttatttaaataaacctgatcacattgtaaatatcttaagaagaaacagttttctttgtatcatactgtaatgttagtttgcatgaaaagctctgtggtgcagtggcaaacagggctaaggatgtttgctgatgtcgcagtggaagtattaggtattgcattgtaagtaaaacatacacagtaaaagttcacatgtctgtaaactatccccatattattctaaatttcatggattttcagtctgaactagaaatccacagggatcctatcacttgtaaacctggagctcgctcctgtcttcaccctgtctggctggtg

SEQ ID NO: 8375 - DNA, 316 bp, Homo sapiens
  III.2003 (AA844072)
actgcaccagcgggccgtgcgtccccctggaatgagacccagtcacgcgcggtgtcccgggccagcccgccccgccccctcgccctctcacctacccggcagtggccgcgggggacgcaggacaggcggggggcttcgcggggggcagggctgcggggcgcggaccagaggaggcctctgcgacgctgctcagcaagccagagcgtccagggtgggcacagggcaggctcgcggagagaccaagtggagcctcagggagaaagagggcacccaggtgggcttggggaggaaggacctcaaggaggggctgtcctcg

SEQ ID NO: 8376 - DNA, 435 bp, Homo sapiens
  III.2004 (AI191944)
ttttttttttttttttgatttttaaatgctttattacattaactttagtatcattagcagatgaatataatcagattaacaaactggtttggccacaaggaaaagaaaaaacatttctgaagcttcacaaaactatgtgtgtagtgtgcaaactagaaccagttatactttcatcacttcacagaacacaagtagtgtggtgcatcaagagatgttccactgctgcaccatcacctccaaactgtagaggagagatgaaggcaaactttggaggaatttccaaggcaactgcagtcaaacattatctgtaaaactgcaggtataaatggcattatacaaaagctcaaacatccttcaaaacttggactattgaagtctacaattaaatttcaatttttttaacttacaaggaaatcatactcatttaagatacag

SEQ ID NO: 8377 - DNA, 388 bp, Homo sapiens
  III.2005 (AI223109)
  misc_feature (303)..(303): n is a, c, g, or t
  misc_feature (312)..(312): n is a, c, g, or t
  misc_feature (327)..(327): n is a, c, g, or t
gcggccgcttccatcacgatgtacagtttcccgttgcacacctcgatgaactcgaagacgtgcacgatgtgcgggtgtcgcacgccccgcaggatggacagctctcgcggcaggaacttgttgacgaagtccgggggcgctcgccgccggtccaccaccttgatggccacggtacccttgtacttcttggatgtggccaccttcaccttggagtagctgccctctccaattgtgcggcccagcttataaccgagttcgctcagaagtttgtctcccgacatggtggcgcctagggcgcacggngggcagganggcggctcctgcggngggcggccggactccaatctcgggtctaagccatggcgcttggcacctacacccctcgtgc

SEQ ID NO: 8378 - DNA, 426 bp, Homo sapiens
  III.2006 (AA885465)
ttttatttagacaataggtttttattgatatcactcctttgtatacttaactaggaaaataaggcaaaaacaattggtctcgattcctctgtgcttcttcagggtacgtctgtcttcccagtcaccgctccaagcaggactgcacggttggcctccttgtgccacatcctttcctgtggcctcaggggctgaattgggggcgttgtgagggtccccaccaacgtctgccagcggtgtctgtcccacaagtttctatgcagacaaggagacaatgcagccaggcgtgtcctgaatccagaggtggtaaaatggggacaaacaggcctcttagagctgggaacacgtggtgtgtggcatctgcaaaacagcccatccctaaagcctttctctgttctgcgactcttttattccagaggcgggaaagtt

SEQ ID NO: 8379 - DNA, 293 bp, Homo sapiens
  III.2007 (AA991286)
tgacctgagagactttatttacataagacaatctttgttcaccatgcagttcctctccttttcctctcataacttgtcatcacctccccttcaagcccctattcattttatgctatgaaaccttcaaccatctgcctcctcctttgagtctcatatttttctgaggcttccatttgcatgtatgtaattaaaatggtctttctcttcttaatctgtttattgtcagttcatttcagcagacttaattatcaaacctccagagggaatgtttaagcttccctataacccccatg

SEQ ID NO: 8380 - DNA, 521 bp, Homo sapiens
  III.2008 (AI733489)
tgacctgagagactttatttacataagacaatctttgttcaccatgcagttcctctccttttcctctcataacttgtcatcacctccccttcaagcccctattcattttatgctatgaaaccttcaaccatctgcctcctcctttgagtctcatatttttctgaggcttccatttgcatgtatgtaattaaaatggtctttctcttcttaatctgtttattgtcagttcatttcagcagacttaattatcaaacctccagagggaatgtttaagcttccctataacccccatgggaaacaacttgtatcaactaggaactgcttacttgcagttccttttgcctttagtcttacaaactccagtaatttccaaagttacttagatcagcacctttcacccctactcttttgagtttgtttcctacatttgtactaatagttatgttctcttgtcacagtctgcattcctgtgattccctgacttcttaaatgattaaaattgtttacataaaattttgacc

SEQ ID NO: 8381 - DNA, 625 bp, Homo sapiens
  III.2009 (AI792148)
gtcaatcactgagtctttgaatgttgccatgaaagaagtatttcactgggtgctgcagccaaggagaatgggagataaagtctcaaatccctgaccaactacaactggggaggcttacatagtgagggaaggaattaaggggggtaaagaagcaattatgatgaatgagggggtctggcatcttatttcgatgtggtgatctggtgagtttaagtcccttgcctgaggatcggttccctgagggaggaactcagatgagacaaatgtaaatttcaagttttaagacctgaagggtcaatttccatgtgtgttccaaaacttttaaatgtcatttctatgggacagttggaacagtttcacttctaggtatttactgatttgaaaacttgtccacataaaaacagcacacacgtgttcataacaaggttataattggttaaaacttgaagcaacacacatttcttcaataagtgaatggataaacaaactggtacatccgtatgatggaatactattcaacaataaagaaatgagctatcgagccacagaaagtcctgtatgaaccttaaatgcatactgttaagtgagagaagtcattctgaacaggctgcatactatatgagtc

SEQ ID NO: 8382 - DNA, 512 bp, Homo sapiens
  III.2010 (AA502913)
agttcaggaagttagggcagggtccctttattaaaaataaacatcctcctgcttgcttccttttcactcttttctcacaaatctgttcccaaaagcccttggaatccgggactccaacatgcaatgattgccccagatctctgtactacacctgaccactttctgaaatatttgaagccgaggatacaggaagttcttaaaggtaacaatacaggttgtatgtgacacaaaattaatgatctgataactaccctgataggatcttttggcttcctataacgaaagttggcacaattatcctagcgaatgagacacatttttagtctgaatcttgcattccttgtttttttggcactcactgcctttctaattaaagatggtggcctataacacttcctgtcccgtcgaaacaggaaaagttcccttgtccccctcgcagggtgtgcgatgcagatgtggctcgcttcttcattgtcccgctgctcagacctctaggggagcatgcagatggg

SEQ ID NO: 8383 - DNA, 466 bp, Homo sapiens
  III.2011 (AI248677)
  misc_feature (433)..(433): n is a, c, g, or t
ttttaatgtgggttttctgtttccttttggcctactcccaagaatattggtaagctattgaatttagatatgcacctccgataagcaaggattgtttcccatagaattaggatgtgctgtggatgtgtggtttgatgccagtgtgctaatgcagagccttcatatactttttaggattttgtgtttccgttttctatttttcttaaaatgcagagttcatatttgccccttaagagtttttgctgagcttgctgaagaaattgtacttcatccacataaatgcccgcctgttgtgaatggtgagcaccaaatgccctttatttgccatgaatttggacggcaccccctgttggcggatagctagactctgcagagttttgtttattcagtggtgtggtctctagagccccaagcaaatagccgaattcgactntccaaacaatagacaccatcaaccttatcgact

SEQ ID NO: 8384 - DNA, 410 bp, Homo sapiens
  III.2012 (AA148456)
  misc_feature (34)..(34): n is a, c, g, or t
  misc_feature (35)..(35): n is a, c, g, or t
  misc_feature (139)..(139): n is a, c, g, or t
  misc_feature (318)..(318): n is a, c, g, or t
  misc_feature (322)..(322): n is a, c, g, or t
  misc_feature (347)..(347): n is a, c, g, or t
  misc_feature (359)..(359): n is a, c, g, or t
  misc_feature (389)..(389): n is a, c, g, or t
ctcccatttcaggaatttaaaattaagtagaacnnaaaacccagcgcacctgttagagtcgtcactctctattgtcatggggatcaattttcattaaacttgaagcagtcgtggctttggcagtgttttggttcagacncctgttcacagaaaaagcatgatgggaaaatatttcctgacttgagtgttcctttttaaatgtgaatttttatttctttttaattattttaaaatatttaaacctttttcttgatcttaaagatcgtgtagattggggttggggagggatgaagggcgagtgaatctaaggataatganatantcggtgacctgaaaccattttcccntcatccggttgntcctgagcaattcgctggtacccctttaangatatccatctttttcctttt

SEQ ID NO: 8385 - DNA, 431 bp, Homo sapiens
  III.2013 (AA148467)
  misc_feature (213)..(213): n is a, c, g, or t
  misc_feature (214)..(214): n is a, c, g, or t
  misc_feature (314)..(314): n is a, c, g, or t
  misc_feature (363)..(363): n is a, c, g, or t
  misc_feature (386)..(386): n is a, c, g, or t
  misc_feature (401)..(401): n is a, c, g, or t
  misc_feature (427)..(427): n is a, c, g, or t
ccattaagttgtaggaatttattttaaataacctacagttgattaaaagggaattcatgataaaaatagaagatacttgaggaaagatgtgggaaatggactctgcacacacactaaactaacaatgcctctaaaactaatgattatagcaaaaaatgtcttcacattaaaattctgctttttatgtttttttccattttttacacaattacnnaagaaaaaataaaagccctaaaatcttgattatttttcctttttttggaccaaatactcattttcctctaagtttattgacctgtgaaactttttatacnataaaatctttcaagtgaaagattaagggttaaaaaaggaaaaaggatnggatatccttaaaagggggtacnggcggaatgctccangaaccaaagggatgatggggaaaatngggt

SEQ ID NO: 8386 - DNA, 437 bp, Homo sapiens
  III.2014 (AI288997)
ttgctgaattgttattttttattgtggttttttttttcaaatattttctatttgtggttggttgaatccatagatacaaagggccaactgtaggttgttaattatctatagtcatcatgttgcacaatagatctcttgaacttatttctcctgtctaactaacctttgcattctgtgaccaacatctccccaatcacatctcctccagcctctggtatctaccattctactctctgcttccatgagttcaacttttttagattctacatataagtgagattatatggtatctgtccttttgtgccttgtttcacttcactttgcataatatcacctaggttcatccatgttgtcacaaatgacggtatttctttttaaaaactgaatagtatttcattatgtatatatgctatattttctttatccattcatctgtt

SEQ ID NO: 8387 - DNA, 454 bp, Homo sapiens
  III.2015 (AA136802)
  misc_feature (451)..(451): n is a, c, g, or t
catgccaatgccttcatactgagttctgggcccctctgcaaataagtctgagaagccccttctctccttcctttatcgtggcctatgctgcagaatctcactgcagctggcaaaaggcattggccagctctcagaaatccctttactcaacgttgaagctgcattttggtcaatgtgggtaacttactttagaaaatgacttgagtttaggtctcccccacccatatttaatttttcccaagttgctggtagaagagaaatttaaaagtggatcaatcctcacagagagagttctttttgttgttgtttattgaaaaaaatgcaatacaagaagcaagaccaaacagatatctaaacactacaaccacttctactacgaaagggcccaaaacagcagacttgattattgcctgtatagtcctaaagattctgccaatctggattctgctgnccg

SEQ ID NO: 8388 - DNA, 437 bp, Homo sapiens
  III.2016 (AA136872)
  misc_feature (114)..(114): n is a, c, g, or t
  misc_feature (437)..(437): n is a, c, g, or t
tttttttttttcgctgcaattttattttaatttgagaaataaagatttcctccaagccacatgaggactctggcacccacccacaaagcaagacctgtatttataagccgaggntcagggagctaactgcgggacccgtcagccccgtgacccatccccgtccccacccccccctccaccgctgggcccatcagtgtgtgttggggggatgcttggcagctgggggtgaggagacaacaaacctcgggaactggagccagagctgcggcctgactgacgccttttgatgctcacgggaaatttctgcccaggatctcagccccaggctggtttgtttctacaaatctctctcaaatgtattattttggtgacaaaaatgaaggagctttgtaaatttttttaaaattatgaatcatatcaagtagttgtttacattn

SEQ ID NO: 8389 - DNA, 219 bp, Homo sapiens
  III.2017 (AA983752)
gataaaagtaaatttcatttcattccaagaaaggtgttagacaactgctcgcctcactggccctctggagcctgccctgccctgcttcccccagaggaatacaatccctggggacttatgacaactgaacagtgcagaaggaaccagcagagggaaccgctgcctttcttcatcactgccggcagcaaaagctgactggaagccatgtcctagtccaga

SEQ ID NO: 8390 - DNA, 456 bp, Homo sapiens
  III.2018 (AI050683)
tttggaatttggttaatctttacaatatgtgaccttgggctcttcagcctgcattgctgaggaagaagaatgttttgtctgtctcctgaatgggggtccagcatgtgcctgggccaagtgagtggaggtcagagtgatagtgcagccatgctcgtacactcacctgaagggtgggaaggggtgggagtgacattttgggggcacctgatggaaggaaagagttctgtggggtaaggaaactgggacctgcaggcatcttctgagctgacaggctgctccatgtgacacgtggtcccacgttctcttttcttctctctcagcaaaatctgtacctggattttattcctggcagcctcctcttctagagtgggtggcttttggagtggagatattgctggatgctgagaagatgtggttgctcatctgcattttggggatggccatggggtcctgggt

SEQ ID NO: 8391 - DNA, 644 bp, Homo sapiens
  III.2019 (AA149648)
  misc_feature (536)..(536): n is a, c, g, or t
  misc_feature (554)..(554): n is a, c, g, or t
  misc_feature (570)..(570): n is a, c, g, or t
  misc_feature (598)..(598): n is a, c, g, or t
  misc_feature (610)..(610): n is a, c, g, or t
  misc_feature (627)..(627): n is a, c, g, or t
  misc_feature (632)..(632): n is a, c, g, or t
gtagtttttgcactatataatagtacaaatattgtattttatattattttctcttaaaacatacaaatatgatacaatacaatttattttaataaaatgccaaccaatatagtacaacaaaatgaattcaatacattaagatgcaatacattacaacattaaaatcccacataagaacagcagtacccccaaggcccccaatgagtacagtatatctctaatgaagtagtcagtcagtcctgctgatgtgtatacattctagttaggagggtactggattggtagctaaagcttccaaggtaaaaaataaaaacaactcctaatgtctttcccaccctcccaagtcattccttcccctcttgttggaaatcctggaacagaaatcaaaagagttttggcataactgacacgttctctgtcactgtctcaattatacagtatgagcttctctgcccatttcgatttcctcatctagtgtactaaaactgtgaaggcagcttaggagtgatgacaatgctacaagatggtacttgcanggcctaattccaggtccngcagggtctgccagtnccaaaccttcccttggggtcccgcaggnaatctcagggtngcattggtaagccattnggaancccggtaaaggg

SEQ ID NO: 8392 - DNA, 639 bp, Homo sapiens
  III.2020 (AA151558)
  misc_feature (628)..(628): n is a, c, g, or t
attaggaaaagctgtttggcagatagcatccaatgcaaaaacagaaatatcgtaacgttctgcttagtgggcaagataagataggaaagacatgctcaaagaggcaaaagaatcattgctaccattcattctacactagtttgaagaagtttttgtacatcagagcacttccttcagcacacttttttgccttcagttttcattttttataaaatgagaagactaatgataaactgtagaaatcaaaatttattgagaaatctgtttctcctaacagatagtaaccctgccatgatatactacttcaacaatgttataaaagttatgtgataatatacattttaacctgggatttctaaattgctttaacaaatgctaatcctgagagttgccctgcaggactcaaaagggaaaggttttgggacgtggcagaaccctggcagggacatggaattaaggccattgcaatgtatcatctttgtagcattgtcatcactcctaagctgccttcacagttttagtacctaagatgaggaaatcgaaaatgggcagagaaagctcatactgtataattgaagacagtgacagagaacgtgtcagttatgccaaactctttgattctgttccngattccacaag

SEQ ID NO: 8393 - DNA, 419 bp, Homo sapiens
  III.2021 (AI081220)
tgagacggagtttagctctgtcacccaggctggagcgcagtggcacgatctcagcttactgtaagtcccgcctcccaggttcacaccattctcctgtctcagcctcccaagtggctgggactacaggcgcccgccaccatgcccagctgttttttgtattttttagtggagacggggtttcagcgtgttagccaggatggtcttgatctcctgacctcatgatccacccgcctcggcctcctaaagtgctgggattagaggcatgagccaccgtgcccggccaacccatagtaactctgttaattcaagacagtatttagcatttgctcctggggtatgaactgtgaggaggggggcagatttcccattccgatgctttcttctatgtgtcggtctccactggccgggatgtgtggggc

SEQ ID NO: 8394 - DNA, 496 bp, Homo sapiens
  III.2022 (AI126946)
gcggccgccactaggacccgggcacaggtggccagcgcggtgcctgagcgcaccacagcaggccccgcccctaggcccgcccccgggcccgcgctgcggagcaggcctcagacgcctgtcccggaggcccctgcaccgtctgcctcgggcgcaggtggaaggtggccgcggtctgtagacgcccggctccggaagtgcccgttggacggcggggcggagccgagagcagtcatatgctcgcccatggctggccaccagggggcggcacagaccggggtcggccgccggggccctcctccaacccctggacgctgcgtcctgatttccccagggacgcaggcctggttgggagaaggggtgcgagctccgattccggactctgcttgggtttaaaacccagattgagggctgggcgcggtggctcacgccgggaatcccagcactttgggaggccaaggcgggtggatcacgaagtcaggagatcgagaccatcctg

SEQ ID NO: 8395 - DNA, 297 bp, Homo sapiens
  III.2023 (AI187220)
tttttttttttccctttataaattacccagtctcgggtatgtgtttattagcagcatgagaacagacaaatacacctgggttacttgtgggcttctttctgtcctggctcccctcaatgggtggggatgcagagcccatgcctggctttgtgcttgagagccggaacaccagataagcggccaggggtcagtttcctgcaagcctctgcctgtgcacgcttggacttgccatctctgcttgcaatactctctagggtgcagtgggggtgggttctggctaaatggggaacagggaca

SEQ ID NO: 8396 - DNA, 348 bp, Homo sapiens
  III.2024 (AI183494)
tttgcgtttcaatgaaactttattcataggcactgatatctgaatttcataattttcatgtcacaaaatattctttgttgacgtcccaccccccaatgatttagaactgtagaagccattcttagtttgtaggataaactaacacagacagcagttacttagtcttgtattaaaccacagggtgtactgaaagatacaccataaaaagctggatggcataaaacttaaaatagttgtggcaattcatacattgatattactgcataggtgtaaaatcatatatattgtagaatgtagttaactgcataggaatatgctcatgatgtataaaagaaaaataagcagctt

SEQ ID NO: 8397 - DNA, 404 bp, Homo sapiens
  III.2025 (AI277275)
tttaatagaaacttaatttttatttatttgagacagggtcttgctctgtcacccacgctggagtgcagcagtgtgatcataactcactgcagccttgacaccctgggctcaagtgatcctcccaccttagcctcccaagtagctgggactgcagacatgtgccatcatgcctggctaactgttgtatatttttttgtagagatggggttttgctatgttgcccaggctggtcttgaacttttaggctcaagcattcctttggccttggagtatctgtagcaagtgataatgcatatcctgagagctagaagatttttctttaatttttcatcactgtggcatgactatacctacatcaccacaatcagactttttctcaacctcacatactacagaagcatctg

SEQ ID NO: 8398 - DNA, 269 bp, Homo sapiens
  III.2026 (AA883353)
ttttccacttgcattcatttatttattcattcatttattcttttaaagaaatattgatttgagcaccattctgttctagaggctgtgctggtccctgtaaatatgaaggtgaatttcatttagtttctgccttcaaagagttcacgatgtcttccaaatgctttcagcttctttcctgctttctaagcttttttctcttctctgcttctctgatactccttcctttccaagtccagagagaattagcttttagttttatttctgtcttc

SEQ ID NO: 8399 - DNA, 424 bp, Homo sapiens
  III.2027 (W78765)
cttccatgctatcttgacaaatttgcactctatagcatcactcaaaatactgcctattggtttaaactccatctgaatactgataactttcacattctttcactagagtggaagctctgagactaggaattttgttgtctttaccccagtcctttgaatagtgactacatgtaagatagtcatgtagtatttattggaaataaatatttattggaaaaacgaaaacagataattcctcttctggtgtttaacacggctttgaaaccaacgtgttcacggtgaaagcctttttatattgatttatcagcatttattcaaccccgtttgtcgggaaatcgggattacaccgtgtgagccacaatgcccagcctgtaaatttttacacattttaaattctgacaaagtgagggatatgtataatgta

SEQ ID NO: 8400 - DNA, 723 bp, Homo sapiens
  III.2028 (W81117)
  misc_feature (507)..(507): n is a, c, g, or t
  misc_feature (564)..(564): n is a, c, g, or t
  misc_feature (584)..(584): n is a, c, g, or t
  misc_feature (610)..(610): n is a, c, g, or t
  misc_feature (629)..(629): n is a, c, g, or t
  misc_feature (637)..(637): n is a, c, g, or t
  misc_feature (652)..(652): n is a, c, g, or t
  misc_feature (696)..(696): n is a, c, g, or t
  misc_feature (701)..(701): n is a, c, g, or t
  misc_feature (715)..(715): n is a, c, g, or t
  misc_feature (720)..(720): n is a, c, g, or t
tcggaggtaaaaatttaatccccgttttacaggtgagtgaagtgggataaaatggcataattcactcaagatcataagctattgagtagcaaagacaagagttaagcataaagtactcaagaacctgtgttttacattctatctgaagtgcaaagaagaatacctgaatgtcaaatgcagccagaactctgggataagacccgaggaacaagtcctgcagcagcagtgctaggaggcagaagaggaccatgggttcacatgctcaggaagagccatcagtaacaacaatcaaccacctactgagactctggccatgggtctccccggctataggggtaaggtcggaggtttaaataaatggcctctggccattccactgggcaatacaatctaagggaagctggccaaactttactggaacccttggcatgtatctgtataatgcaaatgtcattatacatttacctcactttggtatatatgtatacattatacatatccctcacnttgtcaggaatttaaatgtgtaaaaatttacaggctgggcattgtgggctcacacgntgtaatcccatttcccgacnaacggggttggataaatgccggatantccatataaagggctttcncctggacncttgggttcaaggcnggtttaaccccggagggggattaccggtttccgttttcccaganttttnttcccataatctantgctnctt

SEQ ID NO: 8401 - DNA, 402 bp, Homo sapiens
  III.2029 (AA411606)
tatgggaaactgctctttatttagacctttgggacaaaattaactttggtcacatattacttaaaaaaaaatccagttttacatatttctaaatagatagaactaaatgatcagagaatttcttctgtaaaaattggccaaattttatcaaaaatctaacatacgatacaatccaaattataaaaagactacttgggatcataatattccaaatgtatgacagttataactccatcttaacaagtgtgaaaagtacttgctctcatgttgctttggtccaaaagagtagagctaactcagtaacaggaaactaagtacccaatcttttgccaaaattaatttagattgtgactggcagcagaaatatccataatgaacagctctactataacaaagaataat

SEQ ID NO: 8402 - DNA, 427 bp, Homo sapiens
  III.2030 (AA422093)
tggagtctcaatatcagcaaagtatggacagtaaattatcaggaagatatcggcgacattgtggacttggcttcagtgaggtagaagaccatgatggagaaggtgatgtggctggagatgatgatgatgacgatgatgattcacctgatcctgaaagtccagatgattctgaaagcgattcagagtcagagaaagaagaatctgctgaagaactccaagctgctgagcaccctgatgaagtggaggatcccaaaaacaaaaaagatgcaaaaagcaattataaaatgatgtttgttaaatccagtggttcataactcccaaacgcttagtctttgtattaaaagtaagccttattgttacaatgcacagtggaggactgcttatagagcacagacctttgtattataatttttaaaaaggccctttt

SEQ ID NO: 8403 - DNA, 347 bp, Homo sapiens
  III.2031 (AA430187)
taaccgttcaaagtgtttgttaattatttattaagataaacaatttcttagcccacatattcatgtttcacagatagttcaggaacacaggtacagtgacaaacttctatgtaattcaacccaaagaaatactttatgttccaaaatcactttgtactctgagagatattagccttcctcacctcaaattctttaattcaattataatttctgtagaaatctgcatatgccttctttcttggtcaggccacagcagacttacagagagctgcaaccccagggttataaggaatgctccagcaatatgaaatgacagatgcctggccagaaggcacacatcccaggtt

SEQ ID NO: 8404 - DNA, 544 bp, Homo sapiens
  III.2032 (AA430275)
cagcattctcagtttactcttcagtttggaggggtagctcctggactagatactgctgcaaaagaaaacaagcacgaaggaaaccaagatgatttcttcgggctgatacaacctgttctgacctgcaaaaatcctaccttcccccacctccccaccgtaatagtcatagtataagggttgtacagacgcctcaggagacctgcctgattcctttacatccttctccctaacatctagactatctctagagctgtttcctagtcgtgaatgcgtgatggtccttctttgtccctgcaagtatgatccaacatggcccagttcagaatcagaatatgtcttctgtgtcatggtggcatttggtccatggtgggagaaagaaatcaacttttcccagtggtggagtgaggacccgggagggccggccctctcagccttggatgtgatccatttgctgtagtcttccaccttggtgtacagaaacaggccagggcacgtctcaccaccgaagttcaggactcctctcagaacccacagatcgaactgc

SEQ ID NO: 8405 - DNA, 418 bp, Homo sapiens
  III.2033 (AA906364)
tttcaatgacaaaacacacactttattacagctcacaaactgaacaagaatgaatgaaacccaccatggataacaaaacacatagaatagtggcctaattgattcataatagaatccactgctttgcatatttatttttccatctcttacagcttaaaaagaacaaaatggattttaattaaatcttgacttataagaatcctatgtatcagtgatgagttgtctaatgtcaaatttccaactgaagaaataattattgactaagttatgaatgaatatagcacattactagagaattaactatgtgtgcatttattgtcaggcaaccatgtaggattgaaaaacacagagtacaccaggagacccaggttctaaccatggcctggccactaagtagctaggtgagtttaggaaaatc

SEQ ID NO: 8406 - DNA, 382 bp, Homo sapiens
  III.2034 (AA989010)
taaggtattgtgctatttaaagatacacagcaaatgatgaaaacatgcaaaaatgccacttcagttaaaatggctgttaaaattgtgtttatttttcttctgtatcttctcgtttttagtgtaaaaatagtacatatggtataacccattacaaagaaggaaaattgagctgatgtgcagtcatgtgttgcttaatgacagagttctgagaaatgcagtttgggtgattgcatgtgagcatcatagaaaatacacagacctgtacagcgtgttactgtactgagtacaatgttaacacaatggcaagtatttgtgtatctaaacatatctaaatatagaaaaggtacagtaaaaatatagtggtataatctttcaggcttac

SEQ ID NO: 8407 - DNA, 484 bp, Homo sapiens
  III.2035 (AI733446)
taaggtattgtgctatttaaagatacacagcaaatgatgaaaacatgcaaaaatgccacttcagttaaaatggctgttaaaattgtgtttatttttcttctgtatcttctcgtttttagtgtaaaaatagtacatatggtataacccattacaaagaaggaaaattgagctgatgtgcagtcatgtgttgcttaatgacagagttctgagaaatgcagtttgggtgattgcatgtgagcatcatagaaaatacacagacctgtacagcgtgttactgtactgagtacaatgttaacacaatggcaagtatttgtgtatctaaacatatctaaatatagaaaaggtacagtaaaaatatagtggtataatctttcaggcttaccatatatgcacatttgattgttgaccaaaatgttacgtgttacatgactgtctttattttgctccaaaaaggaccaaaaaagtgatagcagagttggcgatt

SEQ ID NO: 8408 - DNA, 506 bp, Homo sapiens
  III.2036 (AI791767)
  misc_feature (502)..(502): n is a, c, g, or t
gttaccattctgatgttggactaagaaacggtggtgaataaatcaaaataaatcaaattgtgatagtagagtagaaagtttagtaatttagtgcctttattccaattcattatacatgaacctatggttaacaacttttggaatccctccccatttggtttatctggaaaacaggaaaatcgccaactctgctatcacttttttggtcctttttggagcaaaataaagacagtcatgtaacacgtaacattttggtcaacaatcaaatgtgcatatatggtaagcctgaaagattataccactatatttttactgtaccttttctatatttagatatgtttagatacacaaatacttgccattgtgttaacattgtactcagtacagtaacacgctgtacaggtctgtgtattttctatgatgctcacatgcaatcacccaaactgcatttctcagaactctgtcattaagcaacacatgactgcacatcagctcaattttncttc

SEQ ID NO: 8409 - DNA, 464 bp, Homo sapiens
  III.2037 (AA121510)
ttttgagagagtcccactcttgcccaggccagagtgctgtggtgccttcacagctcaccacagcctcaatctccatgggctcaggtgatcttcctacctccctagtagctggaactacaggtacacaccaccacacccaactagtttttctatgttttgtagatacagggtttcaccatgttgcccaggctggtgaaacctcgtcactacaaaaaaaacagtaatgagccgggcgtggtggcacatgcctgtaatcccagctactcaggaggcggaggtgcagtgagccaagactgtacctccagcctgggcaacaaagcaagaccctgtctcccaaaaaaaaaaagcggggaaaagatcgggctgcgcaccctgaaggaagagacaggagggtgaagttcggaagacaagatggaaacatttcttatatccagatctgggtggtgcctgcacagagcacacat

SEQ ID NO: 8410 - DNA, 508 bp, Homo sapiens
  III.2038 (AA127735)
  misc_feature (137)..(137): n is a, c, g, or t
  misc_feature (452)..(452): n is a, c, g, or t
cacaggtcttaagcatacttatcagtgaagtattgtatgtgtgctctgtgcaggcaccacccagatctggatataagaatgtttccatcttgtcttcctgaacttcaccctcctgtctcttccttcagggtgcgcanccgatcttttccccgctttttttttttgggagacagggtcttgctttgttgcccaggctggaggtacagtcttggctcactgcagcctccgcctcctgagtagctgggattacaggcatgtgccaccacgcccggctcattactgttttttttgtagtgacgaggtttcaccagcctgggcaacatggtgaaaccctgtatctacaaaacatagaaaaactagttgggtgtggtggtgtgtacctgtagttccagctactagggaggtaggaagatcacctgagcccatggagattgaggctgtggtgagctgtnaaggcaccacagcactctggcctgggcaagagtgggactctctcaaaaaaaagcat

SEQ ID NO: 8411 - DNA, 457 bp, Homo sapiens
  III.2039 (AA149041)
  misc_feature (209)..(209): n is a, c, g, or t
  misc_feature (249)..(249): n is a, c, g, or t
  misc_feature (442)..(442): n is a, c, g, or t
  misc_feature (452)..(452): n is a, c, g, or t
cagaactgaatatgaatagcaagaccaaatccttttttggctattttctatagcttatttatttgcaacatgtcttcatgagggaacctgtttgatgtcgtgtttgtttgtttattttatttcatttgtttattttttgagatggagtctgggcaacaagagcgagactctgtctccaaaaaaaaatccataaagcagctgggcgcggntggctcacgtctgtaatcccagcactttgggaggccgagncggtagaatcgcttgagcccaggagttcgagaccaggctgggcaacaaagcaagacactatctctacaaaaaataaaatagccgaatatcgtggtgtgctcctgtagttccggctactcaggagcctgaagcagaaggattgccttgagtccaggagttggaggctgaggtatgggcaccactacactggaancctggggtgncagaa

SEQ ID NO: 8412 - DNA, 437 bp, Homo sapiens
  III.2040 (AA149042)
aagacagggacttgttctgtcacccagatttcagtgtagtggtgccatacctcagcctccaactcctggactcaagcaatccttctgcttcaggctcctgagtagccggaactacaggagcacaccacgatattcggctattttattttttgtagagatagtgtcttgctttgttgcccagcctggtctcgaactcctgggctcaagcgattctaccgcctcggcctcccaaagtgctgggattacagacgtgagccaccgcgcccagctgctttatggatttttttttggagacagagtctcggctcttggttgcccagacttccatctcaaaaaataaacaaatgaaataaaataaccaaacaaacacggacatcaaacaggttccctcatgaagacatggttgcaaataaataagctatagaaaatagccaaaa

SEQ ID NO: 8413 - DNA, 502 bp, Homo sapiens
  III.2041 (AA399067)
cactagggggaagactaggatgatacctggacggcagagacagcagtgatccagttccagtcccacttcctcaactgccggctggtggtttccacctgcatgtgctcatctctttactcatgccctaaggactcaacaccagtgcctgataggatctactgaggatgctgaaactcacttgatagatgttcaagctccccacgccttctccagctggtggtcagtattcttaggtccagcataccacccaccaagcatccttgcccgactgactaagtgttttgtacctggacaattcaaaagggaatgcggaggttgctctagcctgtatctcctcctctgggcagacccatatctctgggattccaccagctcttctgactatgcctcctgtgttccccactccccgctgtcaggaagcccttccttttgcccactttacatcactcacattgacgtttgacctccacatggaattccaatgtgcccccgttttgtgacc

SEQ ID NO: 8414 - DNA, 338 bp, Homo sapiens
  III.2042 (AA412167)
ttttttttttcagcagaagcataataatgctggctttatcagagttaccccatgtacacatgagctcgtagatgtcaagggggcctagtcctggtcacaaaacgggggcacattggaattccatgtggaggtcaaacgtcaatgtgagtgatgtaaagtgggcaaaaggaagggcttcctgacagcggggagtggggaacacaggaggcatagtcagaagagctggtggaatcccagagatatgggtctgcccagaggaggagatacaggctagagcaacctccgcattcccttttgaattgtccaggtacaaaacacttagtcagtcgggcaaggat

SEQ ID NO: 8415 - DNA, 440 bp, Homo sapiens
  III.2043 (AA878307)
gaatcatgtacagtcgtgctgtttattgttttctagggcatgtctttccagcacaaaatgatggtaaattttctgggtgcagagacagctcttactgtattttacaggctacccagtgcctagtccagtggtgggtaatgcttacaggaatgtacctgttagaagttcttacagaattcttttgttttgttttgttttctgacagggtctcactctgtcgcccaggctggagtgcagtggcgcaatcacagctcactgcaacctccacctccagaggctcaagggatccttccacctccgcctgccgagtaactggaaccacagtcgtgtgccaccgcgcccagctaatttttgtatttgttgtagagatgtggtttcgccatgttgtcctggctggtctcaagcgatccgcccgtctcggcctcccgaagtgctgggat

SEQ ID NO: 8416 - DNA, 500 bp, Homo sapiens
  III.2044 (AI732918)
gaatcatgtacagtcgtgctgtttattgttttctagggcatgtctttccagcacaaaatgatggtaaattttctgggtgcagagacagctcttactgtattttacaggctacccagtgcctagtccagtggtgggtaatgcttacaggaatgtacctgttagaagttcttacagaattcttttgttttgttttgttttctgacagggtctcactctgtcgccccagctggagtgcagtggcgcaatcacagctcactgcaacctccacctccagaggctcaagggatccttccacctccgcctgccgagtaactggaaccacagtcgtgtgccaccgcgcccagctaatttttgtatttgttgtagagatgtggtttcgccatgttgtcctggctggtctcaagcgatccgcccgtctcggcctcccgaagtgctgggattacgggcgggcgccacctctgcataagtcttaggcctgcaaaacagttattttgcagatt

SEQ ID NO: 8417 - DNA, 511 bp, Homo sapiens
  III.2045 (AI791236)
cgaggacacaggtgaaaactgaggtttagagagggtaaataacttgcccaaaatctggaaaagtttgccaacccctggtcttactcctcattaaggtttcccttcctctccaccattcccaaatctgagtattccagaagagctactgtttttttaatgatatggtaaattaatttctaaagggattaaaatgaatacctacctgttgtaatgaaaataaatgtataacataaagcaatctgcaaaataactgttttgcaggcctaagacttatgcagaggtggcgcccgcccgtaatcccagcacttcgggaggccgagacgggcggatcgcttgagaccagccaggacaacatggcgaaaccacatctctacaacaaatacaaaaattagctgggcgcggtggcacacgactgtggttccagttactcggcaggcggaggtggaaggatcccttgagcctctggaggtgaggttgcagtgagctgtgattgcgccactgcactccagcc

SEQ ID NO: 8418 - DNA, 362 bp, Homo sapiens
  III.2046 (AA906931)
  misc_feature (48)..(48): n is a, c, g, or t
tttttttgagatgcaattttaaatagggtggcttggacagccacctgnagttgggtttaaaagctgccagctccagccgtccagctgtggggccacggtgccagacagtggtggtggttataggaccgtaggtgtttaccaaaactagacaagtccacataacaaccaactgcacaaataaggagtaaaataataaagagaaggacgtgtgaggcaggactggattgtagcccaggataaagagaagttgcgggatgacagctgtgccgtcggcccagacagaaccatctggacagaggacagaggataagggagatggttgaaaatactaccatcatatgataatgacaactaagccacag

SEQ ID NO: 8419 - DNA, 426 bp, Homo sapiens
  III.2047 (AI023830)
ttttttttttaacttctgttaaaacatgctgccgtttagtgaaccctgtgccacattactgtgctgaacacgcacataacgttatctccggtagcttcagggaagtatcggtaacctcgatactttataaatgctgtttctcccaggcactgtagcttgctggattcaacgatgatctaactccaaagtttcattccacagtagctgctcttcagtgaggaaggatttggttctccttccaggagtgtctgcatgttaagaggattgactttactgcgaagaaacctagcagacaccaccgtaaccagatcaaagttagtattactggcaaggggagatattgatgccgtgtgccccgataaaaatgcgttaagggcacatcacctccgagtcattttccacaaaaactcccagccttaaaccatg

SEQ ID NO: 8420 - DNA, 449 bp, Homo sapiens
  III.2048 (AI191523)
ttttttttttttttttgtcaagaacagcttaatttaaaaggaggacatttagtgagtacaattaacaggtttttaatatattcacaaagttgtgcaaacaatggcacaatatattttaggttatttcaccatccaaaaaagaagctccttatccttagacaacccctagtcctgggcagaccagtttctatctctatagatctgtctatatattttctggatatttcaatacatggaattatttaatatgttgacctaccttttgatgccatgccccacctttatgcttggcgcattccagcctaacagcatcattcatggtacttaacattttatatcatcgagcaatcaattgtctccaacctatctttcttctgccactcctcctctcttcccagccatcttcccataatgatttttcaagatgcaaatatgctcatatcttactc

SEQ ID NO: 8421 - DNA, 254 bp, Homo sapiens
  III.2049 (AA812750)
tttagtttaatagttggatattttaataatttttatctagtaggtagcaagagtggagcagggctaaatttggagcagacaagccctgttagctgggagggggaaagctggtcatttctgtgctgtgtgcagtgttctgatatgcactcagctttgactgcggaagatctccctttggcctcagctccttgggtcactgagcacgcgcatctgattgtggcatcccctggcgtgttcaacgcctggctgagtag

SEQ ID NO: 8422 - DNA, 377 bp, Homo sapiens
  III.2050 (AA458844)
tttttttttttttttaaaaggaaaaacatttaatacataaaaaagcacaattaaaaagtattaaaagcattacatagtgcaaacaccaaaaagacagagctattaacttagtggtgcttataaggataactaggcaagaatgcagaaaatgccttcctctttcctcatctagtgagctggccacattcaataagttgttattattattattattattattattattagcgaaagactgaagttttattattactcaattcagtctcccaaaaagttattttaaattgctgctttcttcccacttgatgaaaccacatttgctgctcttgtgattctctgatcggaaatatttggaaaatttcatgttttctatatat

SEQ ID NO: 8423 - DNA, 433 bp, Homo sapiens
  III.2051 (AA459035)
gcctggctaatttttgtatttttattggagacggtgtttcaccgtcttagccaggatggtcttgatctcctgacctcgtgatctgcccacctcggcctcccaaagtactgggattacaggcgtgacgaccgcgcccggccggaactctccatttcttaaggtaaagagggtcaaggatacctaaaaagggtcaaataatgctagaagagcaattcctctttcagagcagttgctgtaatttggcaaatgctttatcgaagattgattacaggcgtgacaactgctcctggcccaaaacatctctttctacatacacttgagtaggtggcataaaatgcactgtcaatatatagaaaacatgaaattttccaaatatttccgatcagagaatcacaagagcagcaaatgtggtttcatcaagtgggaagaaagc

SEQ ID NO: 8424 - DNA, 581 bp, Homo sapiens
  III.2052 (AA149082)
  misc_feature (1)..(1): n is a, c, g, or t
  misc_feature (490)..(490): n is a, c, g, or t
  misc_feature (569)..(569): n is a, c, g, or t
nggccatttcaggtttgggtgttttctggggatgttaacatgggattcaggctcaactcacaagaaacttttccatctcatgatggatgctgttgggcatgtccaatgtatgacttcatgagttacacagatgctaattcgtaggggcacttggaatcacatggttgttttgtgtcccatggtcaagcattctatcttatcagggcctacagtaacatgccaaaagttgcttccaacatatttctctgctttggatggggcatatttctgtgctgtggatgacatggccttactccagaatcccaggccctccactgtgactctcctactggtgcttggttcagctccaccccaaatcttaccccaccactggcactttcagcaccagggggtcctgaaggatggtgactgcgccatggcctggatctgctgcagtgtcctttcctgtggaggctccactcaaagctggcatcctcctatgtcacctaanagtgtgggtcaaagcaatacacctacatgtagaatgtgatgtcagaactcaacaggctcaccaggcagtgtgcttcctncttgcatgagag

SEQ ID NO: 8425 - DNA, 564 bp, Homo sapiens
  III.2053 (AA149083)
actatagaatattaaattcctttatttcattgacaacatcatgttgactgggatggatgagtaagaggaggaaggtacactagaggctttggtaaaacatcttctctccagagggtgaagataaataaaccttacagagattcagaagtggccactgcagtgaagttttacaggtctagtggttaggggcatccaggggtgtcccttccaatgtgaaagacaaactgttgcatcttgcatcctcatgcaaggaaggaagcacactgcctggtgagcctgtttgagttctgacatcacattctacatgtaggtgtattgctttgacccacactctaggtgacataggaggatgccagctttgagtggagcctccacaggaaaggacactgcagcagatccaggccatggcgcagtcaccatccttcagaccccctggtgctgaaagtgccagtgggtggggtaagatttggggtggagctgaaccaagcaccagtaggagagtcacagtggaagggcctgggaatctggagtaaggccatgtcatccacagcacagaatatgccc

SEQ ID NO: 8426 - DNA, 371 bp, Homo sapiens
  III.2054 (AA226034)
  misc_feature (20)..(20): n is a, c, g, or t
  misc_feature (83)..(83): n is a, c, g, or t
  misc_feature (209)..(209): n is a, c, g, or t
tttttccccaaagatttgtntgggagtaggaggaatggcaaaatcttaagactttaaaattagatttttttctgagacgaagntcgcatctatcacacaggctggagtgcaatggcatgatctcagctcactgcaacctctacctcctggattcaagtgcttctcccacctcagcctccccagtagctaggacaacaggcgcacgcacncacgcttggctaagtttttgtatttagtagagacggggtttcaccattttggccaggctggtctctaactcctgacctcaagtgatccactgcacccggcctaaaattagattttattaaaattattttctaggctgggcgcagtggctcacacctgtaatc

SEQ ID NO: 8427 - DNA, 414 bp, Homo sapiens
  III.2055 (AA226104)
  misc_feature (214)..(214): n is a, c, g, or t
  misc_feature (216)..(216): n is a, c, g, or t
  misc_feature (292)..(292): n is a, c, g, or t
tcgacccagactggagtgcaatggagtgatctcagctcaccacaacctctgcctcccggcagcaattctcttgcctcagcctcccaagtggctgggatgacgggcgcgtgccatcatgcctggctaattttgtatttttaatggagaacagggtttctccatgttggtcaggctggtcttgaactcccgacctcaggtgatccgcctgccttgncntcccaaagtgctgggattacaggtgtgagccactgcgcccagcctagaaaataattttaataaaatctaattttanggccgggtgcagtggatcacttgaggtcaggagttagagaccagcctgggccaaaatggtgaaaccccgtctctactaaatacaaaaacttagccaagcgtggtggcgtgcgcctgttgtcc

SEQ ID NO: 8428 - DNA, 154 bp, Homo sapiens
  III.2056 (AI820953)
gtcgacccagactgtagtgcaatggagtgatctcagctcaccacaacctctgcctcccggcagcaattctcttgcctcagcctcccaagtggctgggatgacgggcgcgtgccatcatgcctggctaattttgtatttttaatggagaacaggg

SEQ ID NO: 8429 - DNA, 509 bp, Homo sapiens
  III.2057 (AA493645)
gctcgacttttttttttttttctatttctgtgcagaatgtcattggtattttaatagggactccactgaatctgcaggttgctttgggtagtacggtcattttaactataataattattccaatccatgagcatgaaatgtttttccatttgtatgtatccctcttcaatttctttcatcagtgttttgcagctttatctgaagaggtctttcacttccttggttaaatttattcctaggtattttattaatttcttatagctattgtaaatgacactgccttcttaatttctttttcagctagtttgttgtttgtgtatagaaatgctactgatctttttgtgttgattttgtatcctgcaactttaccaaatttgttgatcagttctaagaatttttttttttttggtagagcgttcaagtctcttttcctgtctgtctcttccttacaatctctccgttaaagtacctaagatatttcatttatatgtccagatctgctgatgtac

SEQ ID NO: 8430 - DNA, 497 bp, Homo sapiens
  III.2058 (AA682540)
ggagaaggagtgcaaggttttattaagtggaagtagctctcagcagatgggggagccagaagggagatgatttttccctggagttgggccagttggtggcatagctctcctccaactgccccagccaaactccgcattgttccgctggttggtggcctgcagcacgctgtgcctgtcggtgtgcgcctctcaatgtcccgatacccgtgtgcatgtctttcttcactggtggtgctcttccttatgtccagcacctgtgtgtctatctgctagggtcttggagaatgagtgccaggttttattgagtggaagtagctagggtctcaggggtttttatagacacaggataggggcatggtaggccaggttggtcttgggtaatgcaaccatagggcaggaaaacaaaaattcctgtccacacttaggtccataggcacaggtccggggatggaactctagccacagaccatgcccttttctacccagcacttctcttc

SEQ ID NO: 8431 - DNA, 451 bp, Homo sapiens
  III.2059 (AA781092)
tttttaaagaaaaagacttttatacatagtaacaaactgcaggtaagaatgagacattactcattttccagggtaggaagtcttatgaatgatttatatcagggaacctctaaagagtaaaggttccctacggaactctggtagcaccagttccagggctgagcatgcttcagcgagttcattgcaggcaacatacagcaaagcagatggctgagcaaactgaagcccagacttcagagtaagtagtcatcttcaaggttatcatcaccagacatggaagcagcttctgataagctgaggcaggacagggtatgtgttatctctccagagctctttttggtctcagtgagcaacgtgctgagagaggcatctgtttctgtggccatgtccttcaacatgtctgggacagctctgttttcttctatgtcttcaggaagctcaattgcgtatc

SEQ ID NO: 8432 - DNA, 432 bp, Homo sapiens
  III.2060 (AI218719)
  misc_feature (432)..(432): n is a, c, g, or t
tgcaatataacgtgagcatttctcaatgtcattaagtaagccttctgatttttaatgacttgactgtatttatcttgcagaaataccacaatatacttactaacactactgctagacatttaggttgcttttaaaaatttcattattacaattgtgtctaaagtcttagctccaattacttctttgggataaatccttaagagaagtactaggtcagagctatttttaaagaactctttataccatccagaaaaattttgacaatttatattcctaatagcagagtataaaatgcacaagtgaattttcctgtatccttggcatggtattttctaaacatttgcattatgttaatttgcatttctttgattactagtcaaattaaaatttcctcttaatgccttggagacatttgactccagacatttcggn

SEQ ID NO: 8433 - DNA, 417 bp, Homo sapiens
  III.2061 (AA455904)
ataaagtacataaatttattatgatcctgtgctttgctcctggatagaagagaacttgagatgatggaaaatctcacagaagggtgaagggttccccagccagccttggggtggtgccgggttgatgttggccataggggtcatcaggagggttcagagtccctgggcccccatcagcacacgcatctcatgctgtccagaattctagaaggggacctgtgggcctcctcagggcagcggcagggtgggcctcagacaggtcacagaatgaagtgggcagttgagtgtgtgtttctctggcccccaaacagccactcagcatcccagatctcaggtaacaccagcctctttctccaggcccacccaggaaggagaatccaggagtcatcgttcccctgatgttccattagctgacac

SEQ ID NO: 8434 - DNA, 412 bp, Homo sapiens
  III.2062 (AA456370)
ccaggctcctctgctcacacggagccccagtggccccatgactccttacctgatgctgtgccagccacacaagagatgtggggacaagttctacgaccccctgcagcactgttgctatgatgatgccgtcgtgcccttggccaggacccagacgtgtggaaactgcaccttcagagtctgctttgagcagtgctgcccctggaccttcatggtgaagctgataaaccagaactgcgactcagcccggacctcggatgacaggctttgtcgcagtgtcagctaatggaacatcaggggaacgatgactcctggattctccttcctgggtgggcctggagaaagaggctggtgttacctgagatctgggatgctgagtggctgtttgggggccagagaaacacacactcaactg

SEQ ID NO: 8435 - DNA, 426 bp, Homo sapiens
  III.2063 (AI025800)
tttgacaaatgatttcctttattccccctgcctcccaatttccaggtagctctacaaagacattcagacagagccacatgcaggctgtccttcaaacacagagaaacaaaactgagccactggctggagatcacatctgcccaaaggtggacttttctcattcaatgccactgggcagctggccaaagaaaaaaaaactgaccaagcggaaggtttgaacaggttggggtggggactcagaagggggtgccccacatccatcagtgccaggagggcctgcccaccatggccagcatccacaagacggcggcccctccccgggtcacccaggcacgggtcccgggccctgctaccacaaggggggattggggacccctgcctcaggccagccaaggcctacatcagggagagagggaggaaggaagg

SEQ ID NO: 8436 - DNA, 313 bp, Homo sapiens
  III.2064 (AA676221)
tctcttgaccccccggatatattcttctctggatcctacacatatctcgtgattgagatgaaacaatttaacatgtgaatccaacagccctgcatttcacagaatgttctgtttcaggcagtgacattctttatggggaactagtatacgcaaagcacgtgcaaggaaagggaagagtttcctaaagtgcattaagatagactgactagtaacaggatgcaaacggccctgacacatacagtagctccataagcagggcaggaggggtggcacgacagaaacctcagccagaccagcaacgttccccgtgttg

SEQ ID NO: 8437 - DNA, 240 bp, Homo sapiens
  III.2065 (AA282197)
cctaacagaaagttcttttggacagtactaatccagatattatcagtaaatataagattacttaggtatgttgaaataaaaatctgacataatttcaaatgcttttgagttttaactcaccatgaatctctttgatacgaagtgtattctgatgcattccatatttcagaattaactgttccagatagtagaaagtttttttatgcaaagtctaaaatataaattatttgatcaataaat

SEQ ID NO: 8438 - DNA, 401 bp, Homo sapiens
  III.2066 (AA282718)
cggagacagccaggttggcagctgacgggacagccggggtctattttgttgcgggttttcagcaaatccagggctggtctggaggcgcgaaaacttaaggcatacagaacgatggagtatatggcagaatccaccgaccgcagccctggacacatcttgtgctgtgagtgtggtgttccgataagtccaaatcctgccaatatttgtgtggcctgtttgcgaagtaaagtggacatcagccaaggtattccgaaacaagtctcgatttcgttctgcaaacaatgtcaaaggtattttcaaccaccaggaacttggatacagtgtgctttagaatccaggggaactttcttgctttggtgcttggaaaaaaatccaaagcccctcctgagtaaaggtacggg

SEQ ID NO: 8439 - DNA, 438 bp, Homo sapiens
  III.2067 (AA459944)
tttttgccacgcaattctgaataaagtttattaaataatatgtacagcaaatgtagtaattcaacacatctatttatcaaatcaatccactgcaatgaagaaaaataaatgaacagaaaaatctatgtctgcataggacatgctctcagtgtgtaatttaaatggcaatactttaaattaattggttatatataatgtcagttatttttctttcagaatataaccttttttgtagtaacctattctagcaataggacttaatacgactgcagataaataggactgcaaaaaccaaaaacccaaaataatgaaattaaaaaggaaaaaaaaactgtaactgagatcagagttacctttcctccccaatagaatacttatcgtaaattttaacactttacaatggctatttttgtgctaaaaatctgtaggtgagttatt

SEQ ID NO: 8440 - DNA, 499 bp, Homo sapiens
  III.2068 (AA460033)
aaagaaactgccactaattcattcacactaaggtgtaaatgattgataataggaatgagttacctcttcccacagacatttgtttttaagtatgacagagcagggccttaatcccaagggaaaaggttatggaactggagggggtgagctttctgggtagaaggagacttcctgaatttccttaaaacccagtaagagtaagacctgttgttttggaaggtctgctccaccatctaagagcactgttttttttttgttgttgttgttgttgttttacggtctctgagggaatatagtaaaaatgcatatgcacgtgcaatttgcacggcagcatttcaccgattgtggactgtattggctaatgtgtttcctggtctttagatgcaaaccattaataacactatcttatctcatagttttttcaggggtgcttcttgattagtagggaattttgaacacctctttaaatacagctagaaaataaaaccaatttgtaaag

SEQ ID NO: 8441 - DNA, 351 bp, Homo sapiens
  III.2069 (AI280441)
ttttttttagcagttttagaaattttattttgaagtaacttaagatgtttgtagaagttacagaaatagtatacagagctcccatacatcctcccacagattacccagattcaattcatatttctgagccatttgaaaataagttgaagacatgatgctccattatctttaaaacttctgtgtgtattttctcaaaacaagtggatactctcctacataactatagtatgaatatcaaaatcaggaaattattataacattgatccagtattatctgatccacagaccccattacagttttcctgattatcacaataatgtcctctattcaggagccaatccaggattatg

SEQ ID NO: 8442 - DNA, 456 bp, Homo sapiens
  III.2070 (AI343543)
tttttaattaaaaatccaaagtttattccagagctattgattttccagtatgttttacagcacaagcattcatgttacactaaatttttgcattacttggtttaaaaactattctttcaacaacattgaatataaaatagcacaaatcagcagatcattcacaagtttcaaagcacatacactgcatttttaggagactgacaagtgatgtagttaaattttgtgagctagtgaaaggagaccagtatagtcataataaacactgtcctcagcttactgttcaaaagtattttgaaaatctgtgagtcgagggccaggtgcagtggctcacgcctgtaatcctaccactttgggaggctaaggcgggaggattgcctgagctcaggagttgagaccagcctgggcaacatggtgaaaccctatctctactaaaacacaaaaatgagccgggcgtgg

SEQ ID NO: 8443 - DNA, 559 bp, Homo sapiens
  III.2071 (AA521225)
tttttttttaaatcggcaaattctatgttgacaaatactgtaatccagaaatctgcttttctacttcatattggacaggcaactaaagtagtcacattgaacaaggatatgccccaccttcaagaccagctgctacaatgtgaagcctgacaaagcttctatgacaatatcatcaccaacctcaaactggaactaatagaaataatcataatggatatacacgaggattaaaaattcaagtgtgcagagtttaagatacttggctatataaagtttaaaatactcaaatatatctttatgtatatatacttgtctatatttcatatttttcaagaggctgaatctcctgaagaaatccaatatgcacccctaccccgggaaaaaaaaacaaaaaatgggaaaccaaaaagtctcctcatcccagtgtattgcccgaccctattgggaaatataccccccaaggaagtcccatgtcccgggggtcccactgggacctcgactgtggcccccctcttggaatggcccttcctcccccagaggttctgggtgccactccaac

SEQ ID NO: 8444 - DNA, 428 bp, Homo sapiens
  III.2072 (AI022715)
attatactttaagggttaggaagctttcaattttcaatacacatacaaccatatctggagaagagaaatagggagcagggtcagcttgccaataaaattgtgtaagaatttacacaattctgcaaagaatgagcggagactataggaggcctgctcacttactctatgtaccaaattcagatctgtgttttagaaaatgttctggattgcctgcagttggatattagttggagcttttgtaaacacacagagtatggttttcgggcatgtggtgattaatactaagtgtcaacttgattggatttaaggatgcaaagtactgatcctggtgtgtctgtgagggtgttgccgatggagatgaacatttgagtcagtgggctgggaaaggcagacccacccttaatctggtgggcaccatctaatcagct

SEQ ID NO: 8445 - DNA, 378 bp, Homo sapiens
  III.2073 (AI148766)
tttttggtttaacatcttttttcttcattgatttatttagatttctaaaaggtcacagtcaatttgtttttccactggacagaaacctggaatgagtaaagggttgagagctgcaaatgaattcaactacaaaaacactgggctgtctttaggcgtcaaatgatggcgttacgctctgcatatagagatgaaggagatgcacctcagccttccgggagcttccttgttcacattcagactcaaaggcaactccttagcacctttgatatgcccaggaacagcacagtgattattatacttactcctctcagcaatccccatagggaggtattatgatcatttttatttcacagaggaggagatggagactcagaaagt

SEQ ID NO: 8446 - DNA, 555 bp, Homo sapiens
  III.2074 (AI220535)
  misc_feature (427)..(427): n is a, c, g, or t
  misc_feature (524)..(524): n is a, c, g, or t
tttaaatggaaatatttattttcttaaaagtatagcttaattttccctctccaagtttgagaaggaatattgggaggaaacgggacaagatgacacaggcatttggacattcactgcaaatcctagggcgttgctgcaaagcatcctgggtccagttccagtttaggaaacctcacagccttttttccactcggacaggtctctgccctcacaatgtttcttccagccttgccaatagttcattccttgtgtctctttaacaattttcctggcacagataattgcatctgtgaggtcatcagtgatcaaggctgagcaggcgacatggcagtggttgttctccttcagctttccgcgtctgcaccacgcgaagctgttgatctggaagatgccatagtcgatgctgccgtcatccaggaccgtcggngctgtggtgttgtagccgctctcataatatgccatgcagatccagtttccaaggctgaagccccagtaattgtccaggccagccctcgagaatatcnttgccagtttgcaacgagtgtagattttgga

SEQ ID NO: 8447 - DNA, 156 bp, Homo sapiens
  III.2075 (W88421)
aatcaacagtgaggtaaacacttcttgggaccatctgggcaagcattttaatccaaaatattctgtaaacactgactccatttgagtacccaggaactaccgtccagccgccatcaactgcatttttatttcagttttaagcagtaattgaaatag

SEQ ID NO: 8448 - DNA, 494 bp, Homo sapiens
  III.2076 (W88786)
  misc_feature (12)..(12): n is a, c, g, or t
  misc_feature (15)..(15): n is a, c, g, or t
  misc_feature (38)..(38): n is a, c, g, or t
  misc_feature (39)..(39): n is a, c, g, or t
  misc_feature (40)..(40): n is a, c, g, or t
ctccaaagctanatntcaatatctgagatttattgccnnnggaggaagagagagaccattagccgcaccagcagccattcctctgggcgctttgcacttgaaatatccccattctctttcatgcaggcttgcagaaaactccagaaatcagccctgggactggataaaggaccctatcacaatcctatctttgccatttcttgtgaaagactttaaaattcttgaaattggtcattttataaattagttttacaaagaaactttgaaatataaaggaaaaggaaaactcaaccctaaacttctgcctctcgatttaggtagaatgtatctcccaacagaaaatgaaaaaaatccaaatatgctctgtgcattaaatacttaatgaccaaaactgctaggaccccatttacttctactggtgacttcaaaaggcactgtaagctccctcagagaatgtaagtttcctgggaatccctacagactacctttttttt

SEQ ID NO: 8449 - DNA, 513 bp, Homo sapiens
  III.2077 (AA884015)
  misc_feature (471)..(471): n is a, c, g, or t
  misc_feature (504)..(504): n is a, c, g, or t
tttaagggtatggtattttattgagttattcaacatccagcttctaatttaaactggacaagcagatgctgaaggcctggagcgggctaaatggaaagcagaagtccatggtgaatgtgtctgggcccactcggcgtaactggagcaccagatgttcttggtgtttgggatccacgatttggaagttcttcaccgaagcccgagtgactcgaccatggaaattgagcgtgtagacaccgttctccttgtcccacgacggggttttgttgtgcaacaaaagcaacccttgtttgtccccacgttggtaacgactcagtagcgactcctgttcatttagtggctggacattgattcgctggttctggctgttggttcctgggagaatcacagtcattttccgaggccccaggtatcctaagacgttgggctcataacacacagctcccagctccttgctgatctgggcagtantcttggttaaatgctccggtcaggattcacccnattgtcaaa

SEQ ID NO: 8450 - DNA, 423 bp, Homo sapiens
  III.2078 (AI285128)
tcatgtaatattctagatttaattatatttaaacttctcatcaagtaaagatttgtttgcagacagttcaatctggaggtgggcaacagtggcttgagataagtaagctgcttggctccacgtggttattcaggaacccaggtttctttcttgtctgttgttcctccatctcctagggtatagtcttcatctgcatggttgcagctggaacaccaccccgtttgtgttccagccccgccacgggattgggcacgtgcagcagcaatctctaatcacgcggagacggcatatgtacactgggctccagcaggctcagaaggcacaagtgagctgtgcgagcaggtggcgcagactccttcgacagcgattcttgccttattgcctgttttccttcattcctaggacccgatttgttttccaaag

SEQ ID NO: 8451 - DNA, 514 bp, Homo sapiens
  III.2079 (AA004927)
aaaggtatctaaaatcagagatgatattttaacattgtggctggatataagataaatctgtgaacattagtagtaaaaccatatactagttataaccagctccaaaatacaatgaaaatgatttatatagatccatttacacactacttaccaaactaaacaactctcagaatcatattagtccggataagctatgttttgctgcagtaacaaccctaaatttcagtggcttagctgagtgtggttgtgtgcacctgtactaccaactactcaggaggctgagacaggaggattgcttgagcccaggagttccaggctgtagtggtgatgatcacgtctgtgcatagccactgtactctagcctgggcaacatagtgagaccctgtcccttaaaaaaatgttagtagttatgctacacatacattgtgggtgggatagtaggttttctatccagtgattatctctactctctagaagattgccagtctccttgggcagatggaaaggagagact

SEQ ID NO: 8452 - DNA, 492 bp, Homo sapiens
  III.2080 (AA005335)
  misc_feature (492)..(492): n is a, c, g, or t
catactgatctaaagacttccatgtttagaactgttcatttatgctttcaatataattcagagattataccctttatagtcacatgtattaatcttttccttgtgcttttttggttttcatttttatatttcaatactgctacaattattagtgctattcatgaaatattttcagttctcttctcaggtacaaagttgaactgtacacccttggccctttgaaagataagtgtgtccaagtgattgaccatgtgatcttaaccaatggaatatgaataaaaaggatctgttgctttcagagaacaagtttaagagccaacatgcaattccccagtctctctttccatctgccaaggagactggcaatcttctagagagtagagataatcactgggatagaaaacctactatcccacccacaatggtatgtgtagcataactactaacatttttttaagggacagggtctcactatgttgcccaggctagaan

SEQ ID NO: 8453 - DNA, 381 bp, Homo sapiens
  III.2081 (AA975450)
agcatataaaaattacactcaaggtactttacaaattaatgtgttggaaatctgatgtggaataaaagttcctcaagagttggcagttacgttaccaaaaaaaaccaaacaccaaaacaaaaacacaaattcttcagtcttttaccctccctaagaaagtgaacagatgaaaaaataatttcttaagtcatgtaatcacacatcatcagctggcagggatgggatgcttatctttgctctggtgaagtaggcaatcttctccctagagttggggtgagaaataaattgacttatatatgatgctaaaaatactctgggaccattaaaacagtccccaagacctgcagtggcagtgatgtctctgcaagcacaggtagaagc

SEQ ID NO: 8454 - DNA, 333 bp, Homo sapiens
  III.2082 (AI207046)
tatttttaaaaaaacaccacttttaatgaaagaaactaatatccacacatttgtacttatgtacaattggggtaatatataattttaagctgtttacaaataatatgtaatgcttcaaatattacataaggttgataatatatttctagcagaaataaatatattgcacttaaaaagaactgcattagatgttacttcatagtattaggcttataactttttttcataaaacatttcccatgcccttccccccacccccagcacacatatttcattacagtgactgttctcacgcaattcattaagcaaatgaacacagcaaacaacagaact

SEQ ID NO: 8455 - DNA, 513 bp, Homo sapiens
  III.2083 (AA702807)
aaagaactctatgacaggaggcataattcaacagtatttaaaaggtcactttagtttttaatacttaatataatattgaacagttttgaaacttaatacttcatccttaaatactcagtcactacttaatacaactgtttttctccaaaaactgaatgtagagttcatctcgaactcattgtgaatcctgagcttggattctaacacttattcttttagcttttggacttcaggcctattgtttcaacacacttgcgggtgttggtccctggttatcacagctgtgccctagaaccacaagaatttcattttcttgctaagctcttggagatcagtaggggagaagcctttgcttggttttctggctgttagattagcaaaaggccctttggaatttactgacccgtctcccaggcagaagggaaaagtgacaagacaggtacaagcatgtgcgcgcagcaaacactatgaaacttaatggaagaagtgacattcactctgtccctatgtggt

SEQ ID NO: 8456 - DNA, 423 bp, Homo sapiens
  III.2084 (AI095370)
ttttttgtgataccattcttcttttaatccttaggaattttacagagatatacttcatatatcacatatatatcatataattcttccgtttaaacatatttatagacgtgtgtaaccatcaataaaatcaatttttgaacattttcatcatcaccccaaaaaagactccacacccattggcagtcgctgctccttgttttgtaattcccaactcttttaacagaagccttgaaagctgtgcatttcactctaagaactggtgtagtggcatcccacacatttctacattttatataatcatcataatttattttgaaatattttgaattctcttttgatttcatccatgaactatgaattttttataagtatgttgcttaatattcacatattgggagtttttctagatatagttattaattt

SEQ ID NO: 8457 - DNA, 232 bp, Homo sapiens
  III.2085 (AI207044)
tttttttttttttttttttttataaaaagacactttattacactgcccactcacaccaggccgggacaggagtcactccttaaaaccccgagcgggtgtccaggctgatggaggaggggaccactcacccgccacaaagccagccccctcacatggcttcctccctgaggagcatctcccacactggggcttccaacgatctttgctctgcgtgtgctgaaaggacagcgtc

SEQ ID NO: 8458 - DNA, 393 bp, Homo sapiens
  III.2086 (AI276985)
tttgtagaaacggggccttgctatattgcccaggctggtcttgaattcctggactcaagtgattctcttgccttggcctccggagtcgctgggattataggcgtgagccactgcgcctggccctatcactatggtaactttacatttatctgaattccttttttttttagacggagtctcactctgttacctaggctggagtgcagaggtgcagtgtcggctcactgtgcaacctccgcctccgggttcaagcgattctcctgcctcagcctcccaagtagctgggattacaggcacgcgccaccacgcctggctaatttttttttttttttttttgtattagtaagagacggggtgtcaccacgttggccaggctggtctcgaactcctgac

SEQ ID NO: 8459 - DNA, 429 bp, Homo sapiens
  III.2087 (AA554164)
tcagcaaggccatctttactttctgcagaaagggtgctcaactgcagatggaacaatggtgagagcacatctgaacaaaggaaaagcagatgtatttatcccgtacgcatttgggttgtccttactgctgtgtcctgcatccattggctggagtgggacctcactatcttaaactgatacccgatttgaaactttcctaaataggtaagtgcaaggaagaacaaagaagttgcttacaaaaggtttcaggaagcaataacatttccaattaaggaaggggcataggctgtgagctggaatgtgtctgtgagcatgtccaacagttacataggatagggcttaacaaagagctattagcacaaagcaaggaggcttgaggaaaattagtctttaaaagaatctattatttctaagacttatgatttattc

SEQ ID NO: 8460 - DNA, 419 bp, Homo sapiens
  III.2088 (AI188171)
tttttttaattttaatagtatattttatttaatgcaaaatatccaaaacattatttcaatgtggagtcaatatgaaatattactgagatgttttacatcttcatactgttttctaataatatatgaattattgaatgaagtacgtattttacacttacactgtatcagaatttggactagccacatttcaagtgctcttggacagcacaggtctattattctccaggcctcagtcattttctgaaccaactggaggcaagaaaacgagtgtgtcattgaaatagtgtccaaatgccctgagccggtacaggccatacatcattacttccatcttttggggggtcagtccattgaaagtaatagccatatctgaacagcagccttctactacttgctgagggttattagacaatgcctct

SEQ ID NO: 8461 - DNA, 416 bp, Homo sapiens
  III.2089 (AI150324)
  misc_feature (377)..(377): n is a, c, g, or t
  misc_feature (415)..(415): n is a, c, g, or t
tttgttgttagtcatggttccttttattctcttttccctcagctctattcaggtataactgatcaacattgtatatgtttacactttacaatgtaaattaaaattaaatttctaagcccctcaatgaactgaacggatcctcctctcagccaaggggacccaaataaacctgaaaacttcattcaggccatgagggagaagaggggtcgggcacgcctcagtattccctccaccctttgtggttcagacccaactgagcagcagtgacatgaaaatagagatcctaagactgacggaagaaacgccttgtagcaataagatacccaacttcaaatgcgcctctgtatgcatcacctgaaagcggtcctgaaagagtntgagattttaccccgagacagatttctctgacattttnt

SEQ ID NO: 8462 - DNA, 318 bp, Homo sapiens
  III.2090 (AA781084)
tttttgcttttaaacatcttttaattgaatgttggccaagtagtcaatgtccttgttaacactaaagaaagttgtgtaaatataatacagtcattataaagtcatcttcttggcccagatagaatagttctcttccatcttccaagatcaatctcaacaaatctcaaaagaaagattatagaacccccccagtagaggggagctggaaaggagattggtttaattataccatgaggttggaaagcaacaccttacccacataatctaatactcatcttcaataaaaaacaatgctatgaaatctatcattttcaactc

SEQ ID NO: 8463 - DNA, 375 bp, Homo sapiens
  III.2091 (AI242464)
  misc_feature (265)..(265): n is a, c, g, or t
gagatgaagtctcactctcactctccctcaggagctctgaatccctcccactgtcttctccagagacttgctgggagctaggtcctccagcttcacccaccctctctcttggagcctgcccctcagcattcacacatgtctacaagtgaatatccaagggggtcataatcatcagtgcgacagctgcttaagatgcagattcctgggttcagtcttttatttatttatttatttatttatttatttatttattttgagatggagntttcgatctcagctcactgcactccagcctgggagagagtgagactccggcagtttacttggtcactgccacctactggtaagtgatggaagctgagcccagtcttctca

SEQ ID NO: 8464 - DNA, 413 bp, Homo sapiens
  III.2092 (AA429857)
  misc_feature (63)..(63): n is a, c, g, or t
  misc_feature (64)..(64): n is a, c, g, or t
gcagttcctcgtatttattcacaatcccacgaaatcaatggctcttcggtgcactgcagccanngactttcagctcagccgagctgactgttgagggtgataaattataggcgaaacccggggacatgaaggcaagtcgctgggtttcagactgcctgattgcaaagaggtgacagtgtccttgccccgccgggcgacctaatgcgtacaagaccggggctggcctggtaagtggtgactcttagcctgttctctttgcttcttcctcctccccctgggagaaggccgctgaggatccggaagcaggaatgtctgctgtgggtgagcctctgttctcttttgaacaagagaggctaggccctctgagcagccgcactttctcaatggcaggtaagtgcctcctcttggcgttc

SEQ ID NO: 8465 - DNA, 461 bp, Homo sapiens
  III.2093 (AA446163)
gaaaaccgctcgcattagcaaatgattatttcctccaacgctgaccgtctcttagacccacagaaactcgaggaccggtctgcaccctggctgacttgggcctgccagagctgccgggctgagcctctcctccagaggactgcactggcctgaactgtgcttataaagaatctctgcaaatcaacaggaacttctcatccagagccgggatagggagggctggaatggaaatgaggctgtggaatgaaaggtcactctcaacttggggaaaatggcatttcaccaggaacatcaagtacctcggaggcagaacatgcgaggggcagggaacgccaagaggaggcacttacctgccattgagaaagtgcggctgctcagagggcctagcctctcttgttcaaaagagaacagaggctcacccacagcagacattcctgcttccggatcctcagcggcctctc

SEQ ID NO: 8466 - DNA, 375 bp, Homo sapiens
  III.2094 (AA970376)
tttaaaaattgtttaattattttaatgtgcttttgctgctcttgctgtaaattcttttaaacttagcctcataggttgggttctcagggagtggagatggagcttgaatgcaagatgtttattagaggtcagtacttgaagagggaggctcggtgtctattacaattgctctctggatgatctgtatcttttctcagcctctggtccccatcttccccttaagcctcttcacagcttgctgccttgccacttcctgctatgactgtgtgtcatgagtcttcaaatgctcttgtgcacagctcacttcttgtggattgccaatttgcacaaagatgacctctcccataggacaaagtcaacagtcaggaacaaact

SEQ ID NO: 8467 - DNA, 297 bp, Homo sapiens
  III.2095 (W92716)
  misc_feature (153)..(153): n is a, c, g, or t
  misc_feature (271)..(271): n is a, c, g, or t
  misc_feature (291)..(291): n is a, c, g, or t
tgcccactgccttctcttgaataatatttcctatttatcttctccccttcaagctacaatgtcttctggacctccaacccaggactgcccctgctgacagagatggtaaagagtcgcctaaatagctggtttcagcatcggcccccagggctncccctgaacgctacctcggcttgccaggatccctgaagtgggaggacagaggtccaagtgggcaagggcaggggcagttcttgatacagcaggtgaccctgaaaattcccaatttccnctagagttttgtgtttaaantcagca

SEQ ID NO: 8468 - DNA, 409 bp, Homo sapiens
  III.2096 (W92717)
  misc_feature (14)..(14): n is a, c, g, or t
  misc_feature (41)..(41): n is a, c, g, or t
  misc_feature (61)..(61): n is a, c, g, or t
  misc_feature (395)..(395): n is a, c, g, or t
gagactgcataggnctcggcgtggactgctcgttgtactangaattctggaggcacccggnctcggcctcatcccccagtatctgctccctcccaatccagccatcagcatttagcagccccagccagtggcaagggttcccgggtgagggagggatcccaccgctgaaccaccagctggtgaaagccttcatcccaaaggaagcctcgtgggaagaatgaccgggagggcactgctgtaaaaagaggtacgggtggaaagagggctgggtccaccttctgctcagacccttccaccccgatgtcttggcaataccagcccttgtccgtagaagtaagccaattccaccaaggaggccgctgagggcagcctgacccaaaacctgctcgccaganttcaggcccttctc

SEQ ID NO: 8469 - DNA, 483 bp, Homo sapiens
  III.2097 (AA432020)
ggcaaatggttggatatacctaggtcaacggccaagatctatttgttagagtgtgtgtcgaagttataactaacctcgcctactatctatacatttcaagacacattgccctccttcaagagagacagagtattatccaattgctgggaaaacaattggtaaactgtcctttataacatgtgacattgtaattggcatgaaattcacttattcattctaacttgatagatatttgtgttgtttcctttttgtttgtctggatatttatgaatagggctacgatgaacattctttcccagatcttttagtataaataagcattcagataagtgtagaaataaatgacaattaatgaatcgtgctgccaaattacttattgactcagtctgcgcccaagggaaaaacagaagccgcacagtaatttgaacaggaaaattacacagtttttaacatagaagatttaagtaatgcgggaattgcttc

SEQ ID NO: 8470 - DNA, 522 bp, Homo sapiens
  III.2098 (AA448476)
ttttttttttttttttacccttgtacacattatatttagtaaatgccttaaaatgtttgaagggtgtcaaaatatatcaatcttttcaaatataaaactctgtcaaagactaagaaggtaacaattaaggtgatgtagttcttgaagttatataacaaatggctttcacatgttcatttttaaaatcagtaggagtgtatcttcagatgcaattcattaatacattcttaaaattaaacgccaccgttgtcctatgtgaaaaagatattccatttcatttcttgtaagttttttctccccctcactttagatgcatgaaattagtaacagacttttataatgcattaaacagctttggtctttagaaagaaccatatccattctatgttaaagtaaaatagttcaaaattagatgaaagcatctaatttcattcttcatatggataagcgtgctggttttctatttgttgcttctaagctccaaatttattctttttacctactctgttaaaaagaaaagtg

SEQ ID NO: 8471 - DNA, 472 bp, Homo sapiens
  III.2099 (AI277025)
  misc_feature (445)..(445): n is a, c, g, or t
cagcatccaatttttttttttttaatttttagtagagacatagagacgaggtcttgctatgttgcccaggctgatctcaaacttctgacctcaagtgatactctcaccccagcataccaaagtgctgagattactggaatgaaccattgcctctggtcctaaaatatttaaataagagaggatgacccagggttagtttttttttagctggggctggcccttggggtggacatagggtttggtgtggctgtgtggggttccccaggcctggccgaaatgcctgtacaccttggcccttgtaagtatgggagagcaggctgaagccacaggccttgggaaggccagggccagctggcaaaggggaggggttttgcccaggcttgaggatgcggtgggaagatctgctgctcacatggcatgccacacttttgagttggggcacctncgcacggcacacatcattattgatccc

SEQ ID NO: 8472 - DNA, 424 bp, Homo sapiens
  III.2100 (AA428495)
gacctgtcacttccagacagtgccagctaccagatttagcccattggctcagcccttttctggtcccaggtctgtcttttctgggcgcttggagaccttcaggccaggcccacgtctgggtacactctttatcctggcatagttcttggacactgagctgaagaaggaagatgagaaaccccgttcaccaaggccatggaagtggaggctgcagaggcccggtccccagcccccggtacaagcgctcgggccgccgctacaagtgcctgtcctgtaccaagacatttccaaacgcgcccagggcagcgcgccacgctgcagctacatgggccggcagactgctctgaagaggtggccgaggtgaagccaaagccagagacagaagctaaggcagaggaagccagtggggagaaggtgtcaggct

SEQ ID NO: 8473 - DNA, 312 bp, Homo sapiens
  III.2101 (AA479908)
ggccttggggcatagcggacaccgatagggcctaggcttggcgtcggaccgtgacaccttctccccactggcttcctctgccttagcttctgtctctggctttggcttcacctcggccacctcttcagagcagtctgccggcccatgtgtggcagcgtggcgcgctgccttgggcgcggtttggaaatgtcttggtacaggacaggcacttgtagcggcggcccgagcgcttgtagccgggggctggggaccgggcctctgcagcctccacttccatggccttggtgaacggggtttctcatcttccttctt

SEQ ID NO: 8474 - DNA, 448 bp, Homo sapiens
  III.2102 (AI341769)
ttttttttttttttgttttgaagacttttaaccttttgagtatgaccagccatacacaaagaataacggggtccaccaacaaagcactgaaacaatcatttggctgagacttgcagatgacccattctatgccacgcctttatggttctacaaacaccaatcagcatttccttacaagtttaacaaggttaaagaacattaaggccattcgtatagtggtaaggggtgtctattattaattcatccagcatttactaaacacattaatgtaccaagtatttttaatgtaagttgggcaaagaaatatttaaaatgattaagacatcatttatgcttctaggagctaatagtctaaaaaggaaggtaaaaacccatagaagatgttatggaagaagagtggagagtatgccaggagggagggtaggaagagtatcacccctttgctttg

SEQ ID NO: 8475 - DNA, 365 bp, Homo sapiens
  III.2103 (AA704984)
taagtgacatagtttgacgtcattatcctccctggttggtctcttctgaatattgttttccagtcaacatccttgttaaatgtggcattacaaaactgagccgcagataacatgtggttttctgaaggcacacaacctcacgatgcagtgctgggagcagtcatctgatgcctgtccccgtgcgccatccattgaactttcataatgattggcactttttaggaactatgaaaaacaaacatctttgcttaatatccaattcctgacttctgtgaggcttaaatgacaagtgcctcgtccagtgactggttgtatatctaagagtgttgctactgatattgcaacacaatgctttggcatgggag

SEQ ID NO: 8476 - DNA, 459 bp, Homo sapiens
  III.2104 (AI160468)
ttgtcgatctatttctgctaaaatttttatttaaccaaagcctgatattatttaagtgcaaatgcttaggctgataaaatgaagtctggcatgttaaaaaaaatctaacatttaatattacaatatacagcactggtaaaatatgcaatcatgtacaaacttgcagtaggaagacctcaacaaatttatttttaaaatgggcttttgcaaatttcaaatttatttctgtctgtaaaaacaaatgcattttagatttggcttaaaagaatgttcctaacatcatactaaataaccattgtgtcaagataggctgacttaacgcgggcatgtgaataaaatacattaactgctattttcaccatctttctaagcttgcatcagaacacttattttcatatcagtatgagaccacataaactaaatcccagttgaagaatcaggattcctgacttttatctc

SEQ ID NO: 8477 - DNA, 142 bp, Homo sapiens
  III.2105 (AA031455)
ggcagtaatgaatgccatgttggttttattatttttttttttctaattttaagttccaggatacaagtgcagaacatgtaggtgctatatagataaacatgtgtcatggtggtttgctgcacccatcaacctgttgtctagg

SEQ ID NO: 8478 - DNA, 442 bp, Homo sapiens
  III.2106 (AA031576)
  misc_feature (21)..(21): n is a, c, g, or t
  misc_feature (22)..(22): n is a, c, g, or t
  misc_feature (233)..(233): n is a, c, g, or t
  misc_feature (241)..(241): n is a, c, g, or t
  misc_feature (403)..(403): n is a, c, g, or t
  misc_feature (412)..(412): n is a, c, g, or t
  misc_feature (431)..(431): n is a, c, g, or t
ggcccaggcaaaagcgacgcnnacattggcgtgggtccattcaagaattgtgcccacaatataccaggcacttgtccagacctgcatcgtccaatgcccacctcgacctcccaaagtgttgggattagaggcgtgacaccagcgccctgcctgcatgtggctattgagatgtgctgtatgatacacaccagactttgaagactcagtgtgaaaaataaaaagaattttaagangggtgggngtcgaggggaggcagagcagtaggacaaatagctaatgcacgcagggcttaaaacctagacaacaggttgatgggtgcagcaaaccacccatgacacattgtttatctatatagcacctacatgttctgcacttgtatcctggaacttaaaattagaagaanaaaaataantgtaagccaacttgggcangtcattactgc

SEQ ID NO: 8479 - DNA, 252 bp, Homo sapiens
  III.2107 (AA553963)
tcattagaatgtagtctttattaattattcaacatacatttattgggaacctactgtgtggcaaggacatggagttgggcaataaatagacaacaaactgtagccctcatgaaggttatattctggtcggggtgagagacaacaaactaggttaaaaagggggcggggcacaatggctcacgcctgtaatcccagcactttggaggccgagtcaggtggatcacctgaggtcaggagttcgagaccagcctg

SEQ ID NO: 8480 - DNA, 351 bp, Homo sapiens
  III.2108 (AA897678)
tttttaattttggtatacttttatttaatatactatatatcaccctaacaatgcaaaaatatgatctcatatggattttcaaaaattctttactaatgccattaagagttattaatgctataacaataatcagcttatctaaattagtacagtacttaataaaataatacgcagtttggaaaaggggacagtcaccatttcagcctttcaccattgctgatgagggtgaaccggtatagtctttttggaaaacaatctggcaacatttagcaaaagccttaaaaatgctctaacctttaacccagtaattcaatttctgggaatctatctgaagaaaataaccctatatac

SEQ ID NO: 8481 - DNA, 465 bp, Homo sapiens
  III.2109 (AI039250)
tttttaaattctaaaggtttaattagtaaattcattatttcctccaaaatatactgtcattcttctcttaacaatgaatgtttgacacaaatccaattttgatgttaaaagtcaacatacatagataggtccctcatgttgacagagcacagaattggaaaaaaaaactgcaaatgagaaataggggtatttctaaatcttctgtattcctaaaatatcacactgcgcccttgcttcagcctccctgatagactggtttgggtgtgcaatattaatgcaggaatacgtggaataccagcacaaagccggggagggagactagcaaactctcgccatcaattatttctcaactacatttagtattcttcgcagttttagatttttttttcctttaagcgaaaaccactccactgaaaaaaattccaaacttgttttttaaaaattgcaggaatttcttcgtatttt

SEQ ID NO: 8482 - DNA, 435 bp, Homo sapiens
  III.2110 (AA680113)
tatcaataattttacaaccagttttatttaccaaagattcatgtgaatttgaaaagctatttgtacttaatttataagtactaatttacttaaaattcaatttggtagcatgttagacacatggtggggaaaggaatgatgtgatgtgtcagtcaggataggtcaactgctgtaacaaacagccctcaaatctcagtggctgaacaccatacagctctgcttctggctcacacaaaatccttgcagacggtcttggttaggcatctctcctccttgtggtaacacagggatcctggcttcctccttgtgatgctgttgtcttcatcctgcagcttcctaggtcaccaggaaagcagagagtgtgaggaaggcataccagctgtttcacctccttggccctaaaggggtgtgtattacttctgttcataccttagt

SEQ ID NO: 8483 - DNA, 386 bp, Homo sapiens
  III.2111 (AA704538)
gagatggagtctcactctcgcccaggctggagtccaatggatgacctcattgatcaaagtcataagggagacactgggttggagactggaaactctatggtttccatcagggaataggttaggggtggggtggggtccatttcccatccactgtggcaaaccagtcccttactacaccagcaggccaggccttacctgctgggcaagctttgtggctgtggctggtgctgagtgttagcaaagacaggaggatgtgtgtgtgaagtgtacaggtggtggggggactggagggggggttcttagtgataatcagccgtccctgaagtggtattttggatgtggcaaaaaggctgactgacaccaaggctatccttgtcctttaattc

SEQ ID NO: 8484 - DNA, 243 bp, Homo sapiens
  III.2112 (AA489580)
tcaaggtagaaatgatcatgtgagaaagatatatgattgagctactactgtcacctcttacagttactagtgttagctaatagaaactttcatatatacacatagaaaagaattattacattttacattgaaaaatgtaatatatggcccatgtagtgtatagaaaaatctgtagtttattggttcatcaactatgtattgtgcacctacctatgggtgtcagggtacaaattggtttttttt

SEQ ID NO: 8485 - DNA, 410 bp, Homo sapiens
  III.2113 (AA496995)
tttttataagtacagtattctttattataaacaatcagataacagtataagtgtgcatttgatggataaccgaagccaagttattataatagaaagcatgacttcactcaaatagacagtttctttgttgttgttaatctgttttacattaatttgaatttaacatatgctaggatcacctaaacttgtcatacagttctgctattaaaatcgtaacagggaaagacaaaatgtgaaatgcatgttatatattgctttatttgttgaatatatatgtgtgtgtgtatatatatatatatacacactaaatatttgggacacaaagttaagcaggtgcttacagtctatcaagtgatatttatgaaatgtttttgttgctgttttgttgctgttatgggaacatccatatc

SEQ ID NO: 8486 - DNA, 431 bp, Homo sapiens
  III.2114 (AA904537)
tttatcaatatattgaaatttattgcttaaccaaactgtttaaaccatcttagaatatctgtaggccacagaacagagcttgaaatcagattctattaagacagaattaaaagtgtcaatgaaaaaaaaagcaatgcatcaaagattcaccattgcttaccatagcaattctatttcattttacagtgaaagtaaaattaaggcactgaaaatgagatcgaaacattaaggaaagactatgagtttttctttttatggagagtttagaaaagattataaattcaccacaaggaaaatgagaacattaacacaggccagtgacgagatttcaagaaacttatttttaaaaataaaaagagatgatgtctttctcatcaaaattactgaattatatggctagggcttaaaattcattatttttaaaaaggagc

SEQ ID NO: 8487 - DNA, 262 bp, Homo sapiens
  III.2115 (AA482799)
tctctagtagacatagtagataagaaagcaaaaacatgccataaattactgtagttattgtgaagaagcccgtataggatggaggtacaggtcaattgtagttgaagggattcaggaaagacttcatagatgagggaagtcttgcttgaagtgactcctcaaagatgaataaatgcttgccatgtggtgagtgaggagggacctttcagacagaatatgcaatgagacaggggacaaaggcaaaaaaaaaaaaaagtcgacg

SEQ ID NO: 8488 - DNA, 217 bp, Homo sapiens
  III.2116 (AA228489)
gtcgacggtggctcacgcctataatcccagcgccttggaaggccaatgagagtggatcagttgaggccaggagtttgagaccagcctggccaacatggtgaaatgccgtctctactaagaatacaaaaatgagccgggcacggtggcacgcacctgtaaaaatgcaaaaattaggctgggcacggtggctcacacctgtaatcccagcactttggga

SEQ ID NO: 8489 - DNA, 502 bp, Homo sapiens
  III.2117 (AA988736)
ttttcgctgtttgttgtttatttcatttccttactagaacataagctcccaagggcaggagcttttctgttttgttcagttttgtattttcagcaacaagaacagtgcctcgtatacagaaggagctcaataaatacctattaagtggatgcgtgaatttgtgaatatatgtcgattgacagaaatataccaggaccacttctaaagaaggcttcccctgttctgttttatggtctgctatgtccctcatgactgaaatcattcgcagcacaaagtagatgttcaatgaatatctattgatcaactcccatagcccctgtctgctctattttagcaactgttctaggaaaactgctaatatatctggcctctgcctggcttctctccacctccctctcaggcctttgcacagagcaggtcctcagcctgagaggactgcattacagtttcagggcctactgggtggagggactgctagggcttaaggaacaggagcaataga

SEQ ID NO: 8490 - DNA, 500 bp, Homo sapiens
  III.2118 (AI792004)
aggtctccaacctgcaataaatgaaacatctgatccccttgaatccaaataactttttctttgattttcttttacttctatttcttcgtcctttgttctacagcccgagtcaaatttccctttagaaattgaaagaatgtgtgtgggtttttcctgctttttttttttttttaaccaagctctagtgcaaccgctggttcatggactagaatattaagatccaattcaatggcagactgtctccagcaatgttgtatttttatttttttttgccgtcatcccccccacccacttgtgagcaatggttgtacaaattagcctctgtgtactagtcaccgaagctggcttcccaattaaccccaggcttgagagaaaataagactaaagattcttcccctcctgaaagaactaagttatccatgcacaaaagcctacatgttggcacctggctatggagttggcatttaattgcctttgtaatgactcagtccatctgcatg

SEQ ID NO: 8491 - DNA, 460 bp, Homo sapiens
  III.2119 (AI820607)
ttttcgctgtttgttgtttatttcatttccttactagaacataagctcccaagggcaggagcttttctgttttgttcagttttgtattttcagcaacaagaacagtgcctcgtatacagaaggagctcaataaatacctattaagtggatgcgtgaatttgtgaatatatgtcgattgacagaaatataccaggaccacttctaaagaaggcttcccctgttctgttttatggtctgctatgtccctcatgactgaaatcattcgcagcacaaagtagatgttcaatgaatatctattgatcaactcccatagcccctgtctgctctattttagcaactgttctaggaaaactgctaatatatctggcctctgcctggcttctctccacctccctctcaggcctttgcacagagcaggtcctcagcctgagaggactgcattacagtttcagggcctact

SEQ ID NO: 8492 - DNA, 491 bp, Homo sapiens
  III.2120 (AI149729)
tttttttttttttttacctctctatcctagtagtggtcatgtcttcctactgtggcaaatccctgggttacctcacagttccctcttgtttgcctcccagccccttccttcatctgtgcaatcagctccttacattaaatttccctttgttcagatacttagagcaggttctgtttttttctggttggaccttgacagatacacacagcatcaaggattaacagagacgatttcaaggccaaatcacatctgagggctgccaggcagatttattatcaaatccttaaactgcaaaaataggacaaccttcttcagaaacaccatctggtaccacactattcctctaatgcctagcccaaatccctgctgtgatgaagtttgcatctgataaccagatagaaccaagccactcggcctcaagagctaacgtgagcataggtgttagtgggtccatgggccatgccttagtactggcaggagacattattatg

SEQ ID NO: 8493 - DNA, 303 bp, Homo sapiens
  III.2121 (AA682597)
gagacagggtctcagtcagtcacccaggctggagtgcggtggctcgatctcagctcactgcaacctccgcttcaaggttcaggcgattcttatgccttagcctcctgaggagctggaattacaggcatgtgccaccacgcctggcctaaatttttgtatttataatgtatccactacataaattaggcatagaaatggctatggtctcatcgaagaggattcgttaggatataaagtctaaattgtgcccatttaaaggaaagcagatgggataaacagtaagaataaaaggacataagaagc

SEQ ID NO: 8494 - DNA, 393 bp, Homo sapiens
  III.2122 (AA459731)
ccccacaggctaagaaggcaatagggaaaatgtttccagggcatgtcagagactttcatggcagctgctctcattacaggcccagggactaagataaaaaactagtattttggggctggcccagagcacccctagagactttgttccttgtgtcccagctgctccagccatggctaaaaaaggccaaggtacagttcaggccacggctctagagggtgcaagccccaagccttggtagcttccatccttcctgcaggtgcacagaagtgaagaattgaggtttgggaatctctgcctagatttcacaggatgtatggaaatgtctggatgtccatgctgaagtgtcctgcaggagtggagtccccatggagaacctctgccagggcaatgcag

SEQ ID NO: 8495 - DNA, 379 bp, Homo sapiens
  III.2123 (AA461314)
ttttttaagaataaaaagtgtttatttctaatacacctgaatacagaaaatatgaagggagtctttgagtctaaagagcattgacgtaaaatggaaactcaattcttcatgaatcactgaagactgcagtaatagcaaatattttggtaaatatacagtaatattttattacttttaatttttttataatatatggccatgtaaagagaaactgataatactatattataggatttataatatatgtacttataatatttatgaaaaccatagcatctatgagaggaaatgaaaaataacaagtagtcattaggcacttacattacatataaacggatacaatattaactaaaagtatgttttaataagttaaaaatac

SEQ ID NO: 8496 - DNA, 336 bp, Homo sapiens
  III.2124 (AA688266)
actgtcacctccacctcctgggttcaaacgattctcctgcctcaggtcctgagtagttgggattacaggcatgcactgccatgtccagctaatttttgtagagattgggttttgccatgttggccaggctggtctcaaactcctgacctcaagtgatccacccaccttggcctcccaaagtgctgggattagaggcgtgcgacatatgcctggccaacacatgttcatttttaaaaaactgactagaagactacttaggaaaacttcctatttcaatgaaaaaatgtagttgctagagtggaaagtagtcataaaaataaaatgcatccaggttcc

SEQ ID NO: 8497 - DNA, 406 bp, Homo sapiens
  III.2125 (AA903656)
caaatcaacatttatggtccactccacttagcaacatcagaatacacattcttttcaaatgaccacaaaatatatatcccaagataggtcatatcctgggctatcaaacaagcctcaacaaattttaaataagtgaaatcatatagagtgtgttttgtaatgacaatggaatcaaatgagaaatcaataacaaagataacaggaagatattcaaatgactagaaacaaaacaacacacttttaagtaatccatgggtcagaaggaagtctcaaagaaagtttaaaagatacagtgaactggggggccaggcggcactcgcggaggtgcttctccgagcgtgacgccggactccgctcccgcagcccgctcgcccgccagtctagccgccgcctccctcgctccctg

SEQ ID NO: 8498 - DNA, 395 bp, Homo sapiens
  III.2126 (AA916755)
atcatagggcctggtcaacagaaaccaaccacatgattagaaagttggaactttaagccagccaggggatattctgggaaggaagtgaggctggagactgagttcaatcgcgtgtccaatggtttaatcaaccatgcctatttaatgaaaccttgataatatactctggacaggaaagctcagtagagcttcctggatggtgaatacattgacatggcaggatggtggtactcgctaactctactggaaatagcaaggaagctctgcatccaagaccctcccagacctttccttatgggccttttcatttggctctgctgtgatttgtattcttataataaaattgtaattgtaaggatagcactttttaagttttgtgagtcattctagcaagt

SEQ ID NO: 8499 - DNA, 440 bp, Homo sapiens
  III.2127 (AA970624)
taataatgaaggcttttcccttttataatgaaagaaaaaagacacttaaaatgttaaaggtttttttcattgtcattccccattgttgttagtaaacgagtaggccttcttggggaccgtgtaataagagcctagagatgtaaactgccactgatgcaaactgagtaatataaacattttctcagaaaatggatttagattgggacaaatttagtatcaataaatgaagactataatattataaaataagactttgtggtcctaaaacaaggtctttctgcccatgctttctcttcctggtcctctgtgctggtgtctgccttgtaaggggttatgcacagactctctcccatgctccgtgctggtacagtgctgggtgaaggaagatttttcttccttcactatgatgccacccaatgtgctgactgtgttgttgcagg

SEQ ID NO: 8500 - DNA, 360 bp, Homo sapiens
  III.2128 (AA993924)
ttaaaagcttagctggtagccactgtgcccagcagccaccagaggccctaacaaaagagctccagcaagggattcacctgcataggtatctctgggggagccttgccttcatgggtagggtttaaggcatggctcagtgacacaaccacaatgtggaagtgtaagaatgttctgtgcttatagaccctgggggatacactgatacactgcctgcacggagtcaggtcatacacacacacacacacacatacacacacacacacacacacacacacacacacagagagagagagagagagagaaagagagaccttcagagtacacaggcagggaaaaaagagaaggaagctgtggagcaat

SEQ ID NO: 8501 - DNA, 461 bp, Homo sapiens
  III.2129 (AI126448)
ttatgttgtacataatttattttgataagaaataacttaataggcccacattctactgcacaatcttggtctttataagtcactaagatgacttttaaaggttaaaaagtcaaaaaagtttgtgattagaatctgctattgatttgacaaatggttttgggggcatgacccagaaaaattatttcagaagagaagaatgctctcttttctcatttagagaataagaggatgacacttatttctgtataatgactctaattacatccagaatgtacaatcaggtagtaacatcaaatgttcccagattaatgtagacattgatttaaattagaaacacagtaccacaatgctctaacatcagcaaaaatcattacttacagtttatgaaactgacaggagcaaatgccaatcaagtaaatagcctatatttagataacctaggtaatagttcagtggggagt

SEQ ID NO: 8502 - DNA, 569 bp, Homo sapiens
  III.2130 (AA443137)
gttgaaatgtaatccccattacaatagtattgggaggtggggcctaatgggaggtcatgagggctctgctcatgtgaatggattaataccactgtataaagggcttactgccatgtgaggacacacatttcatccctttgtaccctctgccttgtgccatgtgaggatccagcaagaaagcccttatcacaccagatgtgggcaccttctgcttggactttccagcctccagaactgtgagaaatacatttctgttctctgtaaagtacccagtctgtaatattctgtaatagcagcacaaaatggaccaagacattttgctttctcctcaggccgatcccaagacacaaaaaatgtcctgctaattagtgaaggagttcactggcacagacccaatctgcagacaaagaaatggctgccttttcaaatgcctactttccaacaacaaaaatcacaaattgtatttaaaaaaacaaggccgggtgcggtggctcacgcctgtggtcccagcactttgggaggctgaggcaggtggatcacgaggtcaggagatcaagaccaccctggct

SEQ ID NO: 8503 - DNA, 542 bp, Homo sapiens
  III.2131 (AA443138)
tttttgagacggatcttgctctttcgcccaggccagactgcagtggcgctatctcggctcactgcaagctccacctcccgggttcatgccattctcctgcctcagcctccagagtagctgggaccacagaagtccgccaccacgcccggctaatattttgtatttgtagtagagaagggtttcaccgtgttagccagggtggtcttgatctcctgacctcgtgatccacctgcctcagcctcccaaagtgctgggaccacaggcgtgagcaccgcacccggccttgtttttttaaatacaatttgtgatttttgttgttggaaagtaggcatttgaaaaggcagccatttctttgtctgcagattgggtctgtgccagtgaactccttcactaattagcaggacattttttgtgtcttgggatcggcctgaggagaaagcaaaatgtcttggtccattttgtgctgctattacagaatattacagactgggtactttacagagaacagaaatgtatttctcacagttctggaggctggaaag

SEQ ID NO: 8504 - DNA, 511 bp, Homo sapiens
  III.2132 (AA481179)
agttgggattgttagaagagctagaaagcacagattgcactcagttggacaaagataaacagaaagcttgcttttttatgaaattggagattaaatgagttgatggaatcaagcctagacagccacataagccagagtggaaaattatagactaaaatgcatctgatactgaagagaatgactctctccaaaagccctcactttttatttgattcaaggagtctttataagctcagcaaaccctaagattttaacaagaaaaacaaaagcctccaaacagcatggctttcatccagcgcttttgtgatttacaaatgaccagatttaaaactttaatcatctcacacctagggattttttggatttgttttagtttgtaaggcatgtccacagacaaaatgactcacaaaaaaacagaatcagcctaaacccccaattggccctattcctctgtcaaatcaagacagtcagttttgccctgggatttcagagtgtccccaagtggcccttc

SEQ ID NO: 8505 - DNA, 406 bp, Homo sapiens
  III.2133 (AA481493)
tttttttttttttttttcatggatgttgctttctttattacaaagggtttcatatcctcctggactgagtttctctgttgttgatgctgttggtgtttgtctgttctatggttgttataccttcttttctgtaggatttggaggcataatctgaaatgttaaataacagacttttatttttctaactagtgtcattctatctttggaaggaaaaaaaaaaaaaaaaaagaagaacagtgacattagcattagcaactctgaaaggatcaagacctgatcttcatagtcctattattttttttctgtttccctctaaaaagaagtcttagctccagtaacttcctaggaattacaatttcagaagtgaccagggattctcaaagggcactttcttagcttccacata

SEQ ID NO: 8506 - DNA, 463 bp, Homo sapiens
  III.2134 (AA845209)
tttatttttaattattattattttttatttttttgagacagaggcttgctctgttgcccaggctggagtgaagtggcatgatcttggctcactgcaacctctgcctcctgagttcaagcaattctgctgcctcagcctcctgagtaactgggactacagacgtgtgccactgcacctggctagtttttatatttttagtagagacggggtttcaccatgtaggccaggatggtcttgatctcttgacctcaggtgatccacccaccgcagcctcccaaagtgctgggattacaggttgtgagccactgcgcctggccttgaatttcttaataagtcatattgatgcactatacctttgatccatctccttctgaatttccttatttaactcatcgactttctgctgcagctttttccttctttgttcaggtgggaggtttgcgaaatcctccggtgttgcacc

SEQ ID NO: 8507 - DNA, 405 bp, Homo sapiens
  III.2135 (AI276079)
aataaatactcaatatgcagattttccccttttttctcactggtacctactgcaatgcccagaagcactggctctccatgctgtggaacatgcccaacactacgctaggcaatgagagatactgatgagcaaaacacacttgtggcctcatggaatgaatggaaggagggagatagcacataagtatttcaggtagtgacaagtgctatggaaaaaaacccaagacagggtggacacagtaacctcttcagatgcggcggtataggcaggaaggcttccttgagataccaggcaagctacgagctacctgatgaggaaccagtgggagaacatctggtggcgagggcttggccagggagaagggggctctgacacaggaacaaatttgatatgcttgaaaatcac

SEQ ID NO: 8508 - DNA, 347 bp, Homo sapiens
  III.2136 (AA609594)
ttttgggatgattatttaaattttttatttggatttatacaattgcattttttggatatcttctcaaatcagttcttaacttattacatgtggaaatgccaaacagaagatgctcaccaagtgaagaaaaatcaacctttggacatagcaataagatataaatatgtcctgatttttggttttagatggcgagtaacccatgggccaggtagcgttctatgccaaccttgaatgccatcaggaagtcactggacagcaaactcttccaagatcataacttggctgttggagcaacattgtgcatgttggcattcttcaagcattttttatggattaaatcatttaat

SEQ ID NO: 8509 - DNA, 448 bp, Homo sapiens
  III.2137 (W84795)
  misc_feature (434)..(434): n is a, c, g, or t
cttttttgagatggaattttgctcttgctgcccaggctggggttgcaatggtgagatctcaaaaaaaaagcactgtaatgtcacatgtagtcatctgccaaacaatgatgctttcagtcgacagcagactgtatatattccagtggtcccataagattataagactgtatttttactatactgttgctatgtttggatacataccactgtgtttaagttgcctacagtattcagcccagtaacatacagtacaggtttgtagcctaggagcaagaggctagaccatagaaccttggggtatagtaggctataccatgaggtttgtgtaagtactctctatggatgtctgcaaaatgatgaaaatttcctaatgacacatttctccagactatatcccccatcggttaagtgacaccatgaccttattaaaaacnaaaataaaccttat

SEQ ID NO: 8510 - DNA, 412 bp, Homo sapiens
  III.2138 (W84842)
agagagctagcatagttcttaagggccctagggtttttgaaatggtaaacgatcattggcttcaacttaatgtcaccaattgcattagcccctaaccaaagagtcagcctgtcttttgatgctttgaagccagatattgacttctcctctctagctatgcaagtactaagtggtatcatcttccaatagaaagctgtttcatctacattgaagatctgttgtttagggtagccactttcatgagtgatcttagctagatcttctgaataacttgctgctgtttctatgtcagcacttgctgctttcgcgttgcactttttatgatatggagaaggcttctttccttaaaggtcggtgaaccaacttctgctaccttcccaacctctgcagcttcctcacctgtcaagccgtc

SEQ ID NO: 8511 - DNA, 476 bp, Homo sapiens
  III.2139 (AA458940)
acctggacacagacgatgtcctccgagggagggagcccacccccgttacacctcagagccacgaagccggcgcccgctccctgccgcagcttccccggatccctgcgctgccctcgggaaagcagcgactcaaccagacccagccccccgcgcggcaggggcgacggctgacttgtgacaggcgtggaagtgaggaaggggacggtggaagccacggcagagggggagctgggcctggcgccggggggctcggtgatgggccgattgtagaagaagaaggggcactgctggataaagagttcaatgattgtctggtaggtgcgcgtggctgtgagggcgtccatagtgctgaaatcaggtctcatcaaggtgggccagaagcagatggagaagttctcgctggtcatgagattcaccttgttgttgtggctgaccctgtttaggtgagagatgacatacttgaagacttcgtggtt

SEQ ID NO: 8512 - DNA, 538 bp, Homo sapiens
  III.2140 (AA459154)
ccacgctgggcggcgggataatcatttagtccatctcccccttacattaattttggttaacaagagaggagacaccagtggacagactctgcatagcttaatacagcaaggtcaacaaattgctagcaaacttcagtgtgtctttctcgaccctgcttctgctggcattggttacggacgcaacattaatgaaaagcaaatcagtcaagttttgaagggactcctggactctaagcgtaacttaaacctggtcagttctactgctagcatcaaagatttggctgatgttgatctgcgaattgttatgtgtctgatgtgtggagatccttttagtgcagatgacatactttttcctgtccttcagtcccaaacctgtaaatcttcccattgtggaagcaacaactctgttttacttgaactaccaatcggactgcacaagaagcggattgaactgtcctgttcttccaaccattcctcccttagcatcagaaagagccggttgggtcatgggtacattggtttttaatcagccaaccgg

SEQ ID NO: 8513 - DNA, 489 bp, Homo sapiens
  III.2141 (AA846466)
tttgaatttttaaggtggcaacatgttttcttaaaaacaggtgagcctgtcagctctgctcctgagggagaggtagcttggtcaagagggcagccccaggccctgcagtacagctggtgattttcagcccagagccctggaaccttggatggggagtgtgtgtgagggctgtgcgtggtagaatggcaaaagtggggctaagtgtggcccagcgtggctggttgcggacatctggggttgctgtcaaccccggggcaagcagcggaaggtcccaggtgaacggcaggtccccagaggtctgtttctcctctggaccttaatgaccaggctcccagcaggagccagcggctggggcgaggggagagtgatttcaacgctctctgccccgaagcaggaaccgaaggccagccggtgggacccagcgtgactccaggcacatctggacacctatgctttgcccagagttgcttttctcagaggctgcagtca

SEQ ID NO: 8514 - DNA, 369 bp, Homo sapiens
  III.2142 (AA125913)
  misc_feature (293)..(293): n is a, c, g, or t
ttaaaggctataaaatagcagttacgtaggatgaacaagtttagagatctaaggtacaatatgagtactaaagttaataaaattgtactgtattgatggcagcagtggcccatctggagtggctgctgccatgatgctggttgcagtgtgggaggctctgctggggctgcatgttccatggagccagcaagggctggaagcaggcaggagcccactcttctgggcacagctgcagctacccaagttccggctgcagacctgggcatctctgcactctcgggggcctgggaagntcccgttgcccctgcaggctcagggtgtctgcttccaatgtctggactctcactgctcctgggtgcctgctcttgg

SEQ ID NO: 8515 - DNA, 412 bp, Homo sapiens
  III.2143 (AA127098)
gggtgagcaaggtgaagaggagttttattgggtgacagaacagctcagaggagacccacagagggtagctcctctccacagccagggtgtcccagtgagtgttcagctctgagcagagaggagaccctggagtgaggagctcctctctccacacaggttgtttcgtcatctactcagctctcagcaaaagggagactcttgagcaggtagcttctctccgcagctagccgtcccattgtatcctcgtctggctgaatccagggcttttatgggcctcagaggggagaaagtgcacactgatttggtccatggacagccatgagcaggcccagaaaaagcaccacaagttcccacttcagtacatgggactggcagcccagcccctaggctttcagaaccctccccaggttgg

SEQ ID NO: 8516 - DNA, 398 bp, Homo sapiens
  III.2144 (AA416601)
tttcaccctgccaagcacctccacgtggtgcctccttttattcccacaaggctacaggataggtggaattggaatgaggagccctgttttacagagaaggaaaccgaagctcctgtgctgacggtcagttagttacaaaggtcttaatccaaaactctgaaccattttgttaatttatctttcagtaacagttcaattaagttagacaaatatcccaaaaagctcttagctggccctcaaggcacttgagttcacagcccagaagaaaggaagtaaagacacggtaaggtaacttttctttgtttcagactcattatgtcagagattaagagagagctcttcaaaattgttggatccaaccccccactataaagttggagtaactgaggcccagtgag

SEQ ID NO: 8517 - DNA, 506 bp, Homo sapiens
  III.2145 (AA416619)
caggcgtgacgaccgtgcgcggcgcatgtgtttgttttcatagctgtgaagacagcaacaggcaggtgagagagtctggtctcgtccctccctcacttgtgacctcagaccagccattgccctcactgggcctcagttactccaactttatagtggggggttggatccaacaattttgaagagctctctcttaatctctgacataatgagtctgaaacaaagaaaagttaccttaccgtgtctttacttcctttcttctgggctgtgaactcaagtgccttgagggccagctaagagctttttgggatatttgtctaacttaattgaactgttactgaaagataaattaacaaaatggttcagagttttggattaagacctttgtaactaactgaccgtcagcacaggagcttcggtttccttctctgtaaaacagggctccctcattcccattccacctatcctgtagccttgtgggaataaaaggaggcaccacgtggaggtgc

SEQ ID NO: 8518 - DNA, 483 bp, Homo sapiens
  III.2146 (AA401436)
tttagggagaaaaagcacaaggagaatgtttctttaataaatatgcttaatgttcaactaaagtgtgtctgtggcggagaagagggacaatggatttttcttgaaatttgtggaagactaagttattcaacacaggctgtctaccttgaataaactttatcaactaaaaacattaagaatttgggtctttggatgctgacattcttaaccttggatacaaacccaaaggaagtgattgcaacaccaatggctatattttgtctgtaatattcagtctgaaggagagactaattatgaatgcaactctgcctttttgtgtgtaaaattacttagcttaccatcctaatttttgattcagctctatctgtgctaaccaagtagtttaatcaattctctcaagcaattttcttctctctgccaccatcttggtccaggctgcctcatctcctgctcttagtaacatgacaggtttttatctgattc

SEQ ID NO: 8519 - DNA, 545 bp, Homo sapiens
  III.2147 (AA778692)
ttttttttttggataaactcatttaatcttcacaataaccttatcacaatgtaagaaatttgtaatctgaagtatacagtttaaattacttggtaataaaacagacgtggaaactggtgaaagtataatgatgctgaaaaagattcgtgtaatagataaaagcttttctacattcacaaagtcaacatgattattctctatatgctattctctataagtcaaataaaattttagtggtaatgtttttattaataattgatattctattttttccatataaattctgatgcttaataaattgtgaattatgaggtaaaaaaatttacagtcactggattttcttcacttacaaattgtttgctattccataattgataatttccaaatcaaggatttccccaaaataagcccccctaaccattatcataatgttggagtatattgtgagagtagatctttacacatatcgggctttcattaggcctctcacctgtacaaattctgttatgaaaaagtatagctgagggacaggtaaaagtgtttcc

SEQ ID NO: 8520 - DNA, 477 bp, Homo sapiens
  III.2148 (AI141801)
  misc_feature (187)..(187): n is a, c, g, or t
tttttttttccgaacagcaaacatttattaagcacctactttgtgctgggtgctgagaatacaggagtagactagatccaatccctgttctcaaagagcttcccgtgtactgggtgttcgtcccgagtcaggaaacgactggtagcatcattatcccccatgtgttggatgccagaagccagggganagcggaacgtggagatgacacctcccagtcggtgcctctgagatctccgagactgggggggcggggggcgggcgaggggagatggcttgctgtttagggatgaggggaccccatcctttgccagggggttccagccccagcctggcaccctttcctggcccccacaacacgcagagcccagctctccccccatcgctgctggggctttgtcttctctgccgagaacctctccccgcggccgggctccgggatcgactctcgacttccatcccactcctagcttgccccgg

SEQ ID NO: 8521 - DNA, 357 bp, Homo sapiens
  III.2149 (AA421174)
tttctagccaatagatttatttcttgtgagcaattaaatcatccctgttctcacttcctctttatttcaaccttaatcagagtctactgttggacccagcacaatcaactacacattaccatgccaagaaatcacttctgaggattccagggatgttgtttgtttttttaagactggggagatcactgaaactgaatttatttctacagcttaggaaaaaaaaatttttgaaaggacagtgcatttaaggtctgtaaacacaagggaaaacatgaatctctccagctgaacctagggctgagaacagaaatggaggctcaaagtgactcgttgctcaggcacagaaggaaaaagggg

SEQ ID NO: 8522 - DNA, 342 bp, Homo sapiens
  III.2150 (AA421412)
tccatcaatttgtaaagttttggctgggtgtagtggctccagcttgtaatcccagcactttaggaggccaaggtgggaggatcacttgaactcctgacctcaggtgatctgcccacttggcctcccaaagtgctgagattacaggtgtgagcaccacccctgctgtcacattttaaaaatatgcctgctatagaaaaatctacctgtgttataggttaccaaagtcacataggtgctttaaaggtttcaagtgagttactctaaaagagactatccactttttgaacagagagatgagattcctcaaagtacctcagtacacagtgagaattacattcccct

SEQ ID NO: 8523 - DNA, 488 bp, Homo sapiens
  III.2151 (AA496136)
gtgatttttatctgcattggatctactttaataaaccccacagcctgaatagcagctactagggtagtgccagtggatgtatatggagactgggctggaatggctgagtgtgtgggtgcgccgtgggagcagccatggcagtaagtagacagccagtaacttctgataaaagggagtatctgaaaactgaaaggccccataggaatgccaacaacatttcagaagttttcaacccaaattaaagacgaaaaaagtgaagtagatgatgcaataaagagttggcaaattcccagctgggcgcggtggctcacacctgtaatcccagcactttggaaggccaaggcgggcggatcacgagcatggtctatagaagaagaaagaattcatcatcatttctaggaatatccccaatcataatcctaagactccagctcaaaacaataactggcaactcttcaataattaattaaaggaaggcacaccctcaa

SEQ ID NO: 8524 - DNA, 460 bp, Homo sapiens
  III.2152 (AA496137)
ttttttgagggtgtgccttcctttaattaattattgaagagttgccagttattgttttgagctggagtcttaggattatgattggggatattcctagaaatgatgatgaattctttcttcttctatagaccatgctcgtgatccgcccgccttggccttccaaagtgctgggattacaggtgtgagccaccgcgcccagctgggaatttgccaactctttattgcatcatctacttcacttttttcgtctttaatttgggttgaaaacttctgaaatgttgttggcattcctatggggcctttcagttttcagatactcccttttatcagaagttactggctgtctacttactgccatggctgctcccagctgcgcacccacacactcagccattccagcccagtctccatatacatccactggcactaccctagtagctgctattcaggctgtggggtt

SEQ ID NO: 8525 - DNA, 390 bp, Homo sapiens
  III.2153 (AI129200)
acattttaaagggaatttatttgagaaacatataaaaacatgacagaacacatcattggccactttacaccataaaataggcaataataacatacacattttcgcaagcataagcactcaagtattctaatgatagccacatatatataacagttatgagcagacaaaccatattcattaataaataagtcgaaaagtgaaatgtataaacacatatcactatgattggtaactgcgtgcacccagctttataactgcagtcatctgaaatactatgatggacaacctgcatgtttcaatgagacccatcaaaaaccacagtgagtcaccaccacatatgcagttgcccaagtagctgacatcttgagatattttatctttcacaaattc

SEQ ID NO: 8526 - DNA, 336 bp, Homo sapiens
  III.2154 (AA648877)
ttttttttttttacaacaatcacaatttatttcactatctcaacattaacaatttacctacatacttcaaaatattcacaaaccacttcatcattcacactcatacacacacaaactctcctcaataaaaaaatcctcctttacccattccacctcctctcaccccctccactccctttcccaattccactctcccccttcactcttcatcaatcttcaatactttccctacttcattcacatcttcatcctcctcaccctccttaatcatcttccttcctattcccattcccttaaacatcttccataccacaatccccaccaccactttctccc

SEQ ID NO: 8527 - DNA, 487 bp, Homo sapiens
  III.2155 (AA846469)
tttggtttttattacatccaatcccatttatgtgaatgtgcacaaaaacagcaagatcttgctggtttggaactaggacatacttaattttaaaaaatattgaggattatttacacatagtgaaatgcatagctcttaagtgaaccattcaatgcgctctcgggtgcagctggaccaagttaacaacaaagcagtacacaggggtttagctaagaggccaggatgaagaaactaggaaaggagccactcaccctcacacagctgtaccaccccaagttccccttcgcattcccactgagggcctgctgacatcctgtttaacatgactgtcaaaacaactcttgttatgctatctcagccatgtttatgagagcaaaaccacttgggagtaagccaaatgtccattaaataaactacagtgccatccatacaatagaaaataccattgagaaagaacattaatagacacggaaagctgcctgttaaa

SEQ ID NO: 8528 - DNA, 314 bp, Homo sapiens
  III.2156 (AA884009)
tttagatgtttaaagagttattgggctttaaaacagaaatcagcattcagaacctctgctttcatgaggaaaggccttgagggcagtggaggaggaggctggactttagatccttacttggggtggccagagtaggttcctggttatatcggctcttctttttgtcatccagttcctgtaatactgctggtgtcctggcttgggaggatttctggaggtggtgcacaggaagcatttagcagagggtctcatgcatgaggaatgggagttattcttcttatggaatctgctctctggctctcgggcctccctgg

SEQ ID NO: 8529 - DNA, 346 bp, Homo sapiens
  III.2157 (AI126224)
tttgaatttttaggtatgcaagctttattgatcattttaagatgattccttctgagcggttttccaagactggccacagaatcaagaacacccccgagctggaagagatcttgcagaccttctgtcagccccttctttaccacttgggattttgaggtccacagatggataagaccggccgaaataagtcactgagctgggaatagaacaactgaattatggattttgttttatttcaaacaatttaaatttagacatctcactggggccagtggctactgtgttggacagttccatagccttagaagagtgcatcctcaatcttacttaaaacccctaatggcat

SEQ ID NO: 8530 - DNA, 347 bp, Homo sapiens
  III.2158 (AA445996)
ggagtggtgggtttcttgccctgccagaggtgtccctggatggtgaaggcatcgacgctcatggacatggtcttggcggggatctgggtgaagcgcttgcggtccgagttgtacttgtagatgccttccaccatggcgggcgtgacggtccggggcccataccctgccagccgcgacactcctctgtctcccccgacagcgtgtagagcgcccggaactggcagctcgagtcgcgaaagaggatcaggaagtggttggccttgcttttctcaatttcctccagaatgcgattcttctgcggttcgttcaccttgcccgccagcagcagtgtgatagggcattgtgga

SEQ ID NO: 8531 - DNA, 363 bp, Homo sapiens
  III.2159 (AA446272)
aaagaacccagcgccaagtccaacaagttcatcatccacaatgccctatcacactgctgcctggcgggcaaggtgaacgaaccgcagaagaatcgcattctggaggaaattgagaaaagcaaggccaaccacttcctgatcctctttcgcgactcgagctgccagttccgggcgctctacacgctgtcgggggagacagaggagctgtcgcggctggcagggtatgggccccggaccgtcacgcccgccatggtggaaggcatctacaagtacaactcggaccgcaagcgcttcacccagatccccgccaagaccatgtccatgagcgtcgatgccttcaccatccagggacacctctggcag

SEQ ID NO: 8532 - DNA, 297 bp, Homo sapiens
  III.2160 (AA897381)
tttgagctagaacttcaatctaggtttaattttagggtatagtatgtgctctttcgacgattccacagggctgcagagaaagacaattacttgcttttcttgctacatgctctagaatcttcctggcaacagaaagggaggtacattttgtaaaagcataaagccaactaaatatcaggtaatattaacattgctaatgattagtatctcactggctttctcttctgttccagtaaaacctgacggtgagaaaagggacatcttcaataacagctgcaggcagacagggcaccccct

SEQ ID NO: 8533 - DNA, 424 bp, Homo sapiens
  III.2161 (AI274943)
ctttggaaaagtgtgttttattcagggttcatctgtttggtctgtagatggtgagcaataccacagagagttaagaacatggcttctgaaattggagaaccctaaatttaatttctggctctactgcttctttgctacgggccttgggcatgttacttaatcacatcttaaagtggaggcagtccttgtagtgttgctgtgtgatgaggtgatgtgctctccacagagctaggatacagtaggagctggttatggcagtcatgatgatcatagttgttgttattatctccatcaatgtctccaagaacgtaaactcttaagtttcacaagagcagcttttgtgtgggttagatgctcttgctgtttcagcctcgtcttggtcaggctgcagtgagggttacactggggctggcccgactgatct

SEQ ID NO: 8534 - DNA, 448 bp, Homo sapiens
  III.2162 (AI223045)
tttagcaagattgtaaatgtgccgctaatgtgcaacttttattatcttgacaacgaacatgaggtttccattttgggaagggaacattttagggaaaataccgtgattggcagcttgagctgggaggtacagtcaccaggacatgagtacccacaacacccgaatcacatggggagctactcagtatgaggaaatcagatgactttttattgttttctttctgtggcgtgaatatgtctctctttctccagtcacctcttcttccctcttgttatgccttttctgttcttcccctgtatcctctggctgaccagcatctcctctgcccctggtttggttgggttactggccaggtccaggattgttttgcccataaaaatgcagttacacttcaagcttagaattaagaatcaattgattcttagacgaacaaaagaaaattctacta

SEQ ID NO: 8535 - DNA, 340 bp, Homo sapiens
  III.2163 (AA609134)
tttaaagacaaaggaataatgaaacttttattattctgtgttctatggtaagtgatgacaaagtatcaaattaagggcaccaaaaaccaactaaatatttccagaatactttttaggaaataaatccatcaactatttcaactgaaacttactattagacaatgataaaataagcaaacaaaattattcatccacagacacatttacagggattatttacctgaatcatttcgtagataagatgacatggctgggatgaggcaggactgactgagaagctcgagaagtacagaaggaagggcattactgttctgccctctagtctcatgagatgactgag

SEQ ID NO: 8536 - DNA, 438 bp, Homo sapiens
  III.2164 (AA125751)
  misc_feature (308)..(308): n is a, c, g, or t
  misc_feature (344)..(344): n is a, c, g, or t
  misc_feature (383)..(383): n is a, c, g, or t
  misc_feature (397)..(397): n is a, c, g, or t
  misc_feature (415)..(415): n is a, c, g, or t
  misc_feature (420)..(420): n is a, c, g, or t
aaatgattttagcacaaaggatggagacaacgacaaatgtatttgcaaatgttcacaaatgctaacaggaggctggtggtttgatgcatgtggtccttccaacttgaacggaatgtactatccacagaggcagaacacaaataagttcaacggcattaaatggtactactggaaaggctcaggctattcgctcaaggccacaaccatgatgatccgaccagcagatttctaaacatcccagtccacctgaggaactgtctcgaactattttcaaagacttaagcccagtgcactgaaagtcacggctncgcactgtgtcctcttccaccacaagagggcgtgtnctcggtgctgacgggacccacattgctccagattagagnctggtaaactttancacttaaacttgcatcanttaancggaccaaagcaagaagg

SEQ ID NO: 8537 - DNA, 234 bp, Homo sapiens
  III.2165 (AA125872)
  misc_feature (185)..(185): n is a, c, g, or t
  misc_feature (211)..(211): n is a, c, g, or t
  misc_feature (225)..(225): n is a, c, g, or t
tgcagttccaagatgatctgtattgtataacataagtgttctgttttccagttatttactgataaacttgcacataacattcttggttgtgacagcagcgtctgtaaactgtcagtctgattctcagcctcgggttcatctttgcataggtgttctgtctaatcacaattatggatgtttagggncttgctttggtccgttaagtgatgcnagtttaagtggtanaagtttaca

SEQ ID NO: 8538 - DNA, 576 bp, Homo sapiens
  III.2166 (AA398981)
ggaggttagaatggcagctcaaactccaggaacttgatcctgccacctataaatctatcagcatttacgaaatccaggagttttatgttccccttgttgatgttaacgacgactttgaattgactcctatatagcagtcagtacttcctgatggtattgtcctaaactggtgatgctcaagcattatactgtggaatactgccttttgacaaaaatactcatgcctttacaattgttagtaaagttcgattatagttggttatgtagtaaacactgtcattttataaaaaatgagaattattttggatcttagatccaaacacagtttctaatagaaaactattatttatattgggaaaggtaactattgcattagagcatgttggcagactggtaggtatttaaaaagttgagaatctgctaacagcgctggaagttgttagcgctctaagtaataagataaccactagtattcaaatctctttcaggttttattaaaaaatatatatcaataaactaaaaggttcaattcctaccaaatagtttctaatgtgggagaaaaacttggcacaaaat

SEQ ID NO: 8539 - DNA, 464 bp, Homo sapiens
  III.2167 (AA399583)
tttaacatgaccaataaaatttattaaacgtatttacatatattcacagattctttcataggtgaatattaaaatagacatttacaatttcagaattttcattcaaaggcatttatttttttcctggggaaataggctttactgtgagatgaaaaaagagctaagtttctttgtatgactaagtctaaataatatgtccaacacagtaagtcacaggtctactagaggagactagtatgaaatgccttacactactgcaggcatcaattatggagagttaaattataggaagcatgcaatacaactaagccacatctttgcagttatggtgatgaaaacaagctaactgaaacacctgcatgctgtatttaaaagttttctacctgtacacactactactacactccatacaaaccacaactttggtccaataaaacatgagacaaaacagttttacaggtatt

SEQ ID NO: 8540 - DNA, 260 bp, Homo sapiens
  III.2168 (AA625701)
tttagttaagcaaagaaaactttatttctgctacacgtaacaacaaattgctctaaggaacaactactatattcgttttagcattaatgtatggattcaaaaatacatgtcagcaatccctgcttcccagacaaaacaatgctgtacacagactatcaggtatatggaaaaaaaaaaagctgtcaactgtccacagggaatgcgtccagtcacattttcagtcagtcagctgaggattatgtcattatttagtccttgtt

SEQ ID NO: 8541 - DNA, 482 bp, Homo sapiens
  III.2169 (AA620628)
tttggaacaacatggctgtttatttcacctgggtgcaggtgggctgagtctgaaaaaagagtcagcaagggtggtgggattatcattagttcttataggtttacggataggcggtggagttaagagcaatgttttgggggcagtgggtggatctcacaaagtgcattctcaagggacccagccctctattttcaaagaataggttctatctaatattatcatggtaaatatccatattagtttaagagagaaatgaaaataatttttgaatcctgttcttacagacatcaaagaaagcaggacagaatgcacattgcactattcaatttgttgatttgtcctctgtcatcttgtggagagtgatagagtattttttaatttcttcaattaggatagtccaattgcaataaggtggcataaacatgctgtctcatgcttaaatagtaaagactagtcagcagtcagttatatatataattgtc

SEQ ID NO: 8542 - DNA, 489 bp, Homo sapiens
  III.2170 (AA843926)
ttttttttttttttgggtttttggagcacattttattttacaataccagagaatcaacatctagtagtagcataatacaaaatgaaacaccaatctatttaaaactcatgtaatgggaactgtatttcaaaaatgataagaaaacaaaataggagatttagagaccagtcgatataaatgtataaaaagcccccaaaactctcatttcatcatcagtgcaaacaaaaatcatttataataacatacatatgaatacattcacttacactcacaaagtggattatcatttttattttccatgaaatatgtcaaatatatgcaagtatatcttcacattctgatgggcaagataaatcttcaaattaaaatatgtacatttcacttaaattaaccaaaatattaaaaatagcagcaacactggtctttaaacacgtctaatatcccaagagattgttcacacaatatagactattttggtagctctttcat

SEQ ID NO: 8543 - DNA, 465 bp, Homo sapiens
  III.2171 (AA036974)
  misc_feature (433)..(433): n is a, c, g, or t
  misc_feature (450)..(450): n is a, c, g, or t
gcaacagctcgtttgggaggctggagtggaaacaaagggtgggcatcaaagatgagaagccaaagcccctacaactccagccacccagccaggaggggctgtccaatcacattcaggcatgcgaatgagctgggccctgggtgaggtgggggtctggcctagtggggagcggcctggcctgggtggggcagggctggcctggtccagctgtgggctccattcccatcactgctgtccctcctgaggtctggattggggatggggacaaagaaatagcaagagatgagaaacaacagaaacttttttctctaaaggactggttaaatcaattctgatacagccttacaatacaatagtattgcagctaaaaaataattgtatggctttatatactaatatgtaataatctttcagggtgaaaaagggcaagccnccagaaatgttgtatangcgcacttcccattg

SEQ ID NO: 8544 - DNA, 196 bp, Homo sapiens
  III.2172 (AA036975)
  misc_feature (184)..(184): n is a, c, g, or t
cctgtttgggcccatttattgtttattttgaataggtaatacagtcacatggttcaaaattcaaaatgtacaaaagggtgtaagtgttaagacccttccctctcctgtcctcaacctactggttccccctccccaaaagtaatcagtgttacccatttattctgaatagggcatacattaagcnattgatgtgttt

SEQ ID NO: 8545 - DNA, 474 bp, Homo sapiens
  III.2173 (AI351378)
  misc_feature (446)..(446): n is a, c, g, or t
atttgcatgagaaggtgcaacttgctcctctatgaagagagcttacctaaactatatgaaggggaatagtaactgcttgtcctgacattgttcagctatatagagtttataatatttgaaatgaaaactcttgcctgagtgatttttttgggcatacccaactggaaagtaattttgaacattgggaatgttgtctcagatatgataaaatatctatagcgtctggtgctgttaagttcaaaccactcatgagatcttcaaaactaaaccaggttcatattaaagatcaaccataacagactccgtgtagaacacactggtagatgctgaaaacatatgtctctgcctttcagaaaggatttcatcatcttgttaggggaacaggacagagatcaacagataaatagtgagaggctacatctggaggtgccaaatgagtgatacanaccataaatgctgtaaatattgaggaaa

SEQ ID NO: 8546 - DNA, 269 bp, Homo sapiens
  III.2174 (AI085483)
  misc_feature (205)..(205): n is a, c, g, or t
  misc_feature (208)..(208): n is a, c, g, or t
tttttccttttcggaagatagccttttaattaaatttaacacaaagtgtacaaaatatattagtttactaactctagttttgtcttatattgacaaactctttaatatctagatactagatattataaaattaggacccatttgtccagtacctacacaacatatacagtgtagcaaagttaaatgaaatgcaggctgggccggnggntcacgcctataatcccaatactttgggaggctgaggctggcggataacctgaggttgggag

SEQ ID NO: 8547 - DNA, 413 bp, Homo sapiens
  III.2175 (W86452)
caataatcaaaagttgaactttaattttcaccctttgttggttgttagcttttttacatagaaacacactcaccatgatggcagtaagagcagaagtcataagatctaacaattactgaccactagctaccagcatcctaattttttttttaacacatcatctttttcattcattacatgacagagggatgtagatgtaattattatcctcaggattcacgtgagaaaacagagacccagggaggcagccagctattagaactcaaactgttaagtttgtctccagggctgtgcttctgacccctgccggactacctaccatagagacacgattcgttcaccaaacaaatactaaactgaaaatctcctgtgtgcagagttctccctgttaggcacatcaagcgaaaagatgg

SEQ ID NO: 8548 - DNA, 181 bp, Homo sapiens
  III.2176 (AA693681)
tgtgatacacgtatgtttaagtacttttgtgtggaaagctttaacaagttttcccgataaaatctaaagacagaacagtttcacgtgtgacttagcaattcaatcacttcaggtgaaatcttttctgagttgctattaaagttagctttaaaagtagtccactccatcttaaaattctctc

SEQ ID NO: 8549 - DNA, 250 bp, Homo sapiens
  III.2177 (AA634574)
tttttttcaaatttacagtgttatctattcaacttacctcagaaacactaaggtcacagagagagacagaattaataccaggtaattcaactttcaactcaattttcagaggtttctcactgtgatcatgcacaatttttagttcataggctggcatcttcatctccacctggatttcagtactggaaatctcttctatcagacacactgctttgcctgaaacttggtcttttggcagtaacagttgagg

SEQ ID NO: 8550 - DNA, 399 bp, Homo sapiens
  III.2178 (AA649328)
catatttcatgctaattctttcttcgttgtatacatttttttttatttttattttttttgagatgaagtctcgctctgtcgcccaggctggagtgagaccctgtctcaaaaacaaaataaaaaccaaaaccaagctattcatgggctatcagtccactgtaactaggcttaaaacccattcacataaaaaaaattcctttactacacaaacatttgttgaggatttaacaggtgtttggcatgaggtcaggtgctcagatgttgtgaacaggtctaactggggcatgtgtcaatcaggtaggtctgctctaaccactgctctgagactcagtgggctggaactggcagattcctcaagtaggcatcttgatagggtacctactggtcacttagggattt

SEQ ID NO: 8551 - DNA, 272 bp, Homo sapiens
  III.2179 (AA446030)
tttattaaggcaaaaagttattttaaaaaaacagtaagaatacaagaaaggactggaaaagataatgtatggttttgcttaaatgaataaggattagaaagacaaagaaacagggactagacaatcaaacaaaatggtgtaagagggccgagagcagtggctgacgcctggaatcccaggatttggggaggccgaggtgagaggatcatttgaagctaggagttccagaccagcctgggcaacagagggagactctgtctctacaaaaaaat

SEQ ID NO: 8552 - DNA, 258 bp, Homo sapiens
  III.2180 (AA446303)
ttgtagagacagagtcccctctgttgcccaggctggtctggaactcctagcttcaaatgatcctctcacctcggcctcccaaaatcctgggattccaggcgtcacactgctctcggccctcttacaccattttgtttgattgtctagtccctgtttctttttctttctaatccttattcatttaagcaaaaccatacattatcttttccagtcctttcttgtattcttactgtttttttaaaataactttttgcctta

SEQ ID NO: 8553 - DNA, 342 bp, Homo sapiens
  III.2181 (AA459931)
cttcagatgattttttagtcaaatttttagtcaaatatattcgtgtccaaagatgaagaacataatgtcatgtattgaagaatgtgatggaacttcaaaccctcatataggacgtgagcactttacttagcgcttgacgagacaagctgggcctgtcgggtggtattaaaagtcccagtcccatgtgttaccaaggaggccggctctacctcaggagccatgaaggtttcggcgccccaccctgaggagctcacacccatccagcaggtgatcccttccgaggctacctggatcagtttctactcagactcgcctcctactggccctaagaacgcactaact

SEQ ID NO: 8554 - DNA, 327 bp, Homo sapiens
  III.2182 (AA460201)
gcagaggctcccgcagtgacctgcgccgccttcttcatgtggaaccaaaaggtcccggaaccggagccaggggtccaagttttctccgttgcctttggaatatgtagtccaagccagaacagtcaggaccgcagtaccggtgagaaatggagtccagaatcctaaaaacctacgagaaatacggcagcgaccacttggaccgcgcctcccacccaccgctcgagccccggagacttctgggagtggccgccttgcctcgagtgcgcatgcgagatcggccactactgggcccctggctgaggcttagggtggagttagtgcgttctt

SEQ ID NO: 8555 - DNA, 260 bp, Homo sapiens
  III.2183 (AI191778)
tttggttggtctgctccatttggctaagttcttaaaggttacaggaagatagtgtacttattgcttaagatgatgataatttatattaaaaaataaatacaggcatgtgagcaggaaggggaaattgcttcattaattacctggttatcttatcaggcctctattttttttgttttctggaatgcagagcaggcttcatgaggagtactgaattgctttggcagcagctagccaagctgagtgatttgcaacactctttg

SEQ ID NO: 8556 - DNA, 402 bp, Homo sapiens
  III.2184 (AI277603)
  misc_feature (339)..(339): n is a, c, g, or t
ttttttttttttttattggagaaacttaatgtttattttaaatccatgagttttggtaaatattgataaactttctgagcagttatcatttcttgatgtggttggattgtaggaaaaatgtggagggatgattctgggctgcaaaggccaaggatgcttgtatctttgaaatgtttcacaaccatttatataagggttacccgtgattttctcattggattcttaacaactctgaggtgtatattcattcatccctgtttatagatgacagcactgagaatctggagttaagtgacttgcttacggtcacacagctacacagcctttcagtgatacagncagaatttaaactagttcttttttttccgagatgggggactcactctgtcacccaggctacag

SEQ ID NO: 8557 - DNA, 507 bp, Homo sapiens
  III.2185 (AA779228)
atcgaacacgtgaattctgttagatgtggcccttgagatcagagagcgacatagaaaaaaatggaagttacgactcattcagaaagaacacactgaaagtgaaagattcattaagaatgcgtctttaattctcagacggtgcaggggaagaggagcaggcgcacagatggaagctgaggaaggctgggctgacggggtcgctgtgggtgcagccagggtgtagggtgtgctggaaactcatcagagtcatttgagcaacctcggtcatggttgtggacatcaggcttccaaaactacaatttttcaaaatcagatcagagtctgagaggtgctggtagttagggactgtgccttaggtactgaccctgaaatgtggtgctgccttgaaggaggcctggtgaggtgacttcaaaatgcataccggccagcgggggaaggacccagagcccacctattaaatgagtctaacagtcatttaataaattgggaaattgggattctgaaagc

SEQ ID NO: 8558 - DNA, 415 bp, Homo sapiens
  III.2186 (AA625710)
tttgagcttctcgtttctttattaaaggcatggggttattttcctactggatgtgttggatgtgggattgtgtgtgtagtccaagctatgcaaggttcctcctgccttctccaggtcgttatttagttgcaaacattgctggtctgagaagacaggaaggaggaagctatgggaggctgtggctggagcggagctgcctttgtctggcagcctgagctgacactggagcctaggagagacccaatgagggaaaagatgtgtataataaaagaagagagaagggagcatcttaggaaactccccttttggggataatacagctgaatcaagattcctccacaattcctagcaaaaggttgtccttcatgcctttcgggcacgcgcggtgtccctgcaggtgagagggtagcttctc

SEQ ID NO: 8559 - DNA, 401 bp, Homo sapiens
  III.2187 (AA488804)
aggcggcacgaggcggcacgaggctttttctatttctgaattaatgatttcaaaatctaagccattcgcaagatgtgaataattttaaatgaaatttttacataaaatttttcaatgaccccatgggattacttcaacaaaaacagagcattagtaacttgttttttgcagtgtaattgggtgcaaatgtatgatagagttcttggtaaacagaaccagactctgactctttttcagttttgctatttttttaactatttttaccataaatttatttggaaaagctttggaatgctttttaggtattttaattattggtcagatgcacaaactcagtccaccaaattattcacagagaaaactttaaagataagaaaacaatgaactcagatgtacaatag

SEQ ID NO: 8560 - DNA, 474 bp, Homo sapiens
  III.2188 (AA489056)
tttttttttttctaaaatttcccttaccttccatgagatcctgggtattcataaactaatacatgaattcatgtcttagggttatataaatatacaagcaattaaattccaaattaagataaaagttattagaatatatcaacagaataagaattaattttagaataagatgagcagtccggatgattccctaatatagccactgagagttggatggggtctccagcgccatggagaaactttttgaagggttggagaagttttaaacaccctcagctttcttgcaaatacagtgactcttgaatctatttaaagttgtaaagtaagttctagagcctcattatggtttaagttcaattctaatggttgggaaagaaagaaaaggttgggcacatatatgctaatgtataagatagcctataaattcatatgctatggaatcaaatatttcaatgattgacatacaaataattc

SEQ ID NO: 8561 - DNA, 472 bp, Homo sapiens
  III.2189 (AA946764)
tttttcttggtagattttcttttatttactttctccttcaaatacccactgggtaattttttacccctcgagaagccttggaaaagcagtgatactggatgcattcccttatcttatcacttgtcacattcattatgctgaaatcattcatttaagtgtgactctctcttttattttccatcaggcggcaggttccttgagatccagggccatgtgttatccgttttgatgtccccagtgtcagacttaatgccaagagagaagttgatctgtttccatgtcacagtctggaggtcagcaggtcagggctgctggggtagctccacatccttaatacgtgctttccatttctgtgtctaaggagataccctggttcttctcctctccttccagcagtggaaagggggaaagggactgggcacaaggggtcgatgatactaccaattttttgagggcaagatcaggatgtgac

SEQ ID NO: 8562 - DNA, 483 bp, Homo sapiens
  III.2190 (AI733357)
tttttcttggtagattttcttttatttactttctccttcaaatacccactgggtaattttttacccctcgagaagccttggaaaagcagtgatactggatgcattcccttatcttatcacttgtcacattcattatgctgaaatcattcatttaagtgtgactctctcttttattttccatcaggcggcaggttccttgagatccagggccatgtgttatccgttttgatgtccccagtgtcagacttaatgccaagagagaagttgatctgtttccatgtcacagtctggaggtcagcaggtcagggctgctggggtagctccacatccttaatacgtgctttccatttctgtgtctaaggagataccctggttcttctcctctccttccagcagtggaaagggggaaagggactgggcacaaggggtcgatgatactaccaattttttgagggcaagatcaggatgtgaccctcatcactt

SEQ ID NO: 8563 - DNA, 465 bp, Homo sapiens
  III.2191 (AI791693)
  misc_feature (359)..(359): n is a, c, g, or t
tatacttctgtagtataaattttagctggcaacatggctgcctggccaaagactacatttcccagtctcccttgcagtagccatggtcatgtgacgaggtaaagccagcagaagtgatgagggtcacatcctgatcttgccctcaaaaaattggtagtatcatcgaccccttgtgcccagtccctttccccctttcactgctggaaggagaggagaagaaccagggtatctccttagacacagaaatggaaagcacgtattaaggatgtggagctaccccagcagccctgacctgctgacctccagactgtgacatggaaacagatcaacttctctcttggcattaagtctgacactgnggacatcaaaacggataacacatggccctggatctcaaggaacctgccgcctgatggaaaataaaagagagagtcacacttaaatgaatgatttcagcataatgaa

SEQ ID NO: 8564 - DNA, 351 bp, Homo sapiens
  III.2192 (AI033584)
gagtcaaaatcacgttgaaaaaatgtgcagttgaaaagagtattttgacatatttaacaaaactgcagaattggtaagttcaaaatatattgaaaaggggcaagaatcaatcattagtgcttcttttaaaacacagtgattaaaaatgagttaacagcctgggtgattaaagtgatcaggaaaaaggagttgtggtcatcacagatatcatgaaaggattcaggttcatgtgtctcaactatgtgatatttcatatcagggaaactggtatatgcatttcagctgcaaaaatccccaaagtccaaattaaatgtttgccatttcttgacacacttctcaaagtaagagtgc

SEQ ID NO: 8565 - DNA, 294 bp, Homo sapiens
  III.2193 (AA040695)
  misc_feature (259)..(259): n is a, c, g, or t
  misc_feature (261)..(261): n is a, c, g, or t
  misc_feature (281)..(281): n is a, c, g, or t
  misc_feature (288)..(288): n is a, c, g, or t
gggacaacgagtacacagccagggagggggccaagtttcccattaagtggacagcgccagaagccattaactacgggacattcaccatcaagtcagatgtgtggtcttttgggatcctgctgacggaaattgtcacccacggccgcatcccttacccagggatgaccaacccggagtgattcagaacctggagcgaggctaccgcatggtgcgccctgacaactgtccagaggagctgtaccaactcatgaggctgttntnggaaagaagcgccccaaggnccggggnaccttt

SEQ ID NO: 8566 - DNA, 473 bp, Homo sapiens
  III.2194 (AA040732)
  misc_feature (451)..(451): n is a, c, g, or t
  misc_feature (472)..(472): n is a, c, g, or t
tacaacagtcatcaacagacatttattgaactcctgatgtgtgccaggccaggcaccaaggaggagcacacagaggtattagataaagtcctggcccttgaggaacttctggatgatctgaggaaagaaaagtaggtgggcagaagcttctgtcaatcccaggcttctcccctctctctgtggtctcaggaaatgggagagccagaaaggggtaccttgtacagtgtccaagacatacatgcacaggctacacatgtacaagacatgtgcagagtccacgcaactacaggacacgtgtacagacacaaggtgcatatgtgtcacatgtgggttgggattcatgtgcaagagtccatatggtgcataggccatgttgactatggcacaagaactccatctccccaagtcaggctgggagagaaagggggggagaaccccaggggccttttcnagggcctcttcaaggcttgang

SEQ ID NO: 8567 - DNA, 409 bp, Homo sapiens
  III.2195 (AA121518)
acagcaagacagaaaatattttattacaaagtaaaataaaagacatagtgagtcagttctcttaaattcctcctccacattcagaaaggcatacagggtgattcaaacaaagatgaacggctacagcatagtttctaagctgccctcaagtgcagtgattcatctgaactggtgtcttatttacaggagaagatttggcttcatgaagaaatatcttcctgcataaaattcctgcaactaatcgctcgttgctgaaaatgccagggatgtgtttggtgtgcaaattacttgataaaattactaagacggattaaaatattgcatctgggccaggcacagtggctcatgcctgtaatcccagcactttgggaggccgaggtgggcagattgcctgagttcaggagttcaa

SEQ ID NO: 8568 - DNA, 446 bp, Homo sapiens
  III.2196 (AA127763)
tgtagagatgggttttgccatgttggccaggctggtcttgaactcctgaactcaggcaatctgcccacctcggcctcccaaagtgctgggattacaggcatgagccactgtgcctggcccagatgcaatattttaatccgtcttagtaattttatcaagtaatttgcacaccaaacacatccctggcattttcagcaacgagcgattagttgcaggaattttatgcaggaagatatttcttcatgaagccaaatcttctcctgtaaataagacaccagttcagatgaatcactgcacttgagggcagcttagaaactatgctgtagccgttcatctttgtttgaatcaccctgtatgcctttctgaatgtggaggaggaatttaagagaactgactcactatgtcttttattttactttgtaataaaatattttctgtcttgctgt

SEQ ID NO: 8569 - DNA, 583 bp, Homo sapiens
  III.2197 (AA151148)
  misc_feature (7)..(7): n is a, c, g, or t
  misc_feature (9)..(9): n is a, c, g, or t
  misc_feature (121)..(121): n is a, c, g, or t
  misc_feature (443)..(443): n is a, c, g, or t
  misc_feature (489)..(489): n is a, c, g, or t
  misc_feature (537)..(537): n is a, c, g, or t
  misc_feature (550)..(550): n is a, c, g, or t
  misc_feature (568)..(568): n is a, c, g, or t
cattgtnanggggaacgtgcaggaggtttttctaggcaccgtgttcagtgctgcttcactctaccagagattatggccaaattgcacggaatttggtttcttgccctctgaagcctgaggncccccccttgcctggctggttgacagacccggggtggtcactgctgagacttcagagatcgcagctgctgtgagaatacggtgaaggtactttgttctggaagatgttgtcatacacttttccccagttattttcaaacttgacatgagcctatgttgactcactgggtgggggtcccttcttacgcagcacacggtggcaagtgcctgaatcggggctggaggcacttcagagcctctgaaggggccaccacttctggcccaaaattgcagggttgtagatgaggctgcccctggagaactggtgtgaggaggaagctgtntccaacaaagagcactttcatctgttgagatggctgtggtgagcanctgaacgagcctacgtgtgtacctgaattttccccgtaactcaattcntccatatgaggancaccaaactatgtacagngaactttttacaaag

SEQ ID NO: 8570 - DNA, 461 bp, Homo sapiens
  III.2198 (AA151149)
  misc_feature (131)..(131): n is a, c, g, or t
  misc_feature (133)..(133): n is a, c, g, or t
  misc_feature (164)..(164): n is a, c, g, or t
  misc_feature (454)..(454): n is a, c, g, or t
tacactctacatgctttttattacaagactactgaccatacgaggaaaattcatcatctggtaactacacctaaagcacaagtatttggaaaaaaaaaaaggataaacagattcattaaattatatgattnantcactgacccaatagaaaatttatataatanagccagaaaaaaagttgtaaaatatagtttacaataattattcacattcaaggctgtacatcaatacatacaacaacgtggccccgaacatgaattcaattcaaataattcatatattagaatttaaataacacagactgaactagaggccaacaatagccagcaaataaccttatataagggatagaaaatacaaaagtggtatatcctagtatcattgcatttgttttcataagttcttttaatttttggctttggccggtacatcacaggttacagctaccggaccngggtaga

SEQ ID NO: 8571 - DNA, 405 bp, Homo sapiens
  III.2199 (AA428635)
aaggaaaagctttttcttttatctaataaacaatattctagaggtgagtgtgggcccagtacaaagtcacacttcaaaccagctccctccagtgctggagggggttcgattcctgtggtctccctcgaggctgccatgtcaggtatttgccgctacatcagcatccccagaagtgaatccgaaaggagtacatgaaatctggagacttggccattgcatgttcaaactctgagaaggacagcatgttgtcattgtccagatccgactcactcaggacgtggttcgtgaggtccatcaggaggtcctcagacatgtcatcactgttcagcagtcgcaggatgatcctctgcagatcctcctcatcaatgaagccattctcattaaaatcatagatgcgaaaggcat

SEQ ID NO: 8572 - DNA, 478 bp, Homo sapiens
  III.2200 (AA432290)
atggggcaatgcttgaggtatcagatgcactgggaggacctggaagagtaccaggccctgaccttcctgaccagaaatgaaattctgtgcatccatgacaccttcctgaagctctgccctcctgggaagtactacaaggaggcaacgctcaccatggaccaggtcagctccctgccagctctgcgggtcaaccctttcagagaccgtatctgcagagtgttctcccacaaaggcatgttctcctttgaggatgtgctgggcatggcatctgtgttcagcgagcaggcctgcccaagcctgaagattgagtatgcctttcgcatctatgattttaatgagaatggcttcattgatgaggaggatctgcagaggatcatcctgcgactgctgaacagtgatgacatgtctgaggacctcctgatggacctcacgaaccacgtcctgagtgagtcggatctggacaatgacaacatgctgt

SEQ ID NO: 8573 - DNA, 354 bp, Homo sapiens
  III.2201 (AA244160)
ttttttttttttcaaaaaatttatcttttaatcagccataatagtatgcaaaaacagagaaatgaaggttaacagtcataattcatacattaaaattaaaatacttctagagataaagacgggaaaggagaaagaaatatacaaacaaatgaaaggcagcctggtgaacatggtgaaagcctgcctctactaaaattacaaaaattagcctggtgtggtggcttacacctgtaacctcagctactcaggaggcttaggcatgagtatcactgaacctgggaggcagagtttgcagtgagcagagatcacgccactgcactccagcatgggcgacagaatgagactccatctcaa

SEQ ID NO: 8574 - DNA, 375 bp, Homo sapiens
  III.2202 (AA244161)
cttttgattttgtttttgttttgcttttgttgagatggagtctcattctgtcgcccatgctggagtgcagtggcgtgatctctgctcactgcaaactctgcctcccaggttcagtgatactcatgcctaagcctcctgagtagctgaggttacaggtgtaagccaccacaccaggctaatttttgtaattttagtagaggcaggctttcaccatgttcaccaggctgcctttcatttgtttgtatatttctttctcctttcccgtctttatctctagaagtattttaattttaatatataaattatgactgttaaccttcatttctctgtttttgcatactattatggctgattaaaagataagttttttgaaaa

SEQ ID NO: 8575 - DNA, 497 bp, Homo sapiens
  III.2203 (AA137197)
  misc_feature (312)..(312): n is a, c, g, or t
  misc_feature (415)..(415): n is a, c, g, or t
  misc_feature (437)..(437): n is a, c, g, or t
  misc_feature (459)..(459): n is a, c, g, or t
  misc_feature (480)..(480): n is a, c, g, or t
ccagaccggagagacggtccagcctctgatggctcggagatgatggaccgtggaagggaagcgtctgtggggagtgagcgcttagatggccagcagctgctccttctgggaagctcgcaccttggcaacagaacagccctctagcagagcgtcagtgcagtcgtgttatcccggcttttacagaatattcttgtcctattttagaattttccggagtagtttatttgcagtctgttgattatgtgcagtagacccgggacactgcgttttaccgatcaccttgaatgtggtgcctggatgtgcctttttttnttttccctgaaattattattaattttctattgtgagttcatcagttcataggtttttttaagtaaagaagcaaaattaaaaaggcctttttaaaaaatgtacnaccttccagaatttataatccnggttaagtcaaaataatttggntaattaaaccattttcccggnaaaaatggaagtttggg

SEQ ID NO: 8576 - DNA, 390 bp, Homo sapiens
  III.2204 (AA137198)
  misc_feature (2)..(2): n is a, c, g, or t
  misc_feature (3)..(3): n is a, c, g, or t
  misc_feature (281)..(281): n is a, c, g, or t
gnnttttttttttttttttttttaccatgatcataaattatctttattaaagaatacatattcttgtgatttaaaaccaaatattttaagtgatatatctaatagaaattgacatgaaattatttcatttaaaagttacaataaaaggcaaatagacatccgtatttgtctcattttagaaaacataggctttaagaatcaaaagtaagcttccaagctcacggccaggattacaacttcatattacagaaatgtttaataacaaatatttgactaacagnttataattctgaagttgtacatttttaaaagccttttaattttgcttctttactaaaaaaactatgaactgatgaactcacaatagaaaattaataataatttcaggga

SEQ ID NO: 8577 - DNA, 400 bp, Homo sapiens
  III.2205 (AA235530)
attttaactgctataaacgttttattaaagttatttacatttaatggcaatatttacagagaaacattgtgtaaatcttaaaattttttaaaaacaattcttaaatacaaatctgttaaagataaaaaaaagatggtaagcataaaaaagttcttttatgcccaaagtccaatttgagccagtttacattatggctaaatctttcagtctcaagactcaggcaaggttgtgaggttgcatttgatcatgcatttgaaacaagttcataggtgattgctcaggacatttctgttagaaggaatcgttttccttacttttccttacgcacaagagttccgtagctgttcaagtatgtgtttcaactgttctcgtcgtttccgcaacaagtcctcttcagaaa

SEQ ID NO: 8578 - DNA, 495 bp, Homo sapiens
  III.2206 (AA410662)
  misc_feature (56)..(56): n is a, c, g, or t
  misc_feature (424)..(424): n is a, c, g, or t
  misc_feature (433)..(433): n is a, c, g, or t
ccgttcatcaaaaacatcatcatccaggactgtatgtggagcggcttctcggccgngtccaagctcgtctcagagaagctggcctcctaccaggctgcgcgcaaagacagcggcagccgaaccccgcccgcgccacagcgtctgctccacctccagcttgtacctgcaggatctgagcgccgccgcctcagagtgcatcgacccctcggtggtcttcccctaccctctcaacgacagcagctcgcccaagtcctgcgcctcgcaagactccagcgccttctctccgtcctcggattctctgctctcctcgacggagtctccccgcaggcagccccgagcccctggtgctccatgaggagacaccgcccaccaccagcagcgactctgaggaggaacaagaagatgaggaagaaatcgatgttgnttctgtggnaaagaggcaggctccttgcaaaaggtcagagtctgatcacttctgctggaggcacagcaaac

SEQ ID NO: 8579 - DNA, 527 bp, Homo sapiens
  III.2207 (AA523708)
ttttttttttaacaaaaaacactggtattatttaatacagctttaaacagctttaaaatagttgatcaccatttaacacctcccaccagctccacacaaacatacatacatacacacacacacacacacacatataccaaaacaaaattcataaaattgtcacaggtagataacctgaagatgacgagcatgaagaaatgaaacgctggataatccataaatagtcgcggaatccccaaataacaggcatggtggatacaatgtacataatttgtcattttatctcccagatagattaaaaatcctaaagtagagagagaaaataaatacggagcctagaccaagatatcagctctctcaagcatctgtctaatcggatccttccttcaacacgtcaggaacaggaagacagaacaggaactctcagagcaaagggcttgaagagactttgctgactgtataggtccccactttaatttcccatgaagggatctctgagctattcaacaatcctcctgaagtcttca

SEQ ID NO: 8580 - DNA, 486 bp, Homo sapiens
  III.2208 (AI732496)
  misc_feature (464)..(464): n is a, c, g, or t
gcgtcgactttttttttttttttttaacaaaaaacactggtattatttaatacagctttaaacagctttaaaatagttgatcaccatttaacacctcccaccagctccacacaaacatacatacatacacacacacacacacacacatataccaaaacaaaattcataaaattgtcacaggtagataacctgaagatgacgagcatgaagaaatgaaacgctggataatccataaatagtcgcggaatccccaaataacaggcatggtggatacaatgtacataatttgtcattttatctcccagatagattaaaaatcctaaagtagagagagaaaataaatacggagcctagaccaagatatcagctctctcaagcatctgtctaatcggatccttccttcaacacgtcaggaacaggaagacagaacaggaactctcagagcaaagggctggaagagactntgctgactgtatagtccaccac

SEQ ID NO: 8581 - DNA, 541 bp, Homo sapiens
  III.2209 (AI791451)
  misc_feature (530)..(530): n is a, c, g, or t
ttactactactaaatttgcggccgcgtcgacagaaatacctctttcagctgaagtaacaacggaggaaagtttttatttgagcatccagaaagatctcaccgcgctgttaactggagacactcaggcagagatttcccagataatgaataatgggaggaaaggggctgtctgtgtgcaggagccatcttgtcctttggcctccctcgggagctcagcagtgacctgccactctgcaggcagtgttggtttcttgaaagagcagaggtctgctcttgggagagagcacccagggggatgtgatcgaagcagctccatgggacgcccaggccgggtcaaacatgtggaatttcaaggagtggaaatactgtgggcaggaggagacaagagagagacccagcatcctatagattttgagacatcactgcaaagaacagcctctcctgacagcaaagagtcttccaaagtgccacgccatctcatctcatcagctggtttgtgtaattcaagtagtttaactgagaatgtttgngatgaatcctg

SEQ ID NO: 8582 - DNA, 405 bp, Homo sapiens
  III.2210 (AA864325)
atctttcaatatagaaatatatttaggctatacatgcacttatatcagataaattatataattctaaagttaatttcatctattccctgtaccttctaaaagtatatatacatttctataaaatccaagacaaaacactaaatcccagaagaaagtaactaattgacataagaaactataaagagcacatgggatgaatatgcattagtattgaaattacaaatccaagctatactgtggtatgcacaataacctgcccctgtaaattagaggaatttctgtaagtaggaccaaacagtagcaagtatacgtcaattaatgaagtctttttcctttgctaaaagaaaaacagtcaccagtgatcgattagtttgcttctataacaaacttttcccaataaagtga

SEQ ID NO: 8583 - DNA, 485 bp, Homo sapiens
  III.2211 (AI031535)
aagccctccctcagggcccgaggcttctcctcagggccttccggtgggcgggaagacagcgcaaccccgccaggcctttctcgtcgctgcgcctgctcgctgaaggagtcacctacccgacgagactaacggctgcggcgcggaagccccacagcccgccgagaaccaggaatacgagagccaggcggcgcggcggcgggacctgtactgagcaagaaagaagatttcaaagtaatttattgttatgagatccgtgcttttatcttgtctcagactcccaatgataggcacatactctcctctgtacatttaatgaaactactaaaatatttcgatttaaatcttccacctatttgttttctgtgtatcctacctgttcccgaccttgacattttcaaagaatacaggttacttattttgttttttggtggtggtgagtttttttggggttttgttttttggtttttggttttatttttggagac

SEQ ID NO: 8584 - DNA, 148 bp, Homo sapiens
  III.2212 (AI263653)
actactactatacggctgcgagaagacgacagaagggtgggggttgcggtgagctgagatggtgccattgcactccagtctgagcaacggggcaagactccatctcaaaaaaaaaaaaaaaaaaaaaaaaaagtcgtatcgatgtcga

SEQ ID NO: 8585 - DNA, 510 bp, Homo sapiens
  III.2213 (AI341660)
tttttttttcgactcttgggggggaaattacagatctttatttaatttttcttctttgggcttttgggtatctcctacattttccacaatgcacatagcacttttacaatcagggagtaacaacaaaaaatgcaatgtaaatcctgagaggagctatcacctgcatttgggctcttccgcctgctttggcctcccaaagtgctgggataacaggcgtgagccaccgcgcccggcccctttctctttctttgtggatgttcccagcagctctctcaaaaataaaacgtgccagttcccaaaatccgcccaagaaagctgtggctcagagagggaggcactagcctaaggtgacagtgagtctgggcttagaacacagatctcctggcttcgtgtccagggaactttcttcatgcctctaattcattctctccaacaggagtttggcatgtactatgccctagagcggaggtgtgcaggacaggtgctgctgtccctgtgcacaggttaaga

SEQ ID NO: 8586 - DNA, 344 bp, Homo sapiens
  III.2214 (AA897186)
cttatgtaaagtgccaatttattgagcatgagatgaatacataattgactattcccgtacccgctccttttctcttacaacatggggattactatactctacccctctcccctccagcctacattttccctttaaatattgaagccttgaaatttatctttggagaaagactcagaccacagactgttcctgtgggtccatgttattttcttccaggcatgtctttaaccttggcaaaataaacttctgaattgattgagacctgtctcagatactctttggtttataaactggtggccaatggaagagatgaggtggcctgatctttgacaaatccatccatg

SEQ ID NO: 8587 - DNA, 363 bp, Homo sapiens
  III.2215 (AA454632)
tttttttcattaataaccaacttttttttattagagcagatacagttgtgaaaactgtacattatacattttggtttcaagaattataaataaaggaactcacaggtagggagttctttttcacagcaagaaactttaaataaacaaagtcatgttttattaagtacattggcagacttcatgtgctgtccaaaatgttgagtacagtataacaacccattagaaagagccttcatgtaaaatacagctgtgcacattttagaaaaataccaacaatttgagctttgttttaaaaaagcttataaatcatacatatatttataaatgggaccaacatgctcactttataaacatatcctctcg

SEQ ID NO: 8588 - DNA, 486 bp, Homo sapiens
  III.2216 (AA456243)
ctcactgcccctcccaaaccctatagctccttacgctgggaaagctggttttttaaaaaaataataataaaatatttaatcttattaagtgttcatttaaaatgcgtaatgctttggaaataatgggtaacagatagcgagaggatatgtttataaagtgagcatgttggtcccatttataaatatatgtatgatttataagcttttttaaaacaaagctcaaattgttggtatttttctaaaatgtgcacagctgtattttacatgaaggctctttctaatgggttgttatactgtactcaacattttggacagcacatgaagtctgccaatgtacttaataaaacatgactttgtttatttaaagtttcttgctgtgaaaaagaactccctacctgtgagttcctttatttataattcttgaaaccaaaatgtataatgtacagttttcacaactgtatctgctctaataaaaaaaagttggtt

SEQ ID NO: 8589 - DNA, 438 bp, Homo sapiens
  III.2217 (AA789269)
ttttcagccagaggtgtttattgatagagtgtgggaatccactgggagcttcatctgcattttcatggcttcaggcttcaaagcagttaaaatggccaccacctttcttttggctggtacttgggcttcacgcagcacattttattatttatgcagtaaacatagactctttccttcttggagcatctgtaacggcatttgcataaagattccagcatctttgggtgccacctggagtcagctgggataagagcagcagcacagtcaaagtcagcaaaaggagcttcatggctaaggcagcccaaaatgaagctgcaagtccgatgccacggctgagctaatgggagaaggagagtgcctggcctgtggctcgcactccctcagctgcccacgggtacagccctcacactctgactggacacccctccctttgtcatt

SEQ ID NO: 8590 - DNA, 489 bp, Homo sapiens
  III.2218 (AI140892)
aaattccaaaggtatttttaatgccagaaaaaacttcagtaacaaatgatgaaataattttttagaaaaattatatggaaatagctttttaaatttatattcaacaaaaatttattgagccctttttacttagccactggggctgtagacatggcccttatcctcatggagcatacagtctgctgggaaaaccagacattatacaagcagagaaagtacagacactgttaggaagaatagaggacattgtggggacatatagctgggagccttaaataagaggggtccctgagaaaatgatgtttgatctgacatcaaaccttgagaaataatattttcttgtactgataatttttattgacacatagttgcagtttctcatgttatagaacacacttggacctttatttattatatagatccacccaggagtgatattcagaatatccaatgacaagtaaggcagaagataggccagttagaatagaa

SEQ ID NO: 8591 - DNA, 417 bp, Homo sapiens
  III.2219 (AI188219)
tttgccatgaactcacttggcacatttattaaccatcaggctatgtctgcggccccacgtgtttgctgccccatgcacggtggtggtggtgggaaggcagggccgggtggccagcgcctacttgctgtccatccatttgagctgctccttgccgttcacagtcaccgacttgagctgcccgtcttcctccacctccacgcgctcctgcccgttctccacgatgcgcttggtggtgaccttgtggccattgatcatctcggtggacgacatcaccgacttgaaccccgagctgccagaactggagcccccgaaggaggtggatgagaaggtggtgtggctgcccccgctgcagcccagcatgttgaaggatgagaaggcctccatgaaggccggaaattctccaaagcctgccgagaa

SEQ ID NO: 8592 - DNA, 483 bp, Homo sapiens
  III.2220 (AA419270)
taaatggttctttattcataaacttgatgcaagtttacaaaatttactgtacattgccaaataaatctgcaattaaaaataaaatccattaaacaaagcatgccaaatgtgcagctatcagtctgcttgccatcaggatattaaagaattcaacaatgtattcaagatttagccttaggcttaaggaactttactgatttaaagaattctgccttgtcacttgttatctgagcaactggcaatcagaactttatacaaatgtaatcaagtgaacaagaataccagaaaatctatttactgctctcttaaccaaaatggaatcaaaagaaattaaacacacacaatgtagaaatgacaagtctctcagatgtggtttacaaagttaaaaactgaatctcaaagctaatgcacaagaaacacttttgaactttgtaacttgtttgtgcagaaaaatgtgcttctggatttcttgttaaaagtgct

SEQ ID NO: 8593 - DNA, 469 bp, Homo sapiens
  III.2221 (AA419321)
ttctaaatcataatagctctttcatgtctaaaaccattttatgatattgccaaaatgtgataggaaacctactcattaaattgttaaactttttaatgactatgtgaagatatgaattgtttcctgaagataatactcttaattgagttgtattgtacttcttaggcaaagcagtgtaaaactgtatcaattaaggcttgtgagtagtgatttccactggggcatcagagtcttggctgggctgaatctgctgcttgttggttcagtgtttcttatgaacaagagccacagtacagagcttcaagttatttaaaatactaagtcatcttacgtttccattttattaacgggatgttgcaatcgtttgtaaactaataaacttataaagtgattggcacaaagactccttgagcaaaagctgtgcagttaagtacaaaaagatacttaatttggagactcttacagtaat

SEQ ID NO: 8594 - DNA, 517 bp, Homo sapiens
  III.2222 (AI192302)
ttgaagaacagaactttgcgtgtttatttgaggttaaagtgatttttttttttttttaacccactcactggtcccggtctaggtcattttgtaattcctgcacctcgctggttttctgtctgattgcctcttccttttctcgaatgtcttgttccagtgaatatttctctctttgtaactgggcaatctcttgactgatgtcatcaagctccttcacgccagtaaactccccggagccgagagagcctgaactgtccgggccgggcgtgcctctctccgaaggcgggaccatgtccggcgagaggacttgaggagggtcgatgcctttactgaccttctgctgaatgaaatacatagctaacgcgaattggtctttgcttaactttccccgttgcctcgtatcggccagggcccatatgtgtgctaaaaggttcttggtgaggccccggtgcatgaagatctcttttacctcctgggcacttacgttgccatccaggttcagtccggctttaaggat

SEQ ID NO: 8595 - DNA, 365 bp, Homo sapiens
  III.2223 (AI138882)
tttatggtgacatgctttaattatccaccgagcaatggcgggctgaattacacaggcagggccttggaggttacctaaaaataaagcaagaagcctcattacatgctaattgctgcttttgccaactgaagtgagattctggtgccgagtgccatttagtgctgggttgggggttggggctgagccctgtgaggctcacagtgccagggccaagccctgaggggcagccaggaccatccagggcaggcaggatgacagaaggagccctcagtgccaggggagtgcctcagtttcccctccctgttcagtgggcagatggaaacctgggatgggaagggggagccgtggagccagtgagggtgttt

SEQ ID NO: 8596 - DNA, 371 bp, Homo sapiens
  III.2224 (AA228970)
gatcgacgaaggaaggagagagagagaaagaggagacagaaaggctgctttaggactaagaggtaacgggagatagctgctttaggactaaggtaactggagatatcagatatcagaggtcatatgtgggtagatggagtagttccaactcaataaaagtagagagttcttgctgagcccctctggcattcagttaaataagattccagaaaagcgacatcttaaaaataagaactacacccttgaaaaggagccctgccctaaaattacaaataaagctagaagaggatacctactcctaacaaagtactgaaacaagcctaacaggttcaagatcctttagtaatttaattgcctgccagaacaaagct

SEQ ID NO: 8597 - DNA, 370 bp, Homo sapiens
  III.2225 (AA230043)
actactactactaaattcgcggcgctcgacctgctaatatcaatatctggttaccatgtttttattttgggtcacattttcctgtttcacatgttctagagagttttgattgatgtgctgtacttgtgtgtgatacattttgtagggttatgaattatgttacctttctttaaaagttatgagctttgttctggcaggcaattaaattactaaaggatcttgaacctgttaggcttgtttcagtactttgttaggagtaggtatcctcttctagctttatttgtaattttagggcagggctccttttcaagggtgtagttcttatttttaagatgttgcttttctggaatcttatttaactgaatgccag

SEQ ID NO: 8598 - DNA, 415 bp, Homo sapiens
  III.2226 (AI039344)
ttttcctctatgtgaatgtggttggcctgtcactttcctttcttatataacccttacctggttttgttatcaaggtttttgtctaacacaattatttaggggaaagaattgtaagaaccacttcttcttcttgggcatacagttcaactatattggaaccacctgaatgagccctggccactggaatttgaagtcacttatgctacttccaggactggctcgaaaatctctcatgcataatcttcctcttctttccatatccacgctgacttagaggtttcaggctgactgtgatggtggcacaaaacagagggatcctcagtctccgaatgactaaatggaatagaacactttctatgctctggacaaagcacattagattataaaatgcataagcaataaatttttagtgtgt

SEQ ID NO: 8599 - DNA, 337 bp, Homo sapiens
  III.2227 (AI222324)
tttgcagcatgcagactttaagtgactaggaaacagaatcattacccaaggaggccatgctatggtgattttctggcatcatgttccactgcagggctctctgactgagtgtgagacttttccatttcttctgagtgtagtctacagataggtcctcatatgccacagtatcctggggcctgaccatccgaagtacagttgcccctgcttggtctcctgagttccccacttgaggaagggtaggaactggagaagtacattgagcgaagtccccactggggaggtgggtgtccctgggtcataaggaggctccaggtgggctccaggggctgagccc

SEQ ID NO: 8600 - DNA, 358 bp, Homo sapiens
  III.2228 (AA506051)
tttccctgttaatatttttaatgccatttgcaaattaaagcataatgcaccgattactgggataaaagggaggcctctgcgtctgtctggagaccaaataaaggaacgtttgaacatctgttcatcctgcaaatgtctctaaaagctttgatttcccctcagtctgttgactccaccattcaccccttcctgagtatcccacagcctggggctacaaggcagggtggtctgtgggtgcaggggatggcagatggctctgcagggtgccctcaccatgctagcctccactttctgggaagtatgtggttctcaaacttgagggcaggggctgagggactcctcgtgtttggggtggagg

SEQ ID NO: 8601 - DNA, 483 bp, Homo sapiens
  III.2229 (AI148674)
tttgaaatccaacgtaagatttattacttattctgtggtagaaaccagactaattacaatagaaacaatagtttaaaatagaataaaataatactttcttgaacttaacaaagattcatggatataaaatgaaagggcttcccaaattttaaataaacctaagtgttctttgtattaattatagacattacaggcagctatattgctcaagttcaatggggtgtaagtatttcaggaccatattggcataatctgtaatctaaaatgagtgaacatggagggggggagaagataaaaatgacatgatccagaaaattagaccacttgattttaaccagacctaggtgataattatgtgtttatctttgaaaaaaaaacatatacgtataccctgaacacactctcacaaagatcccgagtctgtgatcaggctctcattcaggcaggtggtccatcaatacagctgagtttttgatacacacc

SEQ ID NO: 8602 - DNA, 480 bp, Homo sapiens
  III.2230 (AI247331)
tttcagaaatataaacaaagagcttgaattattttgaaataactgttggtagctggactgtgttctcttgaccgcaacattgctctgggactgaatcgcgtgggtctctgctcttcctaagtgttacataagaatagcgaacccatgaggtcagcttctaaaccagtttcttcccataacctcctggaccaagtcccaagcaaggcccagaggagctcaaggacccactctccccgggacactcctcactctctagttggaaggaggaaatgaatgtcccccagtaattgaaggctgctcatgtttgtgtagaaaagccaagcacaggcccatattctagagggttgcttgcggcaggcggaaggccatcgaaggcaaaacgaaacaaatgaaaaggcatcttttgaagctaatggaacagatcaggtggtcaaaaatggataaacaatggcatttggagcaaaactttcagcttcttcg

SEQ ID NO: 8603 - DNA, 310 bp, Homo sapiens
  III.2231 (AI222315)
tttcaactttactaatatatttatttagctcaacaggtccaaaatactctcatttgaacctgtcatcagatgcaaacttgcgattgagccattttacactctttatggtggagcttcgaaatccaaggaaacccaacatgtgttttacacccagggcgtccagggcgcctctcagtagcaacgcatgcagtccccgagcccagccagcagccccgatgctggcggttgccctgtgagatgctgcgggtttactcggtgcccagggacgctctgtggacacagtcaccttttgtccatccagcagccctaa

SEQ ID NO: 8604 - DNA, 340 bp, Homo sapiens
  III.2232 (AA425337)
tttttgtcataaattaaatttattctctggagaacatggttcttggtattgacgtgaatgggagcagggcatttggggactcaggaataggagatggggggcttgggtgccaaataccaaggaaagccttaaacggactccccagagattaccgatagcattagcatctcatggaggaccccccgcccccgaccaccagtccccctttacttcttcttcttcttcttcttgcgaccccaacactgggggcctccatcctctcttcggctcctccaggtgggcatgggaggctccagctcatttgggcggcccccccggtctggaacgttgcccataagca

SEQ ID NO: 8605 - DNA, 591 bp, Homo sapiens
  III.2233 (AA425516)
agggtttcaccgtgttggctaggatggtctcgatctcctgaccttgtgatctgcctgtctcggcctcccaaagtgctaggattacaggcatggtggcgcatgttgtccatctcagttactcaggaggctggggtaggaggatcgcttgagcccgggagattgaggctgcagtgagccaccatcacgccaccacactccaggctgggtgacagcgagaccctgtctcaaaaaataaatatttatttgagctgtgggcagtgaggtcttgaatggtaaagtaatgcttccaagatgacaggtcccacttggggaagggctccagggtaccttctcttacctcctccccactccaggcccaaggagaggccatgagggcagtgctgatcccaattcgagaggttctgaccccagaatcggacatctccattgcacacgttctggctgcccgagccgacctgtcttgtctcgtcccagccaccagcgtggctgtccgcagagggacctgctgtgccatcaacaaggtgcttatgggcaacgttccagaccgggggggccgccaaatgagctggagcctcccatgcccacctggag

SEQ ID NO: 8606 - DNA, 378 bp, Homo sapiens
  III.2234 (AA460491)
ggcggaggtgaccaaagccacgtaatgtccgtagttcgctcatccgtccatgccagatggattgtggggaaggtgattgggacaaaaatgcaaaagactgctaaagtgagagtgaccaggcttgttctggatccctatttattaaagtattttaataagcggaaaacctactttgctcacgatgcccttcagcagtgcacagttggggatattgtgcttctcagagctttacctgttccacgagcaaagcatgtgaaacatgaactggctgagatcgttttcaaagttggaaaagtcatagatccagtgacaggaaagccctgtggctggaactacctacctggagagtccgttgagttcggaaaccacccagctaag

SEQ ID NO: 8607 - DNA, 397 bp, Homo sapiens
  III.2235 (AA461061)
tttgattttaatctcttttattaaactacacaagtggttaaaaacttgacaatttgtttcatatgtagcaaatgacatggagtacagggatttcaaatgaatgctataggaataaagaggaagctgtattaatatctgtgcccaaatgatgaatttgcaattcagtactgtctagctggaatagtgtcaaccaacacctttttccccttaaataatgtaattatgcatagaacactttgtagtctttttttaaagtttagagtaacatctatatgacatactctattgtatttttcataatgttatgtcatgtaagatacaccaaaagctttgtattaacagtatatcatcaatttagatcagcaatctctttttcgtagttaagatgtctttaaaa

SEQ ID NO: 8608 - DNA, 350 bp, Homo sapiens
  III.2236 (AI367640)
aaaccataaaatctcatgtgaaggaaaaggagccatgaggttaatcaagaagccagtttacagtctgaggaacagggcagcatacctatgacacccctggatgacaggtgaggagaagagccatgcacaacatggagcacagtaacttcgtgggcacagggagctgccaggtgctttgcagtccacgtacccagatggccttgaagaggaattctgaaaccctcctggttcaaaatatcctacagctcccatgtctccaggactgaacacactccccagcagggcctgcaaggccaggctctgcaggatcccagtccttcccgggtcctcacactcccaactccacggca

SEQ ID NO: 8609 - DNA, 412 bp, Homo sapiens
  III.2237 (AA400268)
ggctagtctttctgcaagcatttaatagtctttggtggaagaaaatgaaaagctcagcttggcatatttcattattcaaaatgtgacctgatggtgttcttttctgatatcattcctcacaggtctttcacttctgcttttctcttctccattgaagttcaagttaccattgggtttggagggaggatgatgacagaggaatgccctttggccatcacggttttgattctccagaatattgtgggtttgatcatcaatgcagtcatgttaggctgcattttcatgaaaacagctcaggctcacagaagggcagaaactttgattttcagccgccatgctgtgattgccgtccgaaatggcaagctgtgcttcatgttccgagtgggtgacggtcatgtgccaaatctggggc

SEQ ID NO: 8610 - DNA, 456 bp, Homo sapiens
  III.2238 (AA401506)
gcaaaaggtcaagacatacaaactcagagtttttaaaatcaagaattgaaagtggtccactagcttctgttcataggacattgagccccagatttggcacatgaccgtcacccactcggaacatgaagcacagcttgccatttcggacggcaatcacagcatggcggctgaaaatcaaagtttctgcccttctgtgagcctgagctgttttcatgaaaatgcagcctaacatgactgcattgatgatcaaacccacaatattctggagaatcaaaaccgtgatggccaaagggcattcctctgtcatcatcctccctccaaacccaatggtaacttgaacttcaatggagaagagaaaagcagaagtgaaagacctgtgaggaatgatatcagaaaagaacaccatcaggtcacattttgaataatgaaatatgccaagctgagcttttcattttc

SEQ ID NO: 8611 - DNA, 459 bp, Homo sapiens
  III.2239 (AI014647)
cttgatcattcctcttcatttattaattttgagttgaggaatttagcccactacccctcttattctctgtgagtcttttacattcttttgttattctcccatgatactacaaatcattatttcttcacccttacgcattaattctattgtgtgacacattcttctgaagacttacatgtcctcatttctgcaatttgtccttctcttgtcctcatttcaggtccactttttcctatctcatatgactacagggcttaattaattcctgacacgctaacccttaaacttgaagagaacagtttttttaaatagatatacctgaaagactcaaatatcaggaaataagacttcacttttaatcaacttttatttggttgaaataaaatgctaaataatggttgtttgcttttttgtcactgagatatgctgtggtataaagacaatttaaaattcaagttt

SEQ ID NO: 8612 - DNA, 579 bp, Homo sapiens
  III.2240 (AI792012)
gtaggatataaaactagaatgtcaatttaaggagtttggtccttattcagtaggcaatgggaatcgaggtagcaagatctaaccctttaagggagaaaactcaaagggttgagacatcaagattacaaggttatctattgaaagagtcttgtaagagatagcaaaggctgcgatagtgacaactgtgatggtagttgtactatgggaattcaaaaaagaacgaaacccctgtggactggaagcgctataagcagaacctgagctaggttctgtgaagagtgagtaggagtcaacaacagccctgttgtaaacttgaattttaaattagttttataccacagcatatctcagtgacaaaaaagcaaacaaccattatttagcattttatttcaaccaaataaaagttgattaaaagtgaagtcttatttcctgatatttgagtctttcaggtatatctatttaaaaaaactgttctcttcaagtttaagggttagcgtgtcaggaattaattaagccctgtagtcatatgagataggaacaagtggacctgaaatgaggacaagagaaggacaaattgca

SEQ ID NO: 8613 - DNA, 527 bp, Homo sapiens
  III.2241 (AI820616)
cttgatcattcctcttcatttattaattttgagttgaggaatttagcccactacccctcttattctctgtgagtcttttacattcttttgttattctcccatgatactacaaatcattatttcttcacccttacgcattaattctattgtgtgacacattcttctgaagacttacatgtcctcatttctgcaatttgtccttctcttgtcctcatttcaggtccactttttcctatctcatatgactacagggcttaattaattcctgacacgctaacccttaaacttgaagagaacagtttttttaaatagatatacctgaaagactcaaatatcaggaaataagacttcacttttaatcaacttttatttggttgaaataaaatgctaaataatggttgtttgcttttttgtcactgagatatgctgtggtataaaactaatttaaaattcaagtttacaacagggctgttgttgactcctactcactcttcacagaacctagctcaggttctgcttatagcgct

SEQ ID NO: 8614 - DNA, 411 bp, Homo sapiens
  III.2242 (AA412336)
gtgtgttgctgcagggaaggcttcccagtggaggtggctcctgagctctaggaaaagggaagtgagtgtccttccaggcagagggaacagcaggtgcaaaggcctgggggtcgtctataaggcccgctggagtcacaagccccatcccagactctccaacgctggacctgcagcgcccagccctgccctggtgctaccacctgccagctctgtgcctgcccctccactagatcatgacttcggctccagctccctcactctccatgcctctcacttgcgggttgtgccctgctcagctggccagactttggccccctccctacctggatttgtgaagccccaaatttcatctcccccaccacacttattcacagcctccgcctgctgacatacccaggcaagactcccttc

SEQ ID NO: 8615 - DNA, 409 bp, Homo sapiens
  III.2243 (AA441812)
ttttgtctgtttatgtatttatttatttatttattatacctattaataaaaaaggtgctcagcctccaaaccattttctctttgtgttcctcaaccgtccaacctcccacccacctctctcccttccaaaaggatggctgggataggatgaaaagggaagggaacttgatgtccagtggcctaagccaagagctgcttctggaaggtgctgaggcccagagcatcatgggtgagatggccaaatgtgtggccaaactggaacttataccctggcacgtagcccccatagttaggtaaaagacccaggttctgagggtatgttctgggaagtggggggagatgtttggggtcctgggcactgcctggtgagtgcttctgcccaaattcctgcagtgcctggttggtgagc

SEQ ID NO: 8616 - DNA, 376 bp, Homo sapiens
  III.2244 (AA441875)
ggaaatgcccggctccccatggctgtggccagcaccttcataccagggctcaaccctcagaaccctcattatatcccaagggtaagactcccacttagcgctccccgcttgctgctgggagtaggggtatagggtggaggaattaagctgcttagagcatggggccaagcggacaggttggtttgggaggctgaggtctctatggtggtggatggaaaaggagaagcaagggactagtgagacaccgggtctgccccaaagctttgtgttgttctctccatgggaacagggtaacagcagaggaaggatcgaaagcccaggcagagaacttagaaatgcctgctccaaatatatacactgctgagtccagaaagat

SEQ ID NO: 8617 - DNA, 448 bp, Homo sapiens
  III.2245 (AI204169)
tttacacaaagtagattcttttattctggaattgtgactgaaggacagtcatggggattaagaacaatgctttaaaaaaatcttgcttcccttcagttaaatcatttccttaactgtttcctgtcaccgcttttttgttgttttttgtttgttttttaacagtaaatcccagaacaaaggtttaataatcttcttttccatcagctgactgcttttttggatggtaggcattctctggtgcattggtacagaagacttcaccatggaagctcatgcttgatctttcaatatgatcatgatatttttcctcttggcataatatggctgctgtgtcctcatcattcaatgaaaaagtctgtcatttctgaagctaccctttttagccataaattttttttcctccagtaagttaaagttgaaatccatccattggtgcttcctgctgctg

SEQ ID NO: 8618 - DNA, 455 bp, Homo sapiens
  III.2246 (AI283729)
tttaggataattgagagtttaatgataggactatttacaaagttgagggcagcattaagggaaatcctggaagcccataacagtggggctccattgccaccccatccctgagagtggaaatggaggaagtagttactggagcccagtgagacctttggtataaaacagagttaggctggaagcagtggctcatgtctgtaatcccagccaaaaaaaaaaaaaaaaattattattgtttagtagcaaaacatcataagagaaacacaaaacctagaagtcagaaggcaagaagactagctgacttgaccgcgtaaaaatgtatagtgtacttgggatggaggaggaggtacagaagagtgtgcatagaatatagttctaaagggcacataatctattaacactggctacctctggggaacgggggggaggaatgataaagaaaatttatattttag

SEQ ID NO: 8619 - DNA, 507 bp, Homo sapiens
  III.2247 (AI288731)
aagaaaaaaatgaactgataagggatcttgaaacccaaatagaatgtttgatgagtgatcaagaatgtgtgaagagaaatagagaagaagaaatagagcagctcaatgaagtgattgaaaaacttcaacaggaattggcaaatattggacagaagacatcaatgaatgctcattccctctcagaagaagcagacagtttaaaacatcaattggatgtggttatagctgaaaagctggccttggaacagcaagtagaaaccgctaatgaagaaatgaccttcatgaaaaatgtacttaaagaaaccaattttaaaatgaatcagctaacaggaattattcagcttaaagagagaacgtgaaagtgtggaaaagattcaaagcataccagagaatagtgttaacgtggctatagatcatctgagcaaagacaaacctgaactagaagtagtccttacagaggatgctcttaaatccctagaaaatcagacatacttcaaatcttttgaa

SEQ ID NO: 8620 - DNA, 409 bp, Homo sapiens
  III.2248 (AI298953)
tttttttttggaatcatacaatgtttattctttcatacctgacttctttcattcaggaacacgattcagagcttctgctgtgcagtagggggcatcaatagttcattttctttttattgtctgctaccattccattgtatggattcaacctagtctgtttattcattctcctgtgaatgaatatttgggttatttccagtttttgtcttttatgaataaagcttctattttcatcttttcagaagtctatttgttagatatgagttttcacctctttatccttggataaaaacctaaggatggactcgctggataatataatagggtatttgtttaaatttacaagaaacaaccaaacaattttcaaaagtgtttgcgttcttttccttactcactagaaatacatgag

SEQ ID NO: 8621 - DNA, 501 bp, Homo sapiens
  III.2249 (AA419254)
tcatttttttaaaatgatatcttacctgaaactacaaacgacaaaagagaattagaaatgtttgaattaaagtgaagaagggttgggggagatgggcctgaacccacttcctgtctcaatccatgctaccccaaacactccagggaacctctgaggttttattgggtgcactttgaaaatttctcttctatagtgtgtttgtttgattttaaatcacagagaaaactgggttttactcttagagaaacattttcatccagttttttagtttgcttcatttgacttcctaaatcatttttgagttcacaaggatttggtacttttctgtttagctttctctctctaagctttatctaccttaaaaacaaagtcctttttttaatggccagtccaaccaattgatttctcaaactgaagtgcccaggtgtggactcatcaatttccgttagaatagggacatcctacttaagagttggtgcagctccaaggagctgacttgtc

SEQ ID NO: 8622 - DNA, 501 bp, Homo sapiens
  III.2250 (AA419290)
tcaagatgataaacttcaaagtgtattttttaaaatgcaagttgcctgtatgaaataaattaaaaatttatatgtaatttcagtgtaaaacaccaaaaccgaacattaaaactgttcacagaaaatagaaaaaaaaaacaaaaaaacaaatcacaattataaaagcacagagatatcagttataagaaccaagtaaataaactaatttctattaatattttcatttactttataaaactttgttgattaaattgggggagtctctgacaatctaaagggtaacaaaataacaaatatacatcatttctttataagtcataccacacaaaccaagttaagttttttctatctgattacagagtcaataaatattgcatctgtatttagagcagcaacataaaactttattagaaagaaatactatatctggaccaaaaaactgcaacatggtttggaaatctaatgactaagaaggtaaaactgggcactatgtgcaactac

SEQ ID NO: 8623 - DNA, 393 bp, Homo sapiens
  III.2251 (AA812708)
tttttttttaattttaaaagaataggaatttatttctcacagttctggaggctgaaagtccaagatgaagggatctttgggtttggtgtctggtgaaggccctgtctctgcttccaagatgataccttgttgctgcatcttagttccacatctctggggaggcctcagaatcatggtgagaggtgaaaggcacttcttacatgatggcaccaagattaaaagccatgtatatgtggaaggcagtcctgcagcagctgagtggcagaatttgttgtatgggagaacaggtagagtcttcctgaagccctgagattacacagacttcatatatgtactaagtctgccttactgagtatttcatattctataaacatgaacagagacaaaataagg

SEQ ID NO: 8624 - DNA, 379 bp, Homo sapiens
  III.2252 (AI041717)
tttttttttttctggacatccttatgactattttaattcaatttcaattcatttccacaaacatttttctcatgcctgctctgtgctaggcactgctgaacaaacggaacaaaaaatccacccttatgcagcttacattctaatggagaaacagaaatgatacaacaaagtaaataaacaagttatgtggcattttagtagtaagcaccatggagaaaaaaataaagtgaagaaatagcaaaagccactgcagaggctgcaggtgggactaagagtgaagaggtgagtgagtcatatgggtgtctgagggaacctgctccaggcagagggagtgacaagtgcaaacgccctggggcaggaactgcaaggaagtcagcaa

SEQ ID NO: 8625 - DNA, 473 bp, Homo sapiens
  III.2253 (AI264444)
  misc_feature (95)..(95): n is a, c, g, or t
  misc_feature (98)..(98): n is a, c, g, or t
  misc_feature (326)..(326): n is a, c, g, or t
  misc_feature (329)..(329): n is a, c, g, or t
  misc_feature (373)..(373): n is a, c, g, or t
acttgcaaaaaattttttatttttcattttagaaattgattttctctccatattcctccccttgcttgctattaggttggtgcaaaagtaattgnggnttttgcattttttttttaaatggcaaaaacagcaattacttttgcaccactctaatataagtatatgcctacaacttttgttactctctaggcttcccagataagactatcagcttcgaaatgaaaatttaacatcccctggaggtctcagtgtgagagtcactgcctatttcacaccttcactatttgctgactttcatttcagttttactctcctcatccctgacntgncaagaaggtttcaatatgtattgaaaccttcccttaaagagttnaaggatcttagcaaagaagttagtttatagtcaacttttgtgagcattttttagtgtcaggcaatgggcatgggcagatgagaagttgggtctggaaata

SEQ ID NO: 8626 - DNA, 539 bp, Homo sapiens
  III.2254 (AI733805)
acttgcaaaaaattttttatttttcattttagaaattgattttctctccatattcctccccttgcttgctattaggttggtgcaaaagtaattgtggtttttgcattttttttttaaatggcaaaaacagcaattacttttgcaccactctaatataagtatatgcctacaacttttgttactctctaggcttcccagataagactatcagcttcgaaatgaaaatttaacatcccctggaggtctcagtgtgagagtcactgcctatttcacaccttcactatttgctgactttcatttcagttttactctcctcatccctgcactgccaagaaggtttcatatgtattgaaaccttccctctcaagagtttaggatcttagaccaagaagttagtttatagtcaacttcttgtgagcatcttttagtgtcaggcaatgggccatgggcagattgagatgtggttctcgaagatcaaacgtgtatgggtggtatgtctcacataagtacaacttgtactgtttattatgacttaatca

SEQ ID NO: 8627 - DNA, 476 bp, Homo sapiens
  III.2255 (AI792615)
aaatattgaaaattcattgttacttctgtgactaatggactttcacagcaaatatgcttggccaggaccttgtaccctgacatttttcttttatttccaggaatggaaacccacactgctgttgtgaagacacctgatgaaactccagcaacttctacatctggcctgctgcttagtcctgggacctgaggtcaaaatcttagaaaagagccatgtgagatgcattccctggcctcatctctgttcttggatgctgtcagcaacactccttgagtttttacccacataataacactttcctcagcatggatgtggaggtggggtggaggaatgttctatttttccttcgatggttacgccctcaccctaccaactcagtaaaaggggagtggtcagggagcgtactgagaatgtgtcctagcatcttttcttccctagcacagccttcatatgacccagctgccatgagaagcttg

SEQ ID NO: 8628 - DNA, 445 bp, Homo sapiens
  III.2256 (AA136473)
agaaaaaagcaaaaaactcagtaccaaatcaaattaatgatattacagatgaaaagactacattctgtctcctgggactgggcatgtacaccaaaacctcgatgacaaaacagaacctaatacataaatgtctatggggattaacagtaatttacttattaatattctcatggggtatcttttatgagctctcagaggcaagacaattaaaaattgtggtcagtgacaccaaagatcacggacagcaaattcagacctagctgcttttccataatgaataataatgaatatgttgttggtgaaagtcctagaacttgaggatttaaagacatcaatgaaattaaggcttggtttgactattataatagtcaatcaagtctaacttacacatttctcctgggtaaagaacagaaataggggctcacgcctggcctcgttccgaatt

SEQ ID NO: 8629 - DNA, 417 bp, Homo sapiens
  III.2257 (AA136964)
  misc_feature (364)..(364): n is a, c, g, or t
  misc_feature (372)..(372): n is a, c, g, or t
  misc_feature (395)..(395): n is a, c, g, or t
taccaggagaaatgtgtaagttagacttgattgactattataatagtcaaaccaagccttaatttcattgatgtctttaaatcctcaagttctaggactttcaccaacaacatattcattattattcattatggaaaagcagctaggtctgaatttgctgtccgtgatctttggtgtcactgaccacaatttttaattgtcttgcctctgagagctcataaaagataccccatgagaatattaataagtaaattactgttaatccccatagacatttatgtattaggttctggttttgtcatccgaggttttgggtgtacatgccccagtcccaggagacagaatggtaagtccttttccatcnggtaatanccattaatttggatttgggtacnggagttttttgccttttttcct

SEQ ID NO: 8630 - DNA, 421 bp, Homo sapiens
  III.2258 (AA432009)
cgatggattgccgtggtaacaggcctccggtggaggacggggaccctcggaagccagctgggtgcgatcgcttgtctgccttggagccccttgtgcagtcttttccggcgtgcgtgcagggattgaaaaggaatgctttatggttcagcagagagccaccacgcaggatcactgggacctgagaaccgtcgggcagtcccacgagctctttcatgaccagctccaaccgacaagtacacgccccttcgcactccactagctagtaagctgagctacaaggtgtgccaggacccaggacgccgattcaccgcttcagtgaaggcccagctcaaatgccacctcttccatgaagacttccgtgatccacaatgatagcatctccagcaattgcttctataatgaatagcatgagtcattctga

SEQ ID NO: 8631 - DNA, 397 bp, Homo sapiens
  III.2259 (AA448472)
  misc_feature (356)..(356): n is a, c, g, or t
tttttcagaatgactcatgctaatgcattatagaagcaattgctggagatgctatcattgtggatcacggaagtcttcatggaagaggtggcatttgagctgggccttcactgaagcggtgaatcggcgtcctgggtgcctggcaaccttgtagctcagcttactagctagtggagtgcgaaggggcgtgtacttgtcggttggagctggtcatgaaagagctcgtgggactgcccgacggttctcaggtcccagtgcatcctgcgtggtggctctctgctgaaccataaagcattccttttcaatccctgcacgctcacgccgggaaaagactgcacaaggggcctgccaaggangacaagcgatcgccacccagctggcttccgagggtccccgc

SEQ ID NO: 8632 - DNA, 420 bp, Homo sapiens
  III.2260 (AA406061)
ttttacctctgtttatggaaaaatagtttattattcatttatccactcattgctggatgttttaagcagatttgtataaactttgggcaccatttggatatagttagtggtggtttagctatggcgttccaaatatacccccttaaataaaattatctcccatggcagaaaaagttatgtctgctcttggtgtgaatataaataagtagtattagaaggcagtttggcagatgcaaccaaaatttctaccaaaatgttgaaaaagagtataatttgtaacctagcaattcaaatcctattcaaaggtaatgtacctgccaaggcatatatataaggctctttggtgcagcacttttaaaagcaaaaagtagaaatggcctaaattccagaactacaggaatagttaaaatgctgggccac

SEQ ID NO: 8633 - DNA, 277 bp, Homo sapiens
  III.2261 (AA496065)
tcgtataaaattaaaacttgagaattctagctttcaatgtccttttggttgctaatgtaaagaggtgatatcaaatttctggcattatatagatatataatatatattgtgcatattattatatataatgtatatatgtattatatattatatatttatatatgtgtgtatttatacacttattggattattatatattacaaaatgttcctcagttaccatgtgtgctgtagcacagtgttaattcatgggtccttcctgaatcacaaattagaac

SEQ ID NO: 8634 - DNA, 462 bp, Homo sapiens
  III.2262 (AA460623)
caactgttcatgatactgaatagacagtccatataagagaaattagtggacctaaagaagccagattgtaggtgttaatttattaaacagagtgcaaagcccttggaaatgtcactgcttggcaataccatatggaatgccaaaatttacaatgacttttctttataagttatccaaaagggatttgaacaagtaagaggttatgccaaaatgtctccaatgtatggtcctgtaatatattgcagcttgaagccaatgatcccttatgacttgtatacaactaatgcatgttttattgaattttgcatttcccacgtgtggtaagttctttaaaatgtttttgatcacctttttgtgccattaaacttgtacagaaaatgtttttatggccattttcaaagggagaaagtttaaaatggaaacagcccaccctttctgccctatagctgtagttagaattga

SEQ ID NO: 8635 - DNA, 293 bp, Homo sapiens
  III.2263 (AA461549)
ttttcaaataattattggtcatcggtcaagcagagtcttctgaggtctctatcttaaaacagctgcagggataagggacatcactacctactgtctttggattacatgtgattctgaaaactattcaatcctgaaatgtaatcaaatggccaaatacaaccccaatttaccactgatttttacgtaaagttgagtctttgatcacaatgctgttccttaagaaatgatcaataactgctgagagatggttgagaaatgccttttccccacattttggtttgtttgttgtttgc

SEQ ID NO: 8636 - DNA, 430 bp, Homo sapiens
  III.2264 (AI040078)
ttttttttaaaactgtaatataaattgggttgtttcctatcttgtccaccttggtatgttttttggaaataaattcaatttttttcctttttattcctcctatcttgggtaaatgtttccccaactctgcagtgggggtgttgggtcagaaatgctcactcgtctcttcccatctctgtcaggctgaggctcttggtaaacagtccagtggtaatagagcctcgaagcaagcccccactgaaatcccctagaggcccctggaaagggtcccattagccaccctttggttagcagccagaccaacaaagcccctgcactccacggctagcttcagcaggtccgacagggccaggtcccttctggtggctgtggctccactgccccttgggacatgtcttcttggtgtggcatgttctgggatctcagtcct

SEQ ID NO: 8637 - DNA, 462 bp, Homo sapiens
  III.2265 (AI220097)
tttgtcttccaaatctcttttaatccacaggtttccctgtgcatccctttattttccttagagttgatctgttcaagagcctggagcatcttgatccatatgtagaatttcccatagtagcagttttgctgattacactctcaccaggaagatcgtctttctccattctttgtgtttcccacaaattggcagctggacgcagaggcttgatcagactcctgttagattccttttatcaggagctcataaagtctgcctttctgtgatattaacagctgttgatgttcaatacctagatgcattaattcaatgggagttgcaaaacggtaatactctaattttatcatttttatgcaaaaattcattttattcccatgtgccaacagccaataaatagaaaatgaaattcaaagagtaataccatttataatagcatcaaaagaaccaccaaatacccagaga

SEQ ID NO: 8638 - DNA, 257 bp, Homo sapiens
  III.2266 (AA650110)
tgcattaccccaatgtaggcttcaaacaggcatgcgaggtgcctttggaaaaccccagggcactgtggtcaggggtcacattggccaagttaccatgtccgtccgcaccaagctgcagaacaaggagcatgtgattgaggccctgcacaggcagaggttctagttctctggctgccagacgatccacttctcaaagaaatgggacttcaccagttcaatgtcgatgaattggagacatggtgctgagaatggctcat

SEQ ID NO: 8639 - DNA, 420 bp, Homo sapiens
  III.2267 (AI821126)
tactactactaaattcgcggccgcgtcgactttttttttttttggagaggaagtagaatttattggttagtattaagaggggaagcacagtgaaagccctcatgagtgcagggcccggcacttgtccacagggccacaactggggatgtacttgaccccacagccatatgagccacttctcagccaccatgtctttaaattcatcgacattgaacttggtgaagccccatttctttgagaagtggatcgtctggcagccagagaacttgaacttggccctgtgcagggcctcaatcacatgctccttgttctgcagcttggtgcggacggacatggtaacttggccaatgtgacccctgaccacagtgccctggggttttccaaaggcacctcgcatgcctgtttgaagcctacattggg

SEQ ID NO: 8640 - DNA, 268 bp, Homo sapiens
  III.2268 (AI821870)
  misc_feature (194)..(194): n is a, c, g, or t
  misc_feature (231)..(231): n is a, c, g, or t
tgcattaccccaatgtaggcttcaaacaggcatgcgaggtgcctttggaaaaccccagggcactgtggtcaggggtcacattggccaagttaccatgtccgtccgcaccaagctgcagaacaaggagcatgtgattgaggccctgcacagggccaagttcaagttctctggctgccagacgatccacttctcanagaaatggggcttcaccaagttcaatgtcgatgaatntgaagacatggtggctgagaagtggctcatatggctg

SEQ ID NO: 8641 - DNA, 288 bp, Homo sapiens
  III.2269 (AA886796)
gggatgttttaaaattttatttatttttttagagatagggtcttgctctgttgcccagtctggagtgcagtggtacaatcatagctcactgcagcctgtgcctcctgggctcaagtgatcctcccacctcagcctcctgagttaaatttttttacaggcgcctgctaccatgccctgctaatttttgtatttttagtagacaaggggtttcaccaggtgggtcaggttggtctggaactcccgacctcaagtgatccacctgcctaggcctcccaaagtactgggatt

SEQ ID NO: 8642 - DNA, 494 bp, Homo sapiens
  III.2270 (AA628472)
taatggattggagagcacagctgggatactgaggcctaagcaaggttcctttcttcttctgtgaagtgacggctgccgagcccactgggtggagcccaacagaacttacccacccagtcacagacggaggctggaacatggagagccaagtcttggctgagctcaccacgagcaggttctgctgggtctgtttactacatggagactgactccaaaaggaggaggaacaggggaaatacaaagagcagcagtcccaggcccaacacaaggagcctggaaaaactcttgacaagtgggttcacccgaatatggccagtcagaatgtcgtagctccacgacaaagcacggcgagcctccttcagctcctcttcttcagcaatcaaaaaggcgttttcatctgcttccagatcctcaaatgaatctgtgtcttctctttccaactcaagcctagaaggacagtcaaagagcatgtcaatctcatcgtcatccacagg

SEQ ID NO: 8643 - DNA, 274 bp, Homo sapiens
  III.2271 (AA868761)
tttatagacatgatttttattaatatggtatccctgagagacagattaggtgtaaacattattttgctttacagaaagggaaatggaggcaggttaacttacaagacatctggaaccagaatatctgttgataccacaaccaatgcttttcccacgagactatacatagatatactaaagacaatacttttttttttttttgacattacagcacacttcctaaatcatctgagatcctgaggcactgcttcagactggtgtttcttgtagcttc

SEQ ID NO: 8644 - DNA, 213 bp, Homo sapiens
  III.2272 (AA878949)
  misc_feature (1)..(1): n is a, c, g, or t
nctggatgaactccacaatggtcaccttgcccttctgcaaccgccacttcaccagcttggagcagcagatgttgacggagctgagcacatgccagctgttgtactccaggaaggagtgactgtcgatgaccaggcccccccaggcccgccccgcagcaggctggccagcttcttggcgtccatcaccttcctggggagccggtccccgggcat

SEQ ID NO: 8645 - DNA, 73 bp, Homo sapiens
  III.2273 (AI142228)
cgctgacgtgcgcgccgcaatgcagcaactcttggacaaccttacgcagccgccctcgtctcctgcggcaagc

SEQ ID NO: 8646 - DNA, 565 bp, Homo sapiens
  III.2274 (AI147946)
tttgctacttatagttccacaaaaaggtcctgaattgtcccagtctcttctaacaaatgcctttctcttctcttccaggaactggcttggaatgagaccagcgcttcctccctcttttacatggctagcctgccaccaatttggatcttctctatttacaatctgaagaatctctcctttggaaaacttcaatcctgcttctttgcaaggtattaggttgtcattgtatggattataatcaaaatgacacttcacaaatacctgttgaggagtaatggtatctctataacttggtaagatttttagggtgacacttactaatatttttcagtaattcttgtaattcctttggattatttccaacctcatggccattgacttctttaattatatctcccacatgaagtagaccttgtcgatctatcattcccccatggaggattcgggcaattaccagatcattattttcaaccctaaacgtcacacccagtggttccccagctcttttgtgagtaccaagaatacgaatggcatctactgggtaatactgattactgatagaaga

SEQ ID NO: 8647 - DNA, 331 bp, Homo sapiens
  III.2275 (AA682469)
actttggatagtttattttattattttctgttcacagtttaaattggtatttggtaagggggcagggtgaatctacaggctaaagcaactttttaaaattaaacataatttttatttctaatcacctatgctatacattccacatgatcaagaaaaattgttggtgcattaacattttataggtaaagtttatgtgaaaatgatggtatggcaatgtcctagttattaaccctttacttctaaaagtatttacattaatacataagtttagggtataataaatattgaagatgaaataattagtaatctgtaaccagttgcatttaagcat

SEQ ID NO: 8648 - DNA, 564 bp, Homo sapiens
  III.2276 (AA454972)
attcggaacgaggctggcgagggcgctggcgagaggtgctcggcttgtagcaggtcccgcactccagcctctcgctgccagggtttgctctctgcttgtcctgggctgaggtgtccatgacggatatccaaggaggaaaaaatctgttccgggtgagcccaggccgccccggatatgcgatggctgaggagcagacaccagggaccacactgaggttgggtttcagaccaagacactggattctcctagttaagataaagagctttgggtgcctgacagtgaaaatggtgtaatctgcgttaacagttcacagcttgaaggcatgacaattaaagaacacacatggacttgtggcacatggaaatgtcgcacagaaaaaggaaatctataattcttttaaagtaggaaggcattcttccttgccaaaatgggtacattctgttcggttatcaagtttgaaaatctacaagaattaaagagactgtgtcactggggtcccatcatagcccttggtgttatagcaatatgttctaccatggccatgattgactctgtgttgtggta

SEQ ID NO: 8649 - DNA, 519 bp, Homo sapiens
  III.2277 (AA454973)
aatgcagagaaatattcaataaaattgctttggaaaatgctattttggatcaatgtgttcaaacagatatgaaataaagtctccgagcctaaatgatcagtgattagagtaatatacttagtctctgtgaggacaaacagtaggctgtgtttggtattattggttagtagataaggcaaaaaccaaatatacgattatcattaaagttcattgtcttacagaatctttcttaccggtttccaccccagaggagcaaagcccggaccgacaaacatggcattgaagtaattataaagaatcatgacagtccaatttatcaacatgatgaaattcacacttcctccagttgtatgtaagggccaataccacaacacagagtcaatcatggccatggtagaacatattgctataacaccaagggctatgatgggaccccagtgacacagtctctttaattcttgtagattttcaaacttgataaccgaacagaatgtacccattttggcaaggaagaatgcc

SEQ ID NO: 8650 - DNA, 572 bp, Homo sapiens
  III.2278 (AA628602)
tttggagacggatctcactctgtcgcccaggctggagtgcagcggcacgatctcagttcactgcaacctccgcctcccgggttcaagtgattctctgcctcagcctccctagaagctgggattgcaggcatctgccaccacgcccagctaatttttgtatctttagtagagatggggtttcaccatgttggccagattggtcttgaactcctgacctcatgatccacccgcctcggcctcccaaagtgctgggattacaggcgtgacactcgcgcccggcccagctctagactgttttaaagggcaccctttccagttactttttcccttttaacacacggtgggagttcaaatctccaaaagaggtttccatggggtcagtgggacgaaagctccttgccacctctagtgaaacgcggtccttgacactagcacggcagaccagatggagtggacactgagctctgacacgcaagcccagggaaacggggaaggaacttgtatgaactacagcgcaaccgtcagcaactgggaagagtttgagggtacgtaatgttcaaagggcatgtctg

SEQ ID NO: 8651 - DNA, 381 bp, Homo sapiens
  III.2279 (AA806804)
ggagatgtgggtgaacaactacatggaacaaaagcatggtagaagaggggattataaaaagagaggtctacaatgaaagggccaggtgagacggctcatgcctgtaatcccagcattttgggaggcagaggtgggcagatcacttgaggtcaggagtttgagaccagcctggccaacatggtgaaatcctgtctctactaaaaacacaaaaattatccaggtgtgatggcactcgtacctgcaatcccagctactcggtaggctgaggcaggagaatctctacaacctgggaggcagaggttgcagtgagccaagatcatgcccatgcactccagcctgggtgacagactgagactatgtctcaaaaaaaaaaaaaagtcg

SEQ ID NO: 8652 - DNA, 491 bp, Homo sapiens
  III.2280 (AI224959)
gcataggatagctttgtttattccaagtcttttgtggttctatataaatttcaagattgttttttctatttctctgaagaatttaattggtattttgatagggaatacactgaatctgtagattgctttggttagtatggacattttaacaatattgattcttccaatccatgaacacagaatatctttcctttgtgtgtgtgtttgccttcaatttcttgaaccaacattttatagctttcactgtagagacttttcacttttttggttaactcccaggtattttatttctagctgttgtaaatctagctgttgttactttcttgatttctttttcacattgttcagtgttggcatatgtaaatgatactgatttttgtatgctgattttgtatcctgcaactttactgaatctatcacttctaatcattttttgatgaattctttaggtttatccaaacataagatcatataatctacaaacaaggata

SEQ ID NO: 8653 - DNA, 425 bp, Homo sapiens
  III.2281 (AI344529)
tttgaatggtaagagtggagaattttattgagcgatgaaaacagttctctagtggagaggggagctggagagggtatcagaaaagcagatcatgtttccctgaagtcaagctgtctcctccccaaagtcaggctgtctcccctccactgacaggggcctttataggaacaggatgggggcagggtgggccataggtagtattggaaaaagcaacattcaattggttaaaaggcattattcagaaagaaccaataagaagagagccaacaaacaggaatggaagtcctcactctggtctgtgggtttcaggctgtttttgacctgaaggtaaggtttccccagggacccatccctgtctgtctaggatttctctgcctcctgcctctattaatatttaagttacgacaaagtatgagaaggagctg

SEQ ID NO: 8654 - DNA, 305 bp, Homo sapiens
  III.2282 (AA523161)
  misc_feature (24)..(24): n is a, c, g, or t
ttttttttatttatggagacagantgagagaaactcaaggtatttctaatatgcaaccatagttaaaaaccattgtcctcgttaaaagagatctctcctctcactgagctcccataacattttatctaaatatcttttatgacacatagtttctagcttctttcatacatattttatttttaaagtattttattgaggggtattttgtgtcaggcactgttctaggcactgtaatataatagtgatcaacacaaagggccctgctctcatggagtttaaattctgatgcggaaacagatgtcgac

SEQ ID NO: 8655 - DNA, 425 bp, Homo sapiens
  III.2283 (AA558832)
tttttttgagacaagatctcactctgtcacataggctggagtgcggtggcaaatctcatctcactgcaacctccacccccagctgaagcaatcttcccatctcagcttcctgagtagctgggaccacaggtatgcaccacaatgcccagctattttttgtatttttagtagagatgggatctcgccatgttgtccaggctagtctcgaattcctgaactcaagcaatctgtccacctccgcctcccaaagtgctgggattacaggcatgagcaccacaaccagcctaaagctataatttttctaaacacaaaacttcaaattcaacatatgactattattatcaagaggcattttaaaatatcaagttagaatgatctacataggaacatatgactttacatgcgatacataaaacctaagtttc

SEQ ID NO: 8656 - DNA, 297 bp, Homo sapiens
  III.2284 (AA879455)
ttttttttttttttttttgaaggttattttttatttatctattttttaagaagacagaatttagctacacccccaaaaaacatgataatgtattaatgcagactcttctggaagccatgagaaaacaaatgaagatttctgacttgatgtgtggcatgacgatggtgatgttttgggaggttcattttggatcaacaaggcaagttttgactaatgagatttcaaatccaccccgattcactcccgtttacagaaggaaattaaaaaattgattggttacttccttcgctgcatacg

SEQ ID NO: 8657 - DNA, 435 bp, Homo sapiens
  III.2285 (AI187357)
ttttgcttttgagaacgtttttatttgaacaatgcatttctttaacatgttatgcagggcccttctagcccaatccagagctgtaccatggcagagacaagagaagaggagacagtgtcagcagaagcctcagggttctcagacttgagtgactcagagttcctggagtttctggacctggctactcagaactggtgtgaactgcaaacagcatatgggaaggagcttcctggtttcttggcacctgagaaggcagctgtgttgaacactggtgccagcatacacctagctagagaactagaacttcatgatcttgtgactgtcccagtcaccactaaagaagatgcttgggcaattaagtttctgaacatacttttgctgattcctaccctgcagtcagaagggcacatcagagagtttccagtgtttggggaa

SEQ ID NO: 8658 - DNA, 296 bp, Homo sapiens
  III.2286 (AI214702)
ttttaaagactaaatccttattttatttgacctcttggatctatgatgtcatcatttaagtattttaaatgaatttaacctttcattgaggaggtccagaattaatagattcaaggatgttttatgcacctgactccacatgcagtgtcagggcctttgaggtccaagggcattgacatggtgggttcctaagagtaaaaccactgggaatgatgagccaatacatgcagaagagcttctcttgtagagtgtcccagaacctcagtgaatcttcatcagcaagaaataaacctttg

SEQ ID NO: 8659 - DNA, 425 bp, Homo sapiens
  III.2287 (AI275498)
gctcagatttttttcgtctataaaatgggaatgagacgatacatgtaaaaagcttggtagaatatcaagaccatctaaagtagtcaatagttgttagtgatcattattattcagggtctcacatttcttctttgaaaagccaacttgttgaagaaaaaagagcccatcaaatcttgggggacacagtctgcgcgcggtatgacttaaacagttaaggctgggtccacgagacttattctttagaggcgaattgaaacctctgtattttccatcagtaagggcagtaacttaaaattctgttccatcttcttcagtgaatagcacaggtccagacatgtcataaaagaatgtgcacaacaagtgaccaccgccagcctcatatttgatgtctcaagatgcaggggtcccatctgcaatgctctgga

SEQ ID NO: 8660 - DNA, 363 bp, Homo sapiens
  III.2288 (AI300935)
attatatttttattttttgtagagatagatcttgctatgttgcccagactggtctgaaattcctgggctcaactggtcctcccactttggcctccccaagttttcagattacaggtgtgagccactgtgcccagccaacgcagaaaaattctaagtttattattttataaatcatattccctataatagttgttcctaatattccaaatctttgtttcttaacagctttattgagataaaattcattcagacccttcttaaacagggtgctaatcatctaagttcatacgtcaaagattacttctcaaacaatgtaccttttcacccttaatttaccataacctagtaaacgccacgtttcca

SEQ ID NO: 8661 - DNA, 165 bp, Homo sapiens
  III.2289 (AA682316)
tttttttttttttttttttttttttttttttttttttttttttcttgttgctcaggctttatttatttatttaatgagatagagttttgcttttgttgcccaggctggtgtgcaatggcatgatgttggttcactgcaacctccacctctggggttcaagcaatt

SEQ ID NO: 8662 - DNA, 444 bp, Homo sapiens
  III.2290 (AA292902)
gtgctgcgctacgagaccttcatcagtgacgtgctgcagcgggacttgcgaaaggtgctggaccatcgagacaaggtatatgagcagctggccaaataccttcaactgagaaatgtcattgagcgactccaggaagctaagcactcggagttatatatgcaggtggatttgggctgtaacttcttcgttgacacagtggtcccagatacttcacgcatctatgtggccctgggatatggttttttcctggagttgacactggcagaagctctcaagttcattgatcgtaagagctctctcctcacagatgttgaactcataggttttcataaggctcagcaacagcctcaccaaggactccatgaatatcaaagcccatatccacatgttgctagaggggcttagagaactacaaggcctgcagaatttcccagagaagcctca

SEQ ID NO: 8663 - DNA, 464 bp, Homo sapiens
  III.2291 (AA401736)
ggatggggggaagaagtcaatggtgaggcttctctgggaaattctgcaggccttgtagttctctaagcccctctagcaacatgtggatatgggctttgatattcatggagtccttggtgaggctgttgctgagccttatgaaaacctatgagttcaacatctgtgaggagagagctcttacgatcaatgaacttgagagcttctgccagtgtcaactccaggaaaaaaccatatcccagggccacatagatgcgtgaagtatctggggaccactggtgtcaacgaagaaggttacagccccaaattccaccttgcatattataacttcccgatggcttagctttccttggagtccgctcaattgacattttctccagtttgaagggtatttggggccaagctggcgcaaaataaccgttgtccttggatgggtccaagccactctttgagaaaaaacccccccc

SEQ ID NO: 8664 - DNA, 535 bp, Homo sapiens
  III.2292 (AI005148)
ttttaacaatctccaacctttattattcttgtttaaaaaatattttgtttcttatgacacatttcacaattcaggttgaaatctggggactgcctcccataggtaaaaagtgttggtctttcaattgtgtgtttgttcgtgactccaaagactaaatgcagtcttgaatgtcctgtggcaaagtttacacataaactgtcttttaaatgtgattgctgaaaggggtggggcatggtaaaaaagggtgtctgattcttggggcacaaacagtttttctgtggctggagttgggttttcggacaggcctgtggggctgtcaggctccagaggctggatcttgggcccagtgtgagagggagagttgtggaacagggcacacctcagattccttatgtgccgattcctctgaagcctgagacatgtgcggattgaagtgactccagagtcgaaaattagtgcgaaaagctttgttgcacacgtgacaaataaattgtttcacagagcacagaagcttctggtgacgctccagctgctt

SEQ ID NO: 8665 - DNA, 382 bp, Homo sapiens
  III.2293 (AI190086)
  misc_feature (31)..(31): n is a, c, g, or t
  misc_feature (95)..(95): n is a, c, g, or t
tatacaaagttgtttttatttcccaccccangacccaatcatttggcattaaaaccgaaaagcgaggcaagaaaaccaagaataaaaagtgaagnaatttttgtattataatgtattcaaccatttgttctgattatctaagagaaaaaaagtcttaggaaatccaacttcaacagaaaagttcaaaacgcttccaaggaaaatcagagaactgatctgcttagccagagaccagtgcttcacagtgtttgattctgtggtttttgaattccaggtccttgtctcaccctaatggcccacactccaaatgaaaccagcagtggaccaacaatacccatccctcctcaacctgcgctgggcaccgcaacaaaccaaaaacatt

SEQ ID NO: 8666 - DNA, 477 bp, Homo sapiens
  III.2294 (AI193769)
  misc_feature (431)..(431): n is a, c, g, or t
tctaacttttatctttatggggtggaattttccagcatgagctttttgactaccctacaggttcgattttgttgctttagagattggcagcatatcaatttgtcctgagaactgataataaagggaagtgaaatcaagcacttaccctgcctttcttgtacagtgatgaggttattaagagttaaaaacagacacatatacaaatatttcatgctcaaactgtctcatctttacatggcctgtagaaatcccttcaagttggcttgtataaccctttgacagaatcccaagtctttaagagcctccttgaatcctggacatcttgtaccagatatgaacttgtacacttactgccctggaactattagctgttttgcaaataagttctgattccttttaattgcaaatgaaaatgaaagaacaccatctgngtacctagtggtgctcattggtactgaactgtaattactctagacc

SEQ ID NO: 8667 - DNA, 464 bp, Homo sapiens
  III.2295 (AI241069)
  misc_feature (439)..(439): n is a, c, g, or t
gcggccgcaatgcagggatgacgacggggaccatggtaccgtggggagctcagagggagaggtgatggccttatcaggaggacggagatgtcaggaaaactgtcacagaagagacttttgagctaagacttaaagataccagttttcaggtaaatggagtgggagaaaaggtgagaggacaggatgtggatggcaaacatcctaaacaatcagggcagtgtgagccaaaaactgacaggcagaaaatacgctgctaagtgcaagaattttaggtaacttgcacagttcaagcactgggtaggggagctggagagatgcaggcaggacttagatcacatggactgtggatcatgctgagcttggatttagctctgtggggaatatgaagagtctcaggagcagacaaggccattctagtttgaattaaaaagaaaaaaanaaggagggagattaaaaaaccatct

SEQ ID NO: 8668 - DNA, 461 bp, Homo sapiens
  III.2296 (AI276178)
ctggcctcagactcatttttaatagctgcattatacacacacacagggaaaatgcctaagatatattaagtttaaaacacaaattacaggacatatatcaacataattcaatttttgttaaaaaaaatgtatgtggagacacatgtttgcatgcacatgtaaagaaaaaggcacagtgggggaactctaagggatcatcatggagagggttattcagtctctatctgcaagcctcgagacccttgtgtctaacagtacagttggccctctatatctacagatttaaccaaccatggattaaaaatatattttaaaaaataacaaaaaatataaattaaaaaaccaatgcagtataactatttacatagcatttacattatattaggtattataggtaatccagaggtgattaaaagtatatgggaggaagggtggtaggtatatgcaaatgctataccatt

SEQ ID NO: 8669 - DNA, 617 bp, Homo sapiens
  III.2297 (AA004805)
  misc_feature (393)..(393): n is a, c, g, or t
  misc_feature (401)..(401): n is a, c, g, or t
  misc_feature (412)..(412): n is a, c, g, or t
  misc_feature (509)..(509): n is a, c, g, or t
  misc_feature (571)..(571): n is a, c, g, or t
  misc_feature (580)..(580): n is a, c, g, or t
  misc_feature (602)..(602): n is a, c, g, or t
  misc_feature (611)..(611): n is a, c, g, or t
acatagtatttacattgtattgggtatcataagtaatctagagatgatttaaagtatacaggagaatgtacacaggttatatgcaaatactatgccactcttataagggacttgatcatctatgaattttgatatccacgaggatcctgcaaccaattcccttggataccaagggactatattcagatatcagtaatagacttatgatcatggttatctcatagaaaaaagaaaaaccaaaaaccaatttttaaatctggcatatgtttataaaacagcaccccagacaaaatttgaagttttgtagttttagtaagcaagtcctcaaatgacggtacatccacgtagtttttatataattatgtctgaatggaacttaactataactagtgncataaagntcccaactagnccaagactggtcttaaatatgggaacctaggactttatcgcagctctcagatttacccaaaatccttcccgctgagcctcgtccatgggccactccnggtaaggtcttgggggtcattatcttccgcagctgcagaagcgctggggaatggctttttcncaatgggcnccgaagaatggagatggccgcntcatgtccncctcat

SEQ ID NO: 8670 - DNA, 298 bp, Homo sapiens
  III.2298 (AA005049)
  misc_feature (282)..(282): n is a, c, g, or t
tgactctaccagatgcctccctcttacccatgttactagtattgaaaatcagtaggaatgcaataactacgttttctaaggagcaacttgactcatttcacacactgaagactttggaagctggtggcaataacttcatttgctcctgtgaattcctctccttcactcaggagcagcaagcactggccaaagtcttgattgattggccagcaaattacctgtgtgactctccatcccatgtgcgtggccagcaggttcaggatgtccgcctctcgggtgtcnggaatgtcacaggaca

SEQ ID NO: 8671 - DNA, 372 bp, Homo sapiens
  III.2299 (AA495788)
ttttttttttcatgactcaggaatgtatggactttatttatacttctatataatttttataattaaaatgacccttattgacttatttattcaatgcctgttttcccccactgtgacatagctcattggtcttattccccactgcctggcacacggtgagtgctttttaatatttgttaactgactccagtccatgctggaggaacccttcctccacctgggggaagacatcacaggctctgatatcctctcccacacctcactgtgcagactgagttcagatcagaaaagacagttgcccaagttacacagtctgtggtggcatcccgcctcaaagcccatttcaggctccctctactctcccttcccatc

SEQ ID NO: 8672 - DNA, 149 bp, Homo sapiens
  III.2300 (AA495844)
gattctacagtggttttaacagcaggccccggggtcgcgtctacaggggccgggctagagcgacatcatggtattcccttactaaaaaaagtgtgtattaggaggagagagaggaaaaaaagaggaaagaaggaaaaaaaaaagaatta

SEQ ID NO: 8673 - DNA, 403 bp, Homo sapiens
  III.2301 (AI025527)
tggcttcccagcgcgatgtgtgcctgggtcgccatgaactaatttcaaggccgagtccaaaagccacagggctgccggaaaacagaactcactttcagccagcagggccccagagttgacataaaatgtgaagagggagtctggaggcggctctggcgaaaacaaaatagaagttggggacgggccggccccagtggcctccctccgtgcaggggctgggagggggtggggcagcggttctgctaaatgaatagagccagctgcttggcgaggccgagcccctcctctgtctcccctgcaatgctctgtcctgagcctctcagtcacctgtgtgaagggactcagacgcaaggagagttgtgctctgctctaaataagcacagtggagaccctgatgtggtgg

SEQ ID NO: 8674 - DNA, 299 bp, Homo sapiens
  III.2302 (AI208653)
  misc_feature (252)..(252): n is a, c, g, or t
tttataaagaaaagggatttaattggctcacagttctgcagactgtacaggaagcatggtgccagcatctgcttggcttctggagagtcctcaggaagcctacagacatggtggaaggcaaagggcaagcagacacctcacatggccagagcaggaggaagaaggagggggaaatgccatacactgttaaacaaccagacctcatgagaactcactcactatacagtaccaaatgctaaaccatgagaaacncagccctgtgatccaatcaccacccaccaggccccacctccaatatt

SEQ ID NO: 8675 - DNA, 536 bp, Homo sapiens
  III.2303 (AA813002)
tttacctttttaaaaatccttttattgtggtgggaaaaagaagaaaaaaaaaggacaaaagggtggggggtttgtgtcagatacttacgctgactttgggctgagaaggcaaagtcccacttgccttcattgtgctcactagcttgttgaacgcatcatgtctccgtctttcttcagttgtcgattgttggttacggcactcaaggtctcttctaggtgttctgccatgaagggagttgaattcttcacttgctggtcaaccttcaagcccttcagacctgcttctacctcctccactgaaagcacaacccctgaatgtgagctttctttaagtttttctttatttgcagaaaggctggaaagaagaggtttcaaatccactttggctttctgtagcaattctaaaatatccactttattttcagcatggtcatccaatggtataggagcaaagtaatcccccgagttctgtccaggagagaggatggcttgctccagacctgcaagtctctctagctcttcatgtggtgttgacc

SEQ ID NO: 8676 - DNA, 505 bp, Homo sapiens
  III.2304 (AA648355)
  misc_feature (367)..(367): n is a, c, g, or t
acgggtggtctttcttccacggaaacttccttcagctgctggtgtggcttggtgccttccatttccctgatgctcacagcataaatcttggtggtgtagtcaatggccttttctctagcaacatcgctgtcatagcctccatcctcttccacgtcggtgtctgactcctcgctgtccaccagcttgctctcctgggtccccacaaactccctggtccagatcatcagggctgtgtcggcgccgccaccgtgagcagcacagagtcattgtgcagccacctcacgttagtgacatgtgcactgtgccccacatacttcttgaatcttgcgtgctgtcccttgacaggatatgaaaaaagcttaacganaccaaaatcatctccggtggctaaaagggaacagtctttggtaagagtggcagcatttacgtcagttatatcgctatgtgctggccagatttcctcacaggtggggcccaggacacaggggtcatgtgtccactctat

SEQ ID NO: 8677 - DNA, 387 bp, Homo sapiens
  III.2305 (AA884148)
tttttttaattcttataattttattctcgtgcaaatctgaatttggaaaagaaaaaacagagttctgtatttgtatttttgtaggcaaaattccaggatctggttcagtaaagttttcacatcagctttgtcagatctcaattgagctgcagcctctggagcaagtgggatgccctgcctgtccattcatggttgcctaagccataggaaagcagaaacactttttctcttccatcctaggttcagtgtctgggaccctacaaattaaactgatcacagacaagttaacaagaaaaataacaattaattatgtacatacacatggagattcacaaagaaatgtgatgcaaagaggcaattaggatttggggtgtatatcttagacta

SEQ ID NO: 8678 - DNA, 460 bp, Homo sapiens
  III.2306 (AI033944)
tccattgctatcacacagccttttcaaaaagtttaatagtaataccaccttagaccctcccaaattcactttctatatgggcatctactaaaaaggctgattgcaaaaattcctatgagggagaaacaggccctaaatagctttttaaaccttaacaaagttcacataaccattgatgtgtttaacccactaaatgggtgttaaatctaacctctgagtctgtgtttctgaccctaacccttggatttaggatcaagacaaaaactcagtaaaacaccagagaaaactgttctgcttccctccactcccatctggggcaatctcaccctcagacactaccatataccaaatcaccttctctggaaaatcaaggctggttggtccaacaactgttgggcccctgattactgcttagagtcaaatcaatgaggcatgttattgggaatcagctctcaaccta

SEQ ID NO: 8679 - DNA, 411 bp, Homo sapiens
  III.2307 (AA393982)
ctggccctgggaagacccagctttgagcctcaggttgtgtctaatcatctctctgtccttgggccagtcaactcacctgttcgtgctgccacagagacagaggggccacatcagagagaaagactctacagcttgcccagagtcgagcttaaatggagcagcatgatttttgtctgaaaagtctgagatgggaccagtggaaaggtgtgcattttaagaaggatttgcttccccatcttgtgctttctgtgtcttgcagcacgacctggccctccacctaggaatcataccttcatcccccatactcataagcatcctcattcctgtttccttgtggatgtcatggtctgctgtgaagtctgcttggtgacccgtccagacctgacttggtataaatgattttgttgcaga

SEQ ID NO: 8680 - DNA, 381 bp, Homo sapiens
  III.2308 (AA397907)
tttctctgcaacaaaatcatttataccaagtcaggtctggacgggtcaccaagcagacttcacagcagaccatgacatccacaaggaaacaggaatgaggatgcttatgagtatgggggatgaaggtatgattcctaggtggagggccaggtcgtgctgcaagacacagaaagcacaagatggggaagcaaatccttcttaaaatgcacacctttccactggtcccatctcagacttttcagacaaaaatcatgctgctccatttaagctcgactctgggcaagctgtagagtctttctctctgatgtggcccctctgtctctgtggcagcacgaacaggtgagttgactggcccaaggacagagagatgattagacacaa

SEQ ID NO: 8681 - DNA, 369 bp, Homo sapiens
  III.2309 (AA833596)
tttaatttctataaaacctagtttattctcaattttagctgtaaaaaagaaggaaaatattttattgtcaaaagagatatagtcagggcaccaaaggctcatgttacaaaagaaaaaataggcaaaatgaacttcataagcccatggaatggtggaaaacatttgcacattatatacctgataagggatgagtaatcagaatatatagtgaactcctaatagtcacaacagagctgctgctgggaagtggcacccaatgagggacatttcccagtcccctgtggtaggggggccatctgactgtgatctggacaacagaatgtggacagaagtgtttatgccacttccacgcctggcctggaagaatct

SEQ ID NO: 8682 - DNA, 561 bp, Homo sapiens
  III.2310 (AA451789)
aacaacaataaaaaggcaaaaaattctatcagaagaactgcaacagaacaggagatggaattccagggaagtaccagacatttctatcagagcaagacttggaggttggacaagccctctgaaagttactcccttacaacctcatcatgaaggacgctcattaagtcacatatttacatttgatgaggaggcaacatgtacagatgaaggtgaaccacttgttcaaacaaacaagaaatgtaatgcaaaggactcattctacaagtcctctacacaaaaagcttatgaagatgttccttgggataagatgctaccaccaaaacttgttccagaagaaacaacattggaaaaagccgctgaccccatctcacagtgttttactctgaaaagatataaaggggtgccagcaataactcagatggttggtgagctctgggacagatttcaaacaagatctttcttggcaccagtcaaaccaattaattttgtgagttcaagttctagaagtaaatatattcctctctatactggtcatgtgcagtctacaaatgctgatgatgt

SEQ ID NO: 8683 - DNA, 394 bp, Homo sapiens
  III.2311 (AA453990)
ttttttagcgcggagaagcagcctttatttcccaccgccgcacaagccttccccaggcggaggctggacagcccgcgcagggcgcctcctctagtagtctatggtttctttgtccttcttgttgaaagggttgtagggtctcacagttgtgaccagtcgagacaggggagcctggtgacggaagaggtcaactgccatttctttctggaagacgcggtgcagttctgaatctggtgatggggttgttgatggaatattagaatttgctgggtgggtggctgtgaaatgaaccttgccggtatatcctggaatatttgcagcacgacttgtgtttgtataaagaggcttagagtaccgctgcttggctagcgatgcgatgtctcccaaggggttg

SEQ ID NO: 8684 - DNA, 370 bp, Homo sapiens
  III.2312 (AI187878)
tttaatatttaaatagtttaaatacatatttcataccaaggatataaaaatagcctctgtgtttttttgataaataaagacgttttcatttacatggcaaataacgtgcgaatagctaaccactggccaccagctctatttgactgattgtctaggagatgacatgcagtgataattgtccctttgccttcacaaaaagaaaaatacatcagcaggagctgtgcactcctgaggccaacagtgctatggatattgttcaggaataacaatcaggcactcatgaaaaacctttgccatacttcacaaaagccacatgggacaaaagtcatccacaagttctttgtctaggacttctagctgctcagaccct

SEQ ID NO: 8685 - DNA, 322 bp, Homo sapiens
  III.2313 (AI208157)
tcgctgccgccaccgccggggctcatgcgggacccgcgcttccttatccggaaaacgaggccgggaaagggagcgccggggccgccgaaatcccggcgttcgtcgccagccgccgctgcctgtccacaccggggggctgaggggccctcctgccaggggctacaggccgcgagctattccgaggaggagccgaaggaggcgccgccgcccgcagccgagcgcgccgggtcggcagaggtgaagcgtaagtaggcggcggatggcgggcgcccgcgctggcggatggctacgcggcggagggggtgcgcgagcgagcgaagcc

SEQ ID NO: 8686 - DNA, 492 bp, Homo sapiens
  III.2314 (W78959)
  misc_feature (492)..(492): n is a, c, g, or t
gcaaagcaggggccacccgtctccacagtccttcagagtttcagctgcatcctggtgtcccacccaggtcgagcccccagcttctggaaaacagtgtgtgctctactttgatggaaacatggcaaggaatttaaagacagggatgtattaatattattgaaggtgtgttcgtaacctctgattctgtggacttgccactttctccaaacgctcggttcctttgaagatttcttctgaacgtgtgtgcgcacgctgggcgggttcgtgcatacatgcggggaccccaagactgtcagcacagggaagaaggatcccatcctaatttttaatcaccttgaaggtttggaacccagtgaagggacttgggaagaagaagttgattttattaaagccaccaaataatccaactttccatgttgggattttttgaccgaagggggtaagttttggtaaatttccattttaaaattcctttttcaagcaagcttgggn

SEQ ID NO: 8687 - DNA, 432 bp, Homo sapiens
  III.2315 (W80453)
atgctgaagtacaaatttaataaagcctttgatcacatctcaatccataagttagctacaaaaacaaaaaatcctacaactttttagagccatcaagagccatcaaggtgtcagtgaacaccagttacaaaaggagattcagtcgtttcagatagtgcaatatttccagctgctgaaaagaatttaaatgaaattacaaactacccctcgtcaaaaatccacatgaagttgatattggtgcttataaatcactctctcccagtccctcactggttccaaccttcaggtgataaaaattaggatgggatccttcttccctgtgctgacagtctggggtccccgcatgtatgcaccgaacccggcccagcgtgcgcacacacgttcagaagaaatccttcaaggaaccgagcgtttggagaaagttggcaaggt

SEQ ID NO: 8688 - DNA, 255 bp, Homo sapiens
  III.2316 (AA046067)
  misc_feature (216)..(216): n is a, c, g, or t
  misc_feature (237)..(237): n is a, c, g, or t
  misc_feature (245)..(245): n is a, c, g, or t
aagtggtatattgtgaactttaaacaagcagcctactcaaaacaagtatggatgaatttaaagaaaaggcataaattgaactaccagcagacctgaatggaaagattattaatgatcattttttcagtgataataaacaagcttcaggaaatgaagcttcagggaaagggaactttttatgaagctataccccctacctcactatagaagagtacnaggatgtggagaaatgccttnccctttgnccaccccccg

SEQ ID NO: 8689 - DNA, 230 bp, Homo sapiens
  III.2317 (AA046350)
  misc_feature (217)..(217): n is a, c, g, or t
  misc_feature (223)..(223): n is a, c, g, or t
ctgaaatgaaaaatactgtggacacttaaataatcgggctagtttcttacaatgaaatgttctctaggattctaaaataggcaggtactttactatgttactgtaccctgcagtgttgatttttaaaatagagttttctgcagtatgcttttagtctaagaaaagcacagatggagcaatactttccttctttgaagagaatcccaaaaagttagtncatccntaagagt

SEQ ID NO: 8690 - DNA, 422 bp, Homo sapiens
  III.2318 (AA436668)
tttgagaatttaaatagatttattttgcctcaatactcaaatcctgcctcatattcatgacatgttttgaagaaaagtccaataattacttgtatgtggaacaacgccaagacggctttcactaggaaaacacaagtccagcctgaaagaattcatgaagtgcctgtgacctgacgttgaggatcacgtgggactgtcgtcatcatgatctcgtccccaggctgccccggcggaactgtccggtcagcgtgactgtttggctttctgcagccatcagcaccgcacgggctcaccagcactttgctcctgagggcacagccggagcccctcctcactgcaggcagacgcagcctctgctgccacgaagccacacagccctgcgcttggcatgcggctgctttttctgtgccagctcacgagtg

SEQ ID NO: 8691 - DNA, 442 bp, Homo sapiens
  III.2319 (AI288986)
aagcatctcaataaagtattttattggcagaataagcaagaaccgaatctagttgcctaagaagaggccaacattgccactgttagattaagaatcatgggggaaaaatgagtgttgagccatagtctagctatagcttccccaagaatttacagaaattctcttctggggtactgaatccataggtgaatctctggaaggagcactggcatttgctagggctactgtgcgggctggaactgaatattgattgtgtaagaatatgtaagaatgtactctgcctgaaatcttttgctctaaaagttcatcatggccaacactagctttcagaaataagccagatacaagtctttttgtgtagaacaaaagctgatccaggtaccagggcatagaaatatgaacagaaacattatcagcacaggacccatacatttttatcttc

SEQ ID NO: 8692 - DNA, 465 bp, Homo sapiens
  III.2320 (AI291252)
tttgatttttctcactgctttctttgaacaatactttaaagagagaggatcgtattatagataccgcgggggcaaagctaaaaaaggggggaggggggaggaaaaaattcaagaagcagaaacccctcgcggagttttactggaagaaaaaaacgggtctgaaagattcctcctcttcatcatcatcaaccatcattcattcactaccttgacattccgggctttgattgacagctggagtggcaaaaagccatgaaacacgacagttcggttacatgtgggctgctgacgggccgctcgtaaccttcagttcgggggcttgacaatttttttcttctttttcttctttttcttttctttctttttttttccaactagatataaatcctctcctaagaggggcctgtcccgatgcctcctctcccttcaacgcttctgctgctgctcgcttgctgatgatggcgg

SEQ ID NO: 8693 - DNA, 461 bp, Homo sapiens
  III.2321 (AI288540)
ttgtgaagcttcaatttaatagttttactgaaccatagaactcatttaaaaaccatagtatgggaaacagttcttatctctaaactcaaatgtaagaatgtattaatagaggcaagacatgggatgtcagtgagcacccattctttttctcctcagtaattcttgtatctttgaagacatctgcaattcaaacaaaaacctctgttaaactcaagaggaggactgcgagggaagctgtcatcaggggtcttccattaagacaagaaggtccaggaaggattcagagacgtattgttatgttagaagggactaaaagtatttgatccaggtttcttgtatagatgcgggatgacagcactgtagcctagaaagattttggtcactgtaaggatacaggaaaaaagcaactcagtttctcttactctcactctcatacggtcactcaacacttccaatactta

SEQ ID NO: 8694 - DNA, 202 bp, Homo sapiens
  III.2322 (AA916224)
tagagttgaaaaattatttttatttttcagtttgtattatatttattaaagtttaaaattttagtttaataaagtggcttgctcatcctgattacagttgaatgttaccattctgtcgagtagaagtccacaggatgcatcataaaacaactttattattcccccaccactcttcctattggggaagtggggcaggattttc

SEQ ID NO: 8695 - DNA, 427 bp, Homo sapiens
  III.2323 (AI022780)
cagccactgttatgacagtagtatatataggcttttatatttataagcaatctataaatatgactacttgtttaaacaaagctgtcatgattttttagtgtttttagatgtaaaaaattcaacagatatgaacttagaattggtctttttgaagtcctttaaaagggctatgcgtgagccaccgcgcccggccggtgcctagactgtttcatcaggacagcatttagttttttggggggtaagaacaggttttatcctgctgaccaaccttaagcacaagaattaatccctaactccatttagtgataaggaagttggatgaacaagtgatagctctggtaaaatgttatttctttttgccatcttggatgagtaatgtgtcagcagtaaggtaggaatcttggggcaaatgtactatacatatatt

SEQ ID NO: 8696 - DNA, 700 bp, Homo sapiens
  III.2324 (AA004272)
  misc_feature (571)..(571): n is a, c, g, or t
  misc_feature (591)..(591): n is a, c, g, or t
  misc_feature (614)..(614): n is a, c, g, or t
  misc_feature (659)..(659): n is a, c, g, or t
  misc_feature (694)..(694): n is a, c, g, or t
ccagagacagggtctctctctattgatcaggctggtaggaactcctggcctcaagtaatcctcgcacctcggcctcccaaagtgttggttgggattacaggtgtgagccactgtgcccgacctgatttttcttttaaagatggtaccatatactaattttgccctttgcccttcctttaaaataatcttttattaatacatattttattcagaaaacaaatatgggtattttttttggcaccagtacattttcagagattcttttattcaacatgttactattggtgctaaaactgttgtacatttagctggaaccccttcataccagcccctgtgtcctggcgctcccactcagggtagcactgctctcttttttggcacagtggcacatcccagcctcaataaatccatgctgacctctgtaactcggcctggtcaccacagtgtcaccacagagacctacgtgttctcccttttcctaccaggagaactctgggtcacaacagtattgcatggtcctcatttactaaatccttacaatacagagaaattaacctcagatttgctatgncctttctactgtgaatgacnaacagtaattggtaatcaattgnataaaggtccacattcattggaggtccttttggtcctagaataangcctggtttatgtcagaagtactgaaattttttcngggggg

SEQ ID NO: 8697 - DNA, 586 bp, Homo sapiens
  III.2325 (AA007265)
  misc_feature (184)..(184): n is a, c, g, or t
  misc_feature (185)..(185): n is a, c, g, or t
  misc_feature (186)..(186): n is a, c, g, or t
  misc_feature (449)..(449): n is a, c, g, or t
  misc_feature (578)..(578): n is a, c, g, or t
agactaagactgaatgagggttataagagagactgtagtatgtgtgactaaatgttctaacaaggtacagtgtatctaggaaataacagggagatgtggtgagaacatattaaaggaatattatgcttgctgattatagttattaactgggagtaaaggacagtatttcaaattagatatagannnagagagagggcagggagaagataggtcctagttaatttctagttttatcctttgaaccacattaagtattttacatactcaacaaaattgcatcggcaaggatggaggaaccctaaaactgaatacaaacagacaaatgaacctgtttataaaattgataaccacacagaaaaaaaaattcaagtaacttctgaacattaaacagtgcatatattctaagaacaaaaagaactacaaatgaatgtggaactttatcaaatagnttaacaaatactgtttgtcattcacagtagaaagggcatagcaaatctgaggttaatttctctgtattgtaagatttagtaaatgaggacatgcaatactggttgtgaccagagttctcctggtagganaagggagg

SEQ ID NO: 8698 - DNA, 785 bp, Homo sapiens
  III.2326 (AI127453)
  misc_feature (630)..(630): n is a, c, g, or t
ttttttttttttactctgaaaaatgagggttttattgcttattgactatatacagaaagtttaattttgagtgatttattcctttaactacatcttgaaaaccagatcaacctcaaattcccttcaaaacttgaaaattttcttgtgaaacctgacttacttgcattaaactgaagggaggatgtgaggtttgaatgctataaaggaaatgctgtatagaactttggggcattttagtactgagcaaggctactctcaacagggcattagatatccacagtggagcgtcatacattaactccacacggcaactcaacactcagtgtgtgcccacacggacgagatagggggaggcgaggcagagagaattcgcaattgttccggtgaaaattaatccagtggaaaaacacattgctttttcattttgtcaacttttgtgtctcacatccacgtgcattttgagatcatgtagtttttgtccaaacactttcactggcacataattttttctgagttcctctggaagcgtttacttcccatccacgctgcctcagtctttcacgatgtgcagctgctccctgggtgtgaggatctggggccggcactgcacagctcaccgagaggacgcangcagctcaaaggcagatgtggctgtgctcctggcacgtggtgctcacaccggccacagacaggtacagctttccatctggacacacacagaattcgtagaggctctgtgagctggcagaaggaccccacgtcccctgcaccaagcttggtaagca

SEQ ID NO: 8699 - DNA, 427 bp, Homo sapiens
  III.2327 (AA282045)
cattttttttttttttttttaacctacaatgacttatgtgtttatgaagtgttctaaaaaaccatacaaaaaccaaagaaacaagaaaacaaaccttttcaacttgatgtagggttcagaagatacatacattccaaataccacagtaagcattcatctgaaagtttgccggttggtctttctattaattaaaaaaattcaaaacagaatacagatttaactatgtacaatatttacaacttacagattttacaacgaaattatacagttaagtctgtcgtggaaatgttggcattttggtatataacacttcagaaatttcaaaaacaactttacctcaaaaacatgttacacaaattttccaaagtgctgtagctcactggctcattttatctcaacaatccagtttagcaatccaggtacccaa

SEQ ID NO: 8700 - DNA, 529 bp, Homo sapiens
  III.2328 (AA282388)
ctcattcagggtcaattgagaaagcagaaatacatgaaaaagtggtggaaaggagagaaaacaccgcggaagttaccggaagtttttttgacgaccctgaggtagatgcaagagtacgaaaggttgatgctccaaaagatcagatggacaaagagtgggacgaattccaaaaagccatgaggcaggtcaacactatttccgaagccatagttgccgaagaggatgaggagggacggttggaccgccagattggggagatcgatgagcagatagagtgttaccgacgggtggaaaagctacggaatcgccaggatgagataaaaaataaacttaaagaaatcctgaccataaaagaactgcagaaaaaggaagaagagaatgctgacagcgatgatgagggggaactacaggatttgttgtctcaggattggagggtgaaaggggcattgttatagggttttaaagacccaaggtttctaacagcctctgctgttgtataaaaagtgctgtctctcagtagtatagcggt

SEQ ID NO: 8701 - DNA, 315 bp, Homo sapiens
  III.2329 (AA436671)
ttttagagatagcgtttcactctgttgcccaggctggagcacagtggtacaatcatagctcactgtaacttcagactcctggactcaagcaatcctcccatcttagcctcaacaaaagtttgtttctttaataggcaggaaactattaactttttctctgtagttttctgcattgtttcacttattacaataagcctgtgtcatttttctaataaaaaaaaaatcaaaagaccatctgttgtttccaaatgggtagtttttaagtaaaaccaaaaaaacccttaagtaaaaagttcacattttatactaataaca

SEQ ID NO: 8702 - DNA, 346 bp, Homo sapiens
  III.2330 (AA442478)
aaagattttttgtcacaggtgatctgtagagaaacatgacagattaagtgttattagtataaaatgtgaactttttacttaagggtttttttggttttacttaaaaactacccatttggaaacaacagatggtcttttgattttttttttattagaaaaatgacacaggcttattgtaataagtgaaacaatgcagaaaactacagagaaaaagttaatagtttcctgcctattaaagaaacaaacttttgttgaggctaagaagggaggattgcttgagtccaggagtctgaagttacagtgagctatgattgtaccactgtgctccagcctgggcaacagagtg

SEQ ID NO: 8703 - DNA, 425 bp, Homo sapiens
  III.2331 (AI348493)
taaatcgtgttctcttaaaccaatacaatcctatagcgatcattcatctctgctatatcacattttatttttgaagtatataaatgatgtcttcatttttaaaggtataattttacatttctgccttctaaagatagtttggtcataattttagatgcatccttttaattaatgtatgtgtcgtttttaggagcacacctttccctatataatctgagtttatttataactttctgattatatactgcttatatctgtgggctcaagacacagaagtgaatactaatttttttaacaaaaaaaaatccaataggttatggtgattgtttgtacatgcttaaaatgttaactaaaagtaaataaataatctaataaacatatcttataggctcctgtgtatcatgaggccacataggtctttagtc

SEQ ID NO: 8704 - DNA, 441 bp, Homo sapiens
  III.2332 (AA410466)
tgtaactgcactcttggagaaaccttagacggcgcgcagccagcgccggggctgagcggactgcagaggattgagatcttaaatgcgcatttttacaaaatacacagccaaatgaaatcaatgatcaggaagtgtctgcagacaaatgtccattgcaggtttgatgagtaattcctttttttagatcaaattgttctcggtagccttttcttcttttttaaaaaaaaattgctgatgaagaaggaagttgctattaaaaaaaagtagggtacattatataaaatgttgttagaaaaactagctaaccgccatcgatagaagatgctggtgagcaattaaaatttaggtaataatagaaagatttttttactatgatttgtaaaattttacttgaatgaaggctgctccggtccttattatcggattttttttcatgtgttg

SEQ ID NO: 8705 - DNA, 445 bp, Homo sapiens
  III.2333 (AA410467)
agtctgaatgattttgttttagaagaagttaatactttcatacttctctaccaccacaagcaacagcaccaatttcatgtcactcaaaggaagtatgttaaaaggctcaactttacaccatgctagcagattcaagaataaacctttaactagtcttcttaaatcatttttttaatgagttaagtgtttcattattgacactcaaaatctccttctgtgttgtgcagaacttgataaatttggagtatccaatcagtagaaaatctaaaatctacaaaaatatagaacacatttgttttacaaaaacagacatttttaactcaaacagttttcgtcattagagatagagagcacgatgtttagattcatattttaatacaagctatttcataagagcttgctggagaagaaaatcttgcttcatgtctgtgacacttataaaaac

SEQ ID NO: 8706 - DNA, 232 bp, Homo sapiens
  III.2334 (AA651799)
ctttgcacaaatttaggatcaattttgttaggaaagcaagcattgaagtgtaggccgatgcgggaggatcacttggggtcaggaattcaagatcagtgtgggaaacataccaagagcccatctatacaaaaaacatttttaattagctgggcatggtggtgttcacctgtagacccaattacttggaaagctgagacaggaggattacttgaaccatgattgcaccactgca

SEQ ID NO: 8707 - DNA, 348 bp, Homo sapiens
  III.2335 (AA991717)
tttttaggtagtgtattagttcatttttactgcaataatgctgcataacaaatcaacctaaaacttgagatcttaaaacagcaggcatttctttccttgcccatggatctacaggtcaacttgagtttgggtgatcttggaagagcttggctggcttaggttgggtttagctccaggctgtgggttgtgttcagttccaccaccacgtgtttccttgtgcttctcaaagaagaggctacctggggtatgttcttctcacaggagaccacaaagcaagagtcctgctagcaggtttcccgcctcacagattgaagcccaggtcgccacacaggaacaggctcctccccg

SEQ ID NO: 8708 - DNA, 457 bp, Homo sapiens
  III.2336 (AI143167)
aattaaactcagtccagttaagggttttatttactactaacaaacgtattcaccgtgtgctaagtgctgcagggaatcccagcccgttttcctccatctaaaaggaaaattaggaggtcccaatactttacttgtagattttccagtttctaccattccctgtaaggcactgagacgcaagatttcaaggcccactcggggtaccctggcatggacatcgagtcgttctagcgctgagcttcaaaactattcctttccttccctttcttcttcataccagactctaatctgttctccctagcttcgaattattcactgtatggtcgaacatcttactccacaaataacctctgaagtgttgcagttgtcttacccaaatacctgaactcagcttgtcccgagtactgcgatcccgcgtactgctaatgggaatatagttaacccaactagtatgagg

SEQ ID NO: 8709 - DNA, 429 bp, Homo sapiens
  III.2337 (AI219911)
gatgcaaacataatggccctgactagaagtaactttaaacttaggtttgagaacatctctagttcaaaatttaagcaaatgttttgaactccagacacaataacactccaggtactctgatcaaaattgtattatttgggaagggctttttttttttttcccagggggaggggacttcaagctccttttccatcaagataacagcacttacatctacataaaactaataactgaaatgaaaaggaagaattgtagtcaaaccctttctcaaggaaaccaaaagctaacaataaactgactggaaaagtcctgaatactagagcaagtgctacagcatccacagcacttttgagaaaggactacttctcagatgttaatataaaacgaaaaatctgtctcctcaaatgtacatataaagtcctcttctag

SEQ ID NO: 8710 - DNA, 336 bp, Homo sapiens
  III.2338 (AI189964)
gcggccgctgccgccgccgccttccccggagcggggcggagcagctgcccggcgccgccgaccacccggacgactcctcgtcgaatcgcaaacgcataggccgccgcccgagttctgcgtacgagaagaaagacgcggcgcgagcgccaacggccaccgggcgcgcgccgcggcggccgggcctgcgccccaagagctggatgccagagcaggagaaagagccgccaaccgatcgctcgatcgaccgcacgcccgttccttcgccctaccagacccgggagggggggagggcgcgccagggcttcttcgatttaggggcctgactccccggcgacg

SEQ ID NO: 8711 - DNA, 331 bp, Homo sapiens
  III.2339 (AI001798)
ttttatccataaagagaatttttaatacatggcagtccctttagagttaatgagttgtctgactcttaggatgatggcttccatctggatcagctcttggcaagttgatagccaggcatttaactggatctttaaaacttgattctgtcagcacgaggatccacggcttcattcttgaagtcggtgagaccaagaacccaccaattccagacgtaattacacagcggggccttccagcagccatgaagatgcaccaccactcagatcttctgttgaggagagcgtaattgacacaggaccccagatgctgtgctttgaatccaccaccaat

SEQ ID NO: 8712 - DNA, 382 bp, Homo sapiens
  III.2340 (AA045734)
  misc_feature (211)..(211): n is a, c, g, or t
  misc_feature (214)..(214): n is a, c, g, or t
  misc_feature (344)..(344): n is a, c, g, or t
  misc_feature (354)..(354): n is a, c, g, or t
  misc_feature (375)..(375): n is a, c, g, or t
gttcgagaccatcctgaccaacatggtgaaacccgtctctactaaaaatacaaaaattagctgggtgtggtggcacgtgcctataatcccagctactcaggaggctgaggcagcagaattgcttgaacctggcagacggaggttgcagcgagctgagattgtgccattgcactccagcctgggcgacagagcgagactctgtctcagaaanaanaagaaaaaaaagagagtaaacatgaagtgcttcgaatacacagcctggcacgatcacagcgaagtgaaggtcagcagttgtactgtgctttatacaggtgcaggtgatggtcctaccagtgtgtctgttnaggtcacccngtcctaaaagtgacctccctngaaagcc

SEQ ID NO: 8713 - DNA, 399 bp, Homo sapiens
  III.2341 (AA045735)
  misc_feature (365)..(365): n is a, c, g, or t
  misc_feature (394)..(394): n is a, c, g, or t
gctattttaggtgaagttttagggtgacctgttacacatcaatgggtaatacagggagtacaaggaagacatggacagggaaggtggggtatccgctgggcctgaagaggaggatttccagaggctgcccaagagtccaaggccaggcctcaagaagtggagtctggatttcaactcaggctttcagggaggtcactttaggacgggtgacctcaacagacacactggtaggaccatcacctgcacctgtataaagcacagtacaactgctgaccttcacttcgctgtgatcgtgccaggctgtgtattcgaagcacttcatgtttactctcttttttttctttttttttctgagacagagctcngctctgtcgcccaggctggagttgcaatngcaca

SEQ ID NO: 8714 - DNA, 468 bp, Homo sapiens
  III.2342 (AA464046)
cttccaggccacagtaggctgaagcagcaccaggatcctggcctggcctggcctgtaggtgtcccctggtggttataattctgtaactctccgggagaaggggaatagcactagcattggatgtcgccaaggcccacattttcctgagagaagccacaaaagatgtgcaaatgcccttcagcacaggacctggtgacatgacataaactccaagacagaacctcagtttacagcacacgaaaaaaatatcttgccaacattgtaatgacaaaataaattcccgtgaagttccacaaccaggccgggcatggtggctcatgcctgtaatcccagcactttgggaggtgaggtgggtggatcatctgaggtcaggagttcaagaccagcctggccaacatggagaaactccgtctctactagatatacaagaatgaaccaggcttggtggtgtatgcctgtaatcccagc

SEQ ID NO: 8715 - DNA, 343 bp, Homo sapiens
  III.2343 (AA464753)
taggtagatagcttatttttactgcttgccaacaaaattgatcctgaagcccaacggccttatgccaaatggttccctccccactgctgtccatcctgggctgccactcccaaaactgccagtaccaggtgtcactgattgactagtcaaattcctggacaaaggggctacacactccaggctggttgtggaacttttgttttgagatggagttttgctcgtcacccaggctggagtgcagttgtgcgttctcagctcactgccacctctgccttcctgggatcaagcgattctcctgcctcagcctcccaagtagctgggattacaggcatacaccaccaag

SEQ ID NO: 8716 - DNA, 398 bp, Homo sapiens
  III.2344 (AA483467)
gctcgacgaaaggttggggttaatataaatgtaattttaaatagaaaatctgacaacactgtcgagtttgtcttcctgtcaaagcttattaaaagtgtctttgcggatgaatggtactttccacaagtgcatttgagtagaagcataacctattctcagttatatttatgtttaaaacatgtactggtttgtatattttgtactgaaaaagaaaacactttatagtcaagatacatctcattcaatacaagtctaaactctttcaaatacaaattcgcatattcacagaaaaagttacaaatcagttttactattgtaaagtaatgaaatggttatacatttcttaattgttcaataaaacactcaatgattaaaaaaaaaaaaaaaaaaagtcgacg

SEQ ID NO: 8717 - DNA, 371 bp, Homo sapiens
  III.2345 (AA609194)
tttttacactttaagttctggaggggtacatttgcagaacgtgcaggtttgttacataggtatacgtgtgccatggtggtttgctgaacctctggttacatctttacagctgattccttttacaaaaaatatagtggaagaactggttaaaagacacctctaggaagcaaaagacaactccgaaatgctgtacattcttttaagagcaattgactccaacaattcaattgcaaggataaaaaaggaggtgagaggaagaggagactgctctagattagacacttgagagagacaacaaattaactttcaaaagatatttttgagacaagtgggatcatactatatggactgggtatcaaggaatcattgtt

SEQ ID NO: 8718 - DNA, 426 bp, Homo sapiens
  III.2346 (AA906420)
agatgtggatatgtttattatttttatggtgatgatggtatcatgggtatatacatatgtcaaaacttatcaaattgtacacttcaaatatttgcagtttatatgtccattatacttcaagaaagctattaaaaataaagttgaaaaattaggttgttccttttttacgtttaaaacctgttgagagcttcccttttcaatcagaatgaaagtcaaagtctcagagtggtgtgcaagggcctgcatagtctcttcagatacaccaggatatccttccactgtgtccccaacttgaaatgcttaggtatccaaaatggctccctccttctttcaggtctttactcatgaggctgctgtaatcactctagatgaataacaactcacccaccctttcacttccttgctcttttttttctgggtagcact

SEQ ID NO: 8719 - DNA, 529 bp, Homo sapiens
  III.2347 (AA418074)
tttttttttttggccacatgtttatttttataaaatatctagaacaggcaaatcatagagacagaaaatggattattgtttctagaggctgggggaagaggaggattagagtggcagctcactggtatggagtttctaggtagatggaaatgttctggaattagatagtggtgatgattgcacaactctgtaaatatactaaaatccactgcatcatttactttaaaggggcaaattttatggcttgtgaattacatttcaataaaaagaagatgaggaaacctaggatatgtcacaatcccatgccacaaactacttacacttccaatataaaaactatatcaacaatagtttacatcacgttcattgcttgctaaagtaaggtcatgaatgtatcaaaatattttataaaagttaaaatttaggagatccatcatttctcttttcaatccatcactgattcattcaatatatatttatgtgtatgccaggctcttcatcaggtaaagtgtttaggagagatataaag

SEQ ID NO: 8720 - DNA, 488 bp, Homo sapiens
  III.2348 (AA418211)
ctcctgaacagtactatttcgtgtgaatctcctccaagccttcttttcattttatatctcatgctgtaattcttggaaagtatgctgtagctcaagtgcagaattctcatcagttttatctttatatctctcctaaacactttacctgatgaagagcctggcatacacataaatatatattgaatgaatcagtgatggattgaaaagagaaatgatggatctcctaaattttaacttttataaaatattttgatacattcatgaccttactttagcaagcaatgaacgtgatgtaaactattgttgatatagtttttatattggaagtgtaagtagtttgtggcatgggattgtgacatatcctaggtttcctcatcttctttttattgaaatgtaattcacaagccataaaatttgcccctttaaagtaaatgatgcagtggattttagtatatttacagagttgtgcaatcatcaccactatctaa

SEQ ID NO: 8721 - DNA, 362 bp, Homo sapiens
  III.2349 (AI280386)
tttttgacgattattatatatttattatatcttacataattatatattatataataacaattattattgcaagaggtgtcaggaaatttttacatggtagcaagaagcttaacacaacattcggtgctgtcaaactgtggaaattagggaatcaaggacagggccagaaccaagaattcttgaaacacaaaagcagaggccagggtccctggccagggaggctaaaggatggttgagcttcttacagcaaagaccttaagattgtgtgtgctgagtagtcagatgtcttcacgagaacacttctaaaattagtaactcactctgacccacacaaaagtcaagatgaggacagaactgtatct

SEQ ID NO: 8722 - DNA, 461 bp, Homo sapiens
  III.2350 (AA293029)
tgaagtggggcgttttggtgaatgatggcaacacattcacggtgagcctggccttatgtgaataggtggagcaaagtggttggtgatgacacattggtagcggccctcgtgcccgaaagtgacctgacggaggtgcaggatggtggtgtactccatcacttccccgtcctgcgcgtggacgtggacaaagttctccatgtctgcattggtcaggacttcattgtctttcttccaggcaaaggtcatgggggagctgctgctgctggctgctgagcatgtaaaccggatgtccttgcccaccatagccatggtggtttctggctgggtgatgatctgtggcttcaggaagtcatcgcacacgaaactctctggtggcacagagaaaatgctctgacccttcagtgattctgggtgggcacaggtggctgtcacaaaggcctgcagcatcctgccaattagcc

SEQ ID NO: 8723 - DNA, 437 bp, Homo sapiens
  III.2351 (AA293422)
gcgaccgcctgcacttgcgctggggactcgctggactgcggtgggcgcgggctggctgcgttgcccggggacctgccctcctggacgcggagctaaacctgagttacaacaaactcgctgagattgaccctgctggttttgaggacttgccgaacctacaggaagtgtacctcaatcataatgagttgacagcggtagcatcactgggcgctggttcatcacaagtagtcgctctctttctgcagcagcaccagaatcggagcctcgacgggaagcagctgcaggcctacctttccctagaagtgttagatctgaatctgaacaacatcacggaagtgcggaacacctactttccacacggaccgcctataaaggagctcaacctggcaggcaatcggattggcgacctggagttgggagcatttgatggtctgtca

SEQ ID NO: 8724 - DNA, 251 bp, Homo sapiens
  III.2352 (AA889729)
tttcctagatgctcatttttattagcatgtggttccagcgtctttaacacagccttcgaggtttccctgtcctcagcagctgacggagttaagaaagagaaacctctactcacataccattggccagaactagtcacatggctccacctggctacaagaggcctgggaaatgcagtttacttgtgggcccaggaagaagaaatgggtctgatgtacatccagccatcctctgccaacgactccaccacaga

SEQ ID NO: 8725 - DNA, 482 bp, Homo sapiens
  III.2353 (AA912664)
tttctgggggtagatttattgagcaagtgctttctttaagatgggagaagaaagatttgggtactcagggaaagaggggcacagaaaggtgggaggggtagacaccacaaaagggaaggaagggctagggagaaaacagcagatgaggtctgggcaccaagtttatttgctctaagacagaggctggtcgagtccataaaacaggcactgctagagcccatgttctttggaatgcactctctctctctctctgcgcttccatccctgacagagcactgaactgaactaaacttccccgcatatagggatcggagggttgtacagattgtcacacatgaatagcttgtgtgagtctagagaaggaacactgattagcttccaatctgcaggtcttgtgttcagcaagcctctttctttcagaaggaacaaaagcatggtgctagatgagaaggttatagaatggaagaaagtttcccagtcac

SEQ ID NO: 8726 - DNA, 721 bp, Homo sapiens
  III.2354 (AI031557)
  misc_feature (441)..(441): n is a, c, g, or t
  misc_feature (445)..(445): n is a, c, g, or t
ggtgtgcgcgctgcgcccgcgagctcccgggctcggcaaccgtggcatgcttaggattggccatatttaaaagttctgaagtagaacctgcgcctcctctctgcttctccctcctcctcagtaatttatttcgagcttccaggcaagggccacggaagaagggaaagcaagaaactagatgcctgtgtggtaactcctcgcggagctaaggtggactctcttgcagccaacttcccatcagatcaccttgctggacttgcagaccggaatggggctcgcctaaggagccgagcgctgcggaggctgctgcgtgttggatgggagtgggagggggctggagcgagatttccagggcgcagtcctccggggcgttacgccgggcataatggaattgcagaggacgtctagtatctccgggccgctgtcgccggcgtacacggngcangtgccttacaactacaaccagctggaaggcagattcaagcagctgcaagatgagcgtgaagccgtgcagaagaagaccttcaccaagtgggtcaattcccaccttgcccgtgtgtcctgccggatcacagacctgtacactgaccttcgagatggacggatgctcatcaagctgctggaggtcctctctggagagaggctggctaaacccaccaagggacgaatgcgcatccactgcttaaagaatgttgacaaggcccttcagttcctgaaagga

SEQ ID NO: 8727 - DNA, 235 bp, Homo sapiens
  III.2355 (AI218608)
gaggaacccgacggcggtggcggtccggacgacttgctgccgctcccgctgtggctggtggccgagggcatcgtgcgcgcgcggaggccgctggaaatcacgagtgggcagctgagggggcaagggtggcggtcccttccgggcagtgtcgcgcgctccgtgggcgcaggccgcttcgccctgtcccgctgcaccgagagccgctcctagtgaggcgagagccgggagcgggagg

SEQ ID NO: 8728 - DNA, 421 bp, Homo sapiens
  III.2356 (AI248120)
ttttaaaaatgtttcttgttttatttaaaaatagcagtagtaaaccaagtacacattaacataaatacttttaaaaaacatatttttaaaaactgagaacagcagcattgtttacattttgcaaatctcattgtctggcttaacaaaagtggctgtattctcagatctacttctgcattcaatccattttgatatgctgttttggctgaagtatatgaaaaaaatctgactttgcacaggcacgtagttggaaaagagaagagtattttaatagcctgttcagataatggtggacattgttctctgaaattttaccaaaaagtggacaagtaatagtttcttaaagattagttgcagtgtgtaatctgaaactatatcaataaactttttcatactctgttatattcaaatatatcaaatc

SEQ ID NO: 8729 - DNA, 338 bp, Homo sapiens
  III.2357 (AI017796)
tttgggttgagatgctgtttatttatcaaggtttacatgtacaaaattataataaatcatagtaatgaatattgcatcttttagtaataaacttgtttataacagtagttttctctcttttcagaatttaggacctttagaaaagttactctctggaaaataatattttatttaaactctggcattaaaaaaactactctttggaaatttaggcatgacttttaatgtatacattctggttttcttattatttctaattttcaaaatagtaacatatattctgatcccacattttaaaaatcctgaagagaaataatgaaaccatttaagttaacatg

SEQ ID NO: 8730 - DNA, 571 bp, Homo sapiens
  III.2358 (AI733515)
  misc_feature (504)..(504): n is a, c, g, or t
tttggtgttgagatgctgtttatttatcaaggtttacatgtacaaaattataataaatcatagtaatgaatattgcatcttttagtaataaacttgtttataacagtagttttctctcttttcagaatttaggacctttagaaaagttactctctggaaaataatattttatttaaactctggcattaaaaaaactactctttggaaatttaggcatgacttttaatgtatacattctgtttttcttattatttctaattttcaaaatagtaacatatattctgatcccacatcttaaaaatcctgaagagaaataatgaaaccatttaagttaacatgtacaccattttcttcatatactgcagaccaagtattaaatgttccatgtgggccagtcacactgtgctaagcactttatatgatttacttatataaatcttcataataattctattaagtaggggtaatttttactcctattaattggtgaataaactaagattntaaaatattgcccaaaattacctagatttgtgtcagaactcgtgtttgaacctaagccatttgactg

SEQ ID NO: 8731 - DNA, 543 bp, Homo sapiens
  III.2359 (AI792225)
  misc_feature (529)..(529): n is a, c, g, or t
ggagatgacattttatgagattttagaggtcaatgtagagactccccccattcttcttaattgaacaaacatgcataaatctagggtttcaggtagagagcagatgggaatctacaggaaactgtcttccatagtgtatgaaaaccgtgtttgttgtgtggtgaagcaaaaggaaactatgaagcgcacagtcaatagattcagctagtgagtcccagcactcctttcaggccctcactaggattagcagcccagagtcatgccaaggccactggtgcagtacaaagacagttcagtgacaagttccatccataccatggaagagggttaaacttgtggctgtttttgccacagcatgaccagagacattctcaataaatggcactaggaatgatgagttttagaggggcctaaaatgttccaaacttgatactcaccactgtacctttaaagcacaaccacagatattggtaaaaatggaacagaattacctcaatacctctttaactcattctgaatgaattcattntgatgacagacatt

SEQ ID NO: 8732 - DNA, 386 bp, Homo sapiens
  III.2360 (AA464596)
taaaatatttcactttctttttttcttaaaattactggcattgactttggtatagaaaatttaagatctcaaaatgcacttaaaaattgcctagaaacaaaattatgaaaatgtgccaacaggacaaagtgaagaacgcagaatcaaatgctcatcaaattacatttgtaattatgttctatgatttctgcttaaacacaagctaagtagaaagggcaatggtattagtttaataggttttgcacaaagagcacataggcatttgttggcatgctcaaagtacgttagtaaagaaaaagaaacatttcagtaggaaggagagttgcatgtcacatttttagagttcaagacaatgtagaccattaaattattataatcacgtagct

SEQ ID NO: 8733 - DNA, 469 bp, Homo sapiens
  III.2361 (W90170)
  misc_feature (29)..(29): n is a, c, g, or t
  misc_feature (30)..(30): n is a, c, g, or t
  misc_feature (33)..(33): n is a, c, g, or t
  misc_feature (36)..(36): n is a, c, g, or t
  misc_feature (48)..(48): n is a, c, g, or t
  misc_feature (109)..(109): n is a, c, g, or t
  misc_feature (122)..(122): n is a, c, g, or t
  misc_feature (181)..(181): n is a, c, g, or t
  misc_feature (189)..(189): n is a, c, g, or t
  misc_feature (196)..(196): n is a, c, g, or t
  misc_feature (260)..(260): n is a, c, g, or t
  misc_feature (325)..(325): n is a, c, g, or t
  misc_feature (330)..(330): n is a, c, g, or t
  misc_feature (340)..(340): n is a, c, g, or t
  misc_feature (344)..(344): n is a, c, g, or t
  misc_feature (460)..(460): n is a, c, g, or t
aggttctcggaccccagcctgctgccctnnggngcngggggtcagtgngagtcgttgtcgttgagggtcgttgccgtgtgtggcgtcttagctggcccctgggttgtgncagagcgacgcancgacacctctgagcgcctcgggagccccgaatagcagctgggagaaggggcgaggactngagcctcnctgcccnctgccggccgggctagagatacgggcgtgcccccattgtgcgcctcccgccccccggtcccctnaccctgcggccacctggggcgtggggcggtgctcctgcccgtgcacgtagccgctgctagcgganggccntgctcacctnggtngccttgctactcactccccccgggcccggtgggcgaaaggacacccgcaagaactccggcagaggaagaaattcagacggctcccgagggtaaggaaaagaccccggcccaccgtngaatctgaa

SEQ ID NO: 8734 - DNA, 405 bp, Homo sapiens
  III.2362 (W90582)
  misc_feature (353)..(353): n is a, c, g, or t
  misc_feature (358)..(358): n is a, c, g, or t
  misc_feature (371)..(371): n is a, c, g, or t
  misc_feature (400)..(400): n is a, c, g, or t
ttccatctttgtaacatctttacttccttggagcaaattcccaggaatgggttttcggggtccaagggtatgcacctctagcactacgacaaacgcggccaacacgcttcagggaaacggtgccccagtttgcattctgcttcccctcgccctgccctgggggtctgacttgaaacatgggatggcagagtggtcgggtgtttcagattccacggtgggccggggtcttttcctaccctcgggagccgtctgaatttctcctctgccgagttcctgcgggtgtccttcgcccaccggcccgggggaagtgattagcaggcaccaggtgaagcaggcctccgctcgcagcgctnacgtncacggggcatgangcaccgccccaacggccccaggttggccngcagg

SEQ ID NO: 8735 - DNA, 280 bp, Homo sapiens
  III.2363 (AA897270)
tttgaacaacaaaacttcagttttatttacataaaaggcaaccttctaaaaaagcatccctaatctctcaaagacaatgataaggcaatctggcagcttgaaaagtcaaagtgactttcaagcattgttgtttaaactgacaaaaatttctacagatgccaatgcaaaattaaaaaaaagaagtaacacgtttaaaatatatacactttagagtttatatagaataaaagctttttttgaacttttctaggattgaaaacaaaagcaaacattgctcttc

SEQ ID NO: 8736 - DNA, 442 bp, Homo sapiens
  III.2364 (AI139571)
tacgccacgtatccagagactgaatgaattggaggcccaaactcgtgtaaaattgaatttcttggaccagattgcaaagtactgggagttacagggaagtactctgaaaattccacatgtggagaggaagatcttggacttatttcagcttaataagttagttgcagaagaaggtggatttgcagttgtttgcaaggatagaaaatggaccaaaattgctaccaagatggggtttgctcctggcaaagcagtgggctcacatatcagagggcattatgaacgaattctcaacccctacaacttattcctgtccggagacagcctaaggtgtttgcagaagccaaacctgaccacagacactaaggacaaggagtacaaaccccatgatattccccagaggcagtctgtgcagccttcggaaacgtgccccccagcccgacga

SEQ ID NO: 8737 - DNA, 312 bp, Homo sapiens
  III.2365 (AI242845)
ttttccttaaacaacttttatatgaagttgaagttgaaatatattctattatgttatatttatcaaataaagtttgatggcttatcttctgattcaatattttcccttaggatcagctgtctacattttaaaatacataaattaacaattctccaaagctgtcaaatcagataaaaacgtcttctctttcctttgaaatttcccaaaagatccagtaacagtaatagctgcatggtatgggtgttgacaaattttattattatgcaataaaatcatagataaaaatcaagctctcacaagataatcccacta

SEQ ID NO: 8738 - DNA, 439 bp, Homo sapiens
  III.2366 (AA969874)
ttttttttttttcactctgagattgttttattctaatttgtcctaaggacctgcctgtacttagagcctgatagaaagcccaagttgatctactgggcagctctctgggcctggaaggaagagcacacaacaagacttcaacagtgagcctggctaggtccaggcagaccatgatttctgaaagcaacagtatagtccacatggaatcaggctgctgatgaacagcagcgagaggctgcctctgaatcatatctgcagggtcacctgcgcctggtggaggcccacagtcatccattaggccccagtatcctatgtgggagtatccacgtctagtctctacttctcactgcaggagaggtggcagatgaggaggtttcctactttaaagaaagtagaagttgtttcctttcttccctcctcacagccttgagggggaggt

SEQ ID NO: 8739 - DNA, 125 bp, Homo sapiens
  III.2367 (AI004479)
tttttaacttataatttgttagattgtaagttataagatttactttattatttttattagagacatttataatttacagacatttaattagagatatcatagtttattagtgacacttccgaaag

SEQ ID NO: 8740 - DNA, 374 bp, Homo sapiens
  III.2368 (AI240032)
tttctcctgcagctcacatttttatttatcaagcgtttttgtttattagctccagccttcaaaacctctcatgtaaaagcattattatccgcccaacaagcaaatccaatggggaagaagcgtgccaactgaccttgagagtccagtttatgaaagaacttgagacaaaacgctgaagacagcagtttgtattggccatggtaatgtctttcttacttcagcctttgtttcgttttcaggaaatcagaaatagagatatctgagtttagactttgttgcagagtagattgtcttatctcccctctggatgttcaaaataaaattcccccaaatattgggaccaaagctatcacaaaaacaaaacaaacaaacaa

SEQ ID NO: 8741 - DNA, 434 bp, Homo sapiens
  III.2369 (AI299780)
atgtagtaactattgcattggaggcaatactgtgattttctttcagtgtgtgtcttattgagccagacattgactcattatgagttgagactttaggctaccagatccaaaacgcaataacattggtattattaagcacttgaggctgtcttttgttaatccagaatgtgcttatttagtcagtgagtttttcctttcttcctagacctatatcttgctcctagagttggttagggttacatcatcactgtcagcagtcctcattttatggttatttaggtgccacatctctcaattaccaaagagatcagtacaatgtgaggcaaagtaccttttttttttaaaagctataagatatcagatttctttcatttagccaatattttggttttagagggaggtttttaaaaagtcaccgagaactgaggatcatg

SEQ ID NO: 8742 - DNA, 457 bp, Homo sapiens
  III.2370 (AA707389)
caaggcaaacaactgacagcgtttattgtcaacaacaatatctaagatttcaagtgaaaattagaattttgggaagcttgtacttgactgagagcactccaagacttttccacagagattgatgctgatattaattatggcggcttctggatattgaacaatgaaatgtgtcaacatttggaagatcttcataactcagtaaaccggtagttaacatgacaatgtaaaatcatgcatggacaaaagatctattcaaagaacagataaaccaacagacattaagagtacttagtcctgaggactggatgcttctctggaaatgagaataataacctcccttgtaagaacatgctagcagtgtctgacatgtcatagacatgtgtatagcttctgttcttagattacagaggtggtaaatgaagtatcaccatggctctacccatctaactttagtagg

SEQ ID NO: 8743 - DNA, 378 bp, Homo sapiens
  III.2371 (AA867983)
ttttttttttagttttttctaatagacaaaattgtcaacaatttattataaaaaacctatacaattaataaatacttgatcaaaagtctttaaaaatatattcataatgaaatgtatagaaagagacatttcaaagtcatagcagttactactattacaatatttaatcatttttacaataggtctgctggtctatttcaattaaattcattctcagaaccatcacatatcttgctgaatttcatttaaagcaaaagcaagttgcttaatttttgcttccattgtttttatgttcttgcatgtttcttccaaaagttcacgcatttctttttcaatttgatggacctttaaatttgcagaatcaatacacttctgctt

SEQ ID NO: 8744 - DNA, 419 bp, Homo sapiens
  III.2372 (AA460234)
ttttcttttccattggtttatttgtatattggtccacaacacattgaagcctcacagttccaagaatttttttttttcatatttgtggcaaactgaggtagagacaatgcttggcacagaataggtactagataaatattagtggaatgaacagccgaagcgactgacttctaaatggagcagattgctcatttcacttctgttcctccacctcaacaaacctttacatcctcactggtttgtgaggccagagaacaggtgtggccttggtgtgataagaaatgctaattttatacaaactgaagcaatctggtctcaactttgacccccaaatgccctcaaaatggatcaatgagccagggaggcttgaggaaggagggagcatctgcccttccccctggccagaagagaatttgaat

SEQ ID NO: 8745 - DNA, 470 bp, Homo sapiens
  III.2373 (AA463797)
  misc_feature (203)..(203): n is a, c, g, or t
caaacttttggcaggatggaaatctagatgagcctgtccggagcagaacacccctgattagccaggcccaccggcatccacatccgctcggcaaagaaggaaggcagcttgttccagaccttggtgagcagctgcagactgcctgcctagaacagcctccttactccagcctggcagggaaggaaggaacctgacttgcttcncaggatctggaagctcagccggcagactgagagccgcagttgcatcctggagcctgatgctagaagcagcttccgtctttgggttcttgctgcctcggcctctgctctgttcagtttgctgttgtgtttttctcccccatgttggggtggtggggtacagggaaataaaatgctttctcccaggcccctaatccttccccatgcctccatcagcctcaaagctgctgacagtcatgaactgcaccttccagccctgcccataagcta

SEQ ID NO: 8746 - DNA, 314 bp, Homo sapiens
  III.2374 (AI149520)
ttttttttttttttatgtgaatattcatattaactttatttgtagtagctccaaattggaaacaacacaagtccatcaacaagtgaatggacagtgtcagatccatacaaaatactactactaagcaatttacaggaatgtactgatatctgcaataacatagatacatctccaaataattatgctgagtagaagtaaaatgaaaagtacatattatatgattccatttatataaaatcattaaaaaactataaactaatctatggtgaccagtgcttgtctggagttggtgggtggttggtgtttggggagga

SEQ ID NO: 8747 - DNA, 420 bp, Homo sapiens
  III.2375 (AI138953)
tttactatgcttaacgtttatttctgtgtctttggttttaagagtaaattctagttaacatgaccttcagaaactcctggaaacatctgaggcgcagtggggtggaacaaggaaaaaggtccttagacttcagcgtcagtttgtggaggtctcagtcctgttggccttgacagacttggtgactcaggaccacgctgactagggctccttcaaggccctgagctgatgtcctgtgtcctgggtaagggcagcatcttctgtcttgtggtgaggcttctaacacagaagtcattctcgagttccttcagtgtccccatcctgacattctgttcattatcaggtcctgtccatccttggaggctgagaagggctggtgggctctgaaagcacaggaaaggggcaatccggggtggcgtcatg

SEQ ID NO: 8748 - DNA, 924 bp, Homo sapiens
  III.2376 (AA455540)
  misc_feature (101)..(101): n is a, c, g, or t
  misc_feature (234)..(234): n is a, c, g, or t
  misc_feature (272)..(272): n is a, c, g, or t
  misc_feature (315)..(315): n is a, c, g, or t
  misc_feature (324)..(324): n is a, c, g, or t
  misc_feature (337)..(337): n is a, c, g, or t
  misc_feature (358)..(358): n is a, c, g, or t
  misc_feature (393)..(393): n is a, c, g, or t
  misc_feature (413)..(413): n is a, c, g, or t
  misc_feature (421)..(421): n is a, c, g, or t
  misc_feature (422)..(422): n is a, c, g, or t
  misc_feature (458)..(458): n is a, c, g, or t
  misc_feature (468)..(468): n is a, c, g, or t
  misc_feature (526)..(526): n is a, c, g, or t
  misc_feature (583)..(583): n is a, c, g, or t
  misc_feature (592)..(592): n is a, c, g, or t
  misc_feature (633)..(633): n is a, c, g, or t
  misc_feature (637)..(637): n is a, c, g, or t
  misc_feature (639)..(639): n is a, c, g, or t
  misc_feature (680)..(680): n is a, c, g, or t
  misc_feature (688)..(688): n is a, c, g, or t
  misc_feature (691)..(691): n is a, c, g, or t
  misc_feature (779)..(779): n is a, c, g, or t
  misc_feature (791)..(791): n is a, c, g, or t
  misc_feature (794)..(794): n is a, c, g, or t
  misc_feature (796)..(796): n is a, c, g, or t
  misc_feature (821)..(821): n is a, c, g, or t
  misc_feature (832)..(832): n is a, c, g, or t
  misc_feature (867)..(867): n is a, c, g, or t
  misc_feature (876)..(876): n is a, c, g, or t
  misc_feature (884)..(884): n is a, c, g, or t
  misc_feature (901)..(901): n is a, c, g, or t
  misc_feature (908)..(908): n is a, c, g, or t
  misc_feature (912)..(912): n is a, c, g, or t
cagggtagctctgctctgttcctggaatataaggcttttattcaggagcaaatcattgatagtaactttgctttatctagccattgacttcagcaggctanaactacattgtgtactgactgttcaaagaataagtaattttttttatctaattcacttatggacagcaccttgctctatggcactttccagatcttttgggattatgtgcttaattatacatacatacaccanaatcacaatagtaagatatgaagcatttaatttagacntctgaagataactgggtgatcatctgtgctaaaattgtgatcnaactacgantgtataataccantatgaatcgaactgtagagcnttgacagctatgattactgcaggtagaggacgatncattcgttagcatatagccntaagtgannattggatgataatgcatgagctcatatgcattcganctacacagcntgcaatcagagtggcatatagtatatatacagtatttagataccttctatgatagacncaaatccgatgtatcagtgcattggtatcagcagtacatgctgacatgctgagccangagcatagntatatataaggtagtgtgagatctatacacttagctgtgangcancnatgatgcatgcatgcatatgctgcatgcatccagatgtacntacatatnacnatgctgatgctagtctatgctcatcccaatcaatgatgcattgtactagatgcatgctacgggacatgagcatgtgaaaacgtgatantagtctggtacntcnanactaaaatatactggcgagtccccntgtggtaatcntgcagcgcgttacgtgtctgaccgtgtcacatacntggatcatncgcctgancgatgctcctcgctcangtgcggncgangtgcgttggtgt

SEQ ID NO: 8749 - DNA, 387 bp, Homo sapiens
  III.2377 (AA458637)
ttttatgatagtttaaatctgcaacataaatttaattcagcttttttttctcaacagttctgcctagtatccctgtttaggcacaggcaaaatctttatttttacaaggactaaatcattatgaatttgagagaagtaagtcatcaggaactagtacatacagtcatatgttacttaatgataagtatacattctgagaaatgcattgtcaggcaatattgtccttgtctgaacatcatagagtgtacttacacaaacctagatggtataggctcctacacacctaggctatataatataaactattgctcctaggctacaaacctgtacagcatgttactgtactgaataccaaaggcaactgtaatacaatggtatttgtgtatc

SEQ ID NO: 8750 - DNA, 388 bp, Homo sapiens
  III.2378 (AA894774)
ttataaagaaaagaaatttatttctcacagttctgcaggctgggaagccacaggtcgaggggctgcctttggtgacttatggtgaggacctcgtgctgttcccgaacacagccaggaaccacgccaagaggaagatgctccagctcagccttgctgtggaccaggccgcccacagggagcaggtccattcctgggggctgactccgcctttcagagaggcgtggctccatcttcacagcctcgtagcctcttaaaggcccagcctcaaaacctcattggggccccagcccggtaaataaattgcattcagaccatagtgccagccttttgaagccaatacttttttggtcgttcgtgcatcttttgaattggttttatttcgattttg

SEQ ID NO: 8751 - DNA, 328 bp, Homo sapiens
  III.2379 (AA993115)
tttctttgtaatagaatggtttatattcctttgggtgtatacacagtaatgggatttctggatcaaatgatatttctgcttctaggtctttgaggaatcactacaccatcttccacaatggttgaattaatttacattccaagttttcaatgcattggcagatgaagcatggtaacctgggccaccttctctgatattccgatttaggaggtctgacatggaggccaccataatctcccaactgatgctgatgctgctagcacatatggcaaatactgattagcaagttatccatgcatttcatagctttcctcattgggcagtaatc

SEQ ID NO: 8752 - DNA, 297 bp, Homo sapiens
  III.2380 (AA497052)
agattcacactttcttattttttattttattttttttacaaatagaaatacatcccttttcaatttttattttttatttcatgtcactgttttgtctttttttttttaaactacacgagcagaacatgcagctatgtgtgtgcgctgatattgtttaaaggtaatacttattctcggaaggcaaggcacatcttgtggtagaaaatttcgtgcaaattaggaaacatggaatttttttaaaggtttttcttgtatctttttttttttttttttttttttaaagaggaagtggggggt

SEQ ID NO: 8753 - DNA, 491 bp, Homo sapiens
  III.2381 (AA497129)
  misc_feature (334)..(334): n is a, c, g, or t
ccagggagaggtgctggtgtacgtgtagggggcctcccatctgctaagcgttttaccgttgagccgctccaaaaacactaagctggggacgccaggtgttcccccaccccggctccctggccctatccacacctcctcccccaccccaggatcgccatctttagtcgtcggacacggttggagcgtatacgtgttttagaaccaccgagatcaaacacaaggtcccctccccggcccacccagcccagccccaactgacctccatgcctagggaaaaattttccccaccacttttccctcccccgacccaggccaaagcaggtgcaggtgccgngacatgcctgctcctagcctcatccccctgcccccgaaaaccagactctcctcccaaactagcctcaggagcttggcatacccgctcgctcctaaagagaaagacccaggaccctcccccatcacccccaagagaggttcgccatcctctggcctcg

SEQ ID NO: 8754 - DNA, 453 bp, Homo sapiens
  III.2382 (AI123648)
tttttttttttgagtccaaggtttttcttagagttttctttataaaaaaattttgtattttttgtggggacatagcagatacatatatatttatgaggtacatgagatattttgatacagtcatgcaatgcataataactacatcatataaaattgagcatccatatacttaatcatttaacctttctgttacaaacaataatccaattatattctttactttgaaatatacaattaaattattagtgaatatagtcacccttttgtgctatcaaatagtaaattcattatttctactttttattgtacctattaaacatccctatttccccccccccaactacactttccaacctctggtagccatgcttctactctctatcttcttcagttcaattgttttgatttttagatctcacaaataagtgataacataatgctgtttgcttttct

SEQ ID NO: 8755 - DNA, 332 bp, Homo sapiens
  III.2383 (AI214398)
tttactttctatagtagtttattcttcataaataaatcactattataactgactacttactgagaaatgaaaatattttaacttaaaaaaatacagagcccttgttgattaacagaatttgtcttaaataggattttatctatagtatcatatatataaaatccttatacaagtaaccattgaaacaagtcagtaacaaaatattcacataactgtatcacagatcttaggaaacagacattcagaaaagatttaaggccactaagtaacagcctctcataaaacccaacaaatcttaaaattgcaattagacttaaaagggacctaaatac

SEQ ID NO: 8756 - DNA, 417 bp, Homo sapiens
  III.2384 (AA283824)
ttttttttttttttttcatgttctgtagctctttactgaaggcctcatgtcaaaggcggggaaggaaagcaattctgtggctctgcacttctacccaagtctgaagagaagtgagccaagttaaatgaaggtcaaggatgctcctcctggtcctctcaggggctggtaaagtcttatatgacgttttctggggagtcattactctgtccaaagtcgaggtagctcagaggccttcagcgcgtgagtacttccagaaggccacctccccatcatcactgcaggaggccagtagccctggctccttggggttccaggccacacagttgacatcctgggaatgggcctgatgcaagtgggctgtcagggagaaggtgggctgctgtggatccgagttgggatcctcctgaaacacgcgga

SEQ ID NO: 8757 - DNA, 283 bp, Homo sapiens
  III.2385 (AA284225)
acgcgcgcggtgagacccgctgtctgctcagcggactctgcgcgcccccacctccccctgcgtcgggccgacatgaaggactcgctggtgctgctgggccgtgtcccggcgcacccggactcccgctgctggttcctggcctggaaccccgcggggaccctgctggcctcgtgcggcggcgaccggagaatccgcatctggggcacggagggtgacagctggatctgcgagtctgtcctttctgaaggccaccagcgcaccgtgcggaaggtagcctggtccc

SEQ ID NO: 8758 - DNA, 473 bp, Homo sapiens
  III.2386 (AI142266)
ctgtcttcaagcccacaagaagcatagagcagaagaagacagaggagggcccatctggcccactacctgttcttgtaaataaagctttattgaagccaggtgctcaccttctagcacattcttcaagagttactctgaggcaagccagccgccatgtcatgaggacactcaagcagcaccatggagaggtccgatggcgaggaacagaggatccccctgccgacagccaatgaggaacaggcctcctgccaacagccgtgacaaaccggagaaagccaaatatgctcccctaaccaattacttaggatgcccctcttctaatgagcccaactgtagctttcctgcaccaccaacaggacgtacctgaagccttctcctttttccgctataaagccttcccctcggcctgcctttgagtctccatgaaaagcaagtgacagtggctgcctcccttactgtaacaagctctgaat

SEQ ID NO: 8759 - DNA, 225 bp, Homo sapiens
  III.2387 (AI147978)
tttgagagcaagcaaaggctgtttattcagagcttgttacagtaagggaggcagccactgtcacttgcttttcatggagactcaaaggcaggccgaggggaaggctttatagcggaaaaaggagaaggcttcaggtacgtcctgttggtggtgcaggaaagctacagttgggctcattagaagaggggcatcctaagtaattggttaggggagcatatttggctt

SEQ ID NO: 8760 - DNA, 399 bp, Homo sapiens
  III.2388 (AA284322)
aatgcaagtagtttatttgggaggtgaaggaaacaggaaaagggaagtagaaaaaacagacagggaggtaatttaaccaaaacatggagcattatcaagcaggctaccatgaccatggtgaatacctggaccttaatgccaaagggaactctggaagccaatggagagcatgtgctcagcattacggccctgacgggtgagggagctggggtatttatgcaccaactcacatcatcatccagtgaaagagagggtttttaattctcaggcacttcctacccacccatgcttagacagagtggattctgcccaccagagaagaccctcaggtagagaggtgccagggttggtgacaaagagcatgaaggccagcggtgagatagaagggatatgtgcagg

SEQ ID NO: 8761 - DNA, 402 bp, Homo sapiens
  III.2389 (AA287211)
gtgatggcctcccaggtgctctatctgaccccaggtgtgctgggggagcctgcacatatcccttctatctcaccgctggccttcatgctctttgtcaccaaccctggcacctctctacctgagggtcttctctggtgggcagaatccactctgtctaagcatgggtgggtaggaagtgcctgagaattaaaaaccctctctttcactggatgatgatgtgagttggtgcataaataccccagctccctcacccgtcaggccgtaatgctgagcacatgctctccattggcttccagagttccctttggcattaaggtccaggtattcaccatggtcatggtagcctgcttgataatgctccatgttttggttaaattacctccctgtctgttttttctactt

SEQ ID NO: 8762 - DNA, 415 bp, Homo sapiens
  III.2390 (AI821524)
taatgcaagtagtttatttgggaggtgaaggaaacaggaaaagggaagtagaaaaaacagacagggaggtaatttaaccaaaacatggagcattatcaagcaggctaccatgaccatggtgaatacctggaccttaatgccaaagggaactctggaagccaatggagagcatgtgctcagcattacggccctgacgggtgagggagctggggtatttatgcaccaactcacatcatcatccagtgaaagagagggtttttaattctcaggcacttcctacccacccatgcttagacagagtggattctgcccaccagagaagaccctcaggtagagaggtgccagggttggtgacaaagagcatgaaggccagcggtgagatagaagggatatgtgcaggctcccccagcacacc

SEQ ID NO: 8763 - DNA, 406 bp, Homo sapiens
  III.2391 (AA911705)
taacatttctttctcttctccactctccacccccctcctaaatgttccagcccggttctctgcatgcactattagcttggaactgtgtcgaaaacttttcagagttttggctcgatgcttgcaggtttcatggtcttattcccaagagcctcctgtctcttctcataagttctggaattatctctagttacgtgcttatcacagggtatgtttcccactttgcaaatctccatttgggtggatcccaactgttttatttatttatttattattttattttatgtgtttatttttgaggcaaagtataccacattttctttttctttttgagacaccatctcaatatatatatatatatgtaaataaataaataaagttttacatcactttttttcttgatcaaagc

SEQ ID NO: 8764 - DNA, 548 bp, Homo sapiens
  III.2392 (AI733108)
  misc_feature (504)..(504): n is a, c, g, or t
taacatttctttctcttctccactctccacccccctcctaaatgttccagcccggttctctgcatgcactattagcttggaactgtgtcgaaaacttttcagagttttggctcgatgcttgcaggtttcatggtcttattcccaagagcctcctgtctcttctcataagttctggaattatctctagttacgtgcttatcacagggtatgtttcccactttgcaaatctccatttgggtggatcccaactgttttatttatttatttattattttattttatgtgtttatttttgaggcaaagtataccacattttctttttctttttgagacaccatctcaatatatatatatatatgtaaataaataaataaagttttacatcactttttttcttgatcaaagcaatgctaggtaattaaggacattgttggcaataacagaaatgtgtctatgaaaaggttcttaagaaggtgactgtaacctcacattctcctttcattntctcccccatctctgcttctctctagggtgaacacagttggtct

SEQ ID NO: 8765 - DNA, 506 bp, Homo sapiens
  III.2393 (AI791605)
  misc_feature (496)..(496): n is a, c, g, or t
tctgtgtccaacttgtccccatttgcccagaactttctgagtgtggacattgaaaatctcacatcccagggagccctcagtcctggctaaacctagacaactggtcaccctgttggcactggatttaactcgaatcctaacttctcctagcttcttcccatgcctttgactggcccgtgtctcctgttcctgggacccaagggtcactattaggaattcccatcacgaatcccgaacagcctctgccccacacagcacaaccccaatcccacccagaccaactgtgttcaccctagagagaagcagagatgggggagaaaatgaaaggagaatgtgaggttacagtcaccttcttaagaaccttttcatagacacatttctgttattgccaacaatgtccttaattacctagcattgctttgatcaagaaaaaaagtgatgtaaaactttatttatttatttacatatatatatatatattgagatggtgtctcanaaagaaaaag

SEQ ID NO: 8766 - DNA, 449 bp, Homo sapiens
  III.2394 (AA446580)
tttttttgagatggggtctcgctctgtagcccaggcgcgacctcagctcactgcaagctctgcctcccgggctcatgccattctcctgcatcagcctcccgagtagctgggattacaggcgcccgccaccacgcctggctaattttttgtatttttagtagagatgggttttcaccgtgttagccaggatggtctcaatctcctgacctcatgatccacccacctcggcctctcaaagtgctaggattaaaggcgtgacgactgcgcccagccacaaaagatctgcttttaacaaaaatttgtaatgggttataaaaagtttatgtgaatcttaccttatggtcaagcattaaaattgggtagatatgtctataaggctttcttaagaattgggtgtcacataaatagtacactaattccaaggtaaaatttggcttatatggtataaa

SEQ ID NO: 8767 - DNA, 316 bp, Homo sapiens
  III.2395 (AA446707)
ctttaagaacacctgttagagttctatagttgattataaaccaccttctaaagaggattaaaacaagacaacaattgcctgtggatgacaaaatattttagggcagccacagtcaaaaacacgattgacaaagaaatttggttatctctgtggcatacagtgattttatgtaacaattataattattactgatgatatatactgaagcatatcagaattataggcatcttacacaattttgtaatatgtactaataacaagtttatataaatataacccaaagaaagttaaacaccatttgacatttgattatact

SEQ ID NO: 8768 - DNA, 491 bp, Homo sapiens
  III.2396 (AI150032)
ttttttttttttttttgcttctctatttggtttattatttctgttctttgagtacatttttaaaaagacatgacaagtacatagggtgaggtaagaaacaatcatgtagcatttagtgcactgaaaaggatataggcagtccttgttttacagctttgttatgcaccaatttcagttaccataatttagttaaataacactagttccctacatcatggttcaaataacagttaccactgtatattaattgaaattgcataaagtataaactttattggtagcctttcagttcacaaattactacgtaaataacagatgcacatcatgatcatgattagaaagaaaattagaaagcaatatgacaatttgccaaggcatagaaaagatacttgctctgtgtcacagacacatgatgaaaaggcaaactactcaataagcagactactagataagtaaaaaaagtgcatgaaaagttcattaacaaagaaatg

SEQ ID NO: 8769 - DNA, 437 bp, Homo sapiens
  III.2397 (AI336785)
acagatgagaaaactgtagcacacagagatggaagtggtggtgccatgacagagatccaggtggtctagctctacagtgtcaactcttaacaccccaccatagtgctttttgtgtagcctaataacagcaatgcacttacttgtaagcaagtgattgctatgtgccaggagtcattctaaatgctttgcatatgtaactcatttaatccctgcagcaatcctgtaagacaggaatgatctccatttatggaggagaaaactagaacacagggaagttaaacgacttgcccaaagtcactcagccaggaaatggaagagctgacatttgaatccaggtgacctggctccgagcccacgttaaaaactacctaactctctaagcttatttgggttttggcaggatatcaaattaaatttatgactaaattttaaaaaga

SEQ ID NO: 8770 - DNA, 539 bp, Homo sapiens
  III.2398 (AA400819)
ttgacaggtcaaaggaattgctttaattgaggtcacaggcatcacaggggtctgctcagcttcctcgccaccagggagaaaagtccttcgttgttggccatggtggaagaataactttgcgagatcacctcaaaccattcgattgtgtagccagcctctttcacagcagcctctactgcctcccggcccagggggaggctggagaacttctgctcaccaatcatgtagtagctgctcttgagcgcatccatgatcaccaggaagccccctggcttcagtaggctgccgaggttcctgagcgccctgcagtaggtggggaggtctgggcaggcggcatccagacacagtgtgctgagcacgcagtcaaccgggggtaaggggacgggccccagtggctggcttctgagtcacatcacacttcagcaactgcttgaccgcctgtctcaacttctgctccttctctggacccttgactctgttccttccagattacacacataggtccctattggggacaatcaaaaggctctgggtctttt

SEQ ID NO: 8771 - DNA, 340 bp, Homo sapiens
  III.2399 (AA401162)
tcttttacatgtttaaatttaaaccattcttcgtgaccccttttcttgggagattcatggcaagaacgagaagaatgatggtgcttgttaggggatgtcctgtctctctgaactttggggtcctatgcattaaataattttcctgacgagctcaagtgctccctctggtctacaatccctggcggctggccttcatcccttgggcaagcattgcatacagctcatggccctccctctaccataccctccacccccgttcgcctaagctcccttctccgggaatttcatcatttcctagaacagccagaacatttgtggtctatttctctgttagtgttta

SEQ ID NO: 8772 - DNA, 221 bp, Homo sapiens
  III.2400 (AA526253)
tgtcccaagttacttgatagataaactttggcatcacatcacaaactcaagatccagaaacttgagcactctgcatcataattgtcttgtgcctcctggtggttaaaaaacctgtcgctccgtgaagcctctggaaaggcaagggaatatacttgatggggatagtagttattctctaatcctccattcaaccaaaaaaaaaaaaaaaaaaaaagtcgcag

SEQ ID NO: 8773 - DNA, 144 bp, Homo sapiens
  III.2401 (AA868617)
agcacacacaagagtactttaatataaccttaatggtctaacaaaccttccaaatggaaggaaatacaaaataaagttgacacatcaaatttaacttatactaatatacttcagcattacaaatttaccaagtcattttttttt

SEQ ID NO: 8774 - DNA, 429 bp, Homo sapiens
  III.2402 (AI222203)
  misc_feature (406)..(406): n is a, c, g, or t
gatgtattatttagcctttattgcatagaaggccttccatttgaatatgctacatacagaactccaaactctgagctttttattcacagaaaatgtgctctcatacatctttgtgtcccctgcccttaatactatgcccgacccagagtcagggatcaaaagatatttttggtatgaataggcaaaaagacacacataggaccttgaatgacagtggcaatgtattacaatttattaaagatgtctgatgagtccagagtactccaaatattgaacccaaattctcaaaaggcatgtgatagaatggggttacccttgataaactataaagttagaaagattattttagagacaccatcagagtaggtgtcagaaaatctgagttcctgtctagcacattccacanataaagtttataacattgcacca

SEQ ID NO: 8775 - DNA, 377 bp, Homo sapiens
  III.2403 (AI243147)
ttttagtttagttccggtttttaatcttaaataagacacttccccttgatgtatgatctcagagaacctcactcacatgagacaatgctagggcactatttggaattttccagagtggataaaagatgtactccctgaagaattgacacaggccgattccaactggctgaggcagaagccaccgtcttgacatttcgaacggctccgagggtgcccgaatgcagcactccccaaatcaggaagggcaggaatgaaaatcagcacataaatttgggctatcctgtaaataaaatgtgtgactgattccacctggcaaggtcttggctcccatgtagctgaatgagaagctccggtggccctccgtgttcttaggggtg

SEQ ID NO: 8776 - DNA, 341 bp, Homo sapiens
  III.2404 (AI208245)
tttgccatttttaaaatattttattttttaaacattttgttaaaaattaagacacaaacacacagcgtggagctgccatctgttataacagtgctttcttcttctggaagatctcctaagagacccgcctgaagctctttttgtgaacagtcactctttccggaaatatgtccatggtggtttgtttgattggcttctctttttttctgtcatacattcgcctgtaagcagataatgcaccatgaatgttctctattaatgaaaacattttgatgttgggatccatgttttcaaactttcaaggaatttgttgaggtctgcaaaagcttctgctaaattcg

SEQ ID NO: 8777 - DNA, 446 bp, Homo sapiens
  III.2405 (AA029890)
  misc_feature (62)..(62): n is a, c, g, or t
ccgggcaacgactccacggcgtctcaggacgtggccaaccgcttcgcccgcaaagggggctngaggcagaagaacgtgcacgaggtgaaggaccacaaattcatcgcgcgcttcttcaagcagcccaccttctgcagccactgcaccgacttcatctgggggtttgggaaacaaggcttccagtgccaagtttgctgttttgtggtccacaagaggtgccatgaatttgttactttttcttgtccgggtgcggataagggacccgacactgatgaccccaggagcaagcacaagttcaaaatccacactttacggaagccccaccttcttgcgatcactgtgggtcactgctctatggacttatccatcaagggatgaaatgtgacacctgcgatatgaacgttcacaagcaatgcgttcatcaatgtccccagcctctgcggaat

SEQ ID NO: 8778 - DNA, 409 bp, Homo sapiens
  III.2406 (AA030029)
  misc_feature (263)..(263): n is a, c, g, or t
tgggatcaggaataagtttcagcttcacataaggatctgaaagcccgtttggatccatagggattagattttttgcatctcgtactgtgacatggagcttttcatcagcaacctcagcctttaggtaaatccgccccctcttctcagtgtgatccattccgcagaggctggggacattgatgacgcattgcttgtgaacgttcatatcgcaggtgtcacatttcatcccttgatggataagtccatagagcagtgacccacangtgatcgcagaaggtggggcttccgtaagtgtggattttgaacttgtgcttgctcctggggtcatcagtgtcgggtcccttatccgcacccggacaagaaaaagtaacaaattcatggcacctcttgtggaccacaaaacagcaaa

SEQ ID NO: 8779 - DNA, 371 bp, Homo sapiens
  III.2407 (AA129901)
  misc_feature (26)..(26): n is a, c, g, or t
  misc_feature (54)..(54): n is a, c, g, or t
cgaaggagcaagccactagtgcttcnatgagccacccctgagaagtctcacgtnatcactttccgccacagcctgtttatcaaaagcaagccccccaggcccagccacgtgcagagggaggagaatgaggttctgtgttttgaagggaagaatatcagaattggtagacatttcaaactgtcacattagggatacaaaaatgaacaggctgggagtggtggctcagcctacaatcccaacactttgggaggctgaggaaggggcatcacttgaaccaggagttcagtactaacctgggcaacaaagaggcccctgtctctgataaaaagaaaaaaaatgaaaaaataaaaatgaacaggtataaaaaagag

SEQ ID NO: 8780 - DNA, 354 bp, Homo sapiens
  III.2408 (AA129902)
gactttgtaccatattctctttttatacctgttcatttttattttttcattttttttctttttatcagagacaggggcctctttgttgcccaggttagtactgaactcctggttcaagtgatgccccttcctcagcctcccaaagtgttgggattgtaggctgagcaccactcccagcctgttcatttttgtatccctaatgtgacagtttgaaatgtctaccaattctgatattcttcccttcaaaacacagaacctcattctcctccctctggcacgtgggctgggctggggggcttgcttttgataaacaggctgtggcggaagtgatcacggtgagacttctcagggtgg

SEQ ID NO: 8781 - DNA, 566 bp, Homo sapiens
  III.2409 (AA394154)
ctcatagaataagtctaattcctcttttggctacagctattttttttaatgctgtgcacattttatagtcctttactgttcagacttggaaagctaggatgaaataaatatttactaaacacccctccccctgcaaaaaagaaaaagtaataatattcttaaataaggaaggggcataggctgagagctggggcatggctgtgagcacatccagtacacatattttggttaaagtacaaggacatagaatgtactacatgcctgtgagcatgtctagcacaagtattttggttaaagtgtaaggacatcgatgtacttactcctttatatctaacagctacataggatagggcttaacaaagagttattagcacaaagcaaggaggcttgaaggaagttagtctttaaaagaaattattatttctaacacttatggtttattctttaataagaagggaaatttgaagaggaactttttactttctacattcccctttaattcatggcacagttgggactacttattttcatatgaggacattcaataaacagactttactaatgaa

SEQ ID NO: 8782 - DNA, 449 bp, Homo sapiens
  III.2410 (AA398120)
tttcattagtaaagtctgtttattgaatgtcctcatatgaaaataagtagtcccaactgtgccatgaattaaaggggaatgtagaaagtaaaaagttcctcttcaaatttcccttcttattaaagaataaaccataagtgttagaaataataatttcttttaaagactaacttccttcaagcctccttgctttgtgctaataactctttgttaagccctatcctatgtagctgttagatataaaggagtaagtacatcgatgtccttacactttaaccaaaatacttgtgctagacatgctcacaggcatgtagtacattctatgtccttgtactttaaccaaaatatgtgtactggatgtgctcacagccatgccccagctctcagcctatgccccttccttatttaagaatattattactttttcttttttgcagggggaggggtgt

SEQ ID NO: 8783 - DNA, 495 bp, Homo sapiens
  III.2411 (AA496130)
aaaacatgtaacgaaattattgtgcctaaagccccctctcataaaacaatccaagaaacacctcattctgaagactattcaattgaaataaaccaagaaactcctgggtctgaaaaatattcacctgaaacgtatcaagaaatacctgggcttgaagaatattcacctgaaatataccaagaaacatcccagcttgaagaatattcacctgaaatataccaagaaacaccggggcctgaagacctctctactgagacatataaaaataaggatgtgcctaaagaatgctttccagaaccacaccaagaaacaggtgggccccaaggccaggatcctaaagcacaccaggaagatgctaaagatgcttatacttttcctcaagaaatgaaagaaaaacccaaagaagagccaggaataccagcaattctgaatgagagtcatccagaaaatgatgtctatagttatgttttgttttaacaatgctcaaccataaag

SEQ ID NO: 8784 - DNA, 464 bp, Homo sapiens
  III.2412 (AA496131)
ttttatgttccattggaccacaactttatggttgagcattgttaaaacaaaacataactatagacatcattttctggatgactctcattcagaattgctggtattcctggctcttctttgggtttttctttcatttcttgaggaaaagtataagcatctttagcatcttcctggtgtgctttaggatcctggccttggggccaacctgatttcttggtgtggttctggaaagcattctttaggcacatccttatttttatatgtctcagtagagaggtcttcaggccccggtgtttcttggtatatttcaggtgaatattcttcaagctgggatgtttcttggtatatttcaggtgaatattcttcaagcccaggtatttcttgatacgtttcaggtgaatatttttcagacccaggagtttcttggtttatttcaattgaatagtcttcagaatgaggtgttt

SEQ ID NO: 8785 - DNA, 345 bp, Homo sapiens
  III.2413 (AA978267)
ttttaaacaagacttattcatatttattattttgctaaaattagcaggatgttcagtcatgggtgttaccagagtcttagggaattgcacttttcactttaaggcaggatggctttgtgatggatggttccctgggctctttcgactgtgctttctgctgtttctttctccagcccattgcatgctgctgtttatcttgcaaaatgtctgacaattgagagcagagacaaaagcacttagagctagatggagctgtatgtttttatataaaaatggtcatctatcacaaaatgtatctgccacatgtgtgcttgatatgacttgataatttttattttgtttcat

SEQ ID NO: 8786 - DNA, 397 bp, Homo sapiens
  III.2414 (AA412506)
tttgcagaaaagaactcaggtttatttgcaagtaaaaaccatggtctgaaaaaaacccattggcaaatgtacagtttgtgtccatttggggttcccgccagctgggggggcccccagatccctgacccacatgcatcgggctcccacatgttcacagctaatctcaggcccctgcagtttagccccctgcaggggacaccccgtctcctgctgaaaaccatcggactcccaggctgcacccagccctccaaccctcctgccttagtgcagtgcaaaaaccaaaccaaacacaaatctcagagcaaagaaacacaaaacaaaaaaattcacaaaaaccagggttctaaattattttttctcagtgtccttcgtgatcatgatgacttatttgtcaaca

SEQ ID NO: 8787 - DNA, 467 bp, Homo sapiens
  III.2415 (AA412620)
gaataataagagattttataatagcaagaaaatgatgtatattttagtttgttgacaaataagtcatcatgatcacgaaggacactgagaaaaaataatttagaaccctggtttttgtgaatttttttgttttgtgtttctttgttttgagatttgtgtttggtttggtttttgcactgcactaaggcaggagggttggagggctgggtgcagcctgggagtccgatggttttcagcaggagacggggtgtcccctgcaggggcgtaaactgcaggggcctgagattagctgtgaacatgtgggagcccgatgcatgtgggtcagggatctgggggcccccccagctggcgggaaccccaaatggacacaaactgtacatttgccaatgggtttttttcagaccatggtttttacttgcaaataaacctgagttcttttctgcaaaaaaaaaaaaaaaaaaaaaatt

SEQ ID NO: 8788 - DNA, 256 bp, Homo sapiens
  III.2416 (AA427524)
ctgaagcatgcatgtcagtttattcaccatacttcccccaggaaccctctcactggtcagggaatgaaagaattgaagggatgggggatgtacaggtagaagtaaaaggcacaccttgaacgtgctatgatgggttgaaaagaggttggtctgaaattgacgagcctcccatttcagaggctcaggaagtttgtgcccaggaaatatgcacgccttcagccaaatcccctgcacctgatggagcagaagcaggcac

SEQ ID NO: 8789 - DNA, 323 bp, Homo sapiens
  III.2417 (AA430715)
gcagcgttagtgatcccactagctgtgacagccaggcccagaaaatgcctgcgtgagagccagcagacagccaggccagggtaggcagtgctgcttctgctccatcaggtgcaggggatttggctgaaggcgtgcatatttcctgggcacaaacttcctgagcctctgaaatgggaggctcgtcaatttcagaccaacctcttttcaacccatcatagcacgttcaaggtgtgccttttacttctacctgtacatcccccatcccttcaattctttcattccctgaccagtgagagggttctgggggaagtatggtgaataaa

SEQ ID NO: 8790 - DNA, 396 bp, Homo sapiens
  III.2418 (AA428609)
agtttataacaatgtttattattatttcaaagtgttttccattcaaggaaaagaagtcaattcctatgtcaaagtaaccaaggtggttgaagaataggcagagtggtctagatggtaaaatcaatcttcaagcctcaaagaagctccatgaacagaggaatgccaggtgtcacacagctttccttcactctaattcattcttgactagagcctgtatgcgtgttccagggacatttaaactcttaaaggatttcttctgatctttactaaatacattaagaagaatgccaaccagtgccattttgtgtactgggacatgcagtcatgtgattaaaacaggtaacatgaactctgactttaaaatatagatacaaatgctctaagctaggaaaggtt

SEQ ID NO: 8791 - DNA, 506 bp, Homo sapiens
  III.2419 (AA432314)
cggcacgagggtttgatctaatcttaatcacagtgagctcttcattagcacaatatgtggtttgccccaagtgtgcactatttaatactttgtaatatgccaccaagagtactgacatttagagttgtttaaaggccgagaactggaaacagcctttccctcattttctgtgtattggtgatgggagtaataacattttcggggagctttttaaatttcacagaagaggaaagttgcctgctctggcaggtatgtgcaagatagagtgtgtttcatttgttctgttgccaagaattagtgctgtactattgtagttcctttaggatttgtatgtgctctgggctcatgaagatattgcatcatgagctgcagcagttgtactcttttttgatgacctaaaaagggcttatttctgaggaatgaaaggttcccatcattgactatggatgtggaaaacctttcctagcttagagcatttgtatctatattttaaagtcagagttcat

SEQ ID NO: 8792 - DNA, 357 bp, Homo sapiens
  III.2420 (AA463269)
aatgcatttaatttgaaaaaaaaaggttagaaaacaaagagtatgggggtttcttagcagtaaccatattttcctgtacctaacgtgaagccagtgtgtagactcagtttgcctaccagacatctcccttttgtgaacatggatacattagaacctgctgtcattagccactcagtagtgcacccatttcccttattcagattcacactcaccctggacccttctgatcattttgtattcctcggggaaactattttagctgacccacacatctggtttctctgacatttgtagtctcaccttaaaagaatgaactcacattcctatttatacattaaaatgaaatttttaaatttt

SEQ ID NO: 8793 - DNA, 391 bp, Homo sapiens
  III.2421 (AA463621)
ctaaattgtaccctgtaaatatgtagaattacaatatgccaatgaaaaatttaaaaatttcattttaatgtataaataggaatgtgagttcattcttttaaggtgagactacaaatgtcagagaaaccagatgtgtgggtcagctaaaatagtttccccgaggaatacaaaatgatcagaagggtccagggtgagtgtgaatctgaataagggaaatgggtgcactactgagtggctaatgacagcaggttctaatgtatccatgttcacaaaagggagatgtctggtaggcaaactgagtctacacactggcttcacgttaggtacaggaaaatatggttactgctaagaaacccccatactctttgttttctaacctttttttttcaaa

SEQ ID NO: 8794 - DNA, 426 bp, Homo sapiens
  III.2422 (AI191514)
  misc_feature (347)..(347): n is a, c, g, or t
gtagagtcagggttaccgtgttagccaggatggtctcgatctcttaacctcatgatctgcccacatcggcctcccaaagtgctgtgattacaggtgtgagccaccgtgcccggcccactcagctaatttttaaattttttgtatgttgcccagccctgtacttattttatatgtctgcctcctcccctctaaaaatgcaagctccaataggatggggattgggagggttgttcatgccaaaggagtacctgggacagggcagctgctgaatacatatgcttggtgaatgactaaagagagcttagctccttttataaaccctgagttgcttgagtctctcttacatncactgtctgctgtcttcctacccctctggcagctctgcttaattcgttgtgggctgccctctatctgggagccccatac

SEQ ID NO: 8795 - DNA, 357 bp, Homo sapiens
  III.2423 (AA417818)
gggaagtccacaaggcattttattccacaggaagaaaaatgatgactctgatatgagaaccagactcaagagtcttcacacactggtgactgtaatagtgtttacataatagagaaccagatatttttagaattttatcaagcagctactatggtattttgaggcccagatcatacttacaaacaaagtggccctggagccttcagaacattgcgatgagacccaccaagcagcaagacactcttgggatttggggaaggggccgcttgtctgttttccactgtgtagtgaccaggcccaggggctggggaagcactggcctggctcacccttcagtgagcacagagaagcagcgac

SEQ ID NO: 8796 - DNA, 296 bp, Homo sapiens
  III.2424 (AA482450)
cccatctcctgtgattgcacaaccaagcactttgacatttgcaccttaggagaggcagatgttaaaatggaatccaaagaccacctagggcggggctgggtgggagatgggagggccaactgcgagctgctccacttctcagctctcccctgccctgcagccctgggccagacaaggccagaaggtttcaggggcatttgacatcccctcctggttctcaccaggaaaacatccaaagctttggaggaaacagtgccctgcccctggctccttaaatgccccgtctctttgtaaac

SEQ ID NO: 8797 - DNA, 352 bp, Homo sapiens
  III.2425 (AA934093)
gactccaaagctggagattaattttttaatttttaatttttgtgggtacatagtagatgtatatatttatggggtacatgtaatattttgatacaggcatgtaatgcctaataatcacatcagggcaaaaggggtatccatcacctcaagcatttattttttgtgttacaaacaacccaagtatactcttttaattatttaaaaatgtacaataaaattatttttgactatagtcactctgttgtgctagcaaatactatatcttattcatcctttctaactactgtttgtactcatcaaccacacccacgtacccccgactcttctcctactcttcctagcctctggtaac

SEQ ID NO: 8798 - DNA, 494 bp, Homo sapiens
  III.2426 (AI733214)
tttgactctaagctggagattaattttttaatttttaatttttgtgggtacatagtagatgtatatatttatggggtacatgtaatattttgatacaggcatgtaatgcataataatcacatcagggcaaaaggggtatccatcacctcaagcatttattttttgtgttacaaacaacccaagtatactcttttaattatttaaaaatgtacaataaaattatttttgactatagtcactctgttgtgctagcaaatactatatcttattcatcctttctaactactgtttgtactcatcaaccacacccacgtacccccgactcttctcctactcttcctagcctctggtaaccatccttctaactctctatctctatgagttcaattgttttaatttttagctcccacagataagtgagaacatgcgacgtttgtctttctgtgtctggtttagttcacttaacataatgatctccagttccatccatgttg

SEQ ID NO: 8799 - DNA, 488 bp, Homo sapiens
  III.2427 (AI793147)
agtagggaccccaggatgccactgtagtgttggatattcctggatcagagtttctcaaatcattctccacaggtaatgtctattctccaagagagttttccttggcctgtggccaggctgctcaaatagaatgcagaaacaaagaatttgcctgaattctgctagccactctccaaggtcttctcctgcgatgggtggagggactttcagggcaaccctgttctaagtaggaggtgaaggtgatatccagacaaatccttcctgggtatttgctcgggggaacttgggactttttggcagtattgtctatggctctggctcattaattcagccctcgtgttcccgtatctgcaagggcataactgcagtcccctcagttctctgggtaatgtgactctcactgcaaacctcaacatggaaagctcttgctaaggtgggaaggtctcagtcctccaaaggaaacgaagttgtggcagccttcttactag

SEQ ID NO: 8800 - DNA, 261 bp, Homo sapiens
  III.2428 (AI032180)
aattatttcaaaataaaattttttttaaattaaattcatatattaaatttatcattatctatatataaaccattatttaaaactttaattttctaaacatattattcaacttatttgaataaatatattatagaagttaaatataatttttatttcattcttaataaaaactcatttttttaacaaattatatctaaatatctatttttccttaccataaaataaaaaaaaaaccctaaaaccaaaaactccttttcccta

SEQ ID NO: 8801 - DNA, 461 bp, Homo sapiens
  III.2429 (AI791979)
caagaatgttaattcttatcagagatccatggcacactagtctggaaaaaaataattttgtgtctttttaaattcctagagtacctctccacttcaatcacaatttaagtccagggcaggtatcctgggctcctagcaaacactacaccccaacaagagtttgggagccaaattattttgcaaacccttaagaacacaaactaaaactaatttatccttatatctctgcaaaaattagcattttgaacatccaacgaaacttcaagtttgaggataatgggcttactgacctgacctttgatttcacgtaactaacaacaaatttctttaaaatctggttaagaaatatgaaaatattgaaaagtaaacataaattccacaaagctgaatggcagcaaaaaatatttcttaacatcaagaacatatacaaaagatgatcattaccacccaaattatctctg

SEQ ID NO: 8802 - DNA, 539 bp, Homo sapiens
  III.2430 (AI820579)
  misc_feature (473)..(473): n is a, c, g, or t
  misc_feature (490)..(490): n is a, c, g, or t
gagtcttaagtatttcaaaataaaagtggttttaaagtaaattcatagattaaatgtatcattatctatatataaaccatgatttaaaactttaattttctaaacatagtattcaacttagttgaataaatatatgatagaagttaaatagaatttttatttcattcttaagaaaaactcatgtttgtaacaaatgatatctaaagatctattttgccttaccagaaaagaaaaaaaaaaccctaaaaccaaaaactccttttccctaggaagtcaaaaatgctgtgatttaaaatatctaattatatttttttctttctatggtagtggggtttacttctgaggataaaatattttgaaaaagctctgtcccttgacatggtagttctcccgtgccttgtacttgttctctctccatatgcacagtgtgacaagatgctcacctttaatgaagaaggtgtagcttttcgttntaagctgtaattgtctntgtcttgatttggctatttttataactgaaatcctgagcaacagagata

SEQ ID NO: 8803 - DNA, 242 bp, Homo sapiens
  III.2431 (AI205722)
tttaaggaagaaaaaagcctctttattgaactgaaacagtgtcccagacttatcccattttccttctcactgggggaagggaaggactctgctttagaataacctgggggtcactggcagggcacagaaggaagtgtaggtgacgcgggctggcctggggcacaatgggtggagctgcgcaatggggcagagacacattacactgtttcctcagctctgtagatggcttaaataactccata

SEQ ID NO: 8804 - DNA, 510 bp, Homo sapiens
  III.2432 (W90341)
  misc_feature (313)..(313): n is a, c, g, or t
  misc_feature (321)..(321): n is a, c, g, or t
  misc_feature (339)..(339): n is a, c, g, or t
  misc_feature (439)..(439): n is a, c, g, or t
  misc_feature (458)..(458): n is a, c, g, or t
  misc_feature (482)..(482): n is a, c, g, or t
  misc_feature (488)..(488): n is a, c, g, or t
  misc_feature (499)..(499): n is a, c, g, or t
aattttgttcatactgtatttatcaagtatgatgaaaagcaatagatatatattcttttattatgttaaattatgattgccattattaatcggcaaaatgtggagtgtatgttcttttcacagtaatatatgccttttgtaacttcacttggttattttattgtaaatgagtacaaaattcttaatttaagagattgtatgtaatatttatttcattaatttctttccttgtttacgtaaattttgaaagattgcatgatttcttgacagaaatcgatcttgatgctgtggaagtagtttgaaggaacatccntatgagtnttccttagaatgtataanggttgtagcccatccaacttcaaatgaaaaaaatgaccacatactttgcaatccaggctgaaatgtggcatgccttttcctaattccaactttataaacntagcaaaagagtgtttgcntattccaccaggtccactgtgacntacccngagtataaagncctgtagccaa

SEQ ID NO: 8805 - DNA, 299 bp, Homo sapiens
  III.2433 (W90342)
  misc_feature (293)..(293): n is a, c, g, or t
acctttttttcccaaaaattttattgggggaaaactacaaaacatttacagtacaatgtttacagtcacaatttgtagtgagctgattccccaaaatatattacaactcaagttgacttatcttgttacattcaaaaacctacttctcgtccaaagtagtccagagagtacatatagtgctccaactgtacctacgtacaaactaaagctaccgctcattcatctgctgtccaggaaagcttaggagacattcctgcctttctacatggaaaaaaaaatagtacaagttttgnaaattt

SEQ ID NO: 8806 - DNA, 450 bp, Homo sapiens
  III.2434 (AA682558)
gccatcatgcatcttatcaaatttaataacatgcacgccagtcagagcacatttgtgggcaaacctgggctatcagctgtcactttgatgcccaaggtttacatgtaaatagggaagctctgtgggggagaggaggagggcaggttgggggagcactgaactcagtccagcccatggccacttagtcatggactctcacagataggcaggatcttggggaggtgggtccatccttatctacattttacagatggggaaagccaaacttgtccaaggccaccatggcacaggtgccctggtgcatccctctcttcacatgcttctcactcaaatttctgtcctgggaaccaagaaaccttgaggatggaactgctcccatacttccttctgaaggagagggagagggcagggctctgtattgggtggcaagacacctaggtccaggccccc

SEQ ID NO: 8807 - DNA, 446 bp, Homo sapiens
  III.2435 (AI125224)
tttgacaatcacatcaattttattttataacaaatagaatcatgtcccagttccaaaacaaaataaatagtaatgttaatatagagatttactcatggccttttttgttaaagagtcttaaaatgtttctttggacaatttaaaaattttcaatgttttttttactcccatacaacctagcccccctgccaaataaaaatcaagcatattttctcctgtatcttgtgtataggttatataatagtaccttttatctttaagatatgagctgaaaccccacctatggttgtagtgagcatcctactttacgcctcttatctcctttaaattcaaaacaggtatctcaaaaataaagttaatataggtttataagtaggacttgctcactcctgaaagtacgtttaagtaaatctccaaacacatttcaaatactctcagagagtctg

SEQ ID NO: 8808 - DNA, 395 bp, Homo sapiens
  III.2436 (AA135610)
  misc_feature (66)..(66): n is a, c, g, or t
  misc_feature (333)..(333): n is a, c, g, or t
  misc_feature (347)..(347): n is a, c, g, or t
  misc_feature (356)..(356): n is a, c, g, or t
cagcaatctttattctatacattttatgtgaacttttttaatgtctttaatttggatttttttttnttttagtattttaacatttattttaatcctgaagacacttttttgattgtgtttcgtaagagacaacatggccgcctaaggtgcaatcctgccgctatagtgagctaatgtcctgaatccaaaggcttcagaaaattgcttttgcctttttcatgaatgttaagcagcagcattgtgagatcgatctgtcctggcagttaacacgatgtgcaacagtgtgttagcatggaacagaacgcttttcacaaaacaaaggactgttttacnaattgattattccngacagtgtngtcgacattaaactttttacaactggcacagcagccaaa

SEQ ID NO: 8809 - DNA, 251 bp, Homo sapiens
  III.2437 (AA135661)
aacagtcctttgttttgtgaaaagcgttctgttccatgctaacacactgttgcacatcgtgttaactgccaggacagatcgatctcacaatgctgctgcttaacattcatgaaaaaggcaaaagcaattttctgaagcctttggattcaggacattagctcactatagcggcaggattgcaccttaggcggccatgttgtctcttacgaaacacaatcaaaaaagtgtcttcaggattaaaataaatgtta

SEQ ID NO: 8810 - DNA, 475 bp, Homo sapiens
  III.2438 (AA436558)
gttttttactgtgggaaaccacatcctgcaacgtaatcttatttttcactagcagtccaattttgatatccatgagattgaggtcattctccagctgctggttagaacgaatgagggtgataacctcttcccgcatcttcataaggtcaagctcctcctgaaaatcctggtcactttggtccagcaggtggacaaattttcggaccacaaccataggaggatcctcagcattgatgagagtcttgtagtcatcccgagctttgtttgcccgaataaaagcctggattttgataatgtcatttatatggtcccggaagtactgcaggcgatctcgatagcgctttcgagcttggtgcatccttgccagggactgaatctttacaacttcatctttgtgggagcgcaggtaagctaaccgatcttgatatgccttcttctgcttgtatcctctccactgtgactgaatgcaggtgat

SEQ ID NO: 8811 - DNA, 513 bp, Homo sapiens
  III.2439 (AA436585)
ggcctgatcaccaggctgcaggctcgctgccgtggatacttagttcgacaggaattccgatccaggatgaatttcctgaagaaacaaatccctgccatcacctgcattcagtcacagtggagaggatacaagcagaagaaggcatatcaagatcggttagcttacctgcgctcccacaaagatgaagttgtaaagattcagtccctggcaaggatgcaccaagctcgaaagcgctatcgagatcgcctgcagtacttccgggaccatataaatgacattatcaaaatccaggcttttattcgggcaaacaaagctcgggatgactacaagactctcatcaatgctgaggatcctcctatggttgtggtccgaaaatttgtccacctgctggaccaaagtgaccaggattttcaggaggagcttgaccttatgaagatgcgggaagaggttatcaccctcattcgttctaaccagcagctggagaatgacctcaatctcatggatatcaaaatg

SEQ ID NO: 8812 - DNA, 477 bp, Homo sapiens
  III.2440 (AI031566)
ttttttgagactgagtctcgctctgtcacccaggctggagtacagtggcataatctcaactcaccgcaacctccgtctcctgggttcaagtgattctcctgtttcagcctcccgagtagcagggattacaggcgtgcactgctgcgcccggctaatttttttatttttagtagagacagggtttcaccgtgttggcaaggctggtctcaaacttctgacttcagcagatccacccgcctcagcctcccaaagtgctgggattacaggtgtgagccaccatgcctgaccttgatattatcattttatccacagggtttgtcaaagggtatcctcattggcttgccagggcataagagagtttgactgagaaggcattagtgggctgtgtaatgactaactttgtaccactttctcaattagcaacatcagagatatcagagcaaatggtagatctttacagtgatgcagttaggagtt

SEQ ID NO: 8813 - DNA, 469 bp, Homo sapiens
  III.2441 (AA904882)
tttaacaaatgaaaggttttgggggcaaagaggaattgggagttttaagatttttgcttagagaacaatctgcccagctaacatctactcatcatttgagattcagcctagatggcatcttcccaggactgaatcacgtgctcctcttgtaaaatatatccatgatacactgtagtgcacagtagtctcctggtacttaccatgcaaaattttcatgtggtttatcacgtttcttacaatgagctccttaagaattacctgataatggttaaaattatttcaactcccagagatatctgtatttcattaggtgactagagaatacaaaagtttttaatatctagcagtgaaactttcagatattttaacaggaaaaactatgtgacaccatgtaatataacacaatataatcaaacaataccatagaggcaataaactactagtaagattagtctgacatattttttac

SEQ ID NO: 8814 - DNA, 478 bp, Homo sapiens
  III.2442 (AA280895)
gcgaccgcccggcagtagctaccacggcctgtgtcaacgactaaagctccagtacagcggcgccctcagacagctgggagggtggctctggccgggagcgcgggccggtgagctaccgcgaggaggagcggcggagggacctcggcccggccctgcactggccgcccggcaggcgcgacatgagcctggtctggcatccgcgggatcgtccttaagccccttctccggctgttaacctccggggaacggttgtgaccacaccgacacgtattttacagataaatcattcttgcggcggcgggtcgaacacgtttatttattttttattttctcaacaagcttttacccagcacctgtccagtgaaacaacttgataatcgtttcgaggggcgtccgccgggttaggaagccactgcctggcagcttgtggaagcctcatttgcaaagccacccctcagatgttttgaagatcgtgacg

SEQ ID NO: 8815 - DNA, 457 bp, Homo sapiens
  III.2443 (AA280976)
tgtagagacaaggttgcccaggctggtcttgaactcctgggttcaagagatcctcctgcctcggcctcccagagtgctgggattacaggcgtgcgactgcacccagcaagacagaaataatgcacgctgatattgtctttctgaagaaattcccctaatttttcgggatccccaggttctcgaaggcatagcagcaaacaggccctgaagacggtttcctctgggttaccctcctagtcttggcagattttctcaatctctggcattccttcttttcttttacagtcttcattcggtgctgtctctctctcctctcttgaattcttctatactattgtgaggacaatacaggctcttccagcttgaaacttcagttctttgcatcgctgggccaagacgttccttgagtaggattctgtgcacacactgctagttacaagacgtcacgatcttcaaa

SEQ ID NO: 8816 - DNA, 410 bp, Homo sapiens
  III.2444 (AA448623)
agtttgtgtagtaattttactgcataagaaattacagagattgcataaatcattaggtcaacagcatacagagaagaacaaaacaaaacattgtttggatcaaataaaaaacagcaggaacaactcaattcttaaaaataccacgaattccccgaatgtggctccatttgatagaaaattttgcattttctggataatgtctgtagttacattaagcaaaatggaaaacggccttcagataaacacactaaaaagcagcttacacagatgtgttgccctcttcaccttggatgtaacaaaaataaagatgtgaggctgcctgctcttgcctaaagcatggcttgaactttcaattgatagtaaccgcttatgaaaaatattacattacataatctcctgtgtattgaaat

SEQ ID NO: 8817 - DNA, 440 bp, Homo sapiens
  III.2445 (AA448713)
ctctcatgttctcgttggcaaacgtgctggggaaatcccagaaatacaaggaatctgaagctttattcctcaaggcaattaaagcaaatccaaatgctgcaagttaccatggtaatttggctgtgctttatcatcgttggggacatctagacttggccaagaaacactatgaaatctccttgcagcttgaccccacggcatcaggaactaaggagaattacggtctgctgagaagaaagctagaactaatgcaaaagaaagctgtctgatcctgtttccttcatgttttgagtttgagtgtgtgtgtgcatgaggcatatcattaatagtatgtggttacatttaaccatttaaaagtcttagacatgttattttactgatttttttctatgaaaacaaagacatgcaaaaagattatagcaccagcaatatactcttga

SEQ ID NO: 8818 - DNA, 361 bp, Homo sapiens
  III.2446 (AI214507)
atgataacagtcttcccccaaactaaatcacctttgcgaagctaatgaaaggccaccaggttaggaggatgtgaggagcctgaattctgctaaggtgtagacataaaagattaccagccattattccagagatcacaagatttgcaactccccagctgctcctgcaaataacatcactattgtagagcctaagattggtggttgagatgtcttttcaggtttttgcatttctgacgactgatggctccacctggacctgctctccctccaccccacaagtcctgaggccccagtcagaagcaggctccctggactttgaattttcggggaattgatttgcgtaataactctgtctcccata

SEQ ID NO: 8819 - DNA, 367 bp, Homo sapiens
  III.2447 (AI733843)
atgataacagtcttcccccaaactaaatcacctttgcgaagctaatgaaaggccaccaggttaggaggatgtgaggagcctgaattctgctaaggtgtagacataaaagattaccagccattattccagagatcacaagatttgcaactccccagctgctcctgcaaataacatcactattgtagagcctaagattggtggttgagatgtcttttcaggtttttgcatttctgacgactgatggctccacctggacctgctctccctccaccccacaagtcctgaggccccagtcagaagcaggctccctggactttgaattttcggggaattgatttgggtaataactctgtctcccatacagcat

SEQ ID NO: 8820 - DNA, 383 bp, Homo sapiens
  III.2448 (AI792665)
gcaacaaagagtttaatggacacaaggccagccatgctgtatgggagacagagttattacccaaatcaattccccgaaaattcaaagtccagggagcctgcttctgactggggcctcaggacttgtggggtggagggagagcaggtccaggtggagccatcagtcgtcagaaatgcaaaaacctgaaaagacatctcaaccaccaatcttaggctctacaatagtgatgttatttgcaggagcagctggggagttgcaaatcttgtgatctctggaataatggctggtaatcttttatgtctacaccttagcagaattcaggctcctcacatcctcctaacctggtggcctttcattagcttcgcaaaggtgatttagtttgg

SEQ ID NO: 8821 - DNA, 404 bp, Homo sapiens
  III.2449 (AI268789)
tgtccttgataaagctgtctttaacattaagaaggactatcattttatgcagttgcccactgctttttggttgttttcagaaaagcaaaggagaaataatgacttattttgcaaactttttttttttttaacttttttagagacaaagtgttgctctgtagcccaggctggaatccagcagtacagtcatagctcactgagccttgacctcctgggctccaagcatggttgaggaatagctgggaccacaggcacacaccaccatgcccggctaattttaagatattttaaatttttttgtagagatggcagtctcactgtgttgcccaggctggtcttgaactcctgggctcaagcgatcctcttgccttggcttcccaaagggctgggattatagtcatgag

SEQ ID NO: 8822 - DNA, 429 bp, Homo sapiens
  III.2450 (AA143058)
  misc_feature (8)..(8): n is a, c, g, or t
  misc_feature (11)..(11): n is a, c, g, or t
  misc_feature (356)..(356): n is a, c, g, or t
gttttttnttnccattaaaaattattttattcaaattatgttttccaaaagagagggttctgtgctagtcgtctttgaaagttttcataccatttcagaaccacatttgccggaatgaacatttcagatgggcttggtgtcatctgggcctgagagacagcaaatgatgaagcaaaattgtagaaattgtccaacatcttttgtgtgaactgagtgaatgagtcaactgaggatacagcagcattacctacaggagtctgctgagccatactgtctaataattccactgaaattccaatctgagcaacagatggagttcggacaatattcatggctccaaaaggatgttggctccntctccagcctccccgccaccaagcagccaaacatggcgacggcagctccgttcagccggcagtgacctgaagc

SEQ ID NO: 8823 - DNA, 179 bp, Homo sapiens
  III.2451 (AA143176)
  misc_feature (18)..(18): n is a, c, g, or t
catgagcagtgggctggntaggaagagaaggtcagagttcgcgggggcagaggcattcttgccgctggccagatcactatgtagtggaggggcagacaccctcccgcaaattctggaaggttcttagtctcgactagggcagtagccaaggactcctagtcgccggcttcaggtcactg

SEQ ID NO: 8824 - DNA, 378 bp, Homo sapiens
  III.2452 (AA476409)
ttttttcactagacaaaaatctatttttaattgtataaaattatacatataaaatacatagaatgtactaagaagatgagtaaaatctttgacaccagaagtggacagatcaggaaacaatttttctcaagttatttgggatcttactggttggtatttgagaaaaataataaatccaggaggtacgagggcaattcttcccacaactcacaccccttaatccacacgtcccagagaaaggagaaacaggagtgttgatgagtgccagcttataaatgtcaaacagacacacctggtgtgtctagctgtttttgcctttactccaacccgacgtgtttcatggaatacaaacatggggcttctaccccagctctcttc

SEQ ID NO: 8825 - DNA, 520 bp, Homo sapiens
  III.2453 (AA476509)
gtctcgatttcctgacttcgtgatccgcccgcctcggcctcccaaagtgctgggattacaggcgtgcgaccgcgcccggcactatttgtgtttttaacaccattctcccccacttctctcctgggtgacataagagagaaataacctgtagtacagcagctaaagtattctcctttcagagaatttttttggaggtctctaatatatatttcccccttgtctctgtgatctcttatttatactatattattgtcccatgtactttctaaactgagcttggaacatttagtattcctgcaattggacttcccacttaacaattatacagactttgcttttagaaatagattaggttccaaacagaaagttcaagtgtaacaacaacaataaaaatagattatgaaacaggctataattggctcttttggatttgataggggcaagatgaaaggcaactttcttgcttttgaaatcatgttgggtaagaggtaaggaatccagctacaattttattagtgct

SEQ ID NO: 8826 - DNA, 483 bp, Homo sapiens
  III.2454 (AA593680)
agatacggggttcactatgttgcctgagctgcacctgaactcctgggctcaagtaagcccctcacctcagcctttagtgtagctgggactatatgcacgtgccagtgcaccaacctgctttttgatgctctattgaatagtactgcttcagtttccaattgtatattgctagtatatataaataattgctttgtatacactcacctcatatcctctggctattctaaatttattagttctaatagtgtggatttcttaggcatttctaggtacacagttatatcatctagaaataaagacagttttactacttctcaaacgtgtgagtcttttatttttcttgctgccttgtagtaatgttggccagtgcaatgttgaataaaggtggttagggcagacaaccttgccttgctcgcaaccattaagtatgatgatggctgtggggttttcacagattcactttaacaggctgaggaaattgcc

SEQ ID NO: 8827 - DNA, 429 bp, Homo sapiens
  III.2455 (AI079464)
gcagttagggcacgggcgtgttggcggcttggggtttgggcactgttttgcccaatgacctggattgccacacttgaaacagttgcaaggcgggcaggacggttgctgttggctagggcaccggctggcccagtgtcctgagttgccgcacttgaagcaggtgccagacggggcctgggagattgtacctctacctctcctgctggggctcttagggaatgcctgttgcagggcagctgccagggcttgggtttggagctgaactttttgtttcagtcttgcctgtcgttgtacctcagccgcctcctctcgggaattaaaaactttgaacgccagctttactaagtcctggataggggtttgggggcccccgctgcctcatccaggattagcggatatcactgcccgcagcgaatgtgttaggagttg

SEQ ID NO: 8828 - DNA, 431 bp, Homo sapiens
  III.2456 (AA993058)
ttttttaggacaaataaaatttatttttctctgtaaattcatttaaaagtatgttatctatgattatcctatcaaggtcagaaatgtcagatcttactccaagataggtaaacgcctttgaaacgcaacaaaaagagacgatgatcttatgagctcatttatgttcatgcatgaaagtgtgaaggtcactagctttgctgtgtttctacaagtttccttgactgtaaaaacagtcaaaatgtaaccaacctaattcaagatgttaaattaattaagttaaataaaattagccaaagcactgtaaattaaatgacataatacttaagttctgtactgatgacaccctttgatcaaaaggatggtgacccagtaaggtgcttctggaggttattacttctctaattccgaatttatcatcactgactctttag

SEQ ID NO: 8829 - DNA, 405 bp, Homo sapiens
  III.2457 (AI150157)
tttttttttatgatcaagatggatttattcctgggatgcaataatattttaatatgtggaaatcaataaatgccatactccttatttacacaacaaaaagattaaaaatcatgacttttttatgcatgcctaaaattattttgacaaaatttaaaatccattccaaataaaatctataacaaattaggtatagaaagaatatacctcaaaataaagagatatgttctttataagctataggacaatcccatggttaacattattgccaatggtgaaattttggaattatttttaagatttattataagaaaaagatgcccactctcactacttctttcaacaccgtattggaaatcctgctcagaatctaagacaagagaaaaaagagcatttaaataagaaaca

SEQ ID NO: 8830 - DNA, 411 bp, Homo sapiens
  III.2458 (AI016163)
ttttggcttaaaacaatcattttatttttctcacaatttttgagtcaggaatttgggaagggctcagctggaaaatgttctctttgggtctttcttgcagttgtagttagatgtcagcttgggctgcagtcatctgaaaactttactggatgtccaagaaggctcactcaaatggcttatagtcgatactgcttgtcagctaagagctcaactgagctgttgaccagagtttctacatttggtctctacagcatgactgtctcagttggacttcttacatggcagctcagggctacaagtataagtgttccaattaatcaggcaaaagctgcatcattttatatgacttagcctaaaaggtcacacagccatcatttctgctatatgctaatgactgataaattcacaagc

SEQ ID NO: 8831 - DNA, 540 bp, Homo sapiens
  III.2459 (AI051969)
gtctgtcttggtcactgttgtatctcaaaagcctggaataaaaagaatatctctgaaatgaatgagttgcttaaggacctatatacaagacattcaagaagaaagagagaaagctcacacttccaggacctgaacaatatctgtgagttaaaatgtgaatgcagaaaagatctatgaaaaaaaaaaatagctgctgtaaatttaaggtagcaaattagaaggtgtcatcaactaagctcagcagaaaaagcaaatcctacagctacatcgaccaattatgagcctctaatcgctgccaggacctcaaacacattatcccagttaattctcacacaacacataacaactgcaggatgaggttctcacacccatttcacagatgagcaacctaagattagcctggaagctacaggagtgcacagaccctacctgttcccatcttgccatcataccaccagcatccagcgatatgctggcgggcagtaggtgtagaatatatagaagctgcataaaattaaaaaatatatatgctcagagagg

SEQ ID NO: 8832 - DNA, 297 bp, Homo sapiens
  III.2460 (AI271731)
  misc_feature (266)..(266): n is a, c, g, or t
  misc_feature (289)..(289): n is a, c, g, or t
agagcaggagtgaaagtttattaaaaagttataaagcaggaacatctttcttttatcctcgtgccctgaccggccacccagtcactgctgaccacttccaggggtggggagactttagctcccagcagagcccactccactgggggaccctgcttatggttggaaggcttctcttgggccatgacggccacagacccatgcctcccgctggatcactcctctgctgtgacctttccaatgacccccatctcacttggaggaaaagnctgagtccttagacaacacttanccgctata

SEQ ID NO: 8833 - DNA, 390 bp, Homo sapiens
  III.2461 (AI266201)
agcgattttcatattttaattctcattcacatggtaataaattttacactgtatgtgtacattatatatggtattgtacattttgtttatatctacgtttatatacatacctgttttagacattatatacatctatgcttatatgtatacatacacgcatatatatctttatatcttatatttacttacatgtatatatctttagctacatattcgtttgtatttctagactttatactatatatatgcacacatattttattaatatctactcatagtatgtggccttcacacatacttactattctattcctagttcattctttatattccattaaaataataattttttggaaggctggtcttctcctactaagtttgtttcaggtg

SEQ ID NO: 8834 - DNA, 512 bp, Homo sapiens
  III.2462 (AA470140)
tttgccatttccatttttatttgtggtggtaatgtgtgagataagtgtttgcttggaattgtggtacctccttttttttcccaaatttattttgtagctggtctgttcaaagaccacatattgcatttggttgtcatgtttcttttcatttagaacagtcccccctttccacatacttctctcaaacacttctctcttttgttgaagacaccaggccaatagttacatagaatgtcacaccttctagatttgtctcttgttttattcctcatagtatttaatttgtttctcaattcctgtgttcctacttgggttcagcttcagcattttcagcaaggataacagggtttgatatgttatcaaactctgtgacctttgtaacctgacagatgaaaatagcatctaaacataattttattttttgtattagaatgaggttgaaattttttccatatacttaaggaccagttacagtttcttttccatgaacttttcatattcctttcatatgt

SEQ ID NO: 8835 - DNA, 489 bp, Homo sapiens
  III.2463 (AI003552)
ttttttgcctgtattagacagagtgtgaactacggaatgataaaatgtagtcttaggcacagatcctgcagggaatagcttttgaaattctccaacatactaagttataattgggttttaatgcataaaatggctgagcaatttaaatgtttagaaaacagtctttcctagagtttatgaagtggtaagcctatttcttataatgattaactgtgagtcatcctttcaaatacaagcatccattagcatatgctcctcacaagaaatgctgcaaggcacttgccagtttaccaaactagtgtcttattatggcaaatttgtcgcagatttttatctgagaaatgaagatgggaagtaacgaaccatgaaccacattgagtttgctgtctacctgccttgccttactaggtgaagaacaatgttttaaaaacatataatcactatctgtctgcatgtagtcttgcttggagacagagaattcactacatc

SEQ ID NO: 8836 - DNA, 318 bp, Homo sapiens
  III.2464 (AI080072)
gcggccgccgaccctcggcccggccgggactttggggggcccgcgggcggggggagaggaggaggggaggcgggcgggggtgtcgggagcgcagggctccgcgaggaaaatcaggcgaagaataatttgggggaaaaaaagagagaggcaaactggaatcaggatcaaaaaaagcgcttccctcctcctctggccgatcctgccgccgccgatgattgttattattattttttggaaaggcttaagcctggggctcaaacttctctccctttctttctctctcctcttctttctctcagtcctagtcttaaagaggca

SEQ ID NO: 8837 - DNA, 393 bp, Homo sapiens
  III.2465 (AI219893)
tttgtgagtatcagtgatttattgggtagcttcttgaattttatttcagcaaacatttagcaagtgctattacgtgctacatactgtgctaagagctggaggtatgaacatgaatgaaatatggcccctatccttagtgtccacggcgtctcaagtttgtatatggaaataacatttcgtttgtatatggaaaagaacattttctttcacaagttcatttgttcatgttaacagacgaaaaagccatgggtgtatgctcaaggagctcacttattaacatttggtttataattttatacaagaacagaagtgaaaggtgttttttttaatctttgagtgagtcaatacacatctactgagcatttactatttacaaggccctatgcttaatac

SEQ ID NO: 8838 - DNA, 426 bp, Homo sapiens
  III.2466 (AA733006)
ccggggcacggacacggcgaggcggggcagctcgtcctccacgttgatgatctccacggtgcgcgtggcccgtgtgcttgtggagctggtgctgcttgcgccgttgtagaaggccacgagcatcaccgcggccatgaacgtgatggccacgaagcagccgatgatgattttggtggtcttcatgacgtcgtccaggtccttgagggcgttctccgtcacatccgtgatgggcaccgtgaacgccttctccgtgggccgcgagagcgcggcgcgggtgccgtggtagaagacgaggcagggcggccgcgtccccaggccgcctctaccccagacaccgtctgtcgtgggcctggcggttccttctccgtccccgcggctgagggctcctctccgggctgcgtctcagggtctcacggtcacgtgtga

SEQ ID NO: 8839 - DNA, 274 bp, Homo sapiens
  III.2467 (AA516148)
ggtcgacaatagaaagaatgaataaaacctatgatgtgatagcaaaacagggtgactatagtcaataataatttaattgtacattttaaaataatgaagagtataattggattgttcataactcaaaggataaatgcttaaggggatggataccccattttccatgatatgactgttacacattgcatgcctgtatcaaaacagctcatggatcccataaatatatacacctactatgtacctacaaacattaaaaaaaaaaaaaaagtcgacg

SEQ ID NO: 8840 - DNA, 325 bp, Homo sapiens
  III.2468 (AA429774)
gacgtcttcccgcactcaggcgccggttgaggtgcgctcctggcgaaggacaggtgctcctttcagccggttaacgttcagctcaagaccggattaagtctcttgctctccaaataaaattgtaaaggtttggaaatatagaaccacatttttaccaaaaacctactagagagcattcgtcagcttgcccttttcgccccgaaaaacgactttttcattcacagcctgtctcttcctctttttaaatttatgccgacagaggaagaagctgatatttaacaaataacaagaggttgcgataaatagaatttaaggtgggaaagca

SEQ ID NO: 8841 - DNA, 433 bp, Homo sapiens
  III.2469 (AA442864)
tttagatttttcttactttagtgactgagcaataacacaaaatccagcataaccacaaagcaattgatactcccatttaaagtgatgcagtctccgtatatcttacagcgattgaatagtaaagagacaaatgcgggtccattggagcgctccgagttaatttgtctagaacattgcagaggcgggataaatcgtgatgaactgctattgtccttatctttctcctgatttgtataattcctccacccaaaggggtggacacttctctgtgcctgaggggatgttttccattcttgtttctttgcgtaactgctgagctttgctgttttggaactattttaaattattcaaattactgatgcagacgtttggcaaatatgggcagaatgaggggccggcgggggtcatgatttgtaggaccccgggctcatca

SEQ ID NO: 8842 - DNA, 359 bp, Homo sapiens
  III.2470 (AA975414)
tttgcgtttggggatttttatttctctgtttggggttatttgctgtgaagaagacacagcctacaattaacagccagaacccgcgttgtcatgtctgcgctgtctgacctgagcgccaccttcccacccctcgggagagacttaaggcaatggagacattgactggtagggctccctggtgcctcccacagctggcgcatggcctctgtttcttgtagatgacctttccagctctgaaattctccattctaagtgacaccaccagaacttcttgcttattaatgtgcacagcatgcttgtcttctgtgcatgtacattactaaatgtttggcctgtccttcccctctcgtggactatgt

SEQ ID NO: 8843 - DNA, 229 bp, Homo sapiens
  III.2471 (AA971916)
tttagaacaacagtcatttattgtttcacagttctggaggccagaagtttaaaatcaaggtgtcagcagagtcatgcaccttctgaaggcactaaggaaggatctgtttcaggcctctctcttagctttcaattcaacccacaaaatggggaaaggtactgttattccctaagacccccacagaggaaagctcatgcagtagaacaggtttgccgatagagagatgaat

SEQ ID NO: 8844 - DNA, 524 bp, Homo sapiens
  III.2472 (AI022238)
ttttgcatacagagagccaatttttccatttgttagaaatatttattttatccattgaattgtcttgtcacctttgctgaaaattagttgacaagtataagaatagaccttattctggtctattgatctatatatctatccttacaccaacaccacagtgtcttggtaatagctttatagttagtgttgaatcaggtagtgtaaattctctttgttctttgttttcaagacctctttttcaccaacctctttcacatagccacagccagaagtccttccgacccacaacagttttaaaagtttatatgatgcgtcaattcagagatggctaactggtctgttgcatgagtaaattataataactggtgctaaatctgcatgttttatgggccattattcatttaggtaattacatgaattatctaaatgtagctatactggtataactaattaatatgagtacctttgaatcatctgtattaatatcaacaacaaaaaataaatacatatttgtacctgctgct

SEQ ID NO: 8845 - DNA, 498 bp, Homo sapiens
  III.2473 (AI142288)
ggccttcagaggagtaaccgtgatcagattaagaactgtggatttttttatggccacagtgcattttcagtagcccttatttttgtaactgcattccagggcctttcagtggctttcattctgaagttcctggataacatgttccatgtcttgatggcccaggttaccactgtcattatcacaacagtgtctgtcctggtctttgacttcaggccctccctggaatttttcttggaagccccatcagtccttctctctatatttatttataatgccagcaagcctcaagttccggaatacgcacctaggcaagaaaggatccgagatctaagtggcaatctttgggagcgttccagtggggatggagaagaactagaaagacttaccaaacccaagagtgatgagtcagatgaagatactttctaactggtacccacatagtttgcagctctcttgaaccttattttcacattttcagtgtttgtaatatttatcttt

SEQ ID NO: 8846 - DNA, 346 bp, Homo sapiens
  III.2474 (AA426043)
ttttccagtatactctgtttactaaggcagggaagtgcgtaatacattttagaaagatttccctcaaaaaaaaatatattaaaattttaaagattcagcacttaaagggttaatcctcggttatctgaatattcacatacattcctcattttacaacaatactagtaaatgaggcattacctttttttgtagtcattagtatcaaattattggcaccattcagttttaaggagaggggcaggagagcaaactatacaatataacataaaaatacagttctgatacaaatatatgagatcagttcctcttaacaagtggtcataagaaatgaatgaacattttacac

SEQ ID NO: 8847 - DNA, 425 bp, Homo sapiens
  III.2475 (AA428078)
gaatattcagaaaattatttctaaagttgatcgattcatgtcgtattgatagaatcttgaccagaagaaattttgctctttttatatagtttcaagaaatgtgtttttaaatttttattaatgcacttgaacaactttgcaggaataaagcaaccccctaaccacaaaatatccctctaaattagttccctagctttctcaatgaatacacacatatttttacatagctatgatcgttgtgtacattctcctttgttttacttctcggcctaacacttgtctcctcttgtcaacacagattctactctcaccaatttaaatgtctttatatccatgttacatgggtaacctcacttcaccccattattagatatttgagttatatctaatttttcactcttataaatagtgctgctatgaatgtc

SEQ ID NO: 8848 - DNA, 512 bp, Homo sapiens
  III.2476 (AI125217)
tttagtattattctgattttattttgcccttaactgattgttatatgctacaagggatttcagtggactgcagagtgcgaacgtcttgctgttgtgtttttatgtcccaacctagaaaccttagctgtcttttctggagttgtctttcatgcttttccagtgggatcaagcccttttccccaagagtcccatctcttctgccatgcacgacatgaaaatccacttctcttccttctccttcttctctctctactttacagtgatacacacacgtatttaaggactatccctgagaccatccttctcattttggaaactgctagggagggaaccaaccacttaaacaagcgtggttttccaagatccaggcaattgtgtgctgttggttgtggtggaggatgtggcacatatatacgtacctacacggttctctaacagagctttctgtatctatagatagatgccatctgtccatttctatgtatctttctataaatatacactctcaggta

SEQ ID NO: 8849 - DNA, 337 bp, Homo sapiens
  III.2477 (AA282704)
tctcgtagccatttttctgcttcttggagaacactggacagctgaataaatgcagtatctaaatataaaagaggactgcaatgccatggctttctgtgctaaaatgaggagctccaagaagactgaggtgaacctggaggcccctgagccaggggtggaagtgatcttctatctgtcggacagggagcccctccggctgggcagtggagagtacacagcagaggaactgtgcatcagggctgcacaggcatgccgtatctctcctctttgtcacaacctctttgccctgtatgacgagaacaccaagctctcggtatgctccaaatcggcaccatca

SEQ ID NO: 8850 - DNA, 473 bp, Homo sapiens
  III.2478 (AA284634)
aacagaaacaacatttggtttatgcctccactggattccaagattcccagtcaccatcacttcgtagtagagaacgtttccaccgtcattcgaatgaaaccaattcatctcattttctgatgaaatcagtaacatggaagtctcaaatatttcagcaccgtaatgttttgtcaaagtttccaaggtagccaagtatttcaccttcaggtcatgcgtggacaccgtgctgtcacaaatggtcttgttgttaaattcctttaggaaatccttgaaaacattatttatccgcatcctggtgagaaggttcctctgtctgatggacttattcaatgtttctggaatatatcgcttgtagctgatgtccttgggcagttctggcaactgcatcttcttcatcatggcatagtgtgagatggccaggacagccatccctagacactcgttctcaatatcatgtccatcctgctcggtct

SEQ ID NO: 8851 - DNA, 506 bp, Homo sapiens
  III.2479 (AA609685)
gcgaccgcctcactcccggagaacccgacggcggtggcggtccggacgacttgctgccgctcccgctgtggctggtggcgagggatcttcagaccgcaagacgagagaagaaaaagcgggaggaaggacaagagcggccagtcaggagacggacggggcgagacgcgggacaaaacgcgcagcagcggtttacctaacactgtaaagagaacgttcaatgaaatacaaagaaaaagatgatttttttgctccaagagaattattccagccttggggtggagtgggtgtggacagtgagcagaaaaacaagaaaccaagttctgggaggaaataaaatgaatataatcagtggaaaattcagcaacgcaatattgtgtgacaacagtaaatgaccaatttataatttaaattctatgaaaaagagatttagaagagagttctaccaaacccactgttccctagggaataaaatgagtaacgctgactggcaacagtgcatcctgagg

SEQ ID NO: 8852 - DNA, 745 bp, Homo sapiens
  III.2480 (AA868393)
ttttttttttgcatccaaaatattttaatagtaaagaataaagaatgaccctcaataatgcattcttagcattcaaaggctaactttacaaatttgaaaacttagtaaaaacagttttcatgaatacaagaaaaagtaacaacaatatataatcatctaattatctgaatacaatgacaggtttccagacaatatgtagttaacatttaggctaaaaatataaagaaacacaaatcattcatgcaagtattttttaagtctcaacttccagataaaatttggctctggcaaataagaacaaaatattaactataagtttcacgttattaggctccttaactacactgattctctgaaattaaacaaataacttttcagcttcttttagttttttttttctatccattttagcaattacagcccaacggtcctcccgcatttttcttatagctccaaacttcagtgtagatccaggggttgttagagatgaaggggccttttttggtgttttgacacaaagatgagaagctggtggattaattgttcctatacagtgttttcaatgtctcttcttctgaaagcatgctcaaagatcaggtagtttctgaactacctgaattagtatcaatttcagaggccatttttcgtctttttttaccttcttcaaggggaatatcacagtttctcccttggctgaagtattgggtttggtgggtgtcccactgttatatgcccttggaatggg

SEQ ID NO: 8853 - DNA, 436 bp, Homo sapiens
  III.2481 (AI312884)
ttcactttctggcttttatctagttttaaaatacatttcaagggtcatttgaaaatgacacaaaccacaaatatgaaaagaaattcaaatattatcacactccctaataaaacagcctaattaccaaaggctcacattttagcaagttaattctaagacttaagctgtgtacggcgtgtgcaaatttgcaaataccttaccatcacatgcaagtgtcttactgctactgaaagctatcagaccctttcaggaggcgcgttgtaccaagcagacctaaatgtgaactttcatcaaggacctttttaggaggcgtattgtaccaagcagacctaaatgtgaactttcatcaaggactatgtgatgtcaagcaaggcagtacccatgtatttcattcaaaaaccagctggctctcctgtgtttttatttttttttttga

SEQ ID NO: 8854 - DNA, 400 bp, Homo sapiens
  III.2482 (AI262776)
tttgcctttcaaatgtgtgggtccccacccatgagtggatcccaaagtcattttattggattgcaaccaacagtgaaaaataaacagaacagaacatactggaggacgtcccccagggaagggtaagtattgttttgtgacatttttgttttggtcgtttccgtgtgtgtgcgctgcaagtctcagtgtgaagtatatttcttactgtgtgttgcaaccaaaaaagttcgaaaagtccctcgtccaaagaaccagtgaagacatcaaagaccccttattgaaagtgacgggagtgagaagtggttcaagatatttgcctgggccgggcgcagtggctcaggcctgtaaccccagcactttgggagaccgaggtgggtggatcacctgaggtcaggagctc

SEQ ID NO: 8855 - DNA, 401 bp, Homo sapiens
  III.2483 (AI266213)
ccatttaaatgctatagccatttattgatggttatagcatctggcttccaccattggtaaactcaccacttcatacagcaccaattacacatgcttacaagcaagagactcaaaacaaaacaataaataaaagaaacatgggggaggcaacttcttaactgaactttcatttttctgtaacattatattatataaaccttctgtagcacctacagaaatctaaaaatagagattagaatctattgtggcagaaaataagtttgtcactacatcaaccagccacatgggagttaatctcattaacttttatattgcaggatgatgcataccttggagagatgagttcagtggtaaatgacatgaatcttggaatttctttacattaatatctacttcttctg

SEQ ID NO: 8856 - DNA, 446 bp, Homo sapiens
  III.2484 (AA129735)
  misc_feature (30)..(30): n is a, c, g, or t
  misc_feature (418)..(418): n is a, c, g, or t
atgttccaaatgtgatgggtttattttatnttactatgatgcaaaaccaaagattccactatagcacagagaccagtatattacaaggtcatgaaaaaatggtgtgggacatgcaggacgtgatgtacaaactggtgggtcagatcgtctcctctaacatgacgctacactgtcgctgaggaacacatttaataacacttcagaactgaactgaaacgtggcacaaacatgacaacttccaggcatgccttcaagcatctccctcaggagggattcgcaacccctagacttcagtgtggggaggattacaatttctttggaagaataaaaagttcacacttttgaaatttcacagaagaattttaaggccaaaacatagtgggttcatttctcttcacttccgggacaaatctgatgntttgcctcaaaaccacttaaggcttccg

SEQ ID NO: 8857 - DNA, 768 bp, Homo sapiens
  III.2485 (AA133349)
  misc_feature (617)..(617): n is a, c, g, or t
  misc_feature (643)..(643): n is a, c, g, or t
  misc_feature (649)..(649): n is a, c, g, or t
  misc_feature (667)..(667): n is a, c, g, or t
  misc_feature (705)..(705): n is a, c, g, or t
  misc_feature (718)..(718): n is a, c, g, or t
  misc_feature (726)..(726): n is a, c, g, or t
  misc_feature (766)..(766): n is a, c, g, or t
gtaactatggacttaccttcacccagaaatggaacacagacaatactctagggacagaaatctcttgggagaataagttggctgaagggttgaaactgactcttgataccatatttgtaccgaacacaggaaagaagagtgggaaattgaaggcctcctataaacgggattgttttagtgttggcagtaatgttgatatagatttttctggaccaaccatctatggctgggctgtgttggccttcgaagggtggcttgctggctatcagatgagttttgacacagccaaatccaaactgtcacagaataatttcgccctgggttacaaggctgcggacttccagctgcacacacatgtgaacgatggcactgaatttggaggttctatctaccagaaggtgaatgagaagattgaaacatccataaaccttgcttggacagctgggagtaacaacacccgttttggcattgctgctaagtacatgctggattgtagaacttctctctctgctaaagtaaataatgccagcctgattggactgggttatactcagacccttcgaccaggagtcaaattgactttatcagctttaatcgatgggaagaacttcagtgcnggaggtcacaaggttggcttgggatntggttntggaagcttaatgtggtntgaggaaagcatcagatttgtcctggaagtgaagaganatgaacccactangtttgggncttaaaattcttctgtgaaattttcaaagtgtggagcggngg

SEQ ID NO: 8858 - DNA, 602 bp, Homo sapiens
  III.2486 (AA453195)
  misc_feature (389)..(389): n is a, c, g, or t
gcggttacgaggaggccgcctcctgcttgccggcctgcggtcctactcgacaacgcaagatttcaaaaggggaattccttcagggcttgattacaaggaagaaagcgatttcctccgcctcttccaaagcggtttggaaattgctctcttcatgtcatcataataaaccactagaaacttgcatttacttttgactgattaatgaagtgtctggttatggagaacaaagaaattggagaaatgtgaagcttaagcttctgctgtgctgcagcgaagaagtctgggaagtttaggaagatatcctcttgactaaatggggctaaatgtcagcagaattgaagaaaagtaaaggaacttaccaatacttgatcgagacagtgctaaaatanaacacatcaaaagaagaatgagttctgtttgtcccagggagaacttagatgccatagacactatattgcagaaaggttgtggaaaagaagatagaaatgagtcacaacttatttcctggtatcaattgcaatgcaatgtggtgagcagctggatatctacatatggattccaatacttttgtggtaaggtgggactacaagatctatgcaacc

SEQ ID NO: 8859 - DNA, 418 bp, Homo sapiens
  III.2487 (AA454148)
ttttttttgagaaactagcaatctccaaaaatatttttattctcttaccaaaattgaaagacaggttgcatagatcttgtagtcccaccttaccacaaaagtattggaatccatatgtagatatccagctgctcaccacattgcattgcaattgataccaggaaataagttgtgactcatttctatcttcttttccacaacctttctgcaatatagtgtctatggcatctaagttctccctgggacaaacagaactcattcttcttttgatgtgttttattttagcactgtctcgatcaagtattggtaagttcctttacttttcttcaattctgctgacatttagccccatttagtcaagaggatatcttcctaaacttcccagacttcttcgctgcagcacagcagaagcttaagc

SEQ ID NO: 8860 - DNA, 138 bp, Homo sapiens
  III.2488 (AA873338)
ttttttttttcatatttgcaacttttattagaaaaaaatccatgtataagtggacctgcacagttcagacccacgttcttcaagggttaactgtactttaaataaaatatacaccaacagattaaatggagaagcaga

SEQ ID NO: 8861 - DNA, 522 bp, Homo sapiens
  III.2489 (AI733020)
ttttttttttcatatttgcaacttttattaaaaaaaaatccatgtataagtggacctgcacagttcaaacccacgttcttcaagggttaactgtactttaaataaaatatacaccaacagattaaatggagaagcagaaatgagaaactcagctattttctcataagccagatattaaaatgtaaaagaaggcctctcttctcactacattttttgctttggaaaacaaagtgatttttaataaaaacatgctatttacattagcttacaatgggtttattatttttaaatgtttataaatatttaaaaattttttcagtttcaagttataatacagtaagtatcagtagttatgacccacataattgaaagttctttggagttctcaataatttttaaggctgtaagggtcctaagaccaaaaagtttgagaacccctgctgtacagtatttcattgtgagcagggatttaaatttagcagtcacttctgggaatattcttgagatagttaatatttagct

SEQ ID NO: 8862 - DNA, 557 bp, Homo sapiens
  III.2490 (AI791418)
  misc_feature (495)..(495): n is a, c, g, or t
  misc_feature (502)..(502): n is a, c, g, or t
agaatatcagagttttgccagaaacccttgagtctggagtggtacggctggagtccagattgcagtctgtggaggagtggacaggagaccaagaaattctcgagttctcttcagagaccaactggggatcaacaattcaatttaattctgacacccaaggaagaagagagtgcacctgatgtagtagccactgtaagaactgtgttggagaatgatccgattggccagtgcaagagggattgcagagaagaagaaaccacaagcagaaaaaccagatgaggaaattaagctaaatattaactatctcaagaatattcccagaagtgactgctaaatttaaatccctgctcacaatgaaatactgtacagcaggggttctcaaactttttggtcttaggacccttacagccttaaaaattattgagaactccaaagaactttcaattatgtgggtcataactactgatacttactgtattataacttgaaactganaaaattnttaaatatttataaacatttaaaaataataaacccattgtaagctaatgtaaata

SEQ ID NO: 8863 - DNA, 378 bp, Homo sapiens
  III.2491 (AI269444)
tttttgccaccatgacggctaatttttatttttagtagagacagggtttctccaggttggccaggttggtctcaaactcctgatctcaagtgatccacccacctcggcctcccaaagcgctgggattacagatgtgagccattgtgctgggcctgagttctagtaaagccaattcaggactgacccgtagggccctgtgagaatcccttcttgctctggcacctctccttccccattatctagactctacagttcacctctctcattagctatagtttttgccaatcttggggctccaaagtccctctttctttaccccctcctggtgctacttccctgtgcaaagcagtgcttccagaatcataagccccatgaggg

SEQ ID NO: 8864 - DNA, 445 bp, Homo sapiens
  III.2492 (AI042323)
ttttttttttttttttttgaagatgtacatgacaaacatatccatacagttcattgtaacattacaattcccaaatcctttgggaaaaatccacctacacacacagtctctttttatctaagtggattcaagatgctcctttttacaaaacttaaaaagattttgcagtggtggcactccagcctcaagtgagtagcatagtcctgcctatttaaaaacatcttagtattccatttcactcttaagttttgggttccttccattccattagggaatagaactttgcatctgatgacaaattcagtttaccatgagactacaccacatttaaagtaaactggccaggtgcggtggctcacgcttgaaatccaagcaatttgggaggccaaggcgggcagatcacttgaggccaggagtttgagaccagcctagccaacatggcaaa

SEQ ID NO: 8865 - DNA, 236 bp, Homo sapiens
  III.2493 (AI184524)
tttggagaactttcattttatttgcaggacttcccagagcaaagccatgagtgtagtgacagtggtgacatcctttgcctccctttttaaatggggaggccaggggaagcgggagcgtgcttaggagctgactgcgcacagaaggtggggcttccttcccccaggaaggaggaggagggagaaggaaggcaggctggcccagggaggtggggaagaggaggtatgggtcatggggg

SEQ ID NO: 8866 - DNA, 459 bp, Homo sapiens
  III.2494 (AA508861)
atgtacacaatggtttattaaaggaatgtatggcccacatcaacctagcaaggattctactggtaaaccttcccatggccaaaggaaaaacaagcaggagttgagtggctggggtggggtgcaggcaatggagagagggcagaagggtgtagaagctgaagggggctagaagcttactcctgagtttcttccttctgtcttcaaatctttacttcttatggccaaagacccagctgtttcataggctggagatgcactcttctagactgctcgagacagccagagacaggggaggagggaagaaggatactgtggaaagggatggcggggcaaacatttagagctagaagccactactgggccaatgctaaagtttctgtctctaagcctaaaaaagccagtgtagtagggcccttatcactcttagtttgctaggtttcccctctgaaataatgagca

SEQ ID NO: 8867 - DNA, 525 bp, Homo sapiens
  III.2495 (AI732541)
attttcacaatggtttattaaaggaatgtatggcccacatcaacctagcaaggattctactggtaaaccttcccatggccaaaggaaaaacaagcaggagttgagtggctggggtggggtgcaggcaatggagagagggcagaagggtgtagaagctgaagggggctagaagcttactcctgagtttcttccttctgtcttcaaatctttacttcttatggccaaagacccagctgtttcataggctggagatgcactcttctagactgctcgagacagccagagacaggggaggagggaagaaggatactgtggaaagggatggcggggcaaacatttagagctagaagccactactgggccaatgctaaagtttctgtctctaagcctaaaaaagccagtgtagtagggcccttatcactcttagtttgctaggtttcccctctgaaataatgagcagatttagccaggctagcagaaaggaagaggacggggctgtgcaggagttagcagaatcttgattct

SEQ ID NO: 8868 - DNA, 526 bp, Homo sapiens
  III.2496 (AI791498)
agagtcttggttgccaaacagatttgcagatcaaggagaacccaggagtttcaaagaagcgctagtaaggtctctgagatccttgcactagctacatcctcagggtaggaggaagatggcttccagaagcatgcggctgctcctattgctgagctgcctggccaaaacaggagtcctgggtgatatcatcatgagacccagctgtgctcctggatggttttaccacaagtccaattgctatggttacttcaggaagctgaggaactggtctgatgccgagctcgagtgtcagtcttacggaaacggagcccacctggcatctatcctgagtttaaaggaagccagcaccatagcagagtacataagtggctatcagagaagccagccgatatggattggcctgcacgacccacagaagaggcagcagtggcagtggattgatggggccatgtatctgtacagatcctggtctggcaagtccatgggtgggaacaagcactgtgctgagatgagctccaataacaac

SEQ ID NO: 8869 - DNA, 379 bp, Homo sapiens
  III.2497 (AA973118)
tgcctgttttattcagttatcacctccagctttgtacttcagcagctgactttccttcttcactggggagcaaatctgcacttgccttaaatgaatttctatttttgactacttttcaaatttatcacattttttcctaaagtactgagaactaacctcatcttgtatttcttgcagcttcccaatgctgagggagtcttagaggcatttgctttgtttttattaggagtatggtttatagtcacccagccagaatgtgatatacaagggtttacaaggaaaagtagaaatgggtgtagatgtatgtgcttgttgtaagaaaaatttacacttacagatgaaagatccatatataatccagccacataccatggaaagg

SEQ ID NO: 8870 - DNA, 415 bp, Homo sapiens
  III.2498 (AA450288)
atgttctgtggtcgttgtttattctatggttcacgtgtgtcaacttcctctccctccacacagcacactgaacccgaagagttgagtatcctgtgtcctgaacatgcatacaattgtcagctccagatgctgcccaccccgaggcaggaaggggctcacttccctctcctcgaaggtggccagccccattctcaggaggcaggtctagaaggcaggtcactaggcagtttctgggagcttgagcactggctgctcctgatgtgggcactctgcttcagtggctagatgaggactcctgtgtagagaaaggagccagacaggcctccaaagtagataagagccaagtgctccagtttcagaggggacaggtagtagaggcaagcggcacagacgcagcccaacgtgtagaggaaga

SEQ ID NO: 8871 - DNA, 349 bp, Homo sapiens
  III.2499 (AA450289)
gcggccgcggatcagccgtgggctctaacgcggggctgggggccggagacagacttcgcccaggtgacgggtagtaggggcggcgcgcttggcctcgtggggtgtaagaccacttgctgttgccccggaccttgccgccacaccagccctgtcctggggcggaaccgaagtaaggtcgggccctgctgccccgccccgtccttccttcttcccgggcggtcactgtgcgtggctcacttttagagtttacttcaaccacgtggagcttccatggcggcctctcaggtcctgggggagaagattaacatcctgtcgggagagactgtcaaagctggggacagggacccgc

SEQ ID NO: 8872 - DNA, 328 bp, Homo sapiens
  III.2500 (AA932818)
ttgcaggagaccagggttttattattactcaaatcagtctcccccagcgtttggagagcagagtttttaaggacaatttggtgggttgggggaagccagtgagccaggagtgctgattggttagggatgaaatcacaaggagtcgaagctgtcttcttgcgctgagtcagttcctgggtggagggcacaagatcagatgaaccagtttaccgatctggatggagtcagctgatccatcacatgcagggtctgtaatcccaaaggtgggaggatcacctgaggtaaggtgttcgagaccagcctggccaacggggcatggtggcacatg

SEQ ID NO: 8873 - DNA, 400 bp, Homo sapiens
  III.2501 (AI038135)
attttattcatccttgctgggtgcaacacatgcatggctcagtaactagaaggaaagaagagaagaagggagggagaggcagagggtggacaggagaggatggtaggaaggaaagacaggaaaggagggtgttggtggccttgcctgcaagctgagcagacaccacgcaaacaggtgacctcccagttaagatggaggggactcagggctcaggaggggcagaaggtccccgtgtcggagagctgggcaagctttctgcaggaaatgatggggatcacggccatgtgagccggcaagatttccctcagccagggaggagactccgggctgtgggaacagcttaagcagaaggcatgggacaggaatgcatatgagagatattgtgggaggagggagggct

SEQ ID NO: 8874 - DNA, 454 bp, Homo sapiens
  III.2502 (AI142824)
ttttggttaccattctttaataaggactaataagatgtaaatgtggtgattaatttagcatgtttcctcatctgtaaaactggtggtttaaaatattctttaaattatctcccaactccaaaagtctacaattctgtcttaaagtcttaatttattcaatctactatcaatcctacccagagcattttcctaaattccaaaaactcagaaatcacagatttctaagtcctaggtaaggttgtcatacgccaaaggaaaacccagttaagtgtgaaattcctactaaataacttccataaataaacaaacaaaacctaccttgcaaggaattcgagtaactaaaatgaacactaggcaaacaactataaagaaacaaaaagcttacaacatatattatgcagggtagaaagagcaggggactgggaatcaaggagctgctcctaggggcagttct

SEQ ID NO: 8875 - DNA, 330 bp, Homo sapiens
  III.2503 (AI350963)
  misc_feature (309)..(309): n is a, c, g, or t
cagtcagacttttaataatttccatttctggtaaatttccaatctgtctagatataatagtgaggaaatgaatgattcaatcttaatgatattagagtcatgatggaaatggactcaactcacaaaaagccattttttggcaacatcagctatgttttcattcaaaccagttctgaaacagtttttccttccctaatcttaacacttattactcttaactacaaatttgagatttgctttctttttatggattctgtaagttttttactaaattacttgcttaatgaagatcttgaaataatatccatnttaagtaaaactaaagaaatg

SEQ ID NO: 8876 - DNA, 505 bp, Homo sapiens
  III.2504 (AA150965)
  misc_feature (498)..(498): n is a, c, g, or t
  misc_feature (504)..(504): n is a, c, g, or t
ccaagtctagatctataaatatatttattataatataacaagaacttaacagtaaacatatactatgtacaataccattacagagaaccctgttttatatcattcacagaaatagccagttttgctccagtgtgatagatgaggagagaaacgaatttcaatgtcatctgtgttgagtctcgctgacaactagaacctcctttggagcaagacgcacaccaatgctaacattagccctgccccaggcagttaggaatttgtgctccagtccttgggttcacacttgcaccctgtttgacataaatactttaaatgacatacaatgtatgtagttttgtgcttattactttttaaaataataaataatattaaaaactgcataacgaagctcggtatcttgtccaagtgggagccacactcgtagtgctagaagttgatgcccaacgttagaactggaattttgtgtcatcaaatactggaacgatggaaagcgtgtcngtcctng

SEQ ID NO: 8877 - DNA, 368 bp, Homo sapiens
  III.2505 (AA151074)
  misc_feature (22)..(22): n is a, c, g, or t
  misc_feature (211)..(211): n is a, c, g, or t
  misc_feature (254)..(254): n is a, c, g, or t
  misc_feature (267)..(267): n is a, c, g, or t
  misc_feature (282)..(282): n is a, c, g, or t
  misc_feature (295)..(295): n is a, c, g, or t
  misc_feature (313)..(313): n is a, c, g, or t
  misc_feature (320)..(320): n is a, c, g, or t
  misc_feature (332)..(332): n is a, c, g, or t
  misc_feature (338)..(338): n is a, c, g, or t
  misc_feature (352)..(352): n is a, c, g, or t
cgagaaaaagacaggacacgcntttccatcgttcagtatttgatgacacaaaattccagttctaacgttgggcatcaacttctagcactacgagtgtggctcccacttggacaagataccgagcttcgttatgcagtttttaatattatttattattttaaaaagtaataagcacaaaactacatacattgtatgtcatttaaagtatttntgtcaaacagggtgcaagtgtgaacccaaggactggagccaanaaaattcctaacntgcctggggggggcntaatgttagcatnggtgtgcgtctgcctccnaaggagnggctagttgtcngcgggnctcaacacagatgncgttgagattcgtttc

SEQ ID NO: 8878 - DNA, 201 bp, Homo sapiens
  III.2506 (AA428300)
atttttatttatttatttattttttgccaaggttcaggacagatccaggtgtctttctccaaagatgattatgatggtgttaatatttaaaggggaaagtggcctagaggggaacaagggagggtatgatcatattactgtatccacatgttgcaggagaaatggagcaggtacaggaatagtcaattatgtgttcttctc

SEQ ID NO: 8879 - DNA, 224 bp, Homo sapiens
  III.2507 (AA428715)
tgaacttatgtaaagtctgatttactgagcatgagaagaacacataattgactattcctgtacctgctccatttctcctgcaacatgtggatacagtaatatgatcataccctcccttgttcccctctaggccactttcccctttaaatattaacaccatcataatcatctttggagaaagacacctggatctgtcctgaaccttggcaaaaaataaataaata

SEQ ID NO: 8880 - DNA, 469 bp, Homo sapiens
  III.2508 (AI042600)
  misc_feature (465)..(465): n is a, c, g, or t
tttttgatgtgacaatgttaggtttattactactgttaaggtaacagaatcaaagcttctgtagatctcaaaaacagaagtttattcataaaatgcatttttaaagtatgaccaaaaataagactacaaaacccctacaatcttgtacatttcaccatcacttaccacagtcaaaaaccaaaagtctcaccaattcagttcctgtattttaagtaaaaaagagctctttaaaatcaaagcattttgttttatgaattaaattgcagaaaatagctacccaaatctagaccaaccgtgccgttttgagatatatatatatatatatatatatatatatatttgtttttttttttttttgagacggagtctcactctgtcgccagggctggagtgcagtggcgcaatctgtagtcctcagcctcccaagtagctaggactacagatgcccgccatgacacccagcanattt

SEQ ID NO: 8881 - DNA, 483 bp, Homo sapiens
  III.2509 (AI126110)
tttgtttgcaagttctctatattactagctgttgaggcagtatgtttaagagctgaagttacctctagcggcgaaaccagagccagttactaagcagccacaatcctatggtaattgaatacatgaccatttctctcttggcacgttccttgttctcctcttctagatgttgcaagcgtctatttagtttgattatctgtcgtcttaacgaagctgcatctgcaacagtcatgtcatccgaagttccttcacttgtatctatgtttgaagtgccatacctgatgttgtcacgatgcggattagaagtggtagcagcagacctgccatactgcacaggtctgcgattttcacccatctcatccacgatatgctggtaagccctacgagtagaagactggataaatgacagaatgccatgaacagaggaaagattagttctattttcgggtaacatgttgggaagacagcttcttatggtgatgg

SEQ ID NO: 8882 - DNA, 317 bp, Homo sapiens
  III.2510 (AA029062)
ctgggcccaaacaactgtacattgtttattgagaacacccagtagatgggaaggagggatgccctgtaccgcatcgtggccaccactgactgggagccaggcccagagagcactggcagagctgggggtgggcttcccatgacacactgaccatctcggagggtgggaggaatgagaggactaaggcctaagaccctggtgccatgctacaaatggggactgattggcctttgcctttcaaaaacagagggtatgggtatgcggactaccagcaaaaaattagaaacttgatttttttaaaaggtcctccctgtaca

SEQ ID NO: 8883 - DNA, 437 bp, Homo sapiens
  III.2511 (AA029166)
  misc_feature (251)..(251): n is a, c, g, or t
  misc_feature (346)..(346): n is a, c, g, or t
gctctggagaggaagaatgagctgatctcccaggactctgacagcgactccgacgatgaatgtaataccctcaatgggctggtgtcggaggtgtttatccggttctttgtggagaccgttgggcactactccctttttctgacacagagtgagaagggagagagggcctttcagcgagaggccttccagcaaatctgtggcctccaaaagcatccgccgctttcttgaggtttttatggagtctcagatgnttgctggcttcatccaagacagggagctaagaaagtgtcgggcaaagggcctttttgagcagcgagtggagcagtacttagaagaactcccaacnactgagcagagtggaatgaataagtttctccgaggtttgggcaacaaaatgaagtttctccacaagaagaattaagcctccttctcagtag

SEQ ID NO: 8884 - DNA, 347 bp, Homo sapiens
  III.2512 (AA650138)
gcgtcgaccaaaagggaattttaaacagggagtgaacttttgtgttttacagagatgatgttgctgcaaacactcattggagtgagagagaccaaaggcaaagaagtcaagtaggaggtctctaggtgaagaattatgaggccctgaatcagggcacagcagtaggagttggtggaagacatttaagagggggaatttataggttgtggtgactgcttggatgttaaaaaggaactctagaaagacacgtgctggttgagcgcagtggcttacatctgtcatttgagcactttgagaggcccagcactttaggaggccaaggcatgaggactgcttgaggctaggag

SEQ ID NO: 8885 - DNA, 465 bp, Homo sapiens
  III.2513 (AI223062)
tttgattttaaaacaaatttattattacctttcatgggaacaatatgaacaataaaaagtgcacagggtattaatgtatatgtaaatagcttgttttggcaagactgaaatgtaagtagggcaaggaaacgaaagaagacaagagttaaaaataaactggatagcacaatgagatacaaccacacatccaccagaatgactaaaatttgaaaaattgacactaaatgttgacaaggatgtggatcaaatgctctgtgtgtaaaatggtacaaccactttgggaaaaggtctagcagtatctaataaaactaaacatacacatactctatgacccaattattccaatcctaagcatttacctatgagaaacgaaaatatatatccacaaaaagatctgcccaagaatgtttatagcagctttacttataattgtccacacctaaaaacagccatgtgtccatcaac

SEQ ID NO: 8886 - DNA, 232 bp, Homo sapiens
  III.2514 (AA702241)
ccagtctggatcaaattcacagaaagcagcacctgcttcaatctcttttctgtactttgcttcaatctattttctgtactttgtcctgcccttggtctgtgggagcagctggtgcccaaaggtgaactcagtttgagtacagaacggtgttcccaactgctctgggaaccctggaatggagttcctaagaagtgagacttgtgactggcttagtccattcttagatgtgtgg

SEQ ID NO: 8887 - DNA, 333 bp, Homo sapiens
  III.2515 (AA411025)
tgttgttgaacgtttattgagctctaacaatgtgacaggtgccacacaaaacattagacacagtacctgcccagtggcgttacaatctaatctaaggacatgaatctttttttttttttaaagacagagtctcactctgtcacccaggctggagtgcagtggcaaatcttggctcactgcaacctccactccccgggttcaagcaattctcctgcctcagcctcccgagcagctgagattacaggcgtctgcaccacgcccggctaattttttgtattttttagtagagatggggtttcactatgttggccaggctcgtcttgaactcctgac

SEQ ID NO: 8888 - DNA, 445 bp, Homo sapiens
  III.2516 (AA446860)
ttttttttcgaactacatttattatgtgaggcaatttcaaaggcttttaaagttataacaaagccagtaatctcttgatttcaaaatggataaaagctctagaagtggctcttgccgactggcaaatcccccaagttatcgttgctgtccttgccttgctcttcattgaagaatcccagtgtctcttcatagtatcttatttatttatttatttatttttctgagacagagtctcgctgtgttgtccaggctggagtgcagtggcgcgatctcggatcactgcaacctccgcctcccggcttcaagcaactctcccacctcagcctcccgagtagctgggattacaggctcgcggcaccacgcccggctaatttttgaatttctagtagagacggggttctgccacgttggccaggctggtctcaaactcctgaccccaggtggt

SEQ ID NO: 8889 - DNA, 608 bp, Homo sapiens
  III.2517 (AA446974)
  misc_feature (447)..(447): n is a, c, g, or t
  misc_feature (468)..(468): n is a, c, g, or t
  misc_feature (482)..(482): n is a, c, g, or t
  misc_feature (485)..(485): n is a, c, g, or t
  misc_feature (512)..(512): n is a, c, g, or t
  misc_feature (527)..(527): n is a, c, g, or t
  misc_feature (545)..(545): n is a, c, g, or t
  misc_feature (566)..(566): n is a, c, g, or t
atttcggcacgaagggttgctgctgctgttgttaatctttagtaccagtactatgtatgaagtagtactaaagaatctgtctttggtaccagtactatgtagtagtactaaagaatctgtctttggtaccagtactatgtagtagtactaaagaatctgtctttagtaccagtactatgtagtagtgctaaagaatctgtctttagtaccagtactatgtagtagtactaaagaatctgtctttagtaccagtactatgtagtagtactaaagaatctgtcttagtatacacagtactggtactaaaggcactatgaagaaggccaggcatggtggctcatgcatgtaatcccagcactttgggaggccgaggtaggtggacacctggggtcaggagtttgagaccagcctggccaacagtggcagaacccctgtctctagctaganattcaaaaagttaacccggcngtaggtgctcaganccntgtaatccccagctactcagggaggcntgaggtgggagaagngcttgaagctgggcgganaggttgcagtgatccgagatngcgcgactgactcgatcgtggcgacacagcgaactctgctca

SEQ ID NO: 8890 - DNA, 413 bp, Homo sapiens
  III.2518 (AA987747)
catattatatacatctggaaaaaaagccttaaaatgagtggttacaggaacaccaaaagttagtgaattcagataacataattaaggaatgttttcttacagtgtgggatgtccttttcaagacacagtatactaaaataagatggctttgtcttatacaggttttaaataatgacctcattcggccagtttttctcctgcccactgatcagagcagatcttcacttaacagtctttcagcatcaaaatcttatgagatgtaggttgcacttatccagataatccagatccaatgaggcataagtaacagtgacatcagagaaatgaaaatgaaaatggggaaaacttttcccccattcagtgaaacagagtactgctcagccactgaaaactataccagtgtccttgggatc

SEQ ID NO: 8891 - DNA, 404 bp, Homo sapiens
  III.2519 (AI205947)
ttttttggcagaggaacaggctgcttttaatctaaccctgtttctttgagaagttgttccatttcagccaaacaccgcttcaggagaactgaatgtgaaaacaaaaacactagttctgccccatccctatcccggtcttctctcactgttctcagcaagaaaaaaaatatcctgtatttaatcctaagacttaaccttttcctgaccctggacaaaatgcatagtttagacaaagggtagacacaccacccactctttcctcatggtgaaggtgttagtcatctatttttcccctgtactagaggtctttcagagccaatagtccctctggcaagagtgaagcttcatctctgccctggatgatagagtcttagcaaccagaatcagccatgctggaggagagg

SEQ ID NO: 8892 - DNA, 414 bp, Homo sapiens
  III.2520 (AI309045)
ttatttttaaatggctcaggtttatctatagatttattaaaaactttgtcatattgtataatcatgtaaatatttgccaatacaaatatttaattctatcccatttgtattcttgccttggtctatacaggtgttaaagggcttaatattcagaatacatgtacagatgtgtaaattaatgatttgctattcagagaaaatacctctacaacattacaggtttttatttattttaatgcattacaaatgaaataacatctattatttgagaatcaattatatatcatagtatactccttggcaggctaccatcagattattatttaggccatagaaggttaccaatcaattcaactggtcctccaaaaccaaaatgtctttccggacattttattttttttttttttttgggaa

SEQ ID NO: 8893 - DNA, 471 bp, Homo sapiens
  III.2521 (AA393849)
agtatacttgaatcagacattttaaggatgtcactatggcactgttgtcatttccaaattcctagaaaagtttgttttactttgtttttattctgttaatgcattctttcttctctttacttcctttcttaccagtacactcctatctcaactctgtttatttgatgagttctgtcccgtaaatcatatttcccttacaattaataaatgtcacttcatattttataataaaccactcagtaaaagcaaaagcttgtcctgagaagtagagtgagttctttttcactctgtgtctaataatgttaaggtgggaaaaaaaaaagtgtggcatagctacctgcccatccccaaccctcagcaaagtagaatctcttttctggtaattttgggtttccgctctgggctctggcaagttgaacaatcctagccattgacaatcgtgatagttattattttcccatttgctgtctt

SEQ ID NO: 8894 - DNA, 478 bp, Homo sapiens
  III.2522 (AA393850)
ttttcaatttttaatttttttatttagaaataataaaataagacataatatataaaaatatgtacaatccatggtttgtgcagtacaataggaagactttagatacaaaaagacagcaaatgggaaaataataactatcacgattgtcaatggctaggattgttcaacttgccagagcccagagcggaaacccaaaattaccagaaaagagattctactttgctgagggttggggatgggcaggtagctatgccacacttttttttttcccaccttaacattattagacacagagtgaaaaagaactcactctacttctcaggacaagcttttgcttttactgagtggtttattataaaatatgaagtgacatttattaattgtaagggaaatatgatttacgggacagaactcatcaaataaacagagttgagataggagtgtactggtaagaaaggaagtaaagagaagaaagatg

SEQ ID NO: 8895 - DNA, 340 bp, Homo sapiens
  III.2523 (AA455172)
gcatgcagggggtttattgggaaacacactcacgaataaaactggcaacagatgagagaagaaggactgggcagaagaaaaagttgaactgtgatccagttgcagaggagacctcagccaatcctatgaggagttctggagctggaatagcccttcagaactatcccatctaagacaaggtccaggactttgtaccccacatcaaccagtgtgggctgccactatagagggagtgtaacactgaacaaagcaattcccctcaagtggaggataattcctgaagaggaactcagccatggccgtcagtagctaacattcctgccagctggaaaatgagtcc

SEQ ID NO: 8896 - DNA, 478 bp, Homo sapiens
  III.2524 (AA456726)
  misc_feature (194)..(194): n is a, c, g, or t
gtgggagctgactgtcccctgggagtaattctgtgaccataattagccacacagctcctctggaggcccctctaaaggacccccaagcttgggcacatgacccaaggtcagccagcaagatgccctgtcccggaaatttacatctgtgtatgagccacatgagaacagggaagcttgcagtgagagcacagcanttttcctggaactgccccacaaggctgtctctgagccccttttgctgggtccccagagctgctgtggctcccattcttcctgaggtctgagattccatcttccttcagttctgtaggatcctgattgttacacgaactgtccacctccatccagagccgtgtggcttgtagtgccttctcgtggcaggtatattttcctgcctgttcacgtgacttgtgttggccagtggaatatagtttgatctgcagtagtttgaatctgaggatgctgaacctgtggataa

SEQ ID NO: 8897 - DNA, 287 bp, Homo sapiens
  III.2525 (AA490554)
tctgaattggaccattgctgctgtgtctgtgaaatctggtgctgctcatccccatccacaaactggaaaatgatttcctatgtaatcatgcatccaactgggctgtgctatttttttaaatggtttgtatttgaacatggtgattcctccttcacttcaccttaacggaatgtctttatttgaattttatttgtaaaatgtgtcctgtttaaatttttcaatctttaaaaataatttttatgtacttttttttttttttaacctttcttgcactctgggtcatgggt

SEQ ID NO: 8898 - DNA, 440 bp, Homo sapiens
  III.2526 (AA496955)
tactttacctccagtatggcactttgggttcaattcagtagttgccttaagtttaaaaatactgaatattatagtttacctcttctcttcttttaagagcttacgcaacttttctgcacttgtttctattttctttgttttctgcttttcttccttttcagcttgtttttctcttaattccaaagatttcttttagaacccagatatcgaaaaaaaccacacgttaaaaatagcagaatatataaaacccagtattcaaaagaccacccccaacgagaaacccaatttagtaaaaccaaatcaccatagagccagcattaaacagtatttttttaacataaaaaaattagtcatacagatgtttggcattagtcattgaaatggccagaacagcattgaggaccatattgcagttggtatcccataaaaaaaggggaagc

SEQ ID NO: 8899 - DNA, 475 bp, Homo sapiens
  III.2527 (AI300402)
tttttttttttcaagagtgactttttttttttaaactttctatttactcccaagcattttcaagagtaaaatgtcacatcctccattaataatccattccaatgttgaattgtttaggtatcaaaaagatctctattgtgctgcaatttaaatccaattctttttattttgacctaggttcaaatagagaactacagaacaatatgctactgtgatatctattatcacccatcagtttcctcttctgaaagctgaaaatacctaaatacttctgccacaaaacacaacaaattagctattatgctcctcatcattggaagaaaagggaattgcatgcaagatatcattgagtgaaggtattgaaaaaaatattagaaagcagagtcaggtcagaggtggagttttctgaggggctgtgttgagaagaatggaagagggagaagtccccacatcaggggacagagggtgtgatggg

SEQ ID NO: 8900 - DNA, 322 bp, Homo sapiens
  III.2528 (AA868653)
tttgttttaactgcctttaattcctaatagtgactatgccagagcagcctattttggggtggcaccttcttaactctgcatactgtacatatctggcacacatcatttaaagtaaatagacaggcttgcttactttttactcaagtgcaacataattcagaaaagtgcagacatgctcagtagacagctccttctacacgcctgttgactttctttcatcaatgacatattggtcggctcttgctaggctgtgttgccaaaacaactcgcaagcctgggtcgatcacagcaaccaagtttcccctcccactcaggtttcttg

SEQ ID NO: 8901 - DNA, 489 bp, Homo sapiens
  III.2529 (AI292146)
tatttatactctgtacatgtggttgttttagcctaattgttatttgtgaaaattaactgtctttatggtggttccatctagattacattaacattaatgttttaacctgtgaatataatgataacttacttcaaattacctgccaattcaaaggttaaaatattgtaaggtttagaaaatggtagaatattctgaagcactaaaccatagttgttattttatttgtacacatgatatgaacattgagcagttcttgctcacccatctctattattctgacattctttgattcattgaattcactgttcctccccacagaaggtaacagggtaccaccatttatcaccaattaatgtcacattctcagcattcttttccttcataccgataactaaaaggacctgaaaccaaccactcagcttgctttctaaatttactgaatctcattctcacggtccaccagatcatatctacttgataacacatatg

SEQ ID NO: 8902 - DNA, 310 bp, Homo sapiens
  III.2530 (AA448627)
cgcacactgaaatatccttttattgcaactcaaattttcaaaaaccagaaaatcaaattattatgctctagccaaattatgtaatgttttctttttcttttctctgtcacccaggctggactgtagtggaacaatcacagttcactgcagcatcggcctcctgggctcaagtgatcttactgcctcagcttcccgagtagctggaactatgggtgagcaacaccacagccagctaattttttaagtttttgtagagacggggtcttgccgtgttgcacaggctggtctcaaactctggcttcaagtgatc

SEQ ID NO: 8903 - DNA, 389 bp, Homo sapiens
  III.2531 (AA448717)
caggatggttttgatctcctgacctcgtgatccgcccgccttggctcccaaaagtgctgggattataggcgtgacgaccgcccgggcaaatttttgtatttttagtagagatggggtttcccgtgttggccaggatggtctcaatctgaccttgtgatctgcccacctcggcctcccaaagtgctaggattactggcgtgacgaccactcctagccttaatgcatattcttaaatatacaaaggtagatttgttatgaaaattgctttggggctctaataacctaccttttaagaatgagaaactgctgggcttaagggagttcagtatgaatcaagattgaaccattcaaatgtggctgtgatttctgcatatatcatagatgggatc

SEQ ID NO: 8904 - DNA, 305 bp, Homo sapiens
  III.2532 (AA971069)
tttttcatatttgtaaatatacatagttttatttccatcagttatgacatgcaagcaagtaataaagtgaaagtacaatcaaatgatatatggaacttcctcagtcttaaaatattccatggagactatcaattttatgaaaactataaagaatgcttcatgaaactacattgtacagtgccatttactattttactgacattttaaataatcaacaattaaagggaatacatcaacattatttaataccaataacgttatttttcttgagtaatcctgttgaaattaaggattttaaataaaac

SEQ ID NO: 8905 - DNA, 465 bp, Homo sapiens
  III.2533 (AI018341)
ttttttaataaaaacaacatttttattttttctgaatccactcacatctaattgagttacatttgactgtaaaccacacacaaaaacacatatatatgccatttttaaacagaaattctattttgcaatctgaaacagcgtgacgtggggcaaaggtctaggtcggtttcatcccattttgcatgaactgactgttgaccattgaacttgccaaagtaaatttctccatttacaaattaaagcattactcttaaaaaagcaatactgagaataaaattccttctcttcacgcaatcaaaatgactaagcttttactgtcagcaaatgtacacgtgacaaaagtcaaattaagcacttaaatatctaactaacacatgtagtaacatttactgcaagaaacaaatattaaggaagcagattcctgcttctcagcagtatttattaccaagcttggatctacttcta

SEQ ID NO: 8906 - DNA, 173 bp, Homo sapiens
  III.2534 (AA406306)
cacgctgcccattcctcggcgcaccggctccgagctttgcccgcggacgtggagggcgcgcgggtcgtgggcgcggggccctgcgctccgagctgggcgcgtggactacgtcccctgcctccgccgtctgcgccgcccgtcgaggcgacttttccgcacgaggcgaggcccgc

SEQ ID NO: 8907 - DNA, 417 bp, Homo sapiens
  III.2535 (AA411289)
tcgttttaagactaatcaagtgcagtagtcagaaaggggaaagagtggaacaaggagttcgatctgtaacggactgaacaagcaacagagaaaactcactcccttggcaccagccacgagcacattcttgaagccaaactcatccatccgtactgggagatagatgatcatagaaacatcaagtgtgagtctggtttgagtttaaaacgaaaagtgctttagagttatggaaacttagcttcaaagaagaggcaccaaggatgccgcgcgaaaactcacgaggccacttaacacaggctgcgtgggaaacaggggctccgcgactgcgctcagattaacggaaaaagacacccctctagagtccggcagcagcgggcgggcaccggcgccttctccacacaggagaatctcggcgat

SEQ ID NO: 8908 - DNA, 364 bp, Homo sapiens
  III.2536 (AA812705)
tttttttttaattctacccataatgggtagggactgagtctttcaaaaacattgcatactcaaagtcccaaaggtgggaccatggaggtaccagccaggagccaggggatggtagtggtggccaaggtgatggagaaatggatgctctgggggtagactagacaagacctgatggtgaactgaatgttcaataagaaatggagcctgtcatgaatagcccccggtctctagagtttttgttccaggacccattgcttatccagacccagaaactatctgcctcctgcaaacccaggtgaaggccataaagtctgcaaagaggcagctgggcccagatgagaccatcagctcctgggttccacac

SEQ ID NO: 8909 - DNA, 355 bp, Homo sapiens
  III.2537 (AA433851)
cgaagagcaggttctggactggatcagctaccaagtggagaagaacaagtacgacgcaagcgccattgacttctcacgatgtgacatggatggcgccaccctctgcaattgtgcccttgaggagctgcgtctggtctttgggcctctgggggaccaactccatgcccagctgcgagacctcacttccagctcttctgatgagctcagttggatcattgagctgctggagaaggatggcatggccttccaggaggccctagacccagggccctttgaccagggcagcccctttgcccaggagctgctggacgacggtcagcaagccagcccctaccaccccggcagctgtggcgca

SEQ ID NO: 8910 - DNA, 383 bp, Homo sapiens
  III.2538 (AA434373)
tagaaaaagcccagaaggcactttattggaggtctctgcctccattcacaggagaaaggagctgggagccccatcctaagggtcccagcatcagcccactggagggcctggaacagtccagcactctgtgggagaggagtggggaggggaatgttttagaaaaaatagatctctatgtacatctgacatatttatatagcacataaattagggagtgctctgacccctgcccgtggagcccaagcactgagcagggaggtgaacgccagtccagaaagaaggtgctggagcccctgctctgtcctctccatcacggtgctcccctagggcctccccaggcctccttggctcagtccaggtgtctgcaggaggaaggtgttgtc

SEQ ID NO: 8911 - DNA, 417 bp, Homo sapiens
  III.2539 (AI095828)
tttttttttaattctggaaatgaaacacctagtacctgcccttcctcttgtcttttatagtggtttctcccttttgaaataccaaagaacttgtcagtagggaagtaggcagggtgggccagtctgcaagaggcctgtggctgtccctattagcaccagcaggtggcgccactgaggaccgctccgaagcgctctgctcctgggtgctttctctgcggaccagtcctagaactgagggtcccacactgcccgcatcaaccatgtagaggcaccaggacggtcgcgtgtcattaggaagaagtgctgtgtcatccttcacagtacactggggagggttctcctcctgaggcatctggcacagtgcacggctggactcccagcacactgtgaagaggaggaaatgatgcatgtgggggt

SEQ ID NO: 8912 - DNA, 335 bp, Homo sapiens
  III.2540 (AA393287)
gaagaaaaaaaatactgttatggaacattcatgaattcttcaaaaatgtttattctaggtctattaataagcgatgctgtgttaggaaatagaagcagttgctacagagcttgagtcctaaatgccattttcacatactgaaatgttaaagtattcttacaggattttgctgtcaagattatgctggccttaaaaaataagctgactatcattgtctgctctctggaagtatttggaatacaagaaaagacagacgtgatgcattttaaattttgccggaccagcactatcaatggaatgtgagatgtcttgccagtgcacagacaaaagctgta

SEQ ID NO: 8913 - DNA, 545 bp, Homo sapiens
  III.2541 (AA398632)
tttagcattaataatttatttattcattcatttcaacaaacatgtattagttatgttacatacttttggaagacctgaattgtaaagatcaaaaattatacacagaaagacttctgctttggggcaggatgtgataggccaatactcttacctgaacaaatggaaaatattaaaaaagtcattttcagaagcacctgagagctgtgaaagcaacgaagactaagtgaactaaaattccagagagagaaagagagaataatttcgaggtgatctgatgattgctggctatttttctctcaggacattttgttggttctgggagtactgatggtttgggcttgaccaggtagagggactctgctctgcttttgcagtgggtacaggcatcttttctgatccgggagtcagaatgacactaccagatcactgagcgttggtctctaggtgtgaccgtggtagaattgagtccttggcgatctctgattcttcatgtcaacagcttctgaaccaaattctagggcacactcatcagattagccaaggct

SEQ ID NO: 8914 - DNA, 486 bp, Homo sapiens
  III.2542 (AA668871)
gttttgttgttgtgtttggcagagatggggtcgtgctatgttggcctggctggtgtgaaactcttggcctgaagaagtgcttccaccttagcgtccaagtgcattgggattacaggggtaaaccacctgtgtcttggctggtgtaccttttaattctaacaaccgtaaaaagtggttaacatcccagatcacatgtgctgatactgaggctcagatgacatgtggctagttcaaagaacataataataatgtcctcactacccagtcaggctttctccaaaactttctttacatccactgccaagcagaaagcaaactgtcaataagaagtgctgcctctaaccaggctgtataatgcagcagttaagaataagtcttctgaagccagactgcctgggtttggaccttgactccacctcttattagctgtgtgaccttgggtaaatcatttaacctctctgggcattagtttccttaactctatgc

SEQ ID NO: 8915 - DNA, 335 bp, Homo sapiens
  III.2543 (AA912702)
tttgtgaaagcaagttttttttattagtaagaagatgtaaagataatataaacacgaagtaaagaaaacaagtgacaaaaaatctttacacgatatgattccaattttaagtggttatataaaatgggcagtgaatacaacaaaatgttaagagtggttaatggctgaattccttttttaatctcaaggcaattaatacttacctgagtgttccttcagtgccaatatgataaactgggaaaatgtgttggaggacacttgtcaatgactgcctctcccatggaaaggacgggtcttgtctcatggaggatggttctcttttaacagagccttcc

SEQ ID NO: 8916 - DNA, 305 bp, Homo sapiens
  III.2544 (AA993124)
tttttcagaggtgatgagtgtttattatcttgattgtagtactggtttcacaattgtttatgtgtcaaaacattcaaattatacatttttgaatatgtacagtttattgcatgtcagttgtctcttaaagcttttttacaccttcctatatgtttccattcagagtgtagcttccattggcaatactttaaacagcgtccatcttgctgtggaagcactacagaaaacctgaagtaaaagtaaatgcagcagcatctctgtgcttttgatctactgctactttttcaaagggcgtacttttgttc

SEQ ID NO: 8917 - DNA, 469 bp, Homo sapiens
  III.2545 (AI206010)
  misc_feature (461)..(461): n is a, c, g, or t
cttagccaaaatataatcttctgtaatattaaataagtccacatgatgtataatggtaaaatattttcaaatatctcacatttgttatacaaataaggactgtatttgattatttttgattgccacccaataaatccagacaataaacataattatctctacacccaataatgagcattgattccaggaccacaggagaagagaagacttctccaggaagttcataaacactttgcaattgtccactctgagattccaagatccacactttcccatcagtagatgctgctgccagcaacatttcattgctgccattgtagttatggaaagcaaacggtgttgcatagacccttgaagtagtttcaaatttccactgcaggtgacctttcatgttacaacagtagataaagcaatcatgggaaccaaaaaatattttttgctctgatggtgaggtacacggngatgaaaa

SEQ ID NO: 8918 - DNA, 287 bp, Homo sapiens
  III.2546 (AA430404)
ataaacatatgacacgagcagagtgaggtctgctaatttcagatcatgccctcctcccttcccggtggctggaatatagatacgacagtgggagcaagagcagcctcctcagaccacgaggcagaaaccctgtacgagggtaacagagcaatgagaaagaaggtgtctgggtccccagcacaatgaggcctccgtgcatgtactggacagcttgcacagaggctgcctgcatagataaaaataatctattttattatcctagcctttgtttcaacagctagcccaaa

SEQ ID NO: 8919 - DNA, 324 bp, Homo sapiens
  III.2547 (AA430651)
cccagtccaagcagtacctttatattcattgggatttgggctagctgttgaaacaaaggctaggctaataaaatagattatttttatctatgcaggcagcctctgtgcaagctgtccagtacatgcacggaggcctcattgtgctggggacccagacaccttctttctcattgctctgttaccctcgtacagggtttctgcctcgtggtctgaggaggctgctcttgctcccactgtcgtatctatattccagccaccgggaagggaggagggcatgatctgagattagcagacctcactctgctcgtgtcatatgtttatgac

SEQ ID NO: 8920 - DNA, 343 bp, Homo sapiens
  III.2548 (AI150526)
gcggccgctcccgcggctggaggcgggacccgcgctccgcgctagcccctcctgagctcaggcggggcgaagagtcgcctccatccgcccgcggcgctctcctaccagtctcttcagcgcggccctcgaggcagaggcaaaggcggcgacagctcctcacccctggcctccccaggagccacggcggcgggagggccctaccccgcccgcccgaccgcggttttcccaccctggccgctcccgcagtggggagggacccaccggtttgcccagaccctcggctccaaccccgagcgcccgcctagcctcggagcccgcccctcgcctcttccttagcactcgc

SEQ ID NO: 8921 - DNA, 589 bp, Homo sapiens
  III.2549 (W87375)
  misc_feature (556)..(556): n is a, c, g, or t
agatattatagagaaatcttaaatgtatgagtaaccttttctgaaaaacaaaagtgggatgaaatatattggtaaaagtatccacttatcttgattattttcattttacaacatacctctgtgtacctttgtgttttattttgcaatctataaagaacttgtccataatcacacagttatcttttcaatattgagatactgtgttttttaaaaatcagtagaggtattttacttaagcattggccaagaagaatgtttaccacatatacagtttatattctttcatgctacaatatttataatcggccgagcacagtggctcacaccaggaatcccagcattttgggagaccgaggcccaggagttcaagtgtatacatatatgtatgcaggtgtggtggcacacaagcgtgtagtcccaagtagctggaactataggcgtgcgccaccacgcccagctaattttgtatttaaccctttcttaaactgtgaatacatgtgcactcaacatcctattttgtatacatagaaagcatggtaaaaatattgaatattcntttacccagtgattgctgtatggtgagcagcaa

SEQ ID NO: 8922 - DNA, 593 bp, Homo sapiens
  III.2550 (W87376)
  misc_feature (533)..(533): n is a, c, g, or t
  misc_feature (593)..(593): n is a, c, g, or t
tcggtacgaaacaagagtctttatgaagaactgcttcaggcaagagatccagggaaatttgtgattcttcactaccattactggctcttccatggaaaagcatgaaaagatctgcttgataggttgagaagaaaacaaaacatgttatagggtgaaaaagagtagttagtatatctgtgaagtaaacttattcctactcaatccacttcctgtgggtaaataatctgacctcccagagagctgctcaacatacagcaaatcacttgtgtaaaagaaatattcaatatttttaccatgctttctatgtatacaaaataggatgttgagtgcacatgtattcacagtttaagaaagggttaaatacaaaattagctgggcgtgggtggcgcacgctattagttccagctacttgggactacacgcttgtgtgccaccacacctgcatacatatatgtatacacttgaactcctgggcctcggtctcccaaaatgctgggattcctggtgtgagccactgtgctcggccgattatnaatattgtagcatgaaagaatataaccgtatatgtgggtaaacatcctcttggccaatgn

SEQ ID NO: 8923 - DNA, 468 bp, Homo sapiens
  III.2551 (AA443854)
tttcagtttaaaatgttttatttcatagctcataaaaaagtatgtatgtacaagactcaagtaaatagaaaggcagctttcaatcacaaatcagtttttcagattttactgtggaagcatatttaatgcacacatttgaatgttacacataaataattttaacgatggagtccaagttctggattttacattagatctgcatatataagacacttgtggtcaaatttcaagattggtaaagccagtttcaagctgcttatattttgagtacaggtttcactattacaaatatatgatgttaaactaacaaactcatgaccttcaaagatgtcttcgtcccacgcacacacatttgtaatttgtgtccacttgccatttcccttcttccataatcctcaaattatatagttatgccttgagttccctatgcatctcaaccatctcctttatctcaggcttctcaaactt

SEQ ID NO: 8924 - DNA, 577 bp, Homo sapiens
  III.2552 (AA446644)
cggcacgaggccttcgcgcagcgagcaccttcgacgcggtccggggacccctcgtcgctgtcctcccgacgcggacccgctgccccaggcctcgcgctgcccggccggctcctcgtgtcccactcccggcgcacgcctcccgcgagtcccgtgcccctcccgcgcccctcttctcggcgcgcgccgagcatggccgccccgcaggtcctcgcgttcgggcttctgcttgccgcggcgacgcggacttttgccgcagctcaggaagaatgtgtctgtgaaaactacaagctggccgtaaactgctttgtgaataataatcgtcaatgccagtgtacttcagttggtgcacaaaatactgtcatttgctcaaagctggctgccaaatgtttggtgatgaaggcagagatgaatggctcacaacttgggagaagacaaaacatgaagggggctccagaacaatgactggctttatgatcatgactgcgatgagagcgggtctttaaggcaacgagtgcacgcacctccacgtgctggtgtgtgacactgcctcgggcataagacgagacaggcgactgaa

SEQ ID NO: 8925 - DNA, 526 bp, Homo sapiens
  III.2553 (AA425986)
ggcgcctggaacatctccctagcaaccgtgaagcaccttgttattagggatgataaccacaacttccctggcaactgcagtgtccgacaatttagaagggaccatccttggcggcttctctgaatatactgagtttggttgctaaaggactcatagcttagcaaccatagcccttcaaggcttttcatggctgtggcgggccccattaggtaccaaaagaagaagaaccccattgtcagtgaactgtaccacccagcccacccaccttcctaccctacaggcaccctctgggccaccctcccttgctgccctagcaagtctgacagccagagggccattgcctggccaggatcccttccttagcatccggggctgggacactagcaggcgtcgggagggggcctggctgagctgcatgtctgtcccccaccctcatcctccaccccccagtccggagaaggcggcttccttggagtatgactatgagaccatccgcaacatcgactgctacagcacagatttctgc

SEQ ID NO: 8926 - DNA, 461 bp, Homo sapiens
  III.2554 (AA426216)
tttttgcctttgtgcaacactttattgggaaagatttacacacggtgacctgtcataggccaagcgatgagaagagggcgccaggagccgtggggtcccgaggtggctcagatggaagccatgggacggccgtcccaggcccgcgcacccgcacctcagtttcccctttgtgaaatgggaagcttatgcttccttccaagtctgcaatattggtgcgatgagctaaaagtggagcgaaagacacaaggaagaggcttcccactcccaggacctgcccccaagctccgaccccacattgtggatgcaaagaaagggaatttgcccaaaacccactgcccaggggccccttccgttttggggaagtgcagtgctctctggatacccagaagctggagcaggggccagtgactcttgtctggacaatactttgattttgtaggagtggaggtggcctctgggca

SEQ ID NO: 8927 - DNA, 414 bp, Homo sapiens
  III.2555 (AA621704)
gaggcagagtcttgctcagttgcccaggctggagtgcagtggcatgatctcggctcaccgcaacctctgcctcccgggttcacgccattctcctgcctcagcctccagattagctgggactacatgctcccgccaccatgcccggctaatttttttttttttttttttttttttagtggagatggggtttcaccgtgttagccaggatggtctcaatctcctgacctcgtgatccgcccacctcggccttccaaagggctgggattacaggcatgagccaccgcacctggccactttcagtaatattttctaatcttgttttctaacaagtaccatgcatctcagccaaactgtgctactgacctccaacacaccctgtggttttgaaactcagagcctttgcttcccaggttt

SEQ ID NO: 8928 - DNA, 452 bp, Homo sapiens
  III.2556 (AI087275)
ttttttttattgaaaatacgtatttatttatttatgtctgtgaattttgcagggacacttctcagtccgtaacagccctatgtgtgttacctaacctttatcccttgtgaacgttctgatgttttaggaggttggagttgaaggtaaaaaattttccacagtcactacactcataaggcctttccccactgtgaattcgctggtgattagtgaggttagagctctggctaaaggattttccacattcactgcattcataaggcctttctccggtatgaactcttcggtgtttaacgaggctagagtggttactaaaggatttccaacactcactgcactcataaggcctttctccggtgtgacttctcctatgtctaatgaggctggagctctggctaaaaaacttcccacattcattgcactcataaggcctttctccagtgtgaactctc

SEQ ID NO: 8929 - DNA, 346 bp, Homo sapiens
  III.2557 (AI184066)
gcggccgcacgtgccgttgacctggagccctgggtcccgggctgccctcggaggggagctcccgggggtgtccctcggcgagggctcccgggagccactctggggcgaggccctcgtggtggcagtggcggaggcctggtccctggggtcgggcgttgcgcatggaggcccatcgtcggcgccctcgggcggcccgcacccgtccgtggccccgtccgtggccttgcgctgcagggagatctgcacggaggagctgcacgtggggcgggcgtcgatgctggtcaagagctgcgggatgaacatggacgagctccgcttaagcgcacccacgcctccctgcaggcct

SEQ ID NO: 8930 - DNA, 319 bp, Homo sapiens
  III.2558 (AA728936)
gctttaagaggaccaaccgggccaagcacggtggctcacgcctgtaatcccagcactttggggccgaggtgggtggatcacgaggtcagcagttcaaggccagcctgaccaacatggtgaaaccccgtctctactaaacatacaaaaaattaactgagtgtggtggcgggtgctgtaatcccagcgacttgggaggctgaggcaggagaatcgcttgaaactggaaggcggaggttgcagtgatccgagattgtgctaatgcactctagcccgggcaataacagcaaaactcccgtttaaaaaaaaaaaaaagtcgacg

SEQ ID NO: 8931 - DNA, 468 bp, Homo sapiens
  III.2559 (AA885484)
ttttttcctgtttcagttatttattgctatataaccacctcaaaagtttatggcttaaaacaaaaaacaattagcttattatttggggggcttggcaatttgggcttggcttgcctgagtggttcttctgctgatcatattcatgtgacagctgtcagctgttggcctggtggaggctggatggttcaagatggtctccctgaaatttctggccgttgttgctcactggacctctctctccaagtgatctttaatgcgcaacaagttgctcttagccttcagtcatggtggtaactcgaaaagcctcgttccgaaaacaggtctgtcctttttctgtttgcagattttattccaccactcgattatccctcccctttttgatggccatttcactgcagctggggtctatacagctgtcgcagcctcctcgccgcgcacaccgccgccttgtcctggcatcaaacacac

SEQ ID NO: 8932 - DNA, 472 bp, Homo sapiens
  III.2560 (AA291562)
atctttaacctgggactttatttgtacaactaagacatttgtataaaacaaacagaaaatgaaagaagcatgaagccatgggagagtagaaatgggagctgagaaacttaagagtaaaaatgggagctgagaagatgaagtgaactcctatcctcaaacccgcaagttcccggccccaaaggaagccctcagagactgatatgccttctgggaactggacagcccctctcagcaagcctcattcccaacctgcacctggcctctctgcgaggaaggtcagccccagcctgggaagaccaagagggagccagcccagcatcaccccatgaaagacccaggacccaatgttactgccctaccagggcaaagcaacctgcaaagatggtggctaaatggccaccactaaaggtcccagttcagggaaagcacaggagccggaagcggtggcatgggcagcatttcttactcagtc

SEQ ID NO: 8933 - DNA, 568 bp, Homo sapiens
  III.2561 (AA293671)
cagttctccatggcaactcagtcctccagcagacccctgcatacataaaggtgcaaaccaacaagatggtgatgctgtcctgcgaggctaaaatctccctcagtaacatgcgcatctactggctgagacagcgccaggcaccgagcagtgacagtcaccacgagttcctggccctctgggattccgcaaaagggactatccacggtgaagaggtggaacaggagaagatagctgtgtttcgggatgcaagccggttcattctcaatctcacaagcgtgaagccggaagacagtggcatctacttctgcatgatcgtcgggagccccgagctgaccttcgggaagggaactcagctgagtgtggttgatttccttcccaccactgcccagcccaccaagaagtccaccctcaagaagagagtgtgccggttacccaggccagagacccagaagggcccactttgtagccccatcacccttggcctgctggtggctggcgtcctggttctgctggtttccctgggagtggccatccacctgtgctgccggcggaggagagcccggcttcg

SEQ ID NO: 8934 - DNA, 500 bp, Homo sapiens
  III.2562 (AA608810)
tttactttaagcaggaagagatttaatacaggcacttaaagatttacaaaatcatctgaagaggctgatggctcaattccagtctgggtctccaggaatgactaccagaataccaaggaacaggaaattaactccaggaacacgttgtcatagctgtgacccagggaatcgagaagatgggattagggagctgccagtgcccgtggcgctaaatcctcagtcgtagagacagctgccttttgacacagaaagctgatggctggccatggggatgctgaatccagccactgctgcgactggagcaggaggctggacactggtctttcctgtttgccttctgtcttctaacgtcatgtaagtgcttctcttacagaactgattttgtaaccaggaccctgactgcaaagggctgtgggaaatgtagttcaagctttcaaatctctgtagtaggggaaggcactccagagaggaaggaataaacaccgaggctcatggctgtg

SEQ ID NO: 8935 - DNA, 319 bp, Homo sapiens
  III.2563 (AI192076)
ttttttttttaaagatgataaatactcggggatttattatatactttcttcactttttggtatgcttgataaatctcctaataaagttagatatgaataaaaactgtattttctttgaagcaaaggaactggatttgatagctgctataacacagggcaaacctcaccatgaagttattatatatagggtattagaagagaaatgctcatggcaagctgggcagtggaaggaagcacctcttggtaaaggcaagtatactgtaggaggcctagctcagactgagtaatggatttagcctcatacagctccatttaagtg

SEQ ID NO: 8936 - DNA, 181 bp, Homo sapiens
  III.2564 (AA687969)
cgttatttagaaatttctagaaaacgggtggtaactttcaggtcattgccatggaaaggggcagtaatttccagctgttaccatgagaacggcaaactcacttggcaccagtgggtgtgtcttatggaggggtgcttttgcctgtttcagctagtctgtaatctggtccagagttcaagcc

SEQ ID NO: 8937 - DNA, 435 bp, Homo sapiens
  III.2565 (AI090763)
tttaacaacggctaatatttatttaaaatgcaccatgcatgcagccatttaagtagacacttataatctcactgacagaggaataaaactgaggcacagagagattaagtaatttgctcaaagtcacacaacagctaggtggattcttttcttgtactcagcgtcgatcttgggaaaatcatgaatcacataatttccccaaatgaacccaactttcctttcaccaaacggggaacccagactcctttttctcaacagccagttttcctgatacctcaaaacttggaagtcatccttaacttcccctggcagctctcaacctatcaggcccaacctcaccagagacactgaaaggccggagcgcacgaatctgaaaccacccgcctccaaaggtccgtcacaaaggccagaaaggtcggtactttcacgtgccgc

SEQ ID NO: 8938 - DNA, 446 bp, Homo sapiens
  III.2566 (AA427861)
ttttttttaaaaatgatgaatattttatttttcagacgtccatattttaaatgtaatagttttataaaagaaaaggttggcaacctgttaaggagatcttcatgtgaaaaatacatgtagaagttttaaaaatttgtggatataattgtcattcagaattaagcaggttgattgctgttatctagatgggtctcttcctttatgtttttcagtcacataatcttgatttccatagttatcacatgtacttaaagaagttaatcaatgcctatatggtccaaggtataatttgcacacagtagtttttggtttttatattgtggatcatatgtatcaaaggtaatattcataaagaacaatgttatagttggctacaaagggacaattccacatttctatacagggaatattttaagggtagagttatatcagctatggtgattgat

SEQ ID NO: 8939 - DNA, 430 bp, Homo sapiens
  III.2567 (AA427986)
cagcaacactgacgccaacatcttgttctatgtagtgggactccggaatactctgactcgaatacgaaaatggattgaacattccaaactgagagaaataaactttaaaatcgtggaattcaacccgatggtcctcaaagggaagatcagaccagactcatcgaggcctgaattgctccagcctctgaactttgttcgattttatcgtccctctacttatccaccaacacgagaaagtcatctatttggacgatgatgtaattgtacaaggtgatatccaagaactgtatgacaccaccttggccctggcacgcggcggctttctcagatgactgcgatttgccctctgctcaggacataaacagactcgtgggacttcagaacacatatatgggctatctggactaccggaagaaggccatcaaggacc

SEQ ID NO: 8940 - DNA, 486 bp, Homo sapiens
  III.2568 (AA428553)
tttgcagaatggaacatcctttatgacataatttctgcccaggaagcattgcacaagaatattagcatggtctcctttctgttgtatccattccaccttggtttctttccactcttttctaggaaggggtctttgtatggaggactgtttccaaagcacaaagactctatggtcttagcaaggcccaaacatttaagtctggatgatcttcttcctttgctgcagctgctctttgacatcctgcacagggtgatgggctggcggccctgggtgtgcctctgggcctgtcatctgtcgtgttgttagactgctgatgagctgtcgctgcttgtctttaaagtctgcacttctctcttttccaattttggctgccactagacaatgaaaatcaagcagccacacagccctttatccccttccagatccaactggttgaatcagtcttggagcagaaaacagaaccttcccattgtcttcccaacacat

SEQ ID NO: 8941 - DNA, 452 bp, Homo sapiens
  III.2569 (AA429490)
aagaccacggggttttctctcttagaggggagggctcagtaaacacttaaggaagttgccgtgcactgagcctgcggagacatgaaggaatgtacgggaggataatcgcaacatcatcaacccaattctccaagtaatttgccatgggacaggcacaccccatgtgtttgggaagacaatgggaaggttctgttttctgctccaagactgattcaaccagttggatctggaaggggataaagggctgtgtggctgcttgattttcattgtctagtggcagccaaaattggaaaagagagaagtgcagactttaaagacaagcagcgacacgtcatcagcagtctaacaacacgacagatgacaggcccagaggacacccagggccgccagcccatcaccctgtgcaggatgtcaaagagcagctgcagcaaaggaagaagatcatccagact

SEQ ID NO: 8942 - DNA, 416 bp, Homo sapiens
  III.2570 (AI217632)
attcagaaaaggcttttattttgggagacaagttggaaaatatggggttcaataggtttccttactgcaggattttgacacactaatgaatagtgtgtaatattctctagagacagttgaccataagttcttttgtcacagagtacattctaggattggattctccaggacacactttgggaaaggatgctccagttcctatctgatcctccctcaaattctcccctctccttcctaactccattcctttcaggaatagcaaaccacgaaatcgcccatcattccgacagatcctgctgcatctggacattgcctcagctgatgtactctccacaccccaggagacttactttaagtcccaggtgtgctgtgggtaggaaaataaatacctaactccccttctttgcagagatgat

SEQ ID NO: 8943 - DNA, 500 bp, Homo sapiens
  III.2571 (AI186783)
tttttgggaagagaaagaggtttaattggacttacagttccacaaggctgggaaggtctcagaatcatggcaagaggcaaagggcacttcttatgtggcggtagcaagagaaaaaataaggaagaagcaaaagcagaaacccctgataaacccatcagatctcgtgagacttattcactatcacgagaatagcacgagaaagaccagcccacatgattcagttacctcctcctgggtgcctcccacaatgcgtgggaattctgggaaatacaattcaagttgagatttgggtggggcacagccaaaccatatcagtgtatatgtgcatgtatctacaagaagggatttattaggggaattggctcccacaataggccatctgcaagctggagactctgggaagccggtagcatggttcagttcacatccaaagacctgagaaatatgaagctgacagtgtaactctcagcctgaggctgaagtcctgagaagctgtcaag

SEQ ID NO: 8944 - DNA, 442 bp, Homo sapiens
  III.2572 (AA513644)
cagtagctccctccaccaccgctgccgccccccgcaacgccgcttccggagtttctgctgccggttcctggggttttgcccgcagaagaggaggatggagaaggggaggcccctcccgccgctgccgcccctctgctgagcgcgtacgcctttccctcgccagcccctggcgggcggcggctgcggcggtagccctcccttttcccggagccgccgccggtccttcctccttaccaaaacactcctcccccttctcagagcggagggcattccacaagtatagaggggaggagtctatctctccacgccgctccccgggcggttcgggcctcctgccgcccaaagcggcacgggtcgcggcgggggccctgcaagcagcaaccacaggtgaacagcttccggaaaggtcccttttggcggcaaagagtccgacttctttgac

SEQ ID NO: 8945 - DNA, 482 bp, Homo sapiens
  III.2573 (AI033023)
  misc_feature (452)..(452): n is a, c, g, or t
  misc_feature (453)..(453): n is a, c, g, or t
  misc_feature (473)..(473): n is a, c, g, or t
gtagagacggggtcttgccatgttgcaagcaaccctcccaccttgaccacccaaagtgctaggattacagtcatgagtcactgcgcccagccagtcaaaggcatcttaaggagtgattggagaccctggtcacccgtggctgtctgggagccttgtgggaggagaactgacagtttctcagaggataaaatgactagagagaagctcctacttttgggaatgggtatcaggttggaaaattccaaattcactcttggccctgcctcaaggctctgtgtgcatgtgcatgtgccgtccttgcagaatgaagcactctggctatgactcttaaaaaaatgagtaaagaagcacacctttccccaccacactggaaccacctctaggggtgggaggttccaaaagagtgggccctgcagccaaagatcagaagaaaggccaagccagtggggaannatgtcatcagccactgcagnttccagggg

SEQ ID NO: 8946 - DNA, 447 bp, Homo sapiens
  III.2574 (AI198864)
tttttttttttttttaaagtttcttgtccacagcatttatgacatttgagaacaaatactgggctgaatgggacttctggtttgtatattgcaccttatttggtggctcaagatgtctttttgtgacaccactcatacaaaagtatccaagtgatctgtctttgataaagactgttgaatagcaagtgggctacaggtaatcagtcaatagagctggagtgaagacagagtgaactttcaagagcagttaagagttcaggttattttcctcctttccactttaaatacttcacctccttcacatggtcctctcttatctcaatttctctcccattttgtttctttctctcccacatctcctttgttacctaatctttggggtggaaaatgaatctacaagaggtatcagaattcttctttgttgtaatctgtccaaaaggttttctg

SEQ ID NO: 8947 - DNA, 386 bp, Homo sapiens
  III.2575 (AA733154)
ctttgaagtaatttttactgggaaaaaaaaacaataaaccatttttttcccaaaacagtcaaaatacaagaccattacccaagattgcacaatcatttacaaatgctggcaattacaggtaactagcctagtctcacacactccttgtctaaatagtttactccacattcaatgcactgcaaatgtgattctcagagctgtcgagattcaaagtttccttggctggattcaaagtccccttggccaagctcattgcattctataattgaatcatatcagacctcaggtaggaactttcccaccaagattcctacgttgagagcagtttaaaatttcacattcattccatttaccaccagcttttttcatagtccggggtataacat

SEQ ID NO: 8948 - DNA, 297 bp, Homo sapiens
  III.2576 (AA496856)
gagcagttggcatgttggctgttccgtaaacagggccgtgtgtctgctctaacagatggcctgggaaggtaaccccgaggctttgtgttccttcctgcagaccttcaggattccgcagagagagctggccctccctccagctgctggggctcttgtccttcccagctggggccagtccacctacagggggaatcctggagctgagggatcctaacttgggagatagtttctgtgctacccttcttgcctctcccctggacccctgaaggctctgtcctagggaggggatgggtcaca

SEQ ID NO: 8949 - DNA, 537 bp, Homo sapiens
  III.2577 (AA496895)
gagacggatttcgctcttgctgcccaggctggagtgcaatggtgcgatcttggctcaccgcaacctccgcctcctgggttcaagcgattctcctgcctcagcctcctaagtagctgggattacaggcacatgccaccacacccggctaattttgtatatttagtagagacagggtttctccatattggtcaggctggtctcgatctcccgacctcaggtgacccacccgcctctgcctcccaaagtgctgggattacaggcgtgacgactgcgcctggctgagcagcccctactcttaaggcccaccgaggtctgaggctgaagcagcatatggaaaggaatcctgaccatagcagcactgtgtcctgacagtcacaatttgtggtgaaacagggctttctggtgaccccagaaaacatcagtgccggctctgcagcacccagacacctggtaccccgagactggcaaggggactggaagagggcagtggctccaggctccctccacactgcccagtgctgtgtgcacacaaaggac

SEQ ID NO: 8950 - DNA, 431 bp, Homo sapiens
  III.2578 (AA883220)
ttttattcacaacaaatgttctattaaacactatgtaaaaacaaactataatagcaataatattagtccaatttgggagctttttaacaaatgaacattcttttttaagactgtaagttctatgtaaaataatataatgcagaaccagagactagaatatttcataaaacagaaggactttcaggactttttttttttttccaaaaggaagatatgccaggaaaatctttatacaattaaatagtctatgttcgtcatgtctaaaggcatggaaaagacccaaaagctatttttttttattacttggagtcagagtatttggtaccgtacacgtttagtgaatatacttgcatggaacataactcatctttgagaatatcatcatagtggtatggacttgcctgacatttagagagtcatatacttttctg

SEQ ID NO: 8951 - DNA, 456 bp, Homo sapiens
  III.2579 (AI285848)
  misc_feature (319)..(319): n is a, c, g, or t
  misc_feature (428)..(428): n is a, c, g, or t
acacttctcacaacggattgtataggtttttgttctgatcaggacacgctagaagtgaataatggtctttagaaaacatattgcttatattccctcagctggtggcagcagaaaatcattcaagaggtaaagatagcctgggagtctgttctttaaggcttgctcgggcttctttgatcggtcatctacctacctgttttttatatatagtgacacatgcacgcacctaccctttgtcaatggcactatccttaaatggcagttaccagttacctcttggccttgtcctgataaccatcacgcctcagcagtactgcgnggggtggggttctcctggggagacgctgaaagttaaaatcagctgtttcactcctctcaggaacgtatcctgacatttttgatagacagcagcagccagagacttgctntatttctcttcagataataaaaccactt

SEQ ID NO: 8952 - DNA, 368 bp, Homo sapiens
  III.2580 (AA972425)
tttgtttgcaagtctttctgttttattcttcgctgcaggtcttgtaatgtccactcaggagggaatgctttgaaccgggcatcaagctctgggccggattccaagtcagtctaaaaacagtctgagctccccgctcccccgacgcccggacaaccccggtcccctacttgctgggcagaatggataaaaaagtgggttctcccttctgcctgcccctccctcctgtcgggtcctcacactgcctgaacagccctgtgctaagccaaggcacggaccagaccaggagattttcttatggcagaacatcttctccccatctggaccccagtgctttctcaccagagagacaaagtattcatattttaaag

SEQ ID NO: 8953 - DNA, 440 bp, Homo sapiens
  III.2581 (AI131141)
aaaacagtaacttggaaatatgaaaaggccagaaggaggagcaagggctgttttctggagtggttgaggtgttgtcctgcagttgtcattgtcttctccaccgggctgttcccatttatttcctgtggaactgaatccctcctccctccactccttgggagcccaggtggtccttggccaccattcaggctttccaagaagccaaccaccttggagattttttttcttgaatttcgctgttttcttctgcttcctttagataaaaagcagctcgagaccttatcttagggatgagaaaaacatgcatattaattccatctgagtgattgtcagtgtaaggccttttaaaacaaaagcaagttctttgttaggaattggtcaaaattcatctctttctttaagcccatcaactcccaggacggtttgagttactcagttac

SEQ ID NO: 8954 - DNA, 331 bp, Homo sapiens
  III.2582 (AI219898)
ttttagattttgaaaaaattgtgtcatatcaggtggatattaaagcctctgatggggcaggtctttctggaaaatgcactgtcataatacaggtggtagatatcaacgataacgctccggaactgaccatggcttcattcacaagccccatccgcgaaaattctcctgagaccgttgcagctcttttcagcattcaagaccgcgattctgttcgccctcaggtcgctggactacgaggccctgcaggagttcgagttccgcgtgggcgcttcagaccgcggctccacggcgctgagcagcgaggcgctggtgcgcgtgctggtgctggacg

SEQ ID NO: 8955 - DNA, 424 bp, Homo sapiens
  III.2583 (AI217782)
ttttgtaattatggggcatttattattaatcagatgaaattgctggaagcagctggtgtaatgtgcgtagctatacagactctgcatgctccccccacaatacgcacacacacatacgcacgccacacacagcctgagccttgcttgctttcacagtctgtttcttgtgaaggtcagatgggtctatatgtgtctgtctgcatactggagtgtatctgtcggtgttttttcatgtcagcctgtaccctcctctactcctattgtctccttttccagctatctctctcattctttggcctaatgtgtccctctctgtctctggcttcccctcagtcttcctccctttgagcctgtcttggtgtggctgatctgcactatcaaccaccctgtctctaacatcttattttagtttctggctatctct

SEQ ID NO: 8956 - DNA, 454 bp, Homo sapiens
  III.2584 (AA004955)
  misc_feature (103)..(103): n is a, c, g, or t
  misc_feature (104)..(104): n is a, c, g, or t
  misc_feature (149)..(149): n is a, c, g, or t
  misc_feature (152)..(152): n is a, c, g, or t
  misc_feature (360)..(360): n is a, c, g, or t
  misc_feature (367)..(367): n is a, c, g, or t
  misc_feature (429)..(429): n is a, c, g, or t
  misc_feature (448)..(448): n is a, c, g, or t
  misc_feature (454)..(454): n is a, c, g, or t
tttaatcaagaaatagttgaaaaggatgggagtgaaggcactttaagcccacagatgccagcagaggtgggacatgacaagtgaggctggggggctggcccannactggtccctcccaagtcagcttggacaccacacagcacttcgtngcncctcggctggcttagcacatggacaaggcattgcgcttggagtcccaccttcttagagactcctgaaaaggagctccacgccaccccccacacctcgccctgtgccactcttccacttgtcctgtccactctggacatagagccttcacggtaaaccattaataggacgtcaactactttctggaattttgtgagcccaggtggagtnaggccgnttctaattttcaacatctacagaagttatcaagtttcaggttttaattaatctagcaagttnttcagacctgaaaggcaangggggn

SEQ ID NO: 8957 - DNA, 421 bp, Homo sapiens
  III.2585 (AA485422)
agctagaatctcatagcatgttaaagtcatatccttatccccactaaaaataactatgtctatgtgagaggaatatagtatgtgggagctgtattaaatactattacaggtgttacagaatctttaaataaatggacatggaccaactttccatctagtagtgtacgatctatatagtgcatgtcagtagcacaaaatgcagtcttagcattagcctgtctaatctgaatagtttactcaaaagtacttctttgtgttaagtattcagccactgtttttagatctagttaataggttctatttaatttgctacaacatttactgaatggtggagtgaaaaaactgatgcatactgggaaatatctaccattttttaaagataatgttaattaggaaaagaacacttttaaggaatttatag

SEQ ID NO: 8958 - DNA, 396 bp, Homo sapiens
  III.2586 (AA485585)
tgaaaaataaatgaaaaaaattttattgagtattactttatacatgcaaattgaaagtgaatctatattaagttgactattccacaataaaaacctatgaaatgggaatgatcaaagctaacacaatactaatgtgttcaataaattatccagatgtttttccacaaatatttggattacctgaattagctgattcttcagcaaaagttaaattttagctttaatatggtagcagcaggatgctacttaaatttagaagaaaaacataagaataaaaaccctgaatagcatagccaaatcttccaagaaataagttcaccaaaaaagtagcatacacctatttggtatccagaggaggaaacaaaacacaggcacttaatcaacatccaccaagtg

SEQ ID NO: 8959 - DNA, 341 bp, Homo sapiens
  III.2587 (AA927612)
ttttttggcagggagattatttaatgcggttcattcaggatgagcttgtaaagtgttacatagctaactagacctagttgggtttcagaggtcaaatcaagtaattaggttttgggctgcatgcagaggtggttagtagttttgatgtccgcacactgggcttgaactgtgatcctgagatttatgttcccagtctccttcaatctggagagattattacttaacaatgagttgatccttgttatactttggtattttggaagaaagttttatccccagacatgttgagacaagagatctaactgaaggagatgagaggatttctataccatatgcgttac

SEQ ID NO: 8960 - DNA, 470 bp, Homo sapiens
  III.2588 (AA004868)
ttttaatttttgtggctgtttattacacagtaaaggccaactgatacacatacccctttgcccacaagccaataaactgtggttcttcaggacccactgggaaatcctccagaaccaggcccactcgtgttagcagtaaagaattctgggccaggcacagtggctcatgcctttaaacccagcactttgggaggctgagatggttggatcacgaggccaagagattgagaccattttgggcaacatggtgaacccccatctctactaaaaatacaaaaattagctgggtgtggtggcactcacctgtagtcccagctactttgggggctgagatgggagaatcacttcaacctgggaggtggaggttacagtgagctgatattgctccacggcactccagcctggtgacagtgtgagactctggagtgctgggtccatcctttttcagccattcagattgctgtttcatt

SEQ ID NO: 8961 - DNA, 447 bp, Homo sapiens
  III.2589 (AA005066)
  misc_feature (1)..(1): n is a, c, g, or t
  misc_feature (32)..(32): n is a, c, g, or t
  misc_feature (35)..(35): n is a, c, g, or t
  misc_feature (61)..(61): n is a, c, g, or t
nggatgagggatgggacgcatccccgggggangtncctccaaagcttttatcgggcgagcncagtggctcacgcctgtaattcctgcactttgggaggctaagggtctcactctattgtctaggctcgaatgcagtgacgtgatcatggatcactgcagtcctcaacttactgggctcaggatgaaaggcttcctagcacaaacaccacccctggagttcccggtacatcaataccagcctggggatcacgttctcatcaagagttggaagagggaaagcttgaaccagcttaggaggacctcatctggtactcttgatgaatgaaacagcaatctgaatgggctgaaaaaggatggacccagcactccagagtctcacacttgtcaccaggctggagttgccgtggcgcaattatcagctcactgtaacctccacctcccaggttg

SEQ ID NO: 8962 - DNA, 413 bp, Homo sapiens
  III.2590 (AI217072)
gacactccaaaacaaaaagtttatttgagaatagcaaggggttgcaatctgggatatatggttggggaaaggggaatgaatcttttagaggtaaaaaggagaagtccgtgtaagctgttttaagacagagaacattgttcacaggggcttctcacaggctccagttcccagctcccttgcagtgtggtgactgtgtgaatggccagaagccacacttagtccaccaacaccacaagcctgaaagcctttctctcatttcagggcgggaggctcacttagttacgctcaaagcttcctgtgcgttggagtcacccggggagctttaaaaacatcgacaggttgtgaggactggtctgcatgctgcctgacattaaatcagctcccatgtgcttctgaagtgcagccaggtttca

SEQ ID NO: 8963 - DNA, 377 bp, Homo sapiens
  III.2591 (AA505464)
gagacagggtcttgctctgttgcccagatgtgatgatcatggttcactgcagcctcaacccctggggctcaagtgatcctcccacctcagcctcccaggtagctggaactacatgcatccacctctatgcctggctaatttttgtattttattttattttatttttttagagatgggctatttttacgttgcccagactcgtctcgaacacctgggctaaagcaatctgcccacctcggcctcccaaagtactgggaggctgaagtgggcggatcatgaggtcaggagatcgagagcatccccgtgaacactgtgaaaccccatctctactaaaaatacaaaaaaaaattagcctggcatggtggcgggcacctgta

SEQ ID NO: 8964 - DNA, 408 bp, Homo sapiens
  III.2592 (AA483689)
gctcgacctcctgattagaagtaaaatttctcagtttacttttagctgagattcaggctcaaggatatagaggcctgaaatgtcagtagagatgggtttagtactctcaaagagttatttattgtactgtctggcagtgcttgtagtaggcaaataattttgttctacttggattctaattctaaaatactatttgaaaaatgtcctaaattcaaattatattgtggtttgggttcatgagactagaattaagaatattaagaatattgggccgggtgcaatggctcacacctgtaatcccagcactttgggaggccgagagcggatcacgaggtcaggagtttgagaccagcctgaccaatatggtgaaaccccgtctctacttaaaaaaaaaaaaaaaagtcgacg

SEQ ID NO: 8965 - DNA, 420 bp, Homo sapiens
  III.2593 (AI130943)
ttctcacagaaaagtttgtaaggtaggtactactcctctcattatatatgtgaataaatggaggaagataagtaacttgcccaaaatcacaaagccagaagatgaatcccaaaagaacattaatccagggctgtttctttctgctaaatgatgctattgcgtcctttcagggcttctgggaaactcttcagacttgctgacagcacttttctaggacagctgagacgcattcgctaatctctgagctgcttgtcctttgtggtttacagacctgctggaagaacttcagacttagcgatgccttgagattgtgccatatcaaacctagctcctgagagtctttccagcttaaagtcacatcctagagcttcccaggagcaggtctgggatctagatttcgggcagagttggtagctgaga

SEQ ID NO: 8966 - DNA, 404 bp, Homo sapiens
  III.2594 (AA398010)
tttgtgatccattctataatatgatgctatgagaacacagaggagatgagccaggatggaggtcaaaatggcttgttcttcattgtggttgaccggtctctgcgcctctattttcagactccatttttcggttccttatttaaaatcctccaatggctcttcattgactggcttccagggagaggtgcttccaaattggccctgtaggcaaattcacttttttcaccctctaagcgagtaagtgcttgttcccaatttccatggtttagtcttcagtttcagtctttggtctcctctggtctatcagctcccatctctctcccagtctttttctttattctgtgacaccattaagagccgaccacgggccagtcctcttactagattctgctgtcagtttacga

SEQ ID NO: 8967 - DNA, 406 bp, Homo sapiens
  III.2595 (AA399284)
gaattcgtaaactgacagcagaatctagtaagaggactggcccgtggtcggctcttaatggtgtcacagaataaagaaaaagactgggagagagatgggagctgatagaccagaggagaccaaagactgaaactgaagactaaaccatggaaattgggaacaagcacttactcgcttagagggtgaaaaaagtgaatttgcctacagggccaatttggaagcacctctccctggaagccagtcaatgaagagccattggaggattttaaataaggaaccgaaaaatggagtctgaaaatagaggcgcagagaccggtcaaccacaatgaagaacaagccattttgacctccatcctggctcatctcctctgtgttctcatagcatcatattatagaatggatcaca

SEQ ID NO: 8968 - DNA, 605 bp, Homo sapiens
  III.2596 (AA131607)
  misc_feature (180)..(180): n is a, c, g, or t
  misc_feature (286)..(286): n is a, c, g, or t
  misc_feature (306)..(306): n is a, c, g, or t
  misc_feature (311)..(311): n is a, c, g, or t
  misc_feature (312)..(312): n is a, c, g, or t
  misc_feature (328)..(328): n is a, c, g, or t
  misc_feature (347)..(347): n is a, c, g, or t
  misc_feature (370)..(370): n is a, c, g, or t
  misc_feature (395)..(395): n is a, c, g, or t
  misc_feature (430)..(430): n is a, c, g, or t
  misc_feature (467)..(467): n is a, c, g, or t
  misc_feature (525)..(525): n is a, c, g, or t
  misc_feature (567)..(567): n is a, c, g, or t
  misc_feature (590)..(590): n is a, c, g, or t
gtttatgaataggagcaaaatgtataaatatccatgggacattcctgttaaatgtaccacattgaatgcaaatatttatctctgctgcttctgaaactttattaaaatgagagtagaaaaaatagaaggatacaaatcaacaaggaggagagaacaagaaagatgatcccaccaaataangaaattgccaacaaaatttttggaatctggaaatagaccgaatgactggtaattatttatccagagcccagaaagaatatttgaggagggagggcacaagaaaatngagtttaatggttcaatttnccccnnccctggtaaccccttntaggaaaattttgggaggncagtagggtactcctggaagttngagggaagttattgggggcttaaanatagggatttcgttaaaaaatcctggtgttaaagnagagtttagatttccaatcctcttttctatctctcancaccagtccaattaaacccttcttcaacctagggccggagaatgggaggctcttcttncgggggaaatttaacctggaaggctctactttggggcacctngtcacgggaagatagtggggggnaaacccccccccccc

SEQ ID NO: 8969 - DNA, 251 bp, Homo sapiens
  III.2597 (AA131700)
ctttgttttgatattacttttcatgttacatcatttctccacatgtctgatgattcttggttctctctttatattcaagagtgagtcactaaaaataagactagaaccagaaacaaagttaaaaagaaaaattaccaaacagagaaaatatttcttatatatgatacaataatggtccatgtttacatatctaaaagtcatgaagacatcaataagaaaggacaactgtcccaataaaaataaataaatgc

SEQ ID NO: 8970 - DNA, 416 bp, Homo sapiens
  III.2598 (AA411605)
tttttttttttttgtagtaaaaaattttatttatggtggaatttccaaaatttcttatatcttgaaatgatccacaaagtactattttgtgcttacatttaaaagatacatttcttacaagaaaagatcaaaatatatacattaggcagtattatatttttatttaatacaatataactaaaggattaaagagaaaagaaatagttaaatatatttaaaattccatttaactgattctcagctgttttaatgttttaaagaaaaaaataaagctctaaacaccagagacattttgatgagcaatatttataatatatatatatgtatatataagttaagcattgcaacaagctaccctcaatcaatggccccctatcagaaatagtattactggaactatgtattaatatctaagc

SEQ ID NO: 8971 - DNA, 458 bp, Homo sapiens
  III.2599 (AA422092)
cagataaaaactccttatccagcttggattgcttatccaacatagtggaccggatcacctcctcagagcaacctgggttgctctccaggatctggcttctctctctccagttgccagcaccgattcacagcctgcaactccaggggcttctagttccaggcttatctatcatgtgctatgaactaattttctggtctatatgacttcttcccggagggcctaatacacaggaagaagaaggcttcaaaaagtcccaaaccaagacaacatgtacataaagatttcttttcagttgtaaatttgtaaagattaccttgccactttataagaaagtgtatttaactaaaaagtcatcattgcaaataatactttcttcttctttattattctttgcttagatattaatacatagttccagtaatactatttctgatagggggccattgattgagggtagc

SEQ ID NO: 8972 - DNA, 512 bp, Homo sapiens
  III.2600 (AA447425)
gtggggatttgcactgggcactccaatcctggagaggatgccacggacggggatgctgaggaagtcagagagcttggtacggttgaagaaaactgagtcttgggcaatttgtgctaaaactaggtgagttgccaaacccaaggcatcttaccaacagctggtttgggggctggtttccctggtgttgtgtgttacctaccctttggcttggcttgacctctccttgtgagctcacctgagccctcccaggcaggttcctgacagtgttggtttttgcacatccactggaaaggtgtcattaatgacccagtgttagaatgcaagaggtcaggttattctagccctcatggctgaaggccagtcctggctccaccactcctccagccagagggtctggaccatccagtgcctgtcctcgccacagggcctccagggagcattcgggtcaaatccatggacaccctgggctacaaaccaaggctgctgttcatcccacatcgtgtggggcagtg

SEQ ID NO: 8973 - DNA, 434 bp, Homo sapiens
  III.2601 (AA447426)
ttttttttttttaactcatagatgatttattgccgtaagtaactaaacaagagaagagacaggctgtgggtttggtcaagacaatcagcattccctctccaaggttcgccagttgcatctacctaaagccttaatactttctggacgatatacacatgataaacacagcatacatgggtaacaacttgaccaatgttacactgattaaaatagcacataacaagggcgccacagtcccgatgccctgaagtgacagaagtaatgtggtttgtatgatgtgctgagtacaaaacctttaaaaacaactttttggcattaatactaacacagaatacttccttgaacattctgcaaaagtaggtgcagagacagaattacttcttcatttccagattaccagtatctataggactattttgagaaaagctgggagg

SEQ ID NO: 8974 - DNA, 387 bp, Homo sapiens
  III.2602 (AA905008)
tttaaaccaatttagtaacaatcttcttctgaaaaacaaattataaatctctatcttataaaacttttacagaaaaatagaactctgccacagatcaatcaattattaagatttacataagggaatgaggggtgggggatgggcagactttcagaatttgtgtaaacaacttttttaaaagaaccttactaggaaagaaccttgggagagggattgccacctagattttgtaagtagattgtaccagaattggacctaggccatgttgggaagtaaataaaatgtgtctttggtatccttctaagtccttcacaattatctttcacaaagaactacccttttgaaacctcctaaaaataaagtgatggtagaataataactgctaac

SEQ ID NO: 8975 - DNA, 398 bp, Homo sapiens
  III.2603 (AI016089)
tttttttttatcatctgtttcctttaaggagggtgcaaagttgttctaacagtttccgttacaagggtacaaactggccgctccccccaatagacggttttgttgagttcgcctctttttttttcttctttttttggccccacttcctatgagagaaactgcttgggtgagggaggtgaaaggagccctggagggtgttctctgaggttttcttcaccatcctcattagccacctgaggtggggctgaggactaaagtaggacagaaggtctctggtagatagaggaggggaaaatcagggggatcccccactttcttcacacccaggacgcagggtgccgctgccggccacagaaaccccaagaatgtttttctttggctattcagaggacatctat

SEQ ID NO: 8976 - DNA, 455 bp, Homo sapiens
  III.2604 (AA625847)
tttttgtgtttttatatacttttaatttatttcttatataaaacatggcacagagtgaggagagggtcatgttctccacttttacccagaactcagccatacttgtttcttgaggactggaaggtttggacgtatggagcatcaatcagccaatgtgaacgaatagtggttttcttctggggtggcttcacaggagctgatgtggacaaggggtggggtcaaagcagggtggaccaaaatggctcagggcctgcagtgccaaacttgactggttatcttgaggagggctgttatctggctctcagacctggagtttaatctctggtccaggttgcttatttttgagatgtttctctccagctttaaagtaccatgattctatgatactacttcttctcagtcatgcagcatcagaagtgggctagttcccctcaagtctcttagcccctagtcaa

SEQ ID NO: 8977 - DNA, 337 bp, Homo sapiens
  III.2605 (AA460323)
gggggagaaggactttatttggagtcaggtgggtgggagcagggaagggtcatggctggagggtaggtccaggtggtccgggctctgtgtctggtggtagggtgggctctggaggtgcagacccgggggctgcctagtgttcgggaacgcagcttcccgtctgcaggggcgtgaaaatgtcctcctccgagagtcccttgcgctgcaccaatttcttaaattcttccagggcctcccggttggtatcagaattcctacccacaagctttcccatgtggagcaggcccccatggtgctggtctttgcagtaaaagatgtagtggtccctcctgggcag

SEQ ID NO: 8978 - DNA, 415 bp, Homo sapiens
  III.2606 (AA460385)
aagaaaacctgatgcggaagacggaggagcctggcaaatacagcgcctatgggggcaggaagctcatgtacctgcaggagctgcccaggagggaccactacatcttttactgcaaagaccagcaccatgggggcctgctccacatgggaaagcttgtgggtaggaattctgataccaaccgggaggccctggaagaatttaagaaattggtgcagcgcaagggactctcggaggaggacattttcacgcccctgcagacgggaagctgcgttcccgaacactaggcagcccccgggtctgcacctccagagcccaccctaccaccagacacagagcccggaccacctggacctaccctccagccatgacccttccctgctcccacccacctgactccaaataaagtccttctccc

SEQ ID NO: 8979 - DNA, 432 bp, Homo sapiens
  III.2607 (AA504457)
agcagtccctggggtctgtagtggcctctggagagcccttctccccaggccaggcgggaaggcccccgctccggcctggttgaagtaggggaacgggtcctaacgcggggccgactcccttgaccctctgacttgctggcttcccttgttttacagtcctcggcctggcggaagttttgcaggttgtgaagacccctagtctttcattctctccttgtcacagccttgtagggcgtgaaggggtcattgccccatttagggatgcgcacctcctgatttcccgtccactgctctgcgccctgaagtggctgaaaagtgctcttaaaaggatgggaatcccgtcgccctcagctggtgcgctctccactgggtcgtggggctcctcatttcatcctaagtgagcccctccatcacctgtgtgttaaggaggca

SEQ ID NO: 8980 - DNA, 382 bp, Homo sapiens
  III.2608 (AA504529)
tgcctaggctggagtgcagtggcgtaatctcagctcactgcaaactccacctcccaggttcaaataattcttgtgcctcagcctctggatagctgggattacaggcactcaccaccacgcccgggtaatttttgcacttttagtagagacagggtttcaccatattggccaggctggtctcgaactcctgacctcaagcgatccgcccgcctcagcctcccaaagtgctgggattacaggcgtgacgaccgcgcccagccattagtaagcattttgtttagcaggtactggatggaagcattttacatccaaaatcccatttcatcctcataagaactctgataggaacgattttctctgtttcacagaggagaaaactgag

SEQ ID NO: 8981 - DNA, 442 bp, Homo sapiens
  III.2609 (AA884461)
tttagaaaagacatcacatttactgagtgccctaatgtgatatgcctatgccaggcactttacacgggttgtgtcgtctcatggaattctctcagcacccgtgcaaggtaagtactactattcccattttacatctgggaaactgaggcccagagaggttcgactactctctagtacatgggcaagcagagattcaaacccaggacactctgttcaaaacccattttctttccaccacactatgctgtctcgtggcacacaccaatgtgcacatcacagctgcactgtaagtcaagtatagttcggaattcttgacccgcatttgctcctctgcctcacctgtttcatgtcccccttcactgggtttggagggtagggattggagagggctgcaggctatccataacatacctgggcacttaatttccaccctgctccccca

SEQ ID NO: 8982 - DNA, 359 bp, Homo sapiens
  III.2610 (AA470573)
ggtcgacattgcgtgtgcctcagattcttttttatgttatttttgtgatgaggaagaatctgtgttcagagtgcagaatggtgtactgtggaagaaggatgagtgtgatctgtgtggcttgggtaccctatgggtgtcaccttgtgcaagctgctgggagacagtgccttgaggcccttcatttctaacacatctactctcagatgcctctagaagtgctgcacaattcataactttagagaaatacttctagaatttcagagcttgaaggtcacgtcatgcaatcatgcttatattctacacaaagctgtcgcccagccatttcctaaacctctccccccatcaatgaaatgtcgacg

SEQ ID NO: 8983 - DNA, 372 bp, Homo sapiens
  III.2611 (AI732676)
aaattcgcttccgcgttgacattgcgtgtgcctcagattcttttttatgttatttttgtgatgaggaagaatctgtgttcagagtgcagaatggtgtactgtggaagaaggatgagtgtgatctgtgtggcttgggtaccctatgggtgtcaccttgtgcaagctgctgggagacagtgccttgaggcccttcatttctaacacatctactctcagatgcctctagaagtgctgcacaattcataactttagagaaatacttctagaatttcagagcttgaaggtcacgtcatgcaatcatgcttatattctacacaaagctgtcgcccagccatttcctaaacctctccccccatcaatgaaatgtcgacg

SEQ ID NO: 8984 - DNA, 287 bp, Homo sapiens
  III.2612 (AA598645)
tttttttttttttttttttgagacagggtctaactctgttgcccaggctggagtacagcaatgcgatcacagctcactgcagccttcaccttctggagtcaatcgatcctcccacctcagcctcccgagcagctgggaccacaggtgcataccaccaagcttcactaattttagtattttttgtagagacagggctcggccatgttgcccaggctggtctcgaactcccgggctcaagtgctccacccaccccggcctcccaaagtgttgggattacgggcatgagc

SEQ ID NO: 8985 - DNA, 531 bp, Homo sapiens
  III.2613 (AI732156)
tttttttttttttttttttgagacagggtctaactctgttgcccaggctggagtacagcaatgcgatcacagctcactgcagccttcaccttctggagtcaatcgatcctcccacctcagcctcccgagcagctgggaccacaggtgcataccaccaagcttcactaatttttgtattttttgtagagacagggctcggccatgttgcccaggctggtctcgaactcccgggctcaagtgctccacccaccccggcctcccaaagtgttgggattacgggcatgagccctgcacccagctgaaaaataccttttaatgttcaaccacagaagagtattcaggtaaattatagcacaactattcccataatgaagtctgtgaatagttgtgctataatttaattaaatttaataattaaaaatggtgatagagaaaatatttaataacatacaaaggtaattactatatattgctgagggaaaacaacttattttatgatcctagttttgcaaatataaatttcaatatatt

SEQ ID NO: 8986 - DNA, 471 bp, Homo sapiens
  III.2614 (AI821167)
ggctgccgaggttgtagcaatctcgtcacttaaaacagtctggaaagatctagaactcaggccaaggtgaagcgagagaactcccaacgtggaaacgcccagcctctccatctttctgactactgaagtcatagcataacgtgaagacatggaatgtctgttccatcgcatcccccacatactgcatacacaagcagtacctgctaagtttctactcaggtcagtcctgttggaccaaggcgtggggcctgcccccacgaagccaggctctggcaaggagatatcttgacagaggacaaccagttagtgggaacctggactgtgcccgttttcccatagctcagggtaggctgagagtaggggacggagcaagcaaaactgggaaagaatacaaagaagagactcaatgagcaggttgtccccctctgatcatttctccatgtgtacctaagacactgcgatgtcacttgg

SEQ ID NO: 8987 - DNA, 374 bp, Homo sapiens
  III.2615 (AA983158)
ttttcatcatgaatggtttaaacatttattttcagggtaaaagttaaaattgtcctaaatcatctacttttttagtacagtgaacgtttcatgcaaattgtttttatgacggaaatttctgtttcacatcagtttcatttcctgtttggtatgttctcaaatgtgccatagcacatgaatgtggggtcactgctcagcctttcctacctactcaccctcgccaaggtggcatctggtagtgagggaggctcagcactttccagtctcaaaccctgggactcaagcagtttctgggaatgatacgatgtattcctttcttaaggcggctgaacaaagcaccctaaactgggtggcttaaaacaacaggaatttat

SEQ ID NO: 8988 - DNA, 462 bp, Homo sapiens
  III.2616 (AI733450)
ttttcattatgaatggtttaaacatttattttcagggtaaaagttaaaattgtcctaaatcatctacttttttagtacagtgaacgtttcatgcaaattgtttttatgacggaaatttctgtttcacatcagtttcatttcctgtttggtatgttctcaaatgtgccatagcacatgaatgtggggtcactgctcagcctttcctacctactcaccctcgccaaggtggcatctggtagtgagggaggctcagcactttccagtctcaaaccctgggactcaagcagtttctgggaatgatacgatgtattcctttcttaaggcggctgcaacaaagcaccctaaactgggtggcttaaaacaacaggaatttattctctcagagtggtaggggctggaagtctgaatcaagatgccagcagggccaggctccctcctcgcttgctgtcaccagcagccctt

SEQ ID NO: 8989 - DNA, 576 bp, Homo sapiens
  III.2617 (AI791749)
  misc_feature (508)..(508): n is a, c, g, or t
  misc_feature (552)..(552): n is a, c, g, or t
gggaaatgacgtggcggagacacaggagggggaaataccgcgtgatgatggagttaaagacaggagttatgcagctgcaagccaagaacaccaagggctgctggtgacagcaagcgaggagggagcctggccctgctggcatcttgattcagacttccagcccctaccactctgagagaataaattcctgttgttttaagccacccagtttagggtgctttgttgcagccgccttaagaaaggaatacatcgtatcattcccagaaactgcttgagtcccagggtttgagactggaaagtgctgagcctccctcactaccagatgccaccttggcgagggtgagtaggtaggaaaggctgagcagtgaccccacattcatgtgctatggcacatttgagaacataccaaacaggaaatgaaactgatgtgaaacagaaatttccgtcataaaaacaatttgcatgaaacgttcactgtactaaaaaagtagatgatttaggacaattntaacttttacccttgaaataatgtttaaaccattcatgatgaanaaaaaaaaaaaaaaaaaaaagaat

SEQ ID NO: 8990 - DNA, 499 bp, Homo sapiens
  III.2618 (AI185718)
tgccagcgcggcggggagcgcggccctgactcgtgaattttccctccgagaaaggttggggtgccgagtccgttctgctaacggggctgggggcgtcacacggcgctgggggggtgtgcgatgtgggttgtgcgcgccggccccagagttttgcagccaccttcgtcagggcagtctttttgtttgtttactttataaaagtgctgcacttaccgtctcgattttcttcttgggtatcttccctttccgaatgtagttttctttttaaaagcggaaggagagttttacatggaagtggcttacagaaacttggcgctgaggtgcagggaagccagaaactctttgtgtctctaaggccgatgaggaatttggaaacacatgtgggacatacaagcgttggatatagaggtgtgtgtgtgtgaccttatcatggagaaacactgaaaatactatcaaatctttgtggtctgcaactcagagcttcaaagcttgagatagg

SEQ ID NO: 8991 - DNA, 466 bp, Homo sapiens
  III.2619 (AI792094)
accaatatctaatacccaaatcagggataaaaaaggctgacctagccagtcatctacaaagactcaagaaaacccttatttgtatgttaataccgatgacaaaatataatcttttaaacttaaagataatattgtatgtcttaaatgacaccaatatggagaagaaaaagcctttcatctaagagccacttttactggcactcagattagatcagaagcagctctttcaggtcttcaggaaaagctcaatctccacccaaaacagaaaaagcaaatcctatgcatcctctctcctcatacttcttataacccacacacaaattatgaaatatcataattcagtatgttgttcagggaaaaattttcaaaaaagtgaaaacctaggaaggtaagtcattgcgtgaacacttttacaacagctaagcatttcctacgtgactaatctattttaaattcggctcctctg

SEQ ID NO: 8992 - DNA, 507 bp, Homo sapiens
  III.2620 (AI821752)
ggcgattcccggagacattctgtgtgccagcgcggcggggagcgcggccctgactcgtgcattttccctccgagaaaggttggggtgccgagtccgttctgctaacggggctgggggcgtcacacggcgctgggggggtgtgcgatgtgggttgtgcgcgccggccccagagttttgcagccaccttcgtcagggcagtctttttgtttgtttactttataaaagtgctgcacttaccgtctcgattttcttcttgggtatcttccctttccgaatgtagttttctttttaaaagcggaaggagagttttacatggaagtggcttacagaaacttggcgctgaggtgcagggaagccagaaactctttgtgtctctaaggccgatgaggaatttggaaacacatgtgggacatacaagcgttggatatagaggtgtgtgtgtgtgaccttatcatggagaaacactgaaaatactatcaaatctttgtggtctgcaaactcagagct

SEQ ID NO: 8993 - DNA, 421 bp, Homo sapiens
  III.2621 (AI239745)
  misc_feature (360)..(360): n is a, c, g, or t
tttaaggaaataattttattagaaaagggttagagggtgggttccgggattagcaggagatcggtggaaggaaagaggaggtctggcaagtcctcagacatgcgcagttatctcttcatgcttcctcatgggtgctgtgtgcaaatcaaattccggggcagttaatacgaaacatgcgtggaaattcaggctgtgatatcagcaagctctttctgcagaaactccagttggccatattgggtccaactgatttctgccagttttgttatcacttgtcacagtttcagtatctaccccaggaggtcacgattgcccattgtgtctgtcccaggagaggttgcgagagttcccacccacccncttccactcacagaccctgaagcagagcttgtctggtttcaggcaaaacagagtcagcatc

SEQ ID NO: 8994 - DNA, 335 bp, Homo sapiens
  III.2622 (AA504493)
tttttttttttttttttttatttttatactatttattgttattttagaatgtattccttctacttactaaaaaagaaaagttaactcaaaaacaagcctcaagcagatgcttcagaagacattctagaagtcattgtcaccataggagatgtcagctccgtgcatgttattgcccctgaataccttaagtgggacacggtagaaggtgtcagacagtgatactcaagatcctaaccctatttaggcctagattaatgcgtatgtgtcttcgtttacaacaaaaaagtttaaaaagtaaaatcgggcaggcaaaaagggcctggaaggtaggctac

SEQ ID NO: 8995 - DNA, 434 bp, Homo sapiens
  III.2623 (AA504571)
agaacacagaagccattagagtctaggcctgctagatgttcaacactagcaggctgggaagcttcttcttactaaagggtaacaacatacacatagagtgtagttacaatttgcctccttatccaagaacacagtatatcctcaaattagaaatatagtatgcatttttcattttttcttggacttttttctagcctgaaccactaaaaaggcttatgactgctaacagctcaggaggaatgagcctctaaagtgcaaaactgtctctgaatatcatttacccgtgacagaaaccaggactcactggagaaatagctgagtctagtatagactaagaaatcttcaagatgagtttggaatatcttatatcacaccctcacgttcctcattgttagaatgggaccaatttcatagggttgggctgagttaatatc

SEQ ID NO: 8996 - DNA, 451 bp, Homo sapiens
  III.2624 (AA922859)
aaactggtcttgtagtctttattgactgtttgtaccaaattgactccaggagaaatggaaaatctaattagatctataactcttcaagacattgaaattacagctttaaattttacaataaagaatattctggccaggcatggtggctcacgcgtgtaatcccactgcactccggcctgggcaatagggcaagactccgtctcaaaaaaaccagaatattctaggctcaaatggtattacagatgagtctaccaaacattcaaggagcaattaattccaatcttaaattcttcaaataataattaaaaaaaggctgggtgcagtggctcatgcctgtaattccagcactttgggagcccgaggtgggtggatcgtgaggtcaggagatcgagaccctcctggccaacacggtggaaccctattaccactaaaaatacaaaaaattatctgg

SEQ ID NO: 8997 - DNA, 429 bp, Homo sapiens
  III.2625 (AA045722)
  misc_feature (407)..(407): n is a, c, g, or t
  misc_feature (419)..(419): n is a, c, g, or t
caacactgtacctcagttcattgccagagagccatatgagctcacagtgcctgcactttaccccagtagccctgaagtgtgggccccgtaccctctgtacccagcggagttagcgcctgctctacctcctcctgctttcacctatcccgcttcactgcatgcccagtgtttctctcctgaggcaaagccaacacacctgtcttttgtccacttctccagcaaattagatttgtctctgggaatgtgtttgtaacataccaacctactgcagaccagcagagggagctcccatgttgaatttgtttgttagctaattttccccccttttcacaaaaactatttcttgacgacctttgagagatttcaaataaaaattttaatcaggagcaaaaatgaacttcaagtangactgcagcggntttggttttt

SEQ ID NO: 8998 - DNA, 402 bp, Homo sapiens
  III.2626 (AA045723)
cagtgtaaaagagtaaaacatttttattaattatatttttttcttcgagaaaaacagatgtgtgatagaggctgtgacaaagtcttgaagggatcaaaactgggcaagggtttttcaagccagcatgctccagttttgtagaacagctagagaacagtagccaccactgaagattgcattaatacccacaagacagattgcagccgccatcacacacctgggacatagtattcagcagaactgacgggacttccagccctgagaagtagcctcggagggagggagccagcgcatcaaacaggaaaccaggccaggctggcacttatcaggagacggagcgctcaaggggtggcttctcctcacagtctgaccttcacaggagtttagagcttggggaaatct

SEQ ID NO: 8999 - DNA, 491 bp, Homo sapiens
  III.2627 (AA428560)
tttaataatataattagtaataatccatttaataaccctggattaattaaattttcttctcattccaagaaagttctgaagaagctagttcatcactctaggggatgacttccttctctttgccatgatagttaggcagaacgtttgaaatcagtcctgtttacgcctctcattttctcatccacggctcaaaaaggaacccaggacccgagagagaaggtgtgtgctcatacgcgcttgacatggctcccctcctccagatgcctctcctctccaccagtgctgcaacctaggagaaaaggcctggcagcccaactccatcggcattctctttccatcgggagtcttgtgcattgggcatctctagagctggagaaccagacacagccttgtaatagctgacttaagctcaggaatcatttttgctacctcctcccgagtgtgtctacctgcccaggcaagtgaaaaacccaaggcagtgggctccatgg

SEQ ID NO: 9000 - DNA, 369 bp, Homo sapiens
  III.2628 (AA429516)
  misc_feature (77)..(77): n is a, c, g, or t
aaggaaatgaggtcgagggcatggagtggctcagcatcccaggatgctccaggagggggtaaaaagaatgttttcantatggacgaaaaagtccaggaggagcggtggcatcgcgagaagggatgagagggcgagttgatctaatattttgtatttaaattccaagaatttaaggatgaattcgtaaaaaatatgcaggaacttaagcaaattgaatgaaacaattattaactccagggaaaacaaaaagttgtataaggaaaaacctcaatcattggctgttacatgacctggcataaatggtaggtagaagtaaagactatacataatataaagacagtgttatcaatgtgacaagtcaccaacaat

SEQ ID NO: 9001 - DNA, 451 bp, Homo sapiens
  III.2629 (AI299739)
agccaaaatcacagaatgaaggcggtgaagagcgaacgggagcgagggagccggcgaagacaccgggacggggacgtggtgctgccggcgggggtggtggtgaagcaggagcgtctcagcccagaagtcgcacctcccgcccaccgccgtccggaccactccggtggtagcccgtctccgccgaccagcgagccggcccgctcgggccaccgcgggaaccgagcccgaggagttagccggtccccacccaaaaagaaaaacaaggcctcagggagaagaagcaagtctcctcgcagtaagagaaaccgaagtcctcaccactcaacagtcaaagtgaagcaggagcgtgaggatcatccccggagaggacgggaggatcggcagcacagggaaccatcagaacaggaacacaggagagctaggaacagtgaccgggacagacaccggggcc

SEQ ID NO: 9002 - DNA, 491 bp, Homo sapiens
  III.2630 (AA009647)
ttttgaggatataaaaaagaatactccaccccgtgcctcccccaaccacaaaacaccctggttattggttcctaagttatgttaaaatggaatttgctgctaaatatgcttcacttgataaatactgcatcttggaaggattaatactgtccatattgtaagggaatattagtttaaatatgttcttattcagaaataaaatgcatggctctataataacacattagtactgtagagataagaatgtgtcatcagccatggcccctaagtggccattgatgacatggcataagatcacagttttaacctcctttaatatcaaactctcctggctctctgaaatagaagcataggaattacagctaagaacaaacaacaaaagaaaaactcagttcaaatcctgactctgcttccagcttctggtacattaggcaagttgctaaacctctgggcttaggggataaagacactacctcacagggtggagtgag

SEQ ID NO: 9003 - DNA, 469 bp, Homo sapiens
  III.2631 (AA009648)
  misc_feature (464)..(464): n is a, c, g, or t
aagtgaaaatcatttattgaaaattaatttactaaatgaaaatccagcaatcaataaacaggttaatcaatatcatagattgaacatggaatacaaaatagcaacagtagctaacatgtatctatcactaactgtcccaggccctgtgctcagtcctttacatagattatcttctttcatcttcataacccaagatatgagtgctattttaacacccattttacagatgagacaatacaggcaacatattagaatctttaagaactctgtctgatctacttagcaataagatccctcacttctggggcccttcacttgcctcaagggatatagtggctgttaaggggtggggataaggatgcgatcagactttgcttatgtctcattcaatcttattgccaggtcccatgcaatatttgcctttcccctcctgatgggagagaccatactagaatgggccaganggcct

SEQ ID NO: 9004 - DNA, 451 bp, Homo sapiens
  III.2632 (AA436158)
gataaacggctatatctattaatcgcagcatcatgatcattacttgcaatctgaaatacttcctttaatgttagtatttctttcagatctctttctttaaactgggtaatggggaacatcatggcatcagcaagttgagttgaaagcactgcatgacaagagctaagctcatctataacttttgaaaactgttgcaatgtagagctcataacttcatcatcacctcccaatggaaaacgctgtttttcatattcttttaaaagttttgaggtcaggtgtgttgctgcacttaattcattctgtgcatcataaatccgatgcatagcttgatacaactggttcatatagttggaaatagctgtggcatcttcttcaaatacacctagtaaagaccttgtctgcgggctgtcctccagcgtctcctcgatgggcagcttgtccctcgtgccga

SEQ ID NO: 9005 - DNA, 426 bp, Homo sapiens
  III.2633 (AA436284)
gacaagctgcccatcgaggagacgctggaggacagcccgcagacaaggtctttactaggtgtatttgaagaagatgccacagctatttccaactatatgaaccagttgtatcaagctatgcatcggatttatgatgcacagaatgaattaagtgcagcaacacacctgacctcaaaacttttaaaagaatatgaaaaacagcgttttccattgggaggtgatgatgaagttatgagctctacattgcaacagttttcaaaagttatagatgagcttagccgttgtcatgcagtgctttcaactcaacttgctgatgccatgatgttccccattacccagtttaaagaaagagatctgaaagaaatactaacattaaaggaagtatttcagattgcaagtaatgatcatgatgctgcgattaataga

SEQ ID NO: 9006 - DNA, 499 bp, Homo sapiens
  III.2634 (AI015488)
tttgaactttactactgaatgatttatttgcaacttgttatctggtatagtggggaagagccacttatgtctctttaagccaagatatatttaagataacaataaagataaaatatcagtttcactatctagatttgattttgacacaatgaaaagctgattggttcataatcaaatgaacaaattttccacaagtaagagatgaaacccctggcttggaaatcctggggattgacaggttgaacgtccttggtctgtggtgagcatgttcacgtttcaacacatgagatctggtgtgctttccgtagcagctcctcagattttgagaaaaactgggtttccttccagtgagccacagatagaagtcatagatgatggcaggggctgctggctgaatggcattccagtactgggttcagaagttgctggtgggtgagatcggcatatggcctcgttgaagctctctcaaatggaattggaatttcaaaggttgccaaga

SEQ ID NO: 9007 - DNA, 270 bp, Homo sapiens
  III.2635 (AI015181)
ttttttttttttttcaggtttttatttttttatttcttatattttttaagacggagtttcactcttgttgcccaggtgcagtgcaatggcatgatctcgactcactgcaacctccacctcccaggttcaagggattctcctgtctcagcctcccaagtagctgagattacaggcatgcaccagcacacccagctaattttgtatttttagtagagacagggtttctccatgttggtcaggctagtctcgaactcccgacctcaggtgata

SEQ ID NO: 9008 - DNA, 456 bp, Homo sapiens
  III.2636 (AI125265)
ttttttacaataggaataacttttatttgtttatacaagttttgaatttcatctattttttatgtaaatagctcgatcttcaaaaatatccttcagctctgacaacctcttcacataactttcctgtaagatcttttaaatatccaaaccatatggtaggtggctcagaaccttctatttctaagtaatcatatttctcttccatttgaaaatcagtaaatatgagtgaaattgtgtccccaggctctgctacaatggtccaagtgcaatcagcattgttatggtactcattaggaaaactagggctggatatgatgccactggatcctctcattgttcctccacaagcatcttcagctctacagataggaacaggaaaatcccacgaagctgtattaactgaattggctatgcaggtgagctgagggtggccatcaaggatgtatccagttacac

SEQ ID NO: 9009 - DNA, 429 bp, Homo sapiens
  III.2637 (AI219882)
ttcagggaaaatgatcatttattctgttgaatttcttcagaatgaattctgggatagatcaaacaaaaaagttataaaataggaattatagataatgaatgcctgcttgttgcaaaggaatttgaatatttgctgtgtgtcgggctgtgtgcaaaacacgatccccatttttcagagaaggaagctgaggcacagagaggttgagaaacttgactaaggtcacacagctcatggcaaactcagggtgcaaatgcagggactggctgcagggccacagctcttatcattctgcccagatgcccagcctatctgccactggtggataatactccccctcctctcacacttgacaggagtttgcatctgcaagacctaggtctgggtcatctctccttctgaagtccttaatctgtccgcaaatcatctttt

SEQ ID NO: 9010 - DNA, 266 bp, Homo sapiens
  III.2638 (AI215001)
tttaattccattgagctaaattaggattatgaacagttatagtaaggggattacaatttctcttagtccacagtttaggacaggaagcacaagctatggaaagggttgaagatcgggttgatcccccagagtaggtggccaaagttacacatgtccagtcagggcagaaaaactggtaagaatctcgacaactagagttagggtgatttcgaggacagaggtaaaagtcaacattctggagtcctttttctgcacctttggagctc

SEQ ID NO: 9011 - DNA, 475 bp, Homo sapiens
  III.2639 (AI218338)
gctcatcaaattaaattttatttgatccatcaacattttatactattacattgttattagttgaaatgaatatgttattagcacataaaacttgttccctggcaagaaagattcatttgtatcacttttaatttcaggacacctagaaaagtatggattaactagaactatacaggactggattcctccagaaagaaagtatggtatcttttcccaagagcttagaatgtatactttttgcccttttctcccccactatggggggctggggagaagtatagattattagctaaaaaacaaacaaaaaaaccgacaaactcgacaggtgtcaagtagctgtgtgtcttggtaatttgctcagcctgttatatagtggtaaacaccctactttgaggtgcttacttgaggcggatattcagactttgacttattaccttccagggttccaatgggtattaaataaaaatactactca

SEQ ID NO: 9012 - DNA, 319 bp, Homo sapiens
  III.2640 (AA857311)
tttttttttttttttttttttttttttttttttttttttttttttttttttttttttttttttttttttttttttttttttttttttttttttttttttccgcctaaaaaattaaaagggagggggggggggacccggaaaatccggggggggacccggggggggcccccctaaaggggcacaaaaaaaagtttttgaaaagaggaaaagggaaaaagggttcccgggggaaaaaaataaccccccccggggcccaaaaaaaaaaccggggggggagggcgcccgggtttttcaaagggggaaaaaaaaaggggggggg

SEQ ID NO: 9013 - DNA, 255 bp, Homo sapiens
  III.2641 (AA883522)
tttaaagtatttattactcggcatcaatgtatttcttaatcattatcctgagtggacttttaagtaggaagaaaatggtgtgttcattactccaaagctgaaacacagttggggttgtgtaaggtgacagcaggtgagttggtaaaagagttagcagaagtgacggctttcgtttcctcaactactggattcaccagtaagccacatgagacctcagtcacaatcggtaattcaaaggtagatttaaatataaat

SEQ ID NO: 9014 - DNA, 305 bp, Homo sapiens
  III.2642 (AI286182)
tttgggagcatatgacatgttagcaactgggccaagcacactggacatcttagcttttccattttcacagggatgctatgaggattgtctgcagtttacagaagaggaaactgagcctcacagagttcatcatttatgggtggaatggactaccttcctgtcatcttcaaagacccctttctcttctttgttgtttgcccctgtggggtagcatggcctcttccgtgagctcctgaaaaagcagggaagaacgcagacagctcccttttcagccctgggcgcagtacctgtctaagacattacgt

SEQ ID NO: 9015 - DNA, 375 bp, Homo sapiens
  III.2643 (AA450121)
cactttcatgctttattgaaagtagaatatgaatcaaagacaggcattggtaagcaggttatgtctctaaaattacttttcgttcagagcagaatgttgtcccatctacttgatacaatcctttatggaccaacgcatctggtatgaaactcgagcaaggaaatataacagaactttattcccctcccacgactataaatctcatatgtaaacatgatttactattactgctactaaacttgttccgtctttacttgccccctcccaccgaccaccccccttaaatataaaattggaaacatttccttcaagtctgatgtccatcagtgcaatctgctttatttgacataaggcatttgggacagtcacgtttga

SEQ ID NO: 9016 - DNA, 444 bp, Homo sapiens
  III.2644 (AA450187)
gcgacatagaaaagttcgtggtgagaaagcacttctcgtttctgctaatcagacgttaaaagaattgaaaattcagatcatgcatgcattttcagttgctccttttgaccagaatttgtcaattgatggaaagattttaagtgatgactgtgccaccctaggcaccgttggcgtcattcctgaatctgtcattttattgaaggctgatgaaccaattgcagattatgctgcaatggatgatgtcatgcaagtttgtatgccagaagaagggtttaaaggtactggtcttcttggacattaatctttgaatacttgctgactgctaagaaatgaccagaggggaagaggagtttgacatgttagggcattaaagcaaaggtggatttaagaattaaaccattacatgccccttccaaaaggcagaaatccattcaaacgtgactg

SEQ ID NO: 9017 - DNA, 349 bp, Homo sapiens
  III.2645 (AA912204)
tttattatatgtccataaaaaattttaattaatgcaaagtattaacaccaatgattgcagtaatacagatcttacaaatgatagttttagtctgaacaggactatccaaaagttaattttctatagtaacagtttttaagtaaaatatcaattcctgaaacacataaaatggtccatgagtatacaacgagtgaaaaaaaacaaattcagagcaaagataaattaagaagtatctaatattcaaacatagtcaaagagagggaaatttctggataatcacttaaacccatggttaaacataaatgcacatatgttaatgtttactgaataacttatctgtgccaagtgg

SEQ ID NO: 9018 - DNA, 214 bp, Homo sapiens
  III.2646 (AA291530)
tcaaggggcttaaaaacaagcccaacttttattttattcacaaattggcaatttcggtgaggcttagtccggagggctcatcttgctccactccattttggtcagctggggcggcccaaagcctgggccaggagttgtctgaacctcattcactcatgtggctggcacttgacactgctgttggctggggcttcagctggggctgttggcaaga

SEQ ID NO: 9019 - DNA, 521 bp, Homo sapiens
  III.2647 (AI821573)
  misc_feature (511)..(511): n is a, c, g, or t
aaggggcttaaaaacaagcccaacttttattttattcacaaattggcaatttcggtgaggcttagtggggagggctcatcttgctccactccattttggtcagctggggcggcccaaagcctgggccaggagttgtctgaacctcattcactcatgtggctggcacttgacactgctgttggctggggcttcagctggggctgttggccagaacactcccacatggcctgtcctgtggctgcatggcttcctcacagcatggtgactgggtcccaggggtgtgcatttccagaggaagctgtttcactggttacaatttagccttggaagtcccatggcatcacttccactccaaccacagtcgaggaaggagtgtcagctccatagtgtgagaagagtatatgggatgggatatattggtggcaccaatgattggaaaatacaactggcagaatgactgttcttcataaaccttcctcataagtttcagcctccacccttactctagctntcttcttctg

SEQ ID NO: 9020 - DNA, 543 bp, Homo sapiens
  III.2648 (AA425282)
aaagatcaacagtaactagtttattatgaaatagaaagacatttccagaatttacaaaagccaacattgttcattccaaagagaacttttgaattgaaggaatcacacatctccttctgataacaatacatgcaatggaagactttaatttcctcttcttataatattgcttccattcaattaccaattttaagctgacatttgaaaacacccagccaaatatatccttcttcagtttaattaacatggcctattgtcttacaggaaaaaatacaaaattaagattaattcttataaggaactcagctcaacatcaggtttatatgacaagagatagtatcagcaaatataactatacaattgagaaccatctatggcactatgattcttatattatgttttctgaattacaatcttaaaaccaggatcataccctattctactcctttaagccttgttttaagcatttgctccactctttaacgacggaacattggtatacctccaatccacattccgaaaaaaagatggtgcggtagaaaa

SEQ ID NO: 9021 - DNA, 597 bp, Homo sapiens
  III.2649 (AA425477)
ggatttggtcaaggacttcaaacagtgccctcaggagtgcacccctgaaccgcagcctcccccacccccaccccctcatcaacccctgggcagcggtgagagcagctccacccgccgctcaagtgaggatttaagcgcctatgccagcatcagtttccagatatcagccagaggacatgtcagtagctcaactggacatcacagcagaatgaagacctaaatgacctcagcaaatcctcttctaactcatgggtacccagactctaaatatttcatgattcacaactaggacctcatatcttcctcatcagtagatggtacgatgcatccatttcagtttgtttactttatccaatcctcaggatttcattgactgaactgcacgttctatattgtgccaagcgaaaaaaaaaaatgcactgtgacaccagaataatgagtctgcataaacttcatcttcaaccttaaggacttagctggccacagtgagctgatgtgccaccaccgtgtcatgagagaatgggtttactctcaatgcattttcaagatacatttcatctgctgctgaaactgtgtacgacaaagcatcgattgtaa

SEQ ID NO: 9022 - DNA, 238 bp, Homo sapiens
  III.2650 (AA550710)
tttttttttttttttgagagtagatccgctctgtcgcccaggtgggagtgcagtggccaatattggctcactgcaagctccacctcccgggttcacaccattctcttgcctcagcctcccaagcagctaagaccacaggcgcccgcgaccatgcccagccaattttttgtatttttagtagagacagggcctcaccatgttggccaagctggtctcgacctcctgaccttgtgatctg

SEQ ID NO: 9023 - DNA, 341 bp, Homo sapiens
  III.2651 (AI821494)
gcgtcgacttttttttttttttttttttttgagacggagtctcgctctgtcgcccaggtgggagtgcagtggcacaatattggctcactgcaagctccacctcccgggttcacaccattctcttgcctcagcctcccaagcagctaagaccacaggcgcccgccaccatgcccagccaattttttgtatttttagtagagacagggcctcaccatgttggccaagctggtctcgacctcctgaccttgtgatctgcccgccccggcccaccaaagtgctgggattacagacatgagccaccgcgcccggctgatagtttcacgtcgacgcggccgcgaatt

SEQ ID NO: 9024 - DNA, 353 bp, Homo sapiens
  III.2652 (AI123080)
ttttttcgtatcataaatacaagttttatttaaacttttttgtaattcaagtaaaaaaaaagctgttttttaactactgttacataaaaagtggaaagtgaggcaatccatcttttcggcaataatcttctcttcttataataatgccatcttctttgaaagtccagataattccaggccaggcacggtggctcacgtctgtaatcatagcactttgggaggctgaggtgggcagatcacaaggtcaggagttcgagaccagcctgagctcacgtgatccacccgccttggcctcccaaaatgctgggattacaggtgtgagccactgtgcccggccttaagtctcttttaaa

SEQ ID NO: 9025 - DNA, 438 bp, Homo sapiens
  III.2653 (AI167890)
ttttttttttggaatctaagttttattttgacacataatagtggtcacattgaaattttctttagcttttctctcactttcattaggtgtcttttttaagagatatacctcttatcaaccacagctggaccaaacttcctcggaacagctctttcttccaaagaaacacacaggattcataaggaaataactgtttcctcactcctcttctttctcatttcccgtcactttcatctgtcctcctttccttctcctcttctttgataactttgcataatggcttggttaaaagaagaatgttaaagctaagaggtgtcaaaagacacagcaaaaataagacagcatttcatttaagtaaaacaatcctttcttaatggattcctctaaaataaatgtcttgaagtagattttgcttcctgtgtgcaaaggaaagttgac

SEQ ID NO: 9026 - DNA, 456 bp, Homo sapiens
  III.2654 (AI088984)
tttttgctttttattagtttgtttatttttgagataaggtctcattctgttacccagcctggagtgcagtggtgcaatcagaggtccctgcagcttcgaactcctgggctcaaccgatcctcccacctcagcctcccaagtggctcggactacaggtgtgtgccatcatgcccagctaattgtttttgtttttgatgttttatttttgtagtgaggggtcttgctatattgcccaggctggtctcaaactcctagctctaagtgatccttccaccttggcctgccaaagtgctgggattacaggcgtgacacctgtgctggggtccaaattcagttctgttacagcggaacagattttggcaggcagctgccactctcaatttcatgtattttcctttgctccaccttccatccgtgtcttccccatgtggcgcaagccccttctctataggggtc

SEQ ID NO: 9027 - DNA, 457 bp, Homo sapiens
  III.2655 (AI074562)
tgtttgttcgtttgttttttaatctttacgggtctgatggctctctaaagggattaggttattgtgattttttttttcccatgcaaaaggacctgcctttctttccctgttctaacgaaagggcaccccccactgagttccaaagagccgttgccccttaaagtgccctctgccatgcattaccttaggttatgtggcaaacctaaccccatactacagcccagttacctcggtgcagacaactggctgtatttgattgttttgctgttgacaacaggatggattagcagggctagaaattaaagtatattgagtattctttaatgccttatgtacaaatttttctggctgtcagattctctgtttggctttctcggggccttgaaggtagggggtcaggaactaagtgttttgagaactgacagctccctttagcgaaaaacagaattctcccacc

SEQ ID NO: 9028 - DNA, 241 bp, Homo sapiens
  III.2656 (AI184681)
tttttgtccttgtatgccttttattcaatttttgagggagaaaatactactctcaaatgtatcatgaaatgacattacatttaccacccaccagcctgtgttgactgaatagtcctgaatattcaggtgcaacctctgaaagtaaagcagaagtgaagatataaatacaataggctcattgtctgtagataaactggagaaataataaacttctttttctacgtaacatatgacatagaga

SEQ ID NO: 9029 - DNA, 432 bp, Homo sapiens
  III.2657 (AI140281)
ttttttttttttctcaggcccagtaagcagtagttttttattggaatgaatcttatttgtaccatctccaaggttctgaataaaaaattgtttcagtaaaaatttccttgaataaagccattgaacaatttggcaaacttaagcaatatcctccccctcctattcctctagttgctgccttatatctaactcttctacttcccctttacccttctaatctttctcttttttttttttttttttttgagacaaagtcctgctctgtcatcaggctggagtgcaggggcacaatttcggctcaccgcaatctccgcctcccgggttcaagtggttcccctgcctcagcctcctgagtagcagggaccacaggcacgcaccatcacgcccagctaattttttgtattttagtaaagacggggcttcaccatgttg

SEQ ID NO: 9030 - DNA, 255 bp, Homo sapiens
  III.2658 (AA280583)
tttaggagatggggatgaagaggtccagacattcccctaaatcagtaaatatttattaggtgcctatacgaggtataggaaagttttctgagcactgatctgaagaggacagagaataacataagccactttcctttaggaagtttacaaccctataaagacatatataagtgaaaagcaatataagagctttcaaatgccaaaagagggtattagacccccccccccaaaaaaaaaaactataggatgacagag

SEQ ID NO: 9031 - DNA, 402 bp, Homo sapiens
  III.2659 (AA281982)
taccagttgttattagtatttctctacacttatagatgtggccggcacctgctggtacctaactctgcaagtatctgattcaattcattgaagaagatacaatgcagcaaagacttatggatgtctagtatatgccaggcatattattccactgagtagctgaggcccatgagggaggtgcctgtccttgaacagccctttcctaaaaatcatcatcatcccattgtagctgctcccagaatgatttgattgctccatatgaacaagtcctataacactagtaacaatgataccatgagagaccgagccccgatggcctaagtaaggacgagacctcaagtcctttgaccctggatgcattatttctactatatcatagttccctccttgtaagactgatgt

SEQ ID NO: 9032 - DNA, 371 bp, Homo sapiens
  III.2660 (AA401177)
ttaccttttgatacttttaatacttcacaatttttgccaattaaaacttaaaatattggtagatttctctctctctctctctctttctgtatttatttctttgacattgacagttgatttactaattaatactacctccaaattatgcctctgaaaatatatttatcaaaaaatgataataaaaaatagtatgcctctaagtttttcatcaatccacgctgctaagatttagataaactatttttaaaaagaactctttaaaacatttaaatatatttgattttatacatttaaatataactattaaaaatttaagcaaaggaaacttagcagcaagtcttcctagtattttcctggctggattctaagtt

SEQ ID NO: 9033 - DNA, 473 bp, Homo sapiens
  III.2661 (AA426442)
tttttttatttttccagaatgcctttattttcagtatcatagaatttaaatacagagtcaaaagatgatttataaaatataaaacattttctgcttggccgtatttgaagacaagctgaatacatatctatgttctgaataagtccactatggatatatataggaagagatatacatatatccatccacagatacacacacacatatatatttctgcatgtatatatacataattctttctatagttacaggaaatacttcttctataattctgattttgactcccatcctccaccatttactcatccactcattacctaaatcttggctttctttcctatattgtaaataatccatccaaacttctagccagtactgtcaggagggttcttgctcgagtgagctgttaatactattttccactgacaacttctgcacatcgaggacacagtgtatctgaagactccgctgta

SEQ ID NO: 9034 - DNA, 351 bp, Homo sapiens
  III.2662 (AA437174)
gtagctgattccaatgtcttcaccgaagttgcaattggcccatccgtgctcaatgctgccagagatgatattagcaagcttaggaatacacttcgctttcttttgggaaatgtggctgatttcaacccagaaacagattccatccctgtaaacgatatgtatgtcatagaccagtacatgctacacttactgcaggatttggcaaacaagattaccgaattatacaaacaatatgattttggaaaagttgttcggctgttacggacgttttataccagagagctctctaacttttatttcagtataatcaaagataggctctattgtgaaaaggaaaatgaccccaaacga

SEQ ID NO: 9035 - DNA, 383 bp, Homo sapiens
  III.2663 (AA452892)
tttgagatggagccttgccctgtcgcccaggctggagtgcagtggccgatctcggctcactgtggcctctgcctcctggcttcaagcaattctcctgcctcagcaatggagcaagattccttgtcaaaaaaaaaagggggaggataatgaggaggagcaaatagaatgaactccatgtctctccaacacttgacctgaagtaactccacttttacctcgtttattttgggaattataaatacaattttatttagtaaaaaactaggttcttttcctttaaaagtatttagaaagtgtagctataaacaatggagaaaggaataggaactatgagagatgagaacaaaaggaaacatctctattgtaaaataactcaatatggc

SEQ ID NO: 9036 - DNA, 98 bp, Homo sapiens
  III.2664 (AA453061)
tcttgatttttagttatttggctggtagcacagagacagaataaaatccaaatttcttgattcacaggctattactatttttactgccgctctgctgc

SEQ ID NO: 9037 - DNA, 456 bp, Homo sapiens
  III.2665 (AA995691)
ttgtataagtatgtattatttaattttttataccaagaccaggaaaccaagcccaagaaagtttttcccttaacattggggaattctactttgcttgtgatgtgtaaaatctgctaagatctttggtctgtcaggacgggtattccttactgatgaagctagaaatatgtaacaggtaacgtggccagtttcgctgagcgttttctccgagcattggctctctatgcaaacgtatttcctaagtgtgagcttggtgtaccttgactaaatgagaagcattctcaatatgacactgtaggtataatcttggatttatgattaatatttccaattatatcttagtaaaaggaaaacagatttttacttaacctatgcaaatgactatattaacttaaaaagtacagaaactcagtagaggtgtttgcttctgaattatgaggagtaaatgagacttgg

SEQ ID NO: 9038 - DNA, 490 bp, Homo sapiens
  III.2666 (AI820612)
tttttgtataagtatgtattatttaattttttataccaagaccaggaaaccaagcccaagaaagtttttcccttaacattggggaattctactttgcttgtgatgtgtaaaatctgctaagatctttggtctgtcaggacgggtattccttactgatgaagctagaaatatgtaacaggtaacgtggccagtttcgctgagcgttttctccgagcattggctctctatgcaaacgtatttcctaagtgtgagcttggtgtaccttgactaaatgagaagcattctcaatatgacactgtaggtataatcttggatttatgattaatatttccaattatatcttagtaaaaggaaaacagatttttacttaacctatgcaaatgactatattaacttaaaaagtacagaaactcagtagaggtgtttgcttctgaattatgaggagtaaatgagacttggcaaattgagggttagccttaaattaagaaag

SEQ ID NO: 9039 - DNA, 363 bp, Homo sapiens
  III.2667 (AI025099)
tttttttttttttttgggagatattattgtaccatttattattttctaagaagagcaaaaagtagggaacatccaagtgagaaaatgattggagtacattcattcactcattttcaacaaacatttataggcattgttgaggggggtggtataacagtggttggaagtacaaaattgggatttgtgggtggatgcctttcatcagtttggggaaattcttagccattctcacttgaatttttttctgcctcattttcactcttcactcctgggactccaattacacatatattaggccttttgatcacatctgttatgtcctgttctgttttttccattctttcctctctgaatccaactggg

SEQ ID NO: 9040 - DNA, 502 bp, Homo sapiens
  III.2668 (AA530867)
ttttttttttttgagacggatctcactctgtcgcccaggctggagtgcagtggggcgatcttggcttactgtaatcttctgcctcccaggttcaagcgattctcctgcctcagcctcctgagcatctgggactacaggcgcccgcaccatgcccagctaattttttgtattttcagtagagacggggtttcaccctgttagccaggatggtctcgatctcctcacctcgtgatctgcccgcctcagcctcccaaagagctgggattacaggcatgagccactgcgcctggccttgttttactttttaaaatttctgtgagctgctctagaaaactaaaggacgaaaactttactgtcataattccaagttcagtcagggatttctcagaattgaggtgtgcagcatccagattcccctttatgtggatagggatccctgtgtcatgtcttgcacttagctaagaactataggaattctccatgtagctcctacagtttttcg

SEQ ID NO: 9041 - DNA, 433 bp, Homo sapiens
  III.2669 (AA907027)
tcctattgaaagccttttttgaattttattccagaaaactatccccctaaggtcgttttttcttcaattcctgggttcccatagcaaccttttgataaacatgttattggtattatcagaaaatactactgaaattgttgggtttcttatctgtctctcccactaagacagtataagcacctttcagtttccggtctctaattcagttgactttctgtgtgtgcaaaagtggcaaacagtgttctaagtactttacatacattaaaattctgtttatcctaaaaaaaaaaatcacagaagataaagactactattatatctctgttttatagatgaggaaactgatagagaggtagaatagtagaaccaagaaccacactcaggccacctggctccagagtagatgctcaacaaaagtttgttgaattgaatt

SEQ ID NO: 9042 - DNA, 429 bp, Homo sapiens
  III.2670 (AA910413)
gaaaactatccccctaaggtcgttttttcttcaattcctgggttcccatagcaaccttttgataaacatgttattggtattatcagaaaatactactgaaattgttgggtttcttatctgtctctcccactaagacagtataagcacctttcagtttccggtctctaattcagttgactttctgtgtgtgcaaaagtggcaaacagtgttctaagtactttacatacattaaaattctgtttatcctaaaaaaaaaaatcacagaagataaagactactattatatctctgttttatagatgaggaaactgatagagaggtagaatagtagaaccaagaaccacactcaggccacctggctccagagtagatgctcaacaaaagtttgttgaattgaattcaatccaagctaggagaactatgattcag

SEQ ID NO: 9043 - DNA, 443 bp, Homo sapiens
  III.2671 (AI239830)
gaggtttaatgaagcatttaatttagaaagcatcatttaacattttctcagattatgatatcatactcttccaagccagtgaggagagtttgtcataatggaacattagtataaacaggtattcataacaaagaaaggaaatcttagcatcctgctttgattcacatattctcagtaatagaagacagtcacattaaccactacatattcatttctaagtgacatactcttagaaatttccaaatatcagtaatttataatatgccttcacttaacaagtactttggaattttattactaccattttaagggaaggttcaaatactgtcatttgcttggaagatcactgcattcaacatcagacagaagacttgagctatggattaagagttgaaaatcgtcaagattccaaagatatacattattatggaattaagagtact

SEQ ID NO: 9044 - DNA, 359 bp, Homo sapiens
  III.2672 (AA491248)
tttttttttaactgactttattgagataaaattcacatatcatgtcctatttaaagtgcacaattcaaaggcttttagtatattccaagttgtgcaaacattaccacaatctaattttagaaagaaactccatgctcattagcaggaattacttgtcgtaagaaaaatcaaagaatctaacgaagggcaaggaaatcacacactttcactgttttgctgccttataccttggagctgctgttgcattgctgaaatgtcgttatgcagtgacaacttgtctctgtttagttggtctagttcctgctgcagttttctgacattcaattccaacttttctaagtttgattgctccattttgc

SEQ ID NO: 9045 - DNA, 317 bp, Homo sapiens
  III.2673 (AA515404)
ttttttttttttggagtcagggactctgtcacccaggccgggagtatagtggcatgatgataacccactgcaaccttgaacgcctgagctcaaacaatccttctggctcagcttccccagtaggtgcgactacaggactacacacacatgccaccacacccagcttttttttttttttttttttttgtagagatgtgtttcactgtgttgcccagactaatctggaaatcctgggttcaagaaatcctccggcttaggcctcccaaagtgttaggattataggcacgagccacctcacccaggtgtttaattttact

SEQ ID NO: 9046 - DNA, 441 bp, Homo sapiens
  III.2674 (AA045833)
  misc_feature (415)..(415): n is a, c, g, or t
atagtccttcattttatttagagagcttgaagtttctgattttatgtagaacagaaaaagaaacacaaattatacaaaatttaagtgcaatcaaaaataaaaatatatgttaaataaacggttatggtacaaattttgcaaagccttcaggtgagccacaaataatcttggaaattattttaataaagtcattttggttctttttcttcattttccttaaagtcacctctaaaggtatttctctgtttatatcatatgtaatcagcttttggctaaagaacaagtggtagtaaatgaagactgccaaagcctcaaaaatggatattgaagaaatggggataattagaaaaaacagaagttcaaaccttaaaattctggcactattagatgacatcaacctaaacctggtaaatcngttttcagaaaactaggtgcctattg

SEQ ID NO: 9047 - DNA, 349 bp, Homo sapiens
  III.2675 (AA045967)
  misc_feature (343)..(343): n is a, c, g, or t
ctgggtgccaaggttcatacctttgtggtagactgcagcaaccgagaagatatttacagctctgcaaagaaggtgaaggcagaaattggagatgttagtattttagtaaataatgctggtgtagtctatacatcagatttgtttgctacacaagatcctcagattgaaaagacttttgaagttaatgtacttgcacatttctggactacaaaggcatttcttcctgcaatgacgaagaataaccatggccatattgtcactgtggcttcggcagctggacatgtctcggtccccttcttactggcttactgttcaagcaagtttgcttgctgttggatttcanaaaact

SEQ ID NO: 9048 - DNA, 424 bp, Homo sapiens
  III.2676 (AA441912)
attttacttctgtttatttgtgtgtatgggaacctcagagttcatcagatattttaaaaatagtatgcatttatttaatatattttacaattacttactatatgctttgcattactattaggctttggaatacagaggtagaaaagatagttcatgcctgttctgaaagtcatcatttgttcaaggagacaaaaaactaattataatatcagaagtactattatagatgaatgcacagggagctttgggaagccagagcgggtgcttcccgcctcttcaagataggggcagtgtactgaatgtgcttcccagggaaggtgacagctgagtcaagtctacaaagagccagacttggagcgtgaaccttctcttccaggctaaggaaatgaagttcatattaagatgatgaagagccatgaaatgc

SEQ ID NO: 9049 - DNA, 423 bp, Homo sapiens
  III.2677 (AA442020)
catttttccctctagtgttagaataaaccagagttccctggattgggcaccagatgaaatgacagatctggggtaaaatctgtcttgcagggaacatacgttatctttagattctaaaatcaaaccaaattcagtaaaatgttcacaatataaaacaggaaaatcaagactgaggatcaataaatcatctcttaatttagaatcaccaggtgaaatggaaggtaatcaaacatattctctcttgcatatccagtcactcactcctctattaacctctagccctgtgtttccttatgtgtataatggcaataatatctaatttaaggggtgctggattaaatgagataatatatatacaagtcagagacacagcaggtattaaatagtagccatgtcgagggtggtaaaattgatgctgctccc

SEQ ID NO: 9050 - DNA, 472 bp, Homo sapiens
  III.2678 (AA492507)
tttttttttttttttttattcttgcttttcttaataaacactatatcataagcttttccttatttcagtcttcaaagttataattttaatgtcttcacgtgatgttgtccagcgcacttatcataatttactagttggtttcctgattattttaatgcttttatcctaggaagtcaggaaaaactctgcatacctatcctaaggcacttcctcattagctgaatggcaagtatttttagcctagtgaaaaccagcggagaagaaagcattagggacttacgttaacagccagcatatcattttcaaaggcctcacgcagcttcttcataatctctatctcagcactggcacaggcctcaactgtgcccttcacagtgatggttctttccgggttgtatatgctcaaatcctgcaaagatgagattgttatcttggtccctgtttcatgttcaattttcttcaaatttctgcc

SEQ ID NO: 9051 - DNA, 339 bp, Homo sapiens
  III.2679 (AA813363)
ttaaacctctgatcaaatccaaagtcataaagatagttcagtacgtcctctgatgacaaggtctcctgtaaataccattgtgaacagaaggaaaaccatagtgtaatcccttgaccaccaaagcatatcccttgagcctgttgtagtacttttttctgggagagaggaaattgcgatctgaagattaaaatctttggtgacagaactggagtggatatgcaaatttcaaggaagaagttttccaaagcctcaagagaagtatcctaggacagttaatgtgaatatattttaaaaagtcaatcatttctttctatagctttggtttggtgcagtcaatgt

SEQ ID NO: 9052 - DNA, 576 bp, Homo sapiens
  III.2680 (AA972719)
ttttatttaacaattttctttttaataagcttattgtttataaagcagacaatattacagagagctcaatatatgaaatgtaatgaatacaagtgtgtgatagaatgatttaaaaaataaaatttccctccacggtaccgatgagagctgctaagaagtttggaaatagatgctatccaatgttattatcattatatcatcattgttaataagcaataatgaagctaatgtttcttccctcagatcatattcatagagtcaaactcatggtgattaagaaccatggcggccattcacatgaatttagaactcttttagaagccggagttctacaattcatatccacatgagaaattcatttggggcttgtaataggtgggacagctgattcaaagaagtacaggcagattcatcagtgctcagccagtggctgcagctccactacaccttcccaagttctcagacaatgacataatctgattcatttttgatcatttttaactcagggaatttctttccattggaataagatgattgcttttttggtgatctaatccacaggttgatgtcactctc

SEQ ID NO: 9053 - DNA, 397 bp, Homo sapiens
  III.2681 (AI148497)
aatggaaaaactttttattacatgcggatataaccacaattgagtaagacactcataattatattagacattatatgctttaagtcaagtactagcatgagacaaagactgatattatacaatagtaaaatggatcaatttaccaggaatctaaaactattatgcctatttatttatgtgtatatgtatatacaacattagggctccaaaatacgtaaagcaaatattgacaaaagtgaaacaagaaatacatagcaacataataattgtagacatcaagaccccatttttaataataaatagaaaattcagagaaaagatcaataagaaaacagaaaacttagacaacggtacagaatatatcatcttgcacatagaggaatacctgagagtggat

SEQ ID NO: 9054 - DNA, 397 bp, Homo sapiens
  III.2682 (AI198855)
ttttttttttttagaagcagaggaaggtttatttgactcggctaaagcaagaaggcaggagaagcagcctctcaaatccaatctgccttttaacataactgggggcttttatgagcaaagcacgtatgcaggagatggattcccccaatactcaaaactgtttgagttcctcggcccaaacaaactcctagatgctatcaaggaggtctgcatgacctaaggatcattgttctttgaaagaaaaacagttcatcaatcttgcaggcagccctgggggttagggtaggaagttaatcacttactagtgacttcccttgtgcaagcaagcatgcacggaggaagaaaaggacaaggacatacgtaaagtgaacatcttatcatctttatgataaaggct

SEQ ID NO: 9055 - DNA, 414 bp, Homo sapiens
  III.2683 (AA460968)
tttctgttttttttcctgtttgatagctgtcagttatagtgattggtatttaatacaaaaaaaaccaaagatatgaaaattgttctatattttaatctgcaaattgctccattaggcagatttaattatttgtggatttacttatggtgcttccagatatcttgtacctcttaatgtgaccatcagaaaacttgactgagaaacatttgtactatacaaaatacaaaatgctttcagtatattattgcaagtgcttcttaaaaacatatagtattgttaaatgtgtactttttaatgttgtcttgtttaaattggaaaattaaccaaatgttatccatttaaacatgctttataacatattaaatgtgagtgcttaataagtacttttaatgatactggtacgggtgttggaac

SEQ ID NO: 9056 - DNA, 450 bp, Homo sapiens
  III.2684 (AA461277)
gtaatcttagaacagtgtctggcacacagtaaaactctatctttgctattgttgtttttgttataactgtatagatgttagctattattactatccacaagaatgggacatatcaattatatatattactggcctagtaattatatatacttagaatccctgatcaataaaataaattgtaatagaaatttttattcctcaaacacatttttgttcctcaaacacatttttaaataaacatgtcttgggaaagccaaagaaaaaaaaatcatacctatatccaaatatgttatattaaaaccttgttccttggcaatttcactaagcagctggatgtaatctgtatttggaatactaaggaggcttcttttcagtaagttgatcttttcaccaggagaattcctcaaggaatgccaagtacatcctaaagaatgtcctactacatttgtc

SEQ ID NO: 9057 - DNA, 486 bp, Homo sapiens
  III.2685 (AA447564)
tttgaattcaccgactttcatagtcttctattttccttacttgaatttcccatcactgagcctgtaccaccagcatagcactggcagccacttccacagcccctggtactctggcacaaggctctctgattgactccttcccagatcttcttggcttagcggctgaagactgatgctgccggatcgcctcggaagccttggttgtggcagaagactctggaatcccaggaacagagtataattttgagggtatcagagcaagaaaggaaagcagaaagctttgctgtaatcttttgtttcgttgttctgtcatccctttagtgtatggtacttgtttacttcttcaaagatggcctctcatttgaaggaatggtggcaaagggcttgatgacagcagctaatggaatctgagcttgcttagccatatctgacgtgcatggaaaacagtatgttgtacaacggatgaatcgaggactggcatttcct

SEQ ID NO: 9058 - DNA, 421 bp, Homo sapiens
  III.2686 (AA448547)
ctgactctatccctagcccaatccaggtgattgagaatgatagagccagcagaggaggacaagtttatgccaccaacaccagaggccagatcctcccctggtcactacagattgcatgatacaagaccaaggaaatgccagtcctcgattcatccgttgtacaacatactgttttccatgcacgtcagatatggctaagcaagctcagattccattagctgctgtcatcaagccctttgccaccattccttcaaatgagaggccatctttgaagaagtaaacaagtaccatacactaaagggatgacagaacaacgaaacaaaagattacagcaaagctttctgctttcctttcttgctctgataccctcaaaattatactctgttcctgggattccagagtcttctgccacaaccaaggc

SEQ ID NO: 9059 - DNA, 445 bp, Homo sapiens
  III.2687 (AA977498)
ttttatattttgataaactgattttttaatgatttgttattgttaagataggagaaaagtcaaatcaatggcacagcaagtgtcagtgtggttgggaggcaagctaacacccacacacaagaaagaggatccctcattcctcctccctgaatttctccttttcttttcaccagtgctgtgcaatctgtttcattctcctacctctacgccctgaaagtaaaatgattgactaggaaagcccagacccgctgcgagcagttgtgggtgtttccatcagcactgtcggaggtgaggatccacaatagttgctcttgcgtggagataggaagcaccatcaagtctgccccttctgggaagtgtggaaagcctctcagtctcaattacctgcagctcagaggaagactaagggaaactgaggcacagctgagcatttcccaagcagaaa

SEQ ID NO: 9060 - DNA, 414 bp, Homo sapiens
  III.2688 (AI024915)
tttttccttgagaaaatatattttcttatttgaatgcaagctccttctggcctccgggactttgaacctgcagtatcttctggttgtttaagaactcatctcccggcggtgagggtgcgggtcggggacggagacgcgtgcaccctgaagacagtaactaggcctgctctacagagggaaacgcaggctctgagagcctacatgtcttcgccgggagtgcttgtcccggagctgctcgcagactgggccgggggtgggctcgggtcggagaggtcacggggctccttaggtcacaggcggcagggccagagaaactcccccgcccctacgtttaactcgcggaaacaagggcccagagagcccagacgccagcccaaggtcacacagcgaagccccggcacagcccgccgggaa

SEQ ID NO: 9061 - DNA, 426 bp, Homo sapiens
  III.2689 (AI274368)
ttcttgggggtaaaaccatccgtttattattaagccattatcaccttcaggtcaaaaaccattaagtacgcgtctgcccgatgcttgtcatctgcacagagctcctttgtcagagatgtctggtgtctggagtttacaatctaacagccctgctctgcatgtgagtccacggtgcacagacaggcaaagaaacagtgctggtcactgatttcatagctggggagatcctggctatagatcgggaaactgaggacagggcgacctgcccaatatcacacagtgcccaatttacgatcagatcctggaggtcctggctctgcccatgaggggtgtatgacatacataaatatatacaatgaaatatcccatgctggccttctccccactcaaggactacgtgattctagggtactgggaagaaggagt

SEQ ID NO: 9062 - DNA, 365 bp, Homo sapiens
  III.2690 (AA889039)
ttttatggatcacaaaatattttaatgcatcatatagaagaggtaaagaatgtaagtggggcagagctcagcatgttacaaatagcacagcatgttgggacattagatccagtggaccacttcagaggatggagatggtcagaggttgtgaagaagctgtgttctgtgtaatgtgaaactggtgtggccactggactcttcagcaggacagaccttagcattttacctttctagagcatgcgtatgccgcattgcttcaaagctgatgtatcaagtagtttccatgttgaaagaactcctaacaaagcattagcagtctgtatacccagttcacagtgcagcaactcaggggctggtgaagatac

SEQ ID NO: 9063 - DNA, 300 bp, Homo sapiens
  III.2691 (AA934869)
tttcggtggtgactcttttttattagaatgcatagggttgcacaggtgtctctatcattagactgcctgggctcaaccaggagtctcttccattaaaattctgggggtcactcgtgtttctgtcattaggccacctggtgttggctgaaagtatctttcgttagaatgccttgggtcgcccagtttttactttcattagattacctggggttgaccaggagtctctctcatttcaatgccttcagttgcccaggtgtccctattgttagattgcttgctgtctgcaaggaatctctccca

SEQ ID NO: 9064 - DNA, 183 bp, Homo sapiens
  III.2692 (AA991839)
tttttcagatgtatgattctttatttaaacggcagtaaagaacgctggaataggctttccagggacactcccatgagctctgggctcctttgcagcttccagctctgggtcttatttaatgggcttcaaaggtcactgtctccatgatgtccggtgtcatagaaccaaccatctccagcccct

SEQ ID NO: 9065 - DNA, 411 bp, Homo sapiens
  III.2693 (AI247397)
tttaatatgaaaccttagagcatttattccccttggctaagagggtctgaattcctttcgcagggctgccagaacaacatcccacagactgggcagcttaaacaagagattgagcgtctcgcactctgcactctggaaggccaaggtgggggggggggcggggctggttcctcagtggctctgcaagactactgtgtcccaggctacttccctttgctgatcgatggcccttggccctctgtgtcctcacagggtggcccttctgtgcacgtctgcatcctgatctcttctggtaaggaccccaatcggattggaagagggcccaccctaatggcctccttttggcttaatgatctctcgggagaccctgtctccaggtacagtcacattctgggtactgggagttgggct

SEQ ID NO: 9066 - DNA, 211 bp, Homo sapiens
  III.2694 (AI302463)
cagaattaaacttttaattcattcgattgtccactctttctttttttcttgtcataataaatggtttgtgagggtggtaagtaagtttatccaactcaactttatcctgaactttatcctgagatagatagatacatagtgaagtaatttgttgtagcgatagagagggccctacttctctagatgcaatttgccaagtttctttagcatt

SEQ ID NO: 9067 - DNA, 408 bp, Homo sapiens
  III.2695 (AA625769)
tttttttgagtcagaaacaaaaaagttttatttataaataaactggttttaaagcttgtatctaaattcgtgtattttcaacatctatttagtgatcatgaagttccagaaccagaatcagaaatgaagatgagactaccaagacgagccaaaaccgcagcactagaaaaaagtaaacttaaccttgcccaatttctcaatgaagatctaagttaggaaagacgatggaggtggaatcctttaagattatgtccagttatttgctttaataaagaagaagttacccttgtcaaaatcagaacaaacctgatgtctttctgaagattttctgctgtgcgcttccacgttactttggcctgtattaaagcagtagagcagcatcagttattatagtccagaaaaagtctg

SEQ ID NO: 9068 - DNA, 411 bp, Homo sapiens
  III.2696 (AA579426)
gcgtcgactaagtcatacaacagccctatgaggtcttccacacccattttacagaggggaacatggaggtccagagaggatatttgctctggattgtgtagttcaaatgcacagtcacgatttgaacccagctcttagccaaccccaaacccccaaatctgagcttgtcatcaccacactgcagtgcctggttgacagtggccttctttataggctacctgtcaactgaatgaattacttactggctcttccctggtgataaggaaagaaaatgagaccacctctacttcattgcctccattcccgcagctggggtaggagagtgtgtgcgtgtgccaggggatgaggcaaatggacacacaggccaccacagtttctgagcctcagttttctcatccgcaagacaggagc

SEQ ID NO: 9069 - DNA, 299 bp, Homo sapiens
  III.2697 (AA992819)
tttttaccttagaattctctttaacgcaaagcaatgctacagtgaatgacgccgatttctccccagttatcaggatggactgattacagtgcccagattcatttgcctgaagataattgcctcaattatccacttcactttgcacatatagaaatagtcccaatctactggagcctcagtgactagacatgtaaaattggtctaatcatattttgaagagctcgagctgcaaggatttctatgagcgtgtgcctaaaccgtgacaacactaagggtttctcccctccgggctcgaggcg

SEQ ID NO: 9070 - DNA, 411 bp, Homo sapiens
  III.2698 (AA057266)
  misc_feature (285)..(285): n is a, c, g, or t
tcctcatcaccaagagggtggtggtagaacggctcaggaagctgaacaaagttcaatatagcacccgtcctggagtaaatgataagatacgcttctgtcctcaggagaaagcaggccagtgccgtggctatgaaatttatggtacgattaataccaaagaggttgatccagccaaatgtgtcctacaaggagaagacctccacagagcccgggagaaacagacggcctctttcaccctgctttgtaaggatgccgcaggagaaatcatgggcaggggaggagacnacgttcaagttgccgttgtccctaaagataagaaagacagcccagtcagaacaatggtccaggataacaaggatgggacatactacatttcctacacccccaaggaacctgggcgtctatactgtg

SEQ ID NO: 9071 - DNA, 246 bp, Homo sapiens
  III.2699 (AA058711)
  misc_feature (94)..(94): n is a, c, g, or t
  misc_feature (97)..(97): n is a, c, g, or t
  misc_feature (242)..(242): n is a, c, g, or t
gcaagataaggcactttgtttttaattctatcagtctctttagaatgaacgaaggtctgggtcctctggaaatctcaagtggtgctgcctgcanttntaaaaggctgagcacaaacccatcagagagccacagtcctaagtagactcctcggtgcgctctgcccacctgtccatgtgcattcagatttctcattaaattttccacagcatgaccagtggggatgacctgggtggccgttgtntcca

SEQ ID NO: 9072 - DNA, 423 bp, Homo sapiens
  III.2700 (AI187902)
  misc_feature (258)..(258): n is a, c, g, or t
  misc_feature (261)..(261): n is a, c, g, or t
tttctctaataaacttgcttttactttattctgcggatttgccccgaattctttcttgtgtgagatgcaagaactctctcttggggtctggattgggacccctttctggtaacaaagaccccatggaccaagggcataaaaagaagggatgtctaagacttgctggttctatggcaggcagaggcagaaagagccccaccatcattcccagcaaatgggaaaagttcccagttgcagatattaggggtgggatgggcnggngggtagtcagcatccatagacttagaccctgaagaggcaaaaaaggagggccatgttcttgggtcagcagagcttctactcagcttcttcagcctctagctctttcctggtgctagtagcacattctctagtggaggcatccagatggcagggagggtccag

SEQ ID NO: 9073 - DNA, 435 bp, Homo sapiens
  III.2701 (AA057280)
  misc_feature (1)..(1): n is a, c, g, or t
ngtttgatttcctgcgctgaactgatgctgcttccagaatgaatctgctccttggtgggttctgctgatgtggccagtgctagcctaggccacgaccacctagcccaccacccagaaggcagcatcccctgctcctgctttaacaagctggcccattttcatctctcctacctctgggagtagcaggggcgctcccggaagctgacaccccctccacaggtccggctgcaggggctccactggctccagggtccccaggtgtcactctgccgcctcaccttgggagcctgcagaagacaaggaccatgcatcagcatttgcccactcacaagcctgagcccagaggcccctccaaagatgctctgcctaaaaccctcccctacccatcaaggagtctggggatttcttccctttccagggcccaccttttaagga

SEQ ID NO: 9074 - DNA, 427 bp, Homo sapiens
  III.2702 (AA058725)
  misc_feature (249)..(249): n is a, c, g, or t
  misc_feature (327)..(327): n is a, c, g, or t
  misc_feature (416)..(416): n is a, c, g, or t
agctgcaggcagtccaggaaatgtattttttttttaaattttgggcagccaggtacccagctgagtcaagttttcaagcattctctcacaatgggagaaggaggggatgaatattggggtactcctgggagtctcggccagattagcaggatccccccactgttgcttccctttattttcttttaggcccccctcccctacatcacggttaacctacaaatgccttggaccctcaaactgcccctggtngtaagggtccctcccctccagtggcccctgaaactccaaactcttcccagctgctcctgctcccgccctccaggcctnggctctcagctccttatgaggaaagcaggctaattctgaaaaggaatatgttttggggtgcccggcagtgttgctgagtcctaaaggtngggcctggaaa

SEQ ID NO: 9075 - DNA, 374 bp, Homo sapiens
  III.2703 (AA437097)
aatgtttggaattttcatttctgagcatccatccctctcctatgtgcttttgcattttacaaattttgcaataaaaaaacctatagagtccttattagccagacgcaacatgtcttctcttctggcctctctaagagagtccatgtcagtgtccggtaatggcacagccgatggatcaaatcgctgcagctgtttcaactgttcacatgagagcccagctcccctcattccttctcctccaatctgcggttcctggggctgaagctgaaggcaaggaaattttgtcagggcccaggcaacctgttcttcattttcggccagtgttatagtgcacgtgctataaaccagcacaccctctggcttcagcagctgaa

SEQ ID NO: 9076 - DNA, 399 bp, Homo sapiens
  III.2704 (AI198578)
ttttagacccctcatgtgttattttattctttaaatgcagaagatagccctgtgagatgggtttagcaatctacatgtcacaggggaggagcatgaggttcaaagacgctgagtaatgtgcccacagactctcagctggcataaaaagctgggggtttagcctccaggttctgtgttctcaacactgtccgggtgtctcctagcagatacattgacgtcctgatgtttgtatctgcagttgaaaacttgtcttctagaaacccatgaactctggcatcctcactgctgccttttgtttgatgcatcggtgttacgggaaagctccttggcagcgagggcctggctctttatcgccgtgtgtccccgccccacgtgggtcccatgcttagcccacggcgg

SEQ ID NO: 9077 - DNA, 375 bp, Homo sapiens
  III.2705 (AI203859)
cacatccactcctcaccttccctgccttggtgctgccagcagcagacatagacgggtgcagaagcggggagctccaggtgcaggagggcaccggccggggcccacgccctctgcccgcctccctggggctccttcctgccacctcctcccatcacctcctgcggcagaacagcacccgtgacccacccagagagcaaggccaggggtcttggtgctccccgacggggcccggcaagttctctttcttctctctgggaaaatgaacgtccaggacacacctgtatcccagagagcaaagtgatgaggagactgagcgtccccagccccacctggcggcatggacacagaaaagctacgccggctggcctctccaga

SEQ ID NO: 9078 - DNA, 328 bp, Homo sapiens
  III.2706 (AI245190)
  misc_feature (290)..(290): n is a, c, g, or t
  misc_feature (291)..(291): n is a, c, g, or t
atggtatttaagaataatacaacaacaatataaaacacctttattagaataaaacaaactccaagaacaaaaaaaaaggaggtctgtacaagagttgactgattggatgagttaactttcagcactttgaatttggctttgggtctccgtggtttctgaggcggaatcagctttgagtcttattgaggatctgcataggtgatgagttctctggacctaaggctttgaagcagctccaatcctgttctgcctcctgccaggttttcattatgagtgtgggatgttggttnntaagtccccattctggaggccagaagtctgagatcaa

SEQ ID NO: 9079 - DNA, 375 bp, Homo sapiens
  III.2707 (AA150922)
  misc_feature (56)..(56): n is a, c, g, or t
  misc_feature (329)..(329): n is a, c, g, or t
  misc_feature (348)..(348): n is a, c, g, or t
  misc_feature (361)..(361): n is a, c, g, or t
caatttaatcatttactttagcaggcaagcaatttgtaaacattcagtagcggcanctccaagttacaaacaatttaaaaagaaccaagattagtgattataatttttccttccctttccccaaaagaaaaaaaaaaatgatttggaaatgaatgacttaaaaccctacaaacattgaacattcagttatgtcttctatcagccttctatgcatcctctctgttttattttaaaagatgtatctactcctaaaatgcattatcttgtaataacttgtacggtgagcacttgcaatctaggaagttgttcctgcacatcactgtgcatanattatccttagtttaaatncccatttgccaangggaatatttaggg

SEQ ID NO: 9080 - DNA, 481 bp, Homo sapiens
  III.2708 (AA151029)
  misc_feature (333)..(333): n is a, c, g, or t
  misc_feature (392)..(392): n is a, c, g, or t
ctggatttaaagtccaataacattcgcacaattgaggaaatcatcagtttccagcatttaaaacgactgacttgtttaaaattatggcataacaaaattgttactattcctccctctattacccatgtcaaaaacttggagtcactttatttctctaacaacaagctcgaatccttaccagtggcagtatttagtttacagaaactcagatgcttagatgtgagctacaacaacatttcaatgattccaatagaaataggattgcttcagaacctgcagcatttgcatatcactgggaacaaagtggacattctgccaaaacaattgtttaantgcataaagttgaggactttgaatctgggacagaactgcatcacctcactcccagaganagttggtcagctctcccagctcactcagctggagctgaaggggaactgcttggaccgcctgccagcccagctgggccagtgtcggatgc

SEQ ID NO: 9081 - DNA, 446 bp, Homo sapiens
  III.2709 (AA512925)
atgattgtcaaacttttatagctattaccaaggcattatgaactcaaaatgtttactttctggtcttgtcttcttgatctgggtaagactgaagaactaagatgaaaaggatattttaaaatttctttgaaattacatatgatttactaatagatattactttgtaagaaaaaatatatctaataacaaaacaaaatacgaatttaaattttcctatgagtttcttgagagtaggtactagatatcaatgtttgctgaattgaagtcattaagaaaagctttgttttatgtaataaatttaagatgggttaacttaaactacattaagaagcagggataaactggtttttgagtatcaaatatttaaaaaatacatgtaataatcagagctcaatatttagcaactctacagatttcatattaagtgttgtaatttgcactaaagc

SEQ ID NO: 9082 - DNA, 537 bp, Homo sapiens
  III.2710 (AI200793)
aattttttttttttttttttttttactctctatcctcatcatcatttataaatacaggacattctaatgtcccaagatacatgaaaaacataatcagaggtgaaattaattgagtaaatttagctttataaagtactcaccaaattcctttttttttctgttcttggtacagccggtgaagatttgagatggactagcacaaagtacatctcacaagcctttcaaagctgctgttacataaccctcaagatttcccgaggtggaaagaagaccttcattcacttaaatcagaacatcggtagacattacttcccacttggatgattgtagcttctagccaggggtgactctccttgaatctcagcaggatgagcgaacacttttctttgccctgccctccctcagcaggtctcaggctccctctcattctctttgttgccctcaaagctggcctgccagaagcggccctctggaaacctggtgtctgtgctcagtggggctgagggatccttcgtgtcctccctggtgaagagcatt

SEQ ID NO: 9083 - DNA, 442 bp, Homo sapiens
  III.2711 (AI281126)
agtactcctaccgcttcgtgtgtgacgaacactactacggagagggctgctccgttttctgccgtccccgggacgatgccttcggccacttcacctgtggggagcgtggggagaaagtgtgcaaccctggctggaaagggccctactgcacagagcgtgagtctctgggaaggcaccgctggctcactcgtccacgaacacggaccacgcgcagggacggggcttcctgagccacggggggcttgggactgtagagatgttctggtggggaaactgaggcccagaggacagaagtggattgctataagtcacagctcgtcagtgggggggttgggtcaacgcagacattttaacatcccatgctgtgtttatccactatcggaactgcctttcttaatcagggaggattttagagacagggccaggggtcaggaagtaaagc

SEQ ID NO: 9084 - DNA, 434 bp, Homo sapiens
  III.2712 (AA421644)
tcagagcaacaaatttgtattttctaaagacatgaataatttcaaataaaagcaatgatgaaatatacatgaacattaccatgcatggttttttagttggaaaaatgtccttatagttacaagagctatttcacagtgttgtattgctgagagctatttgattaggttataatacaagagaaaaaacatttacagaaagctcaaatccagtaacctcatcaggatcaggaaacagcattgtactaaccaacgaggaaatgagagagctggaccctggacacaaaatgaggaatcggtgtccctgcatcaaaatcactgcctgaaccatgcaccaaagctcaagcctggctgaaggatattgtgcttcccaggaggatacctgtcccctgcttcataggggacatctctgaggtccttatagactcatccatgtc

SEQ ID NO: 9085 - DNA, 318 bp, Homo sapiens
  III.2713 (AA470068)
tttttatttcagtagagaaggaaatacttgtattgaaaattaagaaaattacagtaagagaattaaacattaattgacaaatggaaatgcatccagagaaagatctccaagtggatgaaaggttttagaaccatgctttaggcagaatggggatgcttcgtccggtaaaggcatgggaaacatcatcagttatcacctgttggaaggacttcacgtggaggaggagcagaaatgtttctgggtggcttcggagggtagaggtaagactaaagactacaacttagaagaggctgattttgactctcaatgccggtgaag

SEQ ID NO: 9086 - DNA, 297 bp, Homo sapiens
  III.2714 (AI301486)
ttttaggaattccatgcttgtttgtttatttattcattggttggttttggcagagaagagtgaggttcagccccctgagtacaggtgagagaatcagagggccaccccaggccactggtcatccactgaggactgactcatggctagaaaggagtgtggaagccctgggaacgcgggggtgggaaggccagtcctgatgcttctcagacgaggaagctgagcccagtggtcacgcaggtgagcccagagcaggccccgatggagccccagctgagagtcagagaacacacgtagatc

SEQ ID NO: 9087 - DNA, 600 bp, Homo sapiens
  III.2715 (AI097641)
tgaaaggcaacattttatcaaaggcatttggcgtttttcctctcttatgaccctctagaagcttgagaatgtgggagagaagggctggaaccagaaatggagaagtagtgctggaacaataatgacctgaaagccagtggaactgaggtctcctgcaggaacttttggggaggcctggatactttggagaccaatgggtatggatggaaagaagagcagaaatgattcagctcataaagcagtgaaaaggaatgatctaagtacacgaacaaatctttaaagcaaaatgttaaagtgtgggagcaagttctacagaacacatacaatatgatactttttttttttttttttaaagagacagggtctcactctattgcccatgcaggggtgccagggccccaatcagagctcatagcatccttcaactcctgggctcaagccatcttcccacttcagcctcccgagtagctgggacttcataggcaggcaccaccacacccagctaatttaaaacaatttttttggctgggcgcgggggctcacacctgtaattccagcactttggaaagccgaggccggcagatcatgaagtcaaagatt

SEQ ID NO: 9088 - DNA, 449 bp, Homo sapiens
  III.2716 (W90542)
gaatgtctggaacatggacttggcggtcagtaacctgtaacagagctacaactaggaaaattagagtggtagtagtcacttatttaagaattcattcaggtaaacagctgcaccctctgtaccccttaagtggcaaagaagctgttatagtcttctgaaaattatcactatgagtgctataattctgaatataatgtctcttaattagaattcatacaagaaccacgtgtgagtgttgttgttgttgttttttttttaatcaaatgcaacgtgtgactataaacggagtgtggctgattttttttttttcttttttctttttaaacagacagcagaacttttctcaaatgaatgccgtcccatggaaagtggctgtcctgggaggctacacgtttctccaatggtgatgctgttgctcagaacttgctagaggtctttagggaacctcc

SEQ ID NO: 9089 - DNA, 406 bp, Homo sapiens
  III.2717 (W90543)
  misc_feature (208)..(208): n is a, c, g, or t
  misc_feature (255)..(255): n is a, c, g, or t
  misc_feature (304)..(304): n is a, c, g, or t
gcaagtcttttttttttttttaataaaaccaacataacagaatgtagaaatctaaacgaacatttctccctcaaagtagttacatccttagctccaacaaaactactattgttggagacttatttagaactcctgtttgaggaaaggccttaaaaggtggtttatgagccacattagaaaatacccttctaaactttgggctgtttanaaacagaaaatccatactcagaggatgacaccgagaaaattaaaaanggtgctgcagctctcacggaggttccctaaagacctctagcaagttctngagcaacagcatcaccatttggagaaacgtgtagcctcccaggacagccactttccatgggaccggcatttcatttggagaaaagttctgctgtctgtttaa

SEQ ID NO: 9090 - DNA, 313 bp, Homo sapiens
  III.2718 (AA480098)
aagaggtaataggtgtttattaaaaactttttcacccagaggcagttaacatttataacttaaaacccagcccactacaaaaagggatgggagcaataaaaactgtgcaacattgaccaaaggacccagacagacgaggcccgggaaggcgagcccaggggactggggtctctcctctcccgaggcccagagcagctgcattgtggaagccgggatgcccccagcccctggcgggcgcctgtgcaccggcctctccggttggggcagggacccccgaaaggccatcagtagtagtgtgtgctcatcgcgcacc

SEQ ID NO: 9091 - DNA, 412 bp, Homo sapiens
  III.2719 (AA481900)
ttcggaacgaggtggagcgcgctctgctcagtgatgagagagcggcaactggcgttcacatcgagccgccgtggggtgcagcctcagcaatggcggagagtgagtggctgagcgtccaggctgcgcgatgagcacacactactactgatggcctttcgggggtccctgccccaaccggagaggccggtgcacagggccccgcaggtgggggcatcccggcttccacaatgcagctgctctgggcctcgggagaggagagaccccagtcccctgggctgcccttcccgggcctcgtctgtctgggtcctttggtcaatgttgcacagtttttattgctcccatccctttttgtagtgggctgggttttaagttataaatgttaactgcctctgggtgaaaaagtttttaataa

SEQ ID NO: 9092 - DNA, 259 bp, Homo sapiens
  III.2720 (AA573657)
ttttttttttttttttctttttttttgtctctaaaagaaatgtatttaaacaggagagaccaaggcccctgagagaggttgaaggactggggatgactgcccaggttggggggagctggggatgaaggggcagggcagggcatggcacctgtcaccacacacatgaatgaccacaaagaagatgagaaactagactagtttgtgcacctcgtggatccgcactacaacaggtagggttggtgttcaagaagagcagcag

SEQ ID NO: 9093 - DNA, 430 bp, Homo sapiens
  III.2721 (AI732364)
gcgtcgactttttttttttttttttttttttttttttttttgtctctaaaagaaatgtatttaaacaggagagaccaaggcccctgagagaggttgaaggactggggatgactgcccaggttggggggagctggggatgaaggggcagggcagggcatggcacctgtcaccacacacatgaatgaccacaaagaagatgagaaactagactagtttgtgcacctcgtggatccgcactacaacaggtagggttggtgttcaagaagagcagcagggcctcggggtaagaatgtactttctgaagaacggagcttttcaacaccaaaaagcaggacgctttgagcagcagctcccatccctaggggagcttgcagggctgactggatggcagcagcaggtgggttttttgagtggattcacctcctggctg

SEQ ID NO: 9094 - DNA, 326 bp, Homo sapiens
  III.2722 (AA904593)
  misc_feature (85)..(85): n is a, c, g, or t
tttcaatcatttgcatatctagtcttcaaaaagaaaaaacctaaatctttccatatcctcttatacacatcagatggcatggctnggaggtccaacagcagcaggtgagaacattctccttggttcatggtcctgttgcttctgctgccatccccctcctataaagaagactgtagtcctttcctggctacccacacagtcaacaaaagcaggaggagacaaggaaacacttccttgtcttgacttccttccttcattagagtctcagatgactggctttttgtttataaatattttctagacataaaaaaatgcaaataatatta

SEQ ID NO: 9095 - DNA, 345 bp, Homo sapiens
  III.2723 (AI082837)
ttttttttttttttttttaaaggtccagttggcttttattatcgatttgtgaatcaggcagcatcttatctataaaatagaaaaggtgctttgaagaaccaagcagatggatgggcagaaaagcctggggatagcaagatcaagaaacatgaagtggcttggtcatttcaaagttactttccttaaagggtttatacacaggggacttccctctcatgcctgtgcaggtggatggggacccttttgatacaggagctagaaagaaattaggcagttagtgagggtaagagagtcctcagcaaggttacccttttaataaaaagcagcccccgaatcatttctttt

SEQ ID NO: 9096 - DNA, 439 bp, Homo sapiens
  III.2724 (AI203471)
  misc_feature (316)..(316): n is a, c, g, or t
  misc_feature (384)..(384): n is a, c, g, or t
tttttctcttcaaagagttttcaaacaatttatttcacaggagaggtggagaaggccaatcttcttcacacaagttttataacccattaaaacagtatctttctaatcccctcagagtggaaaacaggtaattctcaacctggagacaagctctgaagtacagagctatcacctgctgcaggaggtgtgaaggctcattcttaaagttttctcacgtttattttccattttcttagcacagaatgttctttccagcaaggtccattaagagagaccgaaatatgaatatggctgcattggattccagaggaggacnttgatcaaatacacagaaatagtggctcaatgatcaagttattttgcttctggtcaagtcgatacaangtctgagttttcttttcaaagctcccttatgctgagagggaagtaagaacagaat

SEQ ID NO: 9097 - DNA, 515 bp, Homo sapiens
  III.2725 (AA512935)
tctttttacatgtccatattgtatttttttaatgcagctatgatgtttctgttaaagataatagggtggacagagcggttaccaccaggaccagcagtgggctcagaccacagcttggaggagcagccattgattttgtggttatgtggctggaacaccgagaccttctttttcataattaccattggaaatacagaggtgtgtattgcccgacacattggatttcagcttctgtgcctgtaaatttgcacacggtggcaaaacatgagtgggaatttcattctcagaccctgctggccccagggctctgttcttaacccggaggcagtggtggtagcggcagtggtggtctgtactgggaaggctggctgccacacggtcacatcggagccattgccaaaggcttgaattgcatttttaagacatgtattgtccttgaagaaattcaaaaatttcaagcactcttctaggtcgttcccactgttgctgcagtcacaccatggggccacactgag

SEQ ID NO: 9098 - DNA, 425 bp, Homo sapiens
  III.2726 (AA704224)
aggtggagatgacggctaggggttaggttggggagccagaactcccccactgcacgagtgtgtgttaaagaaggcaacacggacctcacgccacctgccctgcggtcctctcccggcccagctctcggtggggaaagggggtaggacaggaggggcagagggccgggaacatgcagcacccaccgcgggtcctggggagggacagacagtagctcatgaccaagatggcaggtgtgtgtgtgtgttgggaggggaagtgtgcggcccccgggaggctgggcgggttactgcagggcttcagcagagggacccgcctcgccctcgtggctggcggtctcgaagccatgctccacacccatcatgtccggctcgatcttgcccgtttcactgatgaaggtggtgtaggcgtcatcctcagccttgag

SEQ ID NO: 9099 - DNA, 311 bp, Homo sapiens
  III.2727 (AA431299)
tttttcaatttggtaactttattttgccaagggtaaggacacacccgtgacacagcctcaggaggtcctgcagacacatgctcaagatggttggggtacagtttgcttttatgcatgttagggagacacgagacatcaatcaatacatgtaaggtttgcattggtttgatctggaagggtgggacaactcaaagggagcagggcacttccagatcataggtagatttaaatatattctgattggcaattggttgaaaaagctattgtcagtagaaaggaatgtatgggttaagataaagggtggtggagat

SEQ ID NO: 9100 - DNA, 378 bp, Homo sapiens
  III.2728 (AA431592)
gacaagtgctgagtgaaagatttgctgcccacctctacatggggaggagaaacacaggtgggagctacctgtggcatccatgacctagtcagagggatgagatgctcagcaggggtccccatcctatcccaccccacaaacaaaggctggaaaaatttgctaccaagggccaagaccaccagaccaagcctgtttatgagccacccctgcccaggccctcacagacattgctcacggggcttcccatagaggagaagctagagagggagggggcctcatccccagatagatcaggcaaggcttggagagctgctctttaggatccacatcaactacttcctcattttaaggtatggcagttcccttcatccccttttc

SEQ ID NO: 9101 - DNA, 423 bp, Homo sapiens
  III.2729 (AA905035)
tttacccagagataaatttaattttgcaattgacattcactcttttgtaagccacttttaatattacaacacaaaacctggtaagaatagccttttaaagagacatccttcaaggcaaaaaatactaattttgatgattataaacatttttaacatttctggacttctttcttcaatttatggctaggacatagtttgaatttttttttcccccttaagttggttgggtacattttgacggggattgcaaggctgctgttggtattttgtaagaatttatttttttcctttgtgttcccataatacctctcttgataaaccatcaaggatttctcttctattcattcactagtagagtgaggcaatttgctatccctccctatgttaacaccaaagccagagataatgactttccactgttac

SEQ ID NO: 9102 - DNA, 301 bp, Homo sapiens
  III.2730 (AA779916)
ttttttttttttttttttttttgatggtaagaaggcacattttattgggggtgtcaggggtggggggaaggaactatcgccttaggtataggacccactgtgatgcgattctgcagttggggagagaggttgggctcagcacatatacagcaaggaaaagtaggaattaatagccggagcagggtggggatcagtggaggaaaaactactaaggggaaacaccaggaatgagggggctctggctaaaccaacctagcaggatttttgcttaaggcaaaaaaaaaaaaaaaaacagaaaagc

SEQ ID NO: 9103 - DNA, 421 bp, Homo sapiens
  III.2731 (AI299332)
aactggaaggctgccatggctagcccagccgcctcctcggtgcgaccaccgaggcccaagaaagagccgcagacgctcgtcatccccaagaatgcggcggaggagcagaagctcaagctggagcggctcatgaagaacccggacaaagcagttccaattccagagaaaatgagtgaatgggcacctcgacctcccccagaatttgtccgagatgtcatgggttcaagtgctggggccggcagtggagagttccacgtgtacagacatctgcgccggagagaatatcagcgacaggactacatggatgccatggctgagaagcaaaaattggatgcagagtttcagaaaagactggaaaagaataaaattgctgcagaggagcagaccgcaaagcgccggaagaagcgccagaagttaaaag

SEQ ID NO: 9104 - DNA, 240 bp, Homo sapiens
  III.2732 (AA481652)
gaagctgctcctgagtctcagcccccagcttctgaagatttagaggttgatcctgcagttgctgcaaaggataaaaagccaaacaaaagcaagcgttcaaagacccctgttcaggcagctgcagtgagtatcgtggagaagcccgtcacaaggaagagtgagaggatagacagggaaaaactcaagcggtccaattctcctcggggagaagcacagaagcttttggaattgaagatggag

SEQ ID NO: 9105 - DNA, 522 bp, Homo sapiens
  III.2733 (AA523203)
ttttttttgagatgcagtcctgctttgttgcccaggctagagtgcagtggcacaatctcggctcactgtaatcaccacctccctggttcaagcaattcccctgcctcagcctcccgagtagctgggattacaggtgctcgccaccacatccggctaatttttttttttgtatttttagtaaagacagggtttcaccatcttggccaggctggtctcgaactcctgacctcaggtgatctgcccgcctcggcctctcaaagtgctgggattaccggcatgagccactgtgcccagccatctattttctttttcaaggagcagcagggtgatggtctagatgatcctgcaaagtccctccctggactataacatcggagtgctcatacttgggttattccggaagagacaagaagaaatagcctaaaaccaaagctttctagggttggcctgaacatattctcagtgatagctgttcctgaaggcatcttcatgggttcctagtaacaagtcctgctgtgacgt

SEQ ID NO: 9106 - DNA, 427 bp, Homo sapiens
  III.2734 (AI343815)
ttttttttttttaatagtaataatggaggtatcatttattgagtgcatacaacgtgacaaaaatatgctaagcattttacatgtatcaactcctttacttctacagcccaatagatcctttacttcaccagcccaaatttacaggtgaacaaactaaggcttagggaagtcaagctgtccaagttacattctaagtcagtggtaaaattgtgatttcacaccttataagtacaactaatttcaaaacttgtatctcattaaccaccctgagaattgcatttcagtttgccactagaaaacttattagataaccctgtctcagtttcttcatctgtaaaagaagatttggctagaaaatccttgcattatagctcaaacattctagacttgtgctccattttagatgcttttactttttattttatgg

SEQ ID NO: 9107 - DNA, 429 bp, Homo sapiens
  III.2735 (W88798)
  misc_feature (252)..(252): n is a, c, g, or t
  misc_feature (416)..(416): n is a, c, g, or t
agtaaagcagttgaagtgatgattcagcacgtagaaaacttgaagaggatgtatgccaaagagcacgctgaattagaagaactgaaacaggttcttctgcagaatgaaaggtctttcaatcctcttgaagatgatgatgactgccaaattaaaaaacgttcagcttctctaaactccaagccatcttctctacgaagagtgactattgcctttttacccagaaatattggaaatgcaggaatggtggctggnatggaaaataatgatcgattcacgtagaaggtcaagcagttgaactaaagatgactcagagccatctggagaagaaacagtagaaaggacaaggaagccaagtctttctgaaaagaaaaataatccatcaaagtgggatgtctcttcagttttatgacacaatngcttcctggggga

SEQ ID NO: 9108 - DNA, 423 bp, Homo sapiens
  III.2736 (W88799)
  misc_feature (423)..(423): n is a, c, g, or t
gaagatttaaatgattctttatttcaataaactttaacaaacaatatataatatttcttccttaaaaagctcattcaaagatcataggcagacttcttccccattgtattttagttggggagataaaggcaaaaagaggaaatgtaagctatcttacagtcattctgagaacctctggtttcatgctatactttcccagctaaaagttactaatttacgaagttcagatactgaaacttaaaaatcaagatccatatattaggatgtcctgctgtcacactggtggtggcccattgtgtcggagtctggtaaatggccacaagatatgttctagagacgtccatgagtcctcttgctgtgtgggagcggcatccacagacttctggaataaattggcctgtgaggaagctcatcaaagctggn

SEQ ID NO: 9109 - DNA, 417 bp, Homo sapiens
  III.2737 (AI248203)
tttttttttgtagagatggggttttgtcatgttgcccagactggtcttgaactcctgagctcaagcaatccacctgtcttcgcatcccaaagtgctgggattatcataggtatgaaccactgcacctggcctaaaatcccatttcaatacatggatatatttttgttgatatgtatacatatatacaaataaaaaatcagagacttcttttactatccacccaaaatgtcactcctctccctcagaagagtaaacaatttggtgggtagagtatttgtattaattcacatacataaatgtgtgtgtatacatatatacaacacacatatacatatacatacacaacacacatacatacactcatatcatactatgcatataataaatatattaaaacagctttttaaaataaaagat

SEQ ID NO: 9110 - DNA, 481 bp, Homo sapiens
  III.2738 (AI242451)
  misc_feature (350)..(350): n is a, c, g, or t
  misc_feature (383)..(383): n is a, c, g, or t
cataaatgcaaatttattcatgacgaagccttgatttcaaatcttgctctatgtacagtgccctgcacgcgacaagtgcaacaagaaacctcagagctgctttttggtcgcgatcatgtatcggcatgtgtcacaatgtggcaaaatctatatatttatctgcattccccttcccctttccaggtgggcagcatgctgaagactcccaaattacctatttggctgtgcaacatcaatggaaattacagcatccttttttgcacaaacaggcagctcttatcagactggaaaatggaacgtctctttgatctgtacttttacagtggccaaccctcacagaaaaagcttgntgcgtcttacaataggtgagcatttcagctccnagtgttgtgggattttaaatgtgctcaaagagattgcggttggccaatgtttaacaaaactgtgtggatatttcatgctagctccacaggaaaatgct

SEQ ID NO: 9111 - DNA, 511 bp, Homo sapiens
  III.2739 (AI038692)
  misc_feature (506)..(506): n is a, c, g, or t
tttttacatcatacattcttacatatttattcacctgtattcacacttaaggcactctgtatgaagctacatttcctcattctacctttacctgaatcttgattttatggtttctgtttagttttccttaaatttttaaattacaaatgtatgtatttccatttaatagttatttgtcttaagccttgcaaagtcattggaaagaaaggcaaaagtaagaagcaaaacctcaccggggcttttatcgtttttttcttcggttcttaggaaaaggatatcatttctaaggtatgatctagatattgtcttttctgattctgaacatcggacaaaagatctcttttcaagagaaaagaagacatgtcagagagaggccagcttttagaattgtgacaattactcaatttcctcccttaatgaaggacaactttttaaaacacaaagctggcaggcgcggtggctcacacctgtaatccagcacctcgggaggcgagcgggcggatcanaggtc

SEQ ID NO: 9112 - DNA, 268 bp, Homo sapiens
  III.2740 (AI208362)
tttatagggtacttccttagacattttatttttcttcttattcaaagatgcaaatatgttcacaagtttcgttaaaacgttcctaatttccagtatggttaacatataaagaagaagtagtgaagtagtctctgtaaggctgttctcttcctgtccaatgctggagcttgaagcccatagggcggttagtcagaaaagatgtggagttggggagaacaagctgcaacccacaggcatgggctggagcccgtgaggatgctaaaatctg

SEQ ID NO: 9113 - DNA, 482 bp, Homo sapiens
  III.2741 (AI142881)
ttttttagacagtaaactttattgttactttaaataggtttcaaagaagaacacacttttttttactttaatgaggaagctgaaaaggctgcggaggaccttgaggctgctgcggctagggagccgtggtgcccaccttccccacacaaggtgtagaggaatcagccgaaacaggagcatcctctggatagggctgtacacaccccaggttccagccacaccatcagtattagtagaccgggagcttgaagtacggcgccgtgtctccacatggagtttcctcttcaacttcaccaactcttgtggtttttattcttctaattccactgtttggtaaattacatatatgatgtttttgcctgaaattctgtgaacttcgttttgcagccaccacacttccatgtggattttgtttgtctattagctctcctgtccatttttcagggacacgctccagtaaaagaggccaatatttttgttgc

SEQ ID NO: 9114 - DNA, 510 bp, Homo sapiens
  III.2742 (AA479313)
tttaaaactttattctttatttcatttacaagctaccaaatattatgtatcgtacacagtgctgaacacttaaatggctgtagtcatggaaggatccagactgaatggaaagctgttgagaaagaaaagataaaagcaaagtaatactgcaacaggaaggtggcaaaagcatagttttgccataataaaatcaattagatttgtgattatacatcagttccggttaaaatgtctgagcgccatgcgattttcagctttattgtctgcagtctgactaaagtctgtatagtcattttgtcttttgcagttattaaaataaaaaaaagttaaaaactatagcagcaacaagcaaaccctgtgacaggaaggcaagggttaagaactaaaaagagtttatacagtgtgttcagggaaagtgtgcagtttatcttccatcagcaggagttcgactgagggacaacatgattcgggcaaatcgctcacagagttcatgcgtggaatatgaaggta

SEQ ID NO: 9115 - DNA, 502 bp, Homo sapiens
  III.2743 (AA479415)
gtcccatttttgccattattactggtggatgaaatggaagaaaaggatatactagctgtagaagatatgagaaatcgatggtgttcctaccttggtcaagaaatggaaccacacctccaagaaaagctgacagattttttgccaaaactgcttgattgttctatggagattaaaagtttccatgagccaccgaagttaccttcatattccacgcatgaactctgtgagcgatttgcccgaatcatgttgtccctcagtcgaactcctgctgatggaagataaactgcacactttccctgaacacactgtataaactctttttagttcctaacccttggcctcccggtcacagggtttgcttgttgctgctatagtttttaactttttttattttaataactgcaaaagacaaaatgactatacagactttagtcagactgcagacaataaagctgaaaatcgcatggcgctcagacattttaaccggaactgatgtataatc

SEQ ID NO: 9116 - DNA, 220 bp, Homo sapiens
  III.2744 (AA450339)
tagagacaggatttcaccgtgttggccaggctggtcttgaactcttgacctgaagtgatccacccaccttggcctcccaaaatgctgggattacaggtgtgagccaccgggctgagccccatctctagtacttttatcatcccaaactgaaacatcatacctattaaacaaaaattccccaccttccaaccccaagaccatggtaaccactcttctactt

SEQ ID NO: 9117 - DNA, 219 bp, Homo sapiens
  III.2745 (AA450340)
ttttttttttttttttttgagaccaagtttcactcccgtcgcccaggctggagtgcattgacactatctcagcctcctgggttcaagtgattctcccacttcagcctcccgagtagctgggattacaggtacccgccaccatgcccggctaatttttttgtagagacagggtttcaccatgttggccaggctggtctcgaactcccgacctcaggtgat

SEQ ID NO: 9118 - DNA, 483 bp, Homo sapiens
  III.2746 (AA043945)
  misc_feature (287)..(287): n is a, c, g, or t
cctgtgaaaccaccatagagaatttatttttttctcaggtgaagtcagtaactaattcttcctattcccgttggacacaaggagtctgtgagggggtgtgaaggaaggaggctgcggctgcgtcctggactccgtcctgcggtagggagtccagcagggatggctcagctccgcacctggtgtgcagccggatctccatcctgaggaaggccttgaggttctcatcagccacgtgctcctccagggcagccagggcccgctccccaccgtcctggaagtgctgcagnagcctgtccgcgtactccacccacacgcagttggggcagccactcatgcagcagtttgtgggcggctggagctcaggtggcagcgatgccttggggcggcctggtgcgtccgcacctgcttgggagcccacctctacgtggtctgtcccgaattttctgcgcccatcaggggcttgcgctccgggatggtgccttt

SEQ ID NO: 9119 - DNA, 479 bp, Homo sapiens
  III.2747 (AA044206)
  misc_feature (6)..(6): n is a, c, g, or t
  misc_feature (70)..(70): n is a, c, g, or t
  misc_feature (118)..(118): n is a, c, g, or t
  misc_feature (189)..(189): n is a, c, g, or t
  misc_feature (201)..(201): n is a, c, g, or t
ggcggngcaggtcgccgcaggtccgtggctcgggggctcgcggttctccagcccggactgctgccagagnttcctggaggtggcagctttcttcaaaggcaccatcccggagcgcaanccctgatgggcgcagaaaattcgggacagaccacgtagaggtgggctcccaagcaggtgcggacggcacanggccgcccaagnatcgctgccacctgagctccagccgcccacaaactgctgcatgagtggctgccccaactgcgtgtgggtggagtacgcggacaggctgctgcagcactttccaggacggtggggagcgggccctggctgcccttggaggagcacgtggctgatgagaacctcaaggccttcctcaggatggagatccggctgcacaccaggtgcggaggcttgagccatccctgctggactccctaccgcagacggatcagggacgcagccgcagcctccttccttca

SEQ ID NO: 9120 - DNA, 504 bp, Homo sapiens
  III.2748 (AA649852)
  misc_feature (306)..(306): n is a, c, g, or t
  misc_feature (443)..(443): n is a, c, g, or t
gatacactcatcaaagttcgaaatagacaccataatgtattccctacaatggaacaaggaatcttagagtataaaattgcctgtacagtagacccagtcaccaatcaaatcctcaattattttttggatcgttttacatgaacggtattccaattcggatgctgatgaaccagcacattctaatattaagtgactcacagacaggaaacccaagccacattggaagcattgatcctaactgtgatgtggtagcagtggtccaagatgcctttgagtgttcaaggatgctctgtgatcagtattatntatcatctccagaattagagcttacacaagtgaatggaaaatttccagaccaaccaattcacatcgtgtatgttccttctcacctccatcatatgctctttgaactatttaagaatgcgatgcgggcaacagttgancaccaggaaaatcagccttccttacaccaatagaaggtgtatgtgtcttgaggctcgtgcc

SEQ ID NO: 9121 - DNA, 504 bp, Homo sapiens
  III.2749 (AI312094)
ttttgcaagttaaagtccattttattgtgtgaatttttagcagtgcagtgcagtggtgttcttttgcatacgaagattgatgaatcctacacagggagaaaaagatttgacagcagtttaaggagacgttgttagcaaaaaccaaggcgagccgagtaagtggcttctccccgaaagcaattcttccctgtctaatctctttttgcagctcattagttctctgggaatcagaaaaaggttgtttcccaattatcccgccacaggggcacatcatggatggaagccggggctccgtggcacagcatgtgaatcggcgcgaccccatcccaagagccagggctctccttatctctgttgcctgggcccagcgtggtgccgtggatgtgagagtttaggcaggaccacggccccggctgtttgtttgggaggcacttggcaccaaggccatgcctcttattactacccgtggccttgagcaagctcatgaacctctctcagcctcaa

SEQ ID NO: 9122 - DNA, 462 bp, Homo sapiens
  III.2750 (AA436149)
aacctcaaaatcactgagtgatttaatattcctatggcatagtaatctatgtattggacatgagaaaatggacgcttagggaagtgaaggaacatgtctaaggctacatagccagtcagtggtggagtctggatttgaactcaggtgtgtctgacttgaaggctagggccccgaaccctgtcatccaccctcatgtgcctcaggcgggaacgtgggtgctgtcctggatgcctcctccctgtcaccacgcacggccactccgccaggactcacaggcacacagggctcgcagatcagctcctcgcacctctggcccagcttggtcaatccacccccatccttgcttcatccctaacacagccatcttccatcttcctctcttcaagccatacttcacatttagaaaaggtgcttttgctacagtacaggtgacaccactccctggcttacaaggtgctggtg

SEQ ID NO: 9123 - DNA, 463 bp, Homo sapiens
  III.2751 (AA436275)
ctagacagcgcttcagcattatgcttggaggccgtttcaaacagtgaaatcaacaacaagaagctcaaaactgcaaaagaagtggcactatagagaccatgagaagactggtttgcaggttgagagtaggaacaagaaggcagcgtggggccctgcatggcctccgctgggaggcgatggctcaaattgttgccctactctgcacatgttttcctgtgactgtgaaagcaacacgagtattgattcgggggttaaaaatacattttaacaagcagaaaagttcacaaatatgaaatagtggctagtgaggaccacccccatgctggagctgcagacagaggcttttgtgagtgcaaggcttgctcctatcccgggagcttctggttgccaccagcaccttgtaagccagggagtggtgtcacctgtactgtagcaaaagcaccttttctaaatgtgaagtatg

SEQ ID NO: 9124 - DNA, 390 bp, Homo sapiens
  III.2752 (AA883523)
tttatactcacataagtctttattaaaagaaaagggtatggtacgacaggagaaggacagtacaggcaaacagtgatggtttccagcccctaggatcccatctcagtcacacagaatctgctttgttttcagattatgaaccacaaagatacacacgaactgtcttgatttgaagggagcctaaaacttgatacttctctcgttgttgaacagagaaaaaatataccagcctcctctggaagcagcgagggaaaatttaagaagttggtatttactgtatatcttaaaaaaatccaaaacatccacccacgatttttaaaaaatatgaatgacaaagttatagccatcaaataaagatgaagaaaaggtgagaacatgggagtgaacatc

SEQ ID NO: 9125 - DNA, 477 bp, Homo sapiens
  III.2753 (AI218021)
gtttaagtcttcatttttctccatgagaaaaacatttaatgatattatttatgaagtgtctaaaatatacttgtgctttataagacaaaaaggatgatcacttatgcctgagagggtaggtactcttaaaatcttaaaccaaaattcaaaccatttaacttttttaaaaagtttctttaaaaacagtatgtacaaaatttattttatgcactccatggcttttagcttattagataacacattagttttattttccctcagaggagatgtagccatttagctataacggaacttttagataaaactgcactgagatataaagtagatatgcaagtgctccccatacccaagtgtgattgtcctataattataatgtaagaaagtagtaaaaagacatctaataccatgtctcaatatttttttctcagaaataatgaagaatttgaatagtaaaatttatacactctaaaaattctc

SEQ ID NO: 9126 - DNA, 321 bp, Homo sapiens
  III.2754 (AA450303)
aaaacataaatatatttaaaaaattaaaacacctaagaaatgcaatctatacatgtgaaaaagtaaaatatttatatgcataacaagtagttgcaacattatccataagcagcagttagtgtttattttccctatattttggtttaacaccatagtgtagtggtagttcattctttttagggaaattacataaagtacatatagaatattattagtaagttatagaagactgtataactggaaaattaattccaagtaacagcatttcctctaaaaacacatctattattaaacgaattactttaaactagcagagaacaa

SEQ ID NO: 9127 - DNA, 424 bp, Homo sapiens
  III.2755 (AA464833)
catacctatgtcagtaaatgatattgtgaaacccggaatgaggagaagaattattggatatgggctgccatttccaaaaaatcctgaccaacgtggtgaccttctaatagaatttgaggtgtccttcccagatactatatcttcttcatccaaagaagtacttaggaaacatcttcctgcctcatagaatgaagaactttgttacacatattttgataaggcactgaaaatataaaaggactggtagtttactgatgtagatgtgaattctgtataaagatgtgtaaattcttttgagggttcattaaattgcatgaatagagacaggtcaaataaataggcaaaagggatttttacagttagagatagaagagaaaaccattcactgtattttatttcatttctcctgattcagatattttta

SEQ ID NO: 9128 - DNA, 407 bp, Homo sapiens
  III.2756 (AA454562)
aatgtcctgcttttttatttatttatttatttatttatttatttatttattttgtaatcaactgaaagaaggcagaaggagtcgatgggcctcttaggccggaaaccttacaagcataggaccaaggcagaaaaggtccagagggttcatggtcctccgttccacctgaatccagctagagagcgagccagggggataggtgtgcccctcgtcgcccgtgcgctgaggcactgtcacgcaaagagacattcaccttccacgtcaacgcacctttaagggcgagacggtccgccgtgcccaagaggaacgggatgacattcaactgggacttgcctcaccttggcttgggggacctcgagagcggtcccgtgggggcggtgttactcgtggtggtagaagtggagggc

SEQ ID NO: 9129 - DNA, 530 bp, Homo sapiens
  III.2757 (AA456454)
tcggggacggtagatggcccagccccaagtgttccgatcttcctgcccaaacatattctgtgacggaaagcctatgttgacctcgtccggcactcaaggcgtgggcagcggcctaacgtctgctgcgggaacacagtcgcgttgaatgctattctcaagacagacaaaacagtgggaagacactacgccaagctgctaactccctggccattgccggactctttcacccccatggactttccgctggcattttaaacaacatagtttcttttctctgtctctttctctttctctctctctttctctttctctctctctctctctctctctgtcaatctcataatttctctctctcgtgccacgttcccacccaacgctctctcgcccacttctactggggcccacttcctctcccgctctctctgtctcaacgtgattgactttcttgtgctgcccaggacttcttgcccacgtgcgccttcaaaacggtaagagctgcaactgaacgtgtgagacatggtgcagatagg

SEQ ID NO: 9130 - DNA, 393 bp, Homo sapiens
  III.2758 (AA494398)
tttttgagtttgttaacttactagtttattaattctggtaatatgacaaaataaagttctttaacaccccccaaagataacactagttcaccagcaatggatccaaaccaagacaaaatctctgaattgccagaaaaagaactcagaaggtcaattattaagctaatcaaggaggcaccagggaaaggtgaagtccaacttaaagaaattaaaaaaaaatcatacaggatatgaatggaaaaatcttcagtgaaatagacagcataaataaaaaccaataacaacttctggaaatgaaggacacatttagagaaatgtaacttaccagtttgttaacaactcgatgtgtcagttatctgttaagagttttcaaaatgtggtccagaagacctc

SEQ ID NO: 9131 - DNA, 345 bp, Homo sapiens
  III.2759 (AA398332)
ccagctccacttccaatttatttcttccactgcaaccttgatgctcccttcaagtcttgccctggagaggaatctcacacaggggaagggctgctctgatgtgctggagagcagatggacagcggtagataatatggggccctggctccaggccaggcgcggtggctcacgcctggaatcccagcattttgggaggccaaggtgtgcggatcacttgaggccaggagttcgagacctgtctggccgtgtctccctctaaaatagaagctccaagaggggcaggaagttctcttccgtcttagaccctatgtgcacgaccttggatcgatcaacattgaacacctc

SEQ ID NO: 9132 - DNA, 386 bp, Homo sapiens
  III.2760 (AA399325)
  misc_feature (86)..(86): n is a, c, g, or t
ggccgcgctcagttgccctcagccctcacaggccctggggtcgccgcacctgggcacagagacctaggatgccgcgacgcgaacgnccgtccctagggaagccgaagaccttgcctgagcgcaccacccgaaccccgggcccacattccgctctcgcccagaggcgcggttctcactccctagcgctcgttagtaccgggagcgcctcatcccttcctcagctgggccccaagagccactctggtaggccgtgcacgccccggcctcacctcgtggggatacagaaacggaggagggaaccccagccgcggaccgtagctggcactacccgctcctgccgcagctccgcctcacattcaaaccccggcaaaatggcgcgacagagc

SEQ ID NO: 9133 - DNA, 438 bp, Homo sapiens
  III.2761 (AA464196)
aaatcatgactgctttatttgctggactggtgcctctcagcagattcaggggtcgtgcagggctggttaccacaaactcagtaggagtgcaagggctgtacccccggagctagacagcctgggtttgaatctcaacttctcccttttcttgctgtgcaaccttgggcaacgtgcttactctcaatgtgagtgactcagtttcctcatagcctcattgtgaggaatgaataagtccacataaaacgcttagcacggggattggcaaagagtaggcactcagtgaatgtcagcctttgtgattgctgcagttcaaagactggctcagtgtctctggaggaattgtctatgaccttgccaagtagatgcatatggacatggaatgaatggtgtctgctgtggttctaactccttatgccactattccagtctgtaagtatg

SEQ ID NO: 9134 - DNA, 469 bp, Homo sapiens
  III.2762 (AA464791)
cctcgtgcgcctcgtgcggaagtgggagcggctgctggtgaccccaatctgccggtgctgccctatgtccagatcttctatgacacgacaaaccactttctgcccctggatgagctggagcacagcctgggggagagtgcggcccagggcagctggagtggtgctctgggtgagctgggaaaatacaagaaccaaggaatcatgtcaggccatcaaggagtatatggacactacactggggcccttcatcctgaacgtgaccagtggggcccttctctgcagtcaagccctgtgctccggccatggccgctgtgtccgccgcaccagccaccccaaagccctcctcctccttaaccctgccagtttctccatccagctcacgcctggtggtgggcccctgagcctgcggggtgccctctcacttgaagatcaggcacagatggctgtggagttcaaatgtcgatgctac

SEQ ID NO: 9135 - DNA, 416 bp, Homo sapiens
  III.2763 (AA465221)
gattctaacaaaatttattatgcagtaattacaaaggttaaagactcttccatctcaaataaaaataacagttataattacacacataatatagtaccttatagaatgattccaataaatatcacaggaaatacagtgcattttcaagttggagagacaaatactttctcattcacagtgtttgacataggaaagcctatttacataacaatctgtataaagtcatgctcttagtaacagtctatacagagctgtgccaacacaattctttcagaatgtgaagtaccgggcaaaccactcctggcgctggggatctggagaagccactggagaagcttcactctgagcaggactcaaaaatgtcttgggccctttaggtggcactggctgtggaagtggtttgctgctgttgaact

SEQ ID NO: 9136 - DNA, 290 bp, Homo sapiens
  III.2764 (AA465576)
gaaaaatatctaatgagagaatcaaaaccagaagatatacagatgattacagaattaaaagccatgcttacagaaagagaccagatcataaagaaactaattgaggataataagttttatcagctggaattagtcaatcgagaaactaacttcaacaaagtgtttaactcaagtcctactgttggtgttattaatccattggctaagcaaaagaagaagaatgataaatcaccaacaaacaggtttgtgagtgttcccaatctaagtgctctggaatctggtggagtggg

SEQ ID NO: 9137 - DNA, 466 bp, Homo sapiens
  III.2765 (AA147576)
gagactccaactccaataaaaataaaaaaaggaaagaaaagaggaaatttggacacaccgagacagcagggtcacttgtgtacagggaaaggccatgtgagaacacagtgggaagacggccatctgcaagccatggagagaggcctcaggagaaactgtcagaagtgtttgaaccagagcaactccatcttgaatagaagctaggtagaatgaggctgagacctactgggctgcatttccagacagttaaggcattctaagtcgcaggatgagacagaggtcagcacaagatacaggtcataaagaccttgctgataaaacagttgcagtaaagaagccggctaaatcccaccaaaaccaagatggccatgagactgacctctggtcatcctcactgctacactcccaccagcaccatgacagtttacaaatgccatggccacatcaggaagttaccctatatggg

SEQ ID NO: 9138 - DNA, 397 bp, Homo sapiens
  III.2766 (AA156447)
  misc_feature (227)..(227): n is a, c, g, or t
  misc_feature (237)..(237): n is a, c, g, or t
  misc_feature (337)..(337): n is a, c, g, or t
  misc_feature (359)..(359): n is a, c, g, or t
tttaaacaacagaaatttatttcctgacagttctggaggctggaagtccaagatcaaggcattggcagagttggttttgttacaggaaagggctccccatccagaccccgagagacggttcttgtatctcacgcgagaaggaattcagggcgggtccgtacagtacagggaaagcaagtttattaagaaagtagaggaataaaagaacggctactccatatgcaganagcccaaagncgtaagtttgcccatttttatggttatttcttgattatatgctaaacaaggggtggattattcatgcctcccccttttagaccatatagggtaacttccngatgttgccatggcattttgtnaactgtcatggtgccggttggaatgtaacagtgaggat

SEQ ID NO: 9139 - DNA, 341 bp, Homo sapiens
  III.2767 (AA437137)
ggtgtgtttaattatcaaatacctttattctcttcaataacaagaagtctggagtaggtgtgttgggattggtttatggctcaaccttgtcatcaagaagccagcatctttttgttcttcagctctgccgtccatagcctgttgctttttgtttttagacttgtcatgtcatggctgcaaaatagttgtggtggctctagacatcacgccttcactggacagtatccaaaccaggaagtacaaggcctttcctcctgcatcgatttctttaattgaggagtctgtaaggttagagatttcttcttatatttccattggtcagtgctgcatatgcaaaggaa

SEQ ID NO: 9140 - DNA, 124 bp, Homo sapiens
  III.2768 (AA906140)
tttgaactttatatcagttatatttagcatgacatatacaaacacatacccatgttttcaaatctgaaaattttagactggattattaatgtttttctttgtgggatgcttttaaaggctacgg

SEQ ID NO: 9141 - DNA, 430 bp, Homo sapiens
  III.2769 (AA907713)
tatgaactttatatcagttatatttagcatgacatatacaaacacatacccatgttttcaaatctgaaaattttagactggattattaatgtttttctttgtgggatgcttttaaaggctacggcaatatctcagtttacatgaagactcagttctgtagtcagtgggtgaggtgaaaatcattagggcaaaattatcttcaagaatctcatgggaaggcatcttgttagagagccatgagcttcctttctttaagtccaacacagtcagtctttcctcccttgttgaaacctgctgagtttcgaaaggtgttcctgtggtggtttctcatgttgagtttcaaatgatacagttagcttatatttgggggtatgttcagtggtaattcaaatctttagacaccagagtctcattcagcatgatgagatac

SEQ ID NO: 9142 - DNA, 341 bp, Homo sapiens
  III.2770 (AI201209)
tttgagtagatactgcttttattgtaatgaatcatcatcctctattattgcaagtgatgaaggcttctagtagcagtggaactaggaatggcgtcagtggctcagctcttgatggcacatctttagggggaaaccctttcagttttaatggtggataaagcaaaactcctcgttctcatcagtttcccctctaggctgtcctgggtagggagttgataggagatcttttggacacgggaattgcttcactttacagagcactttccggtttgtttcttgttagaaccccacaagggaaaaaagtaggatccccttctgaagatgagaaatttgaaggatgg

SEQ ID NO: 9143 - DNA, 453 bp, Homo sapiens
  III.2771 (AI298836)
tagttgagatggggtttctccaggttggtcaggctggtctcaaactcccgacctcaggtgatcagcccgcctcggcctcccaaagtgctgggattacaggcgtgagccactgcgtgcccggcagcagatgaactttcaattggagcaatggaattctgtggggcaggggattgcacactgcacacatcacagctgctcatccagggttcagggagcacaggtgttgtggcacttgcttcatcttgagtggcacggagcacagagcagcccctgtggagtgtggaaacaccaaaccctgagtcaccactgactgttgccctgggcatagaaccccaggtgaaggcacttaacactggttatccctgtgcatccaggaagctgaatggcggccaaagaaaaaagttacaatgcagtcaggctggaccagagaattcctgcatgtgcaagtttgag

SEQ ID NO: 9144 - DNA, 386 bp, Homo sapiens
  III.2772 (AA416996)
aggagaagagatatagggaagtatatatttctagtatctttaacttgtagtgaatagttggaaaatccatcagaagtgcaaaatcatatcttgactgacaagcctcacccagtgcacaccccaggcaatgttttcgtgtcactgagaaacaaactggcccacccagaagacagccttactaatcttgatgcctagaagcttgaagcctcactggagaagtgagcagtcaaagggagcttgtcgccactgattagcataatcggcaatagtcacttctagctggagttggaaacagtctgtagtataaaagcaggcaaaggggagcacctttctcttccctgaagggatttctggctaaaggaatactgtcagccgccttctggggt

SEQ ID NO: 9145 - DNA, 403 bp, Homo sapiens
  III.2773 (AA455302)
  misc_feature (56)..(56): n is a, c, g, or t
  misc_feature (57)..(57): n is a, c, g, or t
tgcggccgccgctgcccactcgcccactggcgtgggtagaagagaggagcggcggnncagcgggaaggggcgcgctccgctggccgccgagccgcacttgtccaacgtggaaaacccaaataccagtttcaaacacttgggaaacattcagccccgctgcgcacggcatgccgcccggccccctcccccggcaacggccccgccccccgccgcattcacgcccctcaccgtcccaggccctggggcgtgcgggctcgaggccggccctcgcgggggcgtggccttgcctgtcactttttccagaggcgagggtcgcggaggggacagcgtcagggccgatgggttgtcgcaaggcgtgcgacgcgcaaactttactaggagtttttggcacttggaggcagag

SEQ ID NO: 9146 - DNA, 445 bp, Homo sapiens
  III.2774 (AA465020)
ggctgcggtagttgctgtgtaccatggtctcggaggtttctatcccgcggcccgttaggtcctggtcgggttttcagcgacgaagccgctcccctgcgtttcccagcgggcgtgctgtgcgccaacaggctctgctccaagtgccaaaaactcctagtaaagtttgcgcctcgcccgccgtccacaccccagcggccctgacgctgtcccctccgcgaccctcgcctctggaaaaagtgacaggcaaggcacgccccgcgagccggcctcgagcccgcagcccccagggctgggacggtgaggggcgtgaatgcggcggggggcggggcgttaccgggggaggggccggggcgcatgcctgcagcggggctgaatgtttcccaagtgtttgaaactggtatttgggttttccacgttggacaagtgcggctcggcggccagcgga

SEQ ID NO: 9147 - DNA, 455 bp, Homo sapiens
  III.2775 (AI732774)
  misc_feature (235)..(235): n is a, c, g, or t
agaggagcggagcgggcagcgggaaggggcgcgctccgctggccgccgagccgcacttgtccaacgtggaaaacccaaataccagtttcaaacacttgggaaacattcagccccgctgcgcagcgcgcatgcgccccggccccctcccccggcaacggccccgccccccgccgcattcacgcccctcaccgtcccaggccctgggggctgcgggctcgaggccggccctcgcggnggcgtggccttgcctgtcactttttccagaggcgagggtcgcggaggggacagcgtcagggccgctggggtgtggacggcgggcgaggcgcaaactttactaggagtttttggcacttggaggcagagcctgttgggcggcacagcacgcccgctgggaaacgcaggggagcggcctgcttcgctgaaaacccgaccaggacctaacgggccgcgggaca

SEQ ID NO: 9148 - DNA, 478 bp, Homo sapiens
  III.2776 (AI734162)
  misc_feature (200)..(200): n is a, c, g, or t
ggctgcggtagttgctgtgtaccatggtctcggaggtttctgtcccgcggcccgttaggtcctggtcgggttttcagcgaagcaggccgctcccctgcgtttcccagcgggcgtgctgtgccgcccaacaggctctgcctccaagtgccaaaaactcctagtaaagtttgcgcctcgcccgccgtccacaccccagcggncctgacgctgtcccctccgcgaccctcgcctctggaaaaagtgacaggcaaggccacgcccccgcgagggccggcctcgagcccgcagcccccagggcctgggacggtgaggggcgtgaatgcggcggggggcggggcccgtgccgggggagggggccggggcgcatgcgcgctgcgcagcggggctgaatgtttcccaagtgtttgaaactggtatttgggttttccacgttggacaagtgcggctcggcggccagcggagcgcgccccttcccgct

SEQ ID NO: 9149 - DNA, 441 bp, Homo sapiens
  III.2777 (AI285886)
ttttgagatcatctctattttattacacaatttgccctaagacctaggcaagcagggtccctagctcaggccccaggccagattctcaggggaccccacacttttgagtgctcttcttgaaatattctaagttctcttcagtggctgggatcatcccagttggtttctcttcagagtactctgtgacccacctcttgatctgtgtggttggccaaatgccctgaggcagttcagggctcatgcctatggggttgtccagggcaacctgacaagtagattgcttctgctgaccagcacagtatttattttatggcattgaacaatactgggccactagaatggtactgattggctaatttggggtgattcacattgcatatatgagttcagaactctgtgctactaacagttcaccaccaacccttgaggttgcctcgtgcc

SEQ ID NO: 9150 - DNA, 533 bp, Homo sapiens
  III.2778 (AA429919)
tttctaagaaggaagacactttggatatttatttataataattttgttccattctctttcttgtctgctctctttttcctgcttaaagtatgatgtgtcacaactataataaggcaaatgattcctatcaaacccattgctgttaaaactcctttcaatataagataatctctggcaggtacaggatcagaattggggggaataaacagaggcgcctgggcaatgttagatacagcagactgtaaggagttcctatccattgctcgtattgcaacataaattctgtggctttcatgtgtttctccatttggctgatgttcaggtccattcgtggaaatttggggtgagaacgtaaatatctccctgatgccagcttgctgaggatttcgctttgatgtatttactaaaatagcattgttaaagtcatcttggatattctgtagacttttactcattcttatttcatagcttgtagcctggccctgatcaaagtcttctccaggtgctgtccaagatagggtcaattcctcttc

SEQ ID NO: 9151 - DNA, 568 bp, Homo sapiens
  III.2779 (AA446074)
caaaggaacatgagcaccaataatgctttaagagtgttttggaaatcaagagaatggaatatgaaaacatcaacatttgattcagatgaggatattctacttttacccaaaagaaaacgttttagaaagaaaaagtcaagaccagtgagacacaccaaacgccatgaagaggagcaggtctatgagcaagggaccacattaccctgttccatatgcaagcacgaaattgacctaactggtatttttctccataagaagcaacatgtagctctggccacgctgggtttccaatggatgggtagaaagaaaccacagccctcagtgattgctgttcagagacagttcatgatttctaaactattgtcatcttttatgttcactgaaaaaaccctacagagcattaataatgcttttgagctgctttggaaaaaacaaataccagcatactataagatttttgataacattgacaggagtgtcatatattctcaaaaaatatgtcatctgttaattaaaggagtgggcatttgtgaagacaggaattctacatggaaagctgacatgaatg

SEQ ID NO: 9152 - DNA, 190 bp, Homo sapiens
  III.2780 (AA888547)
gctcgacatgacaaagaaatagaaacaacttcaaaaaccaaatagaaatccttgagataaagaatacaatgactaaactgaaaaatgcaatagaaagctccagcatcagactcaaagaatcagtgagcttaaagatagaacatttgaaattgtccaatcagaggagcaaaaaaaaaaaaaaaagtcgacg

SEQ ID NO: 9153 - DNA, 477 bp, Homo sapiens
  III.2781 (AI183644)
  misc_feature (467)..(467): n is a, c, g, or t
cagccctgtaggagacacctccagagaaagtaacagctctcaattgattagctgagccagaattagcttctgttacttacaactgtgagtcctgactgaaaacatatttcttcctttgaagaactgttacctgtaacaggctaagaagaatattaagaataaacagatgcttttacagctcgccttggcgggaagatctggcacaaatgaagtatctataaggagcagcagagtcaaggtggtgatcctgtggatgaataactgaaacctgatatacttgacagcagaaaatataaagcaaattgaaaaggagagagtgtggagataaataagaaaatgaaagaactgataaagtcacttggattaaaaaacctgggagtaagggctttgtttatgattgaacttaagagagaattgagggaccacctacctttgatgttaacgagaaagtaaagaggaaacatatntagagatacc

SEQ ID NO: 9154 - DNA, 479 bp, Homo sapiens
  III.2782 (AI340303)
tggttgagaaaaacaagctgtgatttatataagcgggaaaatcatgtgatttgcaggaacgctccctcctcccccgaccccccgcgtcgcctccaagcccttcccagaggggcccgggcggcgggctgggcccggctgcccatgaggggcgcgggtggggggcgcgccgagcctcggttcacaaagcctcttccccgggcgtgcattcccgcagctcttccttgcggacctcagacgcggggacaggcggcggcgggctctggggcgcggcagtttggtccccacgctgcctcgcggcgggctgccgttcagggggtcctcggtggggccccgcggtcctgtgcctccgagggcgcaggaggcccactcccccgactgggtcggctgctaccctcaggccagggtgtgcggtggagaaactgaggctctcctccagctgctctgggagaaaggaaagccggggaccccacacactggcg

SEQ ID NO: 9155 - DNA, 490 bp, Homo sapiens
  III.2783 (AA418593)
  misc_feature (108)..(108): n is a, c, g, or t
  misc_feature (110)..(110): n is a, c, g, or t
  misc_feature (111)..(111): n is a, c, g, or t
  misc_feature (188)..(188): n is a, c, g, or t
tatttttaattttgttaaatttttattattagggtttgaaataaattcagtgttcacatttctataaagaagtaacccagtttcaggaaaccctgccccagcagcagntnnaagcaacactctccctgcccacatctagtttgatttcacgccctgatgcttcaaggtgcccagaaaagcggcacttngtggaagaggaaatctatgcccggcccgtgcttggggcccagggctcagtaagctttcgagaaagcagaggggaagactagcttactgcaaaaacctttttaaaaaatattcatacacttcagtgagcgcctgttgagacgttaggggaacaagagcttggaaacatcccgtccaggccattgggaggcagcgtcttcctcacaccccgtccctggatgtcgggggtgcagggggaaggtcccggctcttccactggagaaaggagactcacctggcttcctagttcatgtttgactatttc

SEQ ID NO: 9156 - DNA, 484 bp, Homo sapiens
  III.2784 (AA418655)
attgaagcccacccgtggctgaagcattaaccggtgggccccgtgcctccccgccccactttcccttcttcaaaggacaaagtgccctcaaagggaattgaatttttttttttacacacttaatcttagcggattacttcagatgtttttaaaaagtatattaagatgccttttcactgtagtatttaaatatctgttacaggtttccaaggtggacttgaacagatggccttatattaccaaaacttttatattctagttgtttttgtactttttttgcatacaagccgaacgtttgtgcttcccgtgcatgcagtcaaagactcagcacaggttttagaggaaatagtcaaacatgaactaggaagccaggtgagtctcctttctccagtggaagagccgggaccttccccctgcacccccgacatccagggacggggtgtgaggaagacgctgcctcccaatggcctggacgggatgtttc

SEQ ID NO: 9157 - DNA, 228 bp, Homo sapiens
  III.2785 (AA628141)
ttttaacattaaagcaattgaaatatttattgatgtttcaactatgaaatttgacatgttgctgcaacaggaaaactcatggctctttagggaaaatgagtgcctggctgactaccatccgtgcagttttgctccagaccccattcctgttcactggtgtcgttcatattcgcgtcttccctgtttcctttattctccccacctgccccctctcacactgcatgtgct

SEQ ID NO: 9158 - DNA, 235 bp, Homo sapiens
  III.2786 (AI025116)
gtcatttcattagatatatggtgtattgtatttctatctgtccatgtcagcagccacctacctccatggtcactggtactcacaatcttttatttccgttactaatttacccataagatcttaagcctagagcccccttacacaataggcagttcctctttcatgtggcgaaaaattcaaatgttctggtatcccctttaacaactgtcctatttttctctccttttactattag

SEQ ID NO: 9159 - DNA, 481 bp, Homo sapiens
  III.2787 (AI140687)
tttgatttatcacactttttattatgacaatttttaaacatatactagaaagaagaattacaagaatgatttggaacaacattctagaagtgcctgtgaaggagcggctgagcccccaagggtcacagagctcagaggaggatgtggagatgggcacccctcctgccaccccggctctccctctggacagcacctggcccgccactctgccatcaccctctggacagcacctggcccgccactctgccatcaccctctggacagcacctggcccgccactctgccatcaccctctggacagcacctggcctgccactctgccatcaccctctggacagcacctggcctgccactctgtcatcaccctctggacagcacctggtccaccactccgccatcaccctctttcttgtccccttctcatttctttcgtcaacaaacattggctaaagcctgtgtgtcagcccttgtggaacagtga

SEQ ID NO: 9160 - DNA, 202 bp, Homo sapiens
  III.2788 (AA628245)
tttcaaaaaaatgttggttgaaacctattaaattgatttcgtgacacactagttcataaccctcagtttgaacaactctgacctagacgcctgccaagtcttgggaaaataggaaggagacagataattaagtttgggagatgcatagtctaaggccagggttctcaatgttggcagtgcaagatcacgtgaggtacgactg

SEQ ID NO: 9161 - DNA, 393 bp, Homo sapiens
  III.2789 (AA436816)
tttgacagtgcagagggtgaccaagcctgggaagccccaggggtccaacaccaaaattaaaggtttattatacacaagaggacgttctgtccctcagagtggctggccaccctccccactctggccaaggtcctgcacagaggtttgtcctcaagggtgacccttcttggccgcccacagctagacctccggcgaagaggcacgcagtccatgctgctggcacaagtcacttggccagctcctcagccaccgctttgcgcatcttgtccttgaggtaggcgcctttctgccattcagacttgagttccagccactcatagaatgggacgtccactatcaggaagcctgcagccactatgtgtcgccgggccagaacaaagcgacccagcaagt

SEQ ID NO: 9162 - DNA, 262 bp, Homo sapiens
  III.2790 (AA442572)
gggctgccggggagcgccgacaagggcagcctcgaggtggccaccagtatggctgggtgctggatgctgaggtgctgctggacagtgacggcgagtttctgcccgtaagacatttgtggcacctcaccttgcccagccaactgggagccagtcaccacctccagggtctaagaggctagcgttcttgcggtgggagttccccaacttcaacagccgaagcaaggacttgctgggtcgctttgttctggcccggcgacacata

SEQ ID NO: 9163 - DNA, 278 bp, Homo sapiens
  III.2791 (AA469422)
ggtcgacggattgcataatctaaaaatatgaaaatgtgtataaatattttgtttcttaaaaggccactgctgtggtagcttatctagtatccttgctacatttactgaaaatatatgttagagatatctgcactgctatgttcttttcagcatttttcacaatagccaagatatggaaacaaccttaacgttcatcaatgaatgcataaagaaaatgtgatacatacgcacttgcaccatgaaatattattcagcattaaaaaagaagaaaatcctgc

SEQ ID NO: 9164 - DNA, 386 bp, Homo sapiens
  III.2792 (AA471079)
tcgactttttttttttttttggtgtgttaagaacttttaaggtctaccctcttcacaaatgtcaattacagtatatgacactattaactacagtcacactgttgtacattagatctccgaacttatttatgttgcataactgaatctttgtacttgaagtttcaacatctctccatttactcctttccctagcccctggtaaccaccattctactctgtaagtttgatattttcagattccatgcagtatttgtctttctatggctgcgttacttcacttagcataatgtcctccacgttcatccatgttgccgcaaatggcaggattttcttcttttttaatgctgaataatatgtcatggtgcaagtgcgtatgtatcacattt

SEQ ID NO: 9165 - DNA, 336 bp, Homo sapiens
  III.2793 (AA279503)
catttgtcaaagtcagagctagatatttttccatatcagagacagtggctctgatacttaagacagccggaaacaaaagctgtagtaattaatgtcagtgaattcggatcaaagttgactaactaactaattgataaaagactgccatactaaaatacacaggaatttgcccagtataaaatacaaatcttaagacttctaagaggttaatacaacaatacttcacttatctaagatcatgaagaattaagttaatatgttaattttgtaaatgcagcaagcaaacatttttaatgaaacgtcctataaatttttcttaaggaattatttctatgg

SEQ ID NO: 9166 - DNA, 481 bp, Homo sapiens
  III.2794 (AA279504)
agggaacacatcatttattttccaacttctgttatgttaacatagtgctgggcatagaagtaaacactgattcattaatccaaacagcatttactgaacatttactatattgctttagtgatacagcttcagttatagctctgttttttaagtggtgtaacacatttagtaattttaattttgcagaatgtagatcatcatcaaggaatagaataaagctgaaataagtggttgtcattttctatgataatgataaaaaatacagctgctactttaccttcttgtaacctggtgtaattacatggtatttttaagcattatgcaatttgagccttaggacaattatgcaaattaggtatggcagagggtggtagccttactgtagatgagaaagctgaggtcaaggtacatgaagggctttgaccacagttatttgaagaaggaaatcttggactgttagagcccagattttctaactgat

SEQ ID NO: 9167 - DNA, 467 bp, Homo sapiens
  III.2795 (AA425379)
tttgattaaatagaaattttattaaaatattcagatgttcagtgaagataaggtactgattctgattccatataaacattctctatattctgcaagaaaattcattcataaatgttataattacactggcatttacaatcctttctctttttaccattgtagaagatgagtttctatcagattgtggagacttcaattttctagaaactacacatgttggatcagacttggtctcgatgctgctatttgagatgatgtgacagggtctccaggcttcctgatgttgtgccatataatgggtttgagaaggaatagacagaactctctgttttctctgggttgctccagttcccgtaaactggattgacaaaggcacagttaccacttccctcggttttccttattggtacctttctgtttgcaagaaaacacaagactgcaactgtgatgtgagtcatcaggaatgc

SEQ ID NO: 9168 - DNA, 401 bp, Homo sapiens
  III.2796 (AA425507)
gctcactgtgcacagtatacaagcacaacaggaagctgcaattttgaaacaagttcaggaaactggaccacagcctgcagtcttactcaagactctgaggatgacttggactgggccattggagcagaattcctgccaaagcattaattccagactctgatcacacgccaggtagtggtcagcacttcctgtacgtcaactcatctggctccaaggaaggatccgttgccagaattactacttccaaatccttcccagcaagccttggaacgtgtactgttcggttctggttctacatgattgatcccaggagtatgggaatattaaaggtgtataccattgaagaatcggggctaaacatcctggtgtggtcagtgattggaaataaaagaacgggatgg

SEQ ID NO: 9169 - DNA, 427 bp, Homo sapiens
  III.2797 (AI190231)
tttttaacttatgaagaaaagaggtttaattcactcacggttctgcaggctctacaggtagcatgactgggaaggcctcaggaaacttacagtcatagtggaaggcgaaggggaagcaagcacagctgaccattgcagatcaggagagagcgtgcagggggaggtgctacacgcttttaaaccatcacatcttgtgagaactcactcactatcacgagaacagccagggggaaatccacccccacgatccaatcaccttccaccaggtccctcccccaacactgggaattacaattcaacatgagttttgggtggggacacagagctaaaccatatcaggcagctttctaaacattcctgtcttcagtttcttcatctgtgaaatggagttagtgagactccctacctcatagggtgattgtgaggt

SEQ ID NO: 9170 - DNA, 490 bp, Homo sapiens
  III.2798 (AA428531)
caatctcggacttcactccagttccattcaccagggatttcaactacagtgccaacaaatgtaaacacaaataaacctcaaactgaattgtcgtccctttcaacaagtccagtgagctttctcttaagtgtgccaagctgccatccaactttcttgagcattttttctcatgggaaatgatcaagttttgatagcagaaagtgcttctttccaagactttctcgaggccatcttcctgtaggcgtcatgcttctgatgttacacagctgatattttcatatgagctgcatttttagactacaaagatgcttactcagactcagcccaagtctccatgtccatcacctgggacactgtctgaggaactctgtgaggagagccttttccacagagaaatgagagcaccctcagtatcgctctgaagacttgatgaaggtttgctgacaagaaagggcttactcactgtacacagcccttcaataactcctac

SEQ ID NO: 9171 - DNA, 284 bp, Homo sapiens
  III.2799 (AA429452)
tttttctgtcaaagggttggtttattcctttacacacttcacacacacacaatccttcccccacccctgacacccttttcaactatttaaggtctgggggctacttccgggtatttttgggtaccagcagggagacagaaatgagcaggatttatgggagagtcaaatgcccctctcaaaacagttaaaggccttccttataaatggcctctctctgtaaatataaaaactaactataagaatctcaaacggtcagccctaaaagaccaggtcttgtgggattg

SEQ ID NO: 9172 - DNA, 453 bp, Homo sapiens
  III.2800 (AI160252)
aaatgataaatggagaccatttatttacttcccattgagaaagctctagccagataaacagattcctgcaaattggtccctaagataaattttgtaggggccagaggcagtagtgtccttagaccccagcaagaaaaaccgtgttctaggccctccattttagaggacaccaacctgactcttcttatggggtgaaaaatctccaggccagcacccaaagcctgggtacccactatgtccccaagacccaggaccctggaattccctgactggtattaccaaagccacttcttggccctgagctagcttcttctgagaactgtcctcccaatgaaggacccaacaactggtataggcacacctcagatccagacgcagacagagggtggctgttagaaagtgtgaacagaacttggttttgtgggctgcggtgttcacacacaggtacaaaaa

SEQ ID NO: 9173 - DNA, 511 bp, Homo sapiens
  III.2801 (AI939338)
aaatgattaatggagaccatttatttacttcccattgagaaagctctagccagataaacagattcctgcaaattggtccctaagataaattttgtaggggccagaggcagtagtgtccttagaccccagcaagaaaaaccgtgttctaggccctccattttagaggacaccaacctgactcttcttatggggtgaaaaatctccaggccagcacccaaagcctgggtacccactatgtccccaagacccaggaccctggaattccctgactggtattaccaaagccacttcttggccctgagctagcttcttctgagaactgtcctcccaatgaaggacccaacaactggtataggcacacctcagatccagacgcagacagagggtggctgttagaaagtgtgaacagaacttggttttgtgggctgcggtgttcacacacaggtacaaaaaaatcccctcttgtccttgaagatagctgggcacaggaagcaaagacggtgaaggtgta

SEQ ID NO: 9174 - DNA, 196 bp, Homo sapiens
  III.2802 (AA035407)
gctgactttggcctggccgggtcattgaggacaacgagtacacggctcgggaaggggccaagttccccatcaagtggacagctcctgaagccatcaactttggctccttcaccatcaagtcagacgtctggtcctttggtatcctgctgatggagatcgtcacctacggccggatcccttacccagggatgtcaaa

SEQ ID NO: 9175 - DNA, 459 bp, Homo sapiens
  III.2803 (AA035408)
  misc_feature (325)..(325): n is a, c, g, or t
  misc_feature (400)..(400): n is a, c, g, or t
  misc_feature (440)..(440): n is a, c, g, or t
  misc_feature (452)..(452): n is a, c, g, or t
ggtaaagactttggcatttatatcttttatttaaatattcatttcactattttgaaagtttcccttccaaatcacagctgtaactaaaatccaaccattccaggaaatagaaatatcaacttgggggcttcctgaagaatgtcagattgtggattgcaagagtcaaaaagagattttccagtccaacctacccactggacagatgaggaaactgtggctgaagcgagggtgggtgtctgggagtaggaagggggtgtgggccctggcggatggtgctggagccaccttgcagccaccacctgggcaccccctgggccctgccctnggtcctcccctatcatgggctggctgttgggtaactgggctctcttgttgggcccgttgtaagaaagttcatccnagcgacacctctgggatggtatttcgaaaggtcgggccgntccttccggaanggttttt

SEQ ID NO: 9176 - DNA, 533 bp, Homo sapiens
  III.2804 (AI139782)
ggccaaggccacgctcctccgggtcagcggcagcgacgccgccggctacttcagggtctggaaggttcccaagcccaggagaaagccgggacgcgcgaggcaagaggagggcacgcgcgctccctggaggaccccagccgcgccccggagctcccggaggcgccgccagccccttcgcaaggcggccaggaaggccagagaagtgtggagacggaacgcgagggcgaaagccaaggccaatgccagggcgaggaggaccaggagggcaaggccgagagccaaggagccgccgtgtgccagagccaaggaggaagcgggagcgacagcggcagacgaggggcgaggacaggccgtgaaggaagacaccacgccgaggtcagggaaggacaagaggcgaagcttcaagcccagggaagagaagcaggagcccaagaagcccgcacagcggaccatccagtagccaacgcgggctaaaaccgaccggacatctagcgggcaggggaagactccactaaagacttccacaaagacct

SEQ ID NO: 9177 - DNA, 491 bp, Homo sapiens
  III.2805 (AA426456)
tttttcattaagtgaacagatatttattgagtaccaaatactattctagatgtggtggatatagcaggaaaccaaacggaaaacctggcccattatatttgcatgttaaaatagtcttatcacataatattctttctgacattcagaccttggtgagcactataaaccatgtctctcaggcttttccccacaaatgacaccattattatgttcatttcatattggctcattgtggacatgttaacaaggtaataggtaagtgttagttttctgttcttctgctggtaattatatttgacaggcagtattgtggctgcctaaggatatagaaagattactgtccatgagactgcttttatatcaacagaatatcttcattaggtgtccctttgtataaccagagaagcccagtataatgtgactggcaaacatggctcttcagtggcttagagcatcctgatgtatttagtttttacacagtcttgggcagt

SEQ ID NO: 9178 - DNA, 268 bp, Homo sapiens
  III.2806 (AA437205)
aataccttttcaaattgccagtcaagagtgaagtatgccaagaaaaaaggagaggctcctcaataaccctcaagacataatgtcattttctctcctgtggatgaagactctctatctgctgaatatttattagtctgctgggtcacctgctagaaaacagacaattctccagcaacttcaaacactcttcttcactgaactacagtttggtatgagacgtcaaaggataagaatgtgcatacctaaatggtcaaatgaagatgaatgt

SEQ ID NO: 9179 - DNA, 347 bp, Homo sapiens
  III.2807 (AA430058)
ttcggagatgagggaatttattttatgcatctctgtgactcccatagttaggacagggctttgcttctccactggaaagtcaattccatgaggacagacaataagacagttctgttgatggctgccttcctaggcctcatgtgtgtcctccatgtgcgtcgactgccaactgctcagtgaaaacttcagtcactgaagatgtcctccttcgacacgcaggcagagcagcctccttaatggcttgcataagtctctctccccatctgggaaaatattccacccatttgccaagcattgttctcagtgctgggagcaccacagtgaagaaaagagacaaggatctctgc

SEQ ID NO: 9180 - DNA, 562 bp, Homo sapiens
  III.2808 (AA430267)
ccaagatacagaaaacctgagagaaaggaaatgaatttaaatggatgaaaatagggcgggagagttagagtttctctgtctgccagtgggggaaagtaggcagaagactctgcttccaagggagagacttatactttaaccttggagcataagaagaggaaactgaggctgagagggaggaagtgtcttgcccaaggtcccccaggcaacaagcaatggaaccaggatttgaaaccaggacttttcatcttaatcttcctcctgtggatatataagatcattataacatgaggaatttggaagagccaacgtactaaggtattgaactgatccttaccaggatgaaagctcctttctagtgaatgtcactagcctgtgatagacagagagcaaaggcagagatccttgtctcttttcttcactgtggtgctcccagcactgagaacaatgcttggcaaatgggtggaatattttcccagatggggagagagacttatgcaagccattaaggaggctgctctgcctgcgtgtcgaaggaggacatcttcagtgactgaagttt

SEQ ID NO: 9181 - DNA, 321 bp, Homo sapiens
  III.2809 (AI209013)
gcggccgcagctcctggatgaggcgcagggccccgggaaggatgtcgtccgggtccacggaaatgccgaagtacgcgacggcggcggccctcggggggcccggcggctcccggcagctggcgctggccgccgccttctcctccatgccccatgagcactgcgggcaaggcgtgtgcctcctcaggtgaaaggacgcgcgcggctgaggggccgaagggggcacagccattcccagcagccccaccccctcggagccgcggcagacgctagccccggcgggggggtccggcgagggagtgggagtggtagaggaggggccag

SEQ ID NO: 9182 - DNA, 504 bp, Homo sapiens
  III.2810 (AI304946)
ctacgacagcggagcccctggggaagccaagatgccgtcgaagggaaaggacaaaaagaaaggcaagagcaaaggcaaagacacgaaattgaaaaactgaaacagcaattaaatgaaacaaaggaaaaagcccaagaggagaaggataaattggaacaaaagtataccaggcaaattaatgaactagagggacagttccatcaaaaagccaaagaaattggcatgattcacacagagctgaaagcagtaagacaattccagaagagaaaaatccaagtggagagagagttagatgatctgaaagagaatttaagaaacacagagcggatacatcaggagactcttagaagactggaaagcagattttttgaagaaaaggtacagattattagggttaatttaaaatgttttgtttactagaacataagtgtatttatatgcattctgaaacatcagccttccatttggtatcttaatagaagattagaagattgttaccaaatt

SEQ ID NO: 9183 - DNA, 542 bp, Homo sapiens
  III.2811 (AA146968)
  misc_feature (179)..(179): n is a, c, g, or t
  misc_feature (443)..(443): n is a, c, g, or t
  misc_feature (493)..(493): n is a, c, g, or t
  misc_feature (542)..(542): n is a, c, g, or t
caaggatgtgctggagacaatacatggactttctctttcaatggtgaggaatgaaacaagatacaagaaccacagcatggaatatgttttcttttacatccaatggccaggtcataaaggatgccttgagacctccaccctggcccccacagcgctttgggacaggatgactaacgcanccagcttcatgtgcaatcaagtcccgggaagaaatttacatttcaaactctgaaaaatcagtgtctaggttggcagcagtactctggaaactgataaaaccaaattcggtcctatatttcaatttccccttctaagttaatacatgattgctgcccatcatacagtacttcaaccctaaactacagcaatttctgtcaacatttctgttgtataaaagttccatgctttgaagagcctatgggagtagaaaaagtttctctagnaatgtcactgaactatatttgcaacctagttgctctatgtgataaatatntccgactatactagggattatggtgcctttaaaaaataaattttgttcn

SEQ ID NO: 9184 - DNA, 348 bp, Homo sapiens
  III.2812 (AA146969)
  misc_feature (52)..(52): n is a, c, g, or t
acataatccctagtatagtcagatatatttatcacatagagcaactaggttnaaatatagttcagtgacatttctagagaaactttttctactcccataggctcttcaaagcatggaacttttatacaacagaaatgttgacagaaattgctgtagtttagggttgaagtactgtatgatgggcagcaatcatgtattaacttacgaaggggaaattgaaatatagggaccgaatttggttttatcagtttccagagtactgctgccaacctagacactgatttttcagagtttgaaatgtaaatttcttcccgggactttgattgcacatgaagctggactgcgtta

SEQ ID NO: 9185 - DNA, 325 bp, Homo sapiens
  III.2813 (AA244047)
gtatttttagtagagatggggtttcacacgttggccaggctgattttaaacttctgacctcaggtaatccacctgcttcagcttcccaaagtgctgggattataggcgtgcgaccgcgcccaaccagtggcaccttttttttgtcttcctcaagggatctcagggttgtcagaagtcccatctagacccctttaagggttatcaaaggtggcaaaaggaagaagtagaaatacatggaacaaccagttttggagaagccaatttggagagattttaagcttccccaaaaggctaatgaaattttacattttcagtcgacgcggcc

SEQ ID NO: 9186 - DNA, 327 bp, Homo sapiens
  III.2814 (AA244257)
ggtcgactgaaaatgtaaaatttcattagccttatggggaagcttaaaatctctccaaattggcttctccaaaactggttgttccatgtatttctacttcttccttttgccacctttgataacccttaaaggggtctagatgggacttctgacaaccctgagatcccttgaggaagacaaaaaaaaggtgccactggttgggcgcggtggctcacgcctataatcccagcactttgggaagctgaagcaggtggattacctgaggtcagaagtttaaaatcagcctggccaacgtggtggaaaccccatctctactaaaaatacaaa

SEQ ID NO: 9187 - DNA, 408 bp, Homo sapiens
  III.2815 (AA609291)
tttgtgttaatattttttatttacagtacagattaaaggatagggtgcaccatttttgtaacttttaaggcgttgcaaaagggcattttctgtcaaatatttgtccaaagcaaggaggtttggaagagaggagagtggagttacataagggctgacttagtgagttttctttctccaagtgcaagtctgaagggcctagagcaaataggcttagttttctgcccagtggaggctgaagtagagacagatctttggcctcttctggaagtgctgttgaatacacagccccctttgatacacagatcacctccaggtcagcaaagaggcttcgaggctggcagtggtgatgatcatgccctggcccacccttatctcagagctccgatctgacgcaaccagtccccatgc

SEQ ID NO: 9188 - DNA, 143 bp, Homo sapiens
  III.2816 (AA888443)
ttgatggctgttgtttaatgggacattcaaaagctttaattgaattcaaaaaggagttatttaagatttggacttaaaatcagcccattcctttattgtgtctctgtacaatctccgtctcaaaaaaaaaaaaaaagtcgacg

SEQ ID NO: 9189 - DNA, 306 bp, Homo sapiens
  III.2817 (AI312684)
tgcaggttactgtctaaaggcagtttaatatttacgaaatgtcacacacatacacacacactcacactctttaggatccagttacaagcgctgcgtcatccgccagatcacatggtaattgttgctatttcaaggatcaagtggcataaatctccccccccccaccccacccccttcccttggtaccatatagcgtggaagagtgagttttgtgtgatggagtgggaccaggctctctgatccaaccctctgctagcaactcggctgtcggtggggtggcgcgcgcgtattctcacggagtgacta

SEQ ID NO: 9190 - DNA, 442 bp, Homo sapiens
  III.2818 (AI190774)
tttttttttttttttgattttttaactgtttttaattgtaaaattccagacagagatataaaagttggcattaatacaggggaaagaactcaatgcgaatcattacatgccctgtgtttgtgggtattgtgtgtttcagtcaggccctgaaatcacacaagcgtgtatattggtcagccagtgtttgttgcatgggctaatctttttcttcaaggagcatttggcagggtttacctaagtttggctttgaaactgaatttgcatactcatatttaagtagatctacctgcaggccaatagtgttaacataagctagaagaccattttattatcggggaaaacgctgatgagttatttctgtcgtgggccatcctttgaccagcttgagattgtctgtagtctccatcagatggcgtgactttgcgtctgctttgcttctttt

SEQ ID NO: 9191 - DNA, 413 bp, Homo sapiens
  III.2819 (AA417948)
tacttttattagtctttttattcttcttttattgatcacctctgaagttcagtagcacactgcataattttttgcattagcatgctgttgtttctacctaaaatgaccggggtccttgccttctgcttcccatagagattgtcctgcaaaggaagtgtaagccattgtgttactaattcccagatttcccccacccagacattttcctaggagctggtctcagtcccatatccgcatttctcatccatggatgtccactcaaattaggtttcatcctggaccagtcattctaaatacagtgtgtgctacatggaaccccttgtttctaccccactctcaactctccctaatgctgagagacgtcccaccaaagaatgcatcatgagctccagccaccactgaacatttgtggc

SEQ ID NO: 9192 - DNA, 542 bp, Homo sapiens
  III.2820 (AA418124)
gtcagacctgcagggtgaatggtatcaagatggagatgaaagggcagccccatccgctgtgctctaatctgcagaattactctggtcagttctatgaccaaaccgtgggcttcagtcagcaagacacgaaagctggttcattctctatttcagacgccagctgcctgctacaggggaccagcgccaaaaactctgagttactttccccaggtgctaatcaggtgacaagcacagtggacagcctcgacagccatgacctggaaggggtacagattgacttcgatgccatcatagacgatggggccactccagcctgatgtcgggggccctgagcccaagtatcattcagaacctttcccatagctcctcccgctcaacaagcctcgggtcccctcccatttccagcgctgtcaatgagcaccaccaacatggctatcggggacatgagttctttgctgacctccctagcggaagaaagcaaattccttgcggttatgcaaagggcttaggaagaaaagactggtaccaacgggaatcatagg

SEQ ID NO: 9193 - DNA, 447 bp, Homo sapiens
  III.2821 (AI148301)
tacacggaacggacatgctcagtttaatgaattatttagccagcgcctgtgaaacaccacccacaatgcctggtgcccctgtgtagtccacagagcctggctataaccaagcagtttcccagggacaccaacacccacagacagggcacctcgactccagacaccatgtgcctcttgcttcccggattcatggaaacacagagaccagggatggggcagagcccacaggctttggaacctagaatttcccatcagttcaaccccaagcttgactgcaactcccattctagtgaattgaaggaacagaaaacacaccatttcccctttctgggaggggggtttccgtacccggcctcctccagtgagtcttggctgaggggtgggggtgtccctagttaaagtcaaggagaactgtgccttccctgcatccctgctaaaaatcctcgt

SEQ ID NO: 9194 - DNA, 482 bp, Homo sapiens
  III.2822 (AI148996)
ttaaactgtgttaatctctttattgtaaaataattacaaatcaggaaactgcacaaacatatatacaccttatccttttaatccccaatagagctctgtcagttaccccagagcttcctccttgttccatgtaccaatcataaccaccttcctccctccaaactataattattctcctgattttatagttatcattccttacatttcttaatggctttatcatccaactgtacagatggaaacatcatagcttaattttccccatttttcttccatgtcttctagttgtttttcttctataggtttttccttcattctttttttttccttagagtttagcagttggaaaagctggcccattttctccatgaaggctctcttggtcaggaatttggtcctggtactcttcagtacgtctttggtatttcctatacattgacagctggagacagaggcttgacgagactcaggcttgagccttg

SEQ ID NO: 9195 - DNA, 461 bp, Homo sapiens
  III.2823 (AI138306)
tttttttttttttttaaaattaagagttttcatttattttggaaaacgattttagcttataaaaataaaacaatcactgtgaaaagacatggaagaatcttaaatatatactactaagtgaaagaagccaatctgaaatggctacatatggtatgattacaactgcatgacatcctggatgagacaaaactagatacagtacaaagataatgaatatcaggcattagagaggaggaatgggtaaataggtggaacacagaggatttttaggacagtgaaactattctgtgtgatactataattatggataaatgtcattatacatttatcaaaacctatagaatgcacaacacaaagagtgagcccttgtgtatgggttttattaataataatgtatcaacattgactcatcagttgtaacaaaattaccacactaatgcaaactacaaatcatagtggaa

SEQ ID NO: 9196 - DNA, 417 bp, Homo sapiens
  III.2824 (AA448003)
tttatcttgaccatgtaaatttttaatgaggtattaagaagtgtgtaacagttgaggtaacaacttgcataggtattatgaacaattttaaacatagccatttaatattccagatgtattttcggcacaaatgatttgtctattcagtgataaaagtctcactgcacctcactatcagctaacccagatgacttgttttgtgaaatttaagaaaaatttattggtagagacctctttcaagtttgtacttaacagatgatcactagtggtgaacagcattctacaggatactatctttcactaagacttcaacctgcaaataaacccacttataaaaaagggatacatgatcttcctgtggttaacagagcttagatacatagctggtctacagagattagttgattctaccctctc

SEQ ID NO: 9197 - DNA, 452 bp, Homo sapiens
  III.2825 (AA448146)
gtctttcatttgtatattgaagttaccttgccccttggagttattgaagtgacatgtcaaggtatcacctaaatattcttcagtcacactcactggtatttctgaggctttgtgtgttaacaggccttgtaattgacattattttggttaatgtaaccccaaaattgctttagtaattgctctttggcatagtcaaactataaatgaaaatggcagctttacaaatagtatatttaagtgaactctggaactatggacatgaaaaaaatgatggctgggatttatgatttttgtctggcagcaaacaggtttgtccagaagtctaataattaagcagtcataaaaagtctgaatttagtaaaccagtgtatgatgttattcagatagtttaccttgggtatgagttcattttataatgtctgatgacattagatctcttaaaactttatgta

SEQ ID NO: 9198 - DNA, 370 bp, Homo sapiens
  III.2826 (AA620841)
gttccataaagaatttaagaattaaaatacatccgcattgcagagggctgggtagaatgcaaaggactagtttaaactcgggctgtagaaactgcactgaggcaaccttgtcttggagcgtggacccttcccggggcacgtccgtttcggatgcagccacaaagcaaatggggtagaacttggacgagaaccgcaccccgcctcccattccggacctcgttgaggtggagagcagcgtggggtgggttttctttcttattgcgggcgttcagcggatcgtgtttccgagtccgggcgtccggctgcaagctcgtggctggcgggcggcgccagcacggccgagcatggcggcggcgggccgggccggctt

SEQ ID NO: 9199 - DNA, 503 bp, Homo sapiens
  III.2827 (AI148552)
  misc_feature (418)..(418): n is a, c, g, or t
ttttgcttttacattttctttatgtctattatttccccataataagagttcggttccagaaagaaaaatgtatttacatttttttttccttgtaagtagtgacttaacttcatatatttgtgaggatgtaactatactttctcaaggcctatggcactttccaataataggctgagtggtttattgagtcaaagtcagtcctgtaagatacggggttatcacttagtaaacagcatcattgtaatatctatagtagtacccttggaatactagaggccaatcagtaatgaatatccctgatgtcaccatgggctagcctgggtactaagggaggcagttaaagaagttttaaactgagttatttctcagaaccccaaataagagttcagcctatctatggctctgctaatattgattntaaaactataacgttcatctttttcttgctttaaattcaagctgtttttaaaatcaaatctttatccccaaccaaaatgtagatt

SEQ ID NO: 9200 - DNA, 491 bp, Homo sapiens
  III.2828 (AI340051)
ttttttttttttatttttaaatcattttattttgtaataatattcatacactacaacccattgaagaaacaaagccaaaaaacgcagtgatgtaattctagttcccgcatgtagcaagactctctctactccattagcaacagtggccaattacagccaatcaaagtcgtccttcttggtgaagacagacatcaacactcccggggatgagtcatgctggacagatgaataagtgaaaggctatcctctgagaaatattgttcaaaaccttccaaggttagagaacagaagactccagaagcctttggacagtcttttcctccctgtgattcttttcctcttgggcttctgggatttcaaactcggtacatctggtctcttggagacacatcctccctggaagctccagcagaagatggccaaagaccccttttgccttttctgcttctccaaagcacaaatgagagactgataattcagaaataattcta

SEQ ID NO: 9201 - DNA, 486 bp, Homo sapiens
  III.2829 (AA469940)
tttctacaaatcactttattggaggaatagtataacagaagaatataaagatggaggtgattttaagggcaagaaagcaggagacagctgactttggtctttggatccactagcctgggaggaaggcagctcgtggcttagttctgcttgttttcatttccaagggtatgtgtgtcaaaaaggtactccgccaggccagcatccggggcccccatcttcactaagttgtgcacgtggtcacctagttctttgatagacttcacctgctcattcaggtagtaggtttccaggaaatcgcacaaatgggggtcacctttatctgaggctagagcgtgcaattccagcaacgactggttcacgttcttttccaagagtagagcacactccatggcatgcagcccgctttcccagtcgtcctgttccggcttcttgatgtcctgcaggcggatccggcctcctcgctggttctgcagcctcatcagcttc

SEQ ID NO: 9202 - DNA, 503 bp, Homo sapiens
  III.2830 (AA470110)
ccagaacttccaccccgactccgaggctgccatcaaccgccagatcaacctcgagctctatgcgtcctacgtgtacttgtccatggcctattacttctcccgggatgacgtggccttgaacaacttctccaggtatttccttcaccagtcccgggaggagaccgagcacgcggagaagctgatgaggctgcagaaccagcgaggaggccggatccgcctgcaggacatcaagaagccggaacaggacgactgggaaagcgggctgcatgcatggagtgtgctctactcttggaaaagaacgtgaaccagtcgttgctggaattgcacgctctagcctcagataaaggtgacccccatttgtgcgatttcctggaaacctactacctgaatgagcaggtgaagtctatccaagaactaggtgaccacgtgcacaacttagtgaagatgggggccccggatgctggcctggcggagtacctttttgacacacataaccttggaga

SEQ ID NO: 9203 - DNA, 423 bp, Homo sapiens
  III.2831 (AA676874)
gaggtgcagtctcgctctgtcacccaagctggagtacagtggcatgatctctgctcactgcaatgtccacctcctgggttcaagcgaatcttctgcctcagcctcccgagtagccgggactacaggtacatgccaccgcacccggctaatttttttatttttagtacacacgaggtttcaccatattggccaggctggtctcgaactcctgacctcgtgatccgcccgccttggcctcccaaagtgctgggattacatgcgtgaccgccgcacccagcccctgaattacctatgactttatcaagggaaagagtcacctgtgttgttaaagctgagctgatgacagctccacaaatgttaactgaacaaagtgccacactatgtgcctgtgtctgaagatgaatgagacacaatctgtgtgtt

SEQ ID NO: 9204 - DNA, 350 bp, Homo sapiens
  III.2832 (AI087277)
ttttttttttttttttttttttttttttttttttttttttttttttgggtaacttatttatttattttcaccaccaaaattattagccatgcctttttggtaatcgattttaacaaggggggggaaaacacatgcaaaatttttggggaaaagcttaagggcaaaaaatatgggacccaaactggggggcgcccttggggggttatttgactttggcacaaggaccgccaacagggagactggtaagccggtaaaaataaaaaaataaaactaatcaaataaaccggggtttttaatttcaaagggcaaaatcttttaacggaaaaggacgggtttgaaaaattcccggg

SEQ ID NO: 9205 - DNA, 465 bp, Homo sapiens
  III.2833 (AA393483)
acctgtccttccacagctcattatcccgataaaaaatgccttgaacctccgaaaccgacaggtcatctgtgtcactctcaaggtcctccagcatctggttgtgtcagctgagatggtgggaaggcttggtgccttattaccgtcaaatcctccctgtcctgaacatctttaagaatatgaatgtgaactccggagacggcattgactacagccagcagacgagggagaacattggggacttgatccaggagacactggaggccttcgagcgctacggaggagaaaatgcctttatcaacattaagtacgtggtcccaacctacgagtcttgcttgctaaactaacagtggcagcagctgggacttgaaacctcccgttggtgttgggatcatctgtctctgttgcttttagcatctcattccttgtgacttccacagctttcttttctacagctgctaaaatagt

SEQ ID NO: 9206 - DNA, 301 bp, Homo sapiens
  III.2834 (AA398695)
aggaatgagatgctaaaagcaacagagacagatgatcccaacaccaacgggaggtttcaagtcccagctgctgccactgttagtttagcaagcaagactcgtaggttgggaccacgtacttaatgttgataaaggcattttctcctccgtagcgctcgaaggcctccagtgtctcctggatcaagtccccaatgttctccctcttctgctggctgtagtcaatgccgtctccggagttcacattcatattcttaaagatgttcaggacagggaggatttgacggtaataaggcaccaaggc

SEQ ID NO: 9207 - DNA, 444 bp, Homo sapiens
  III.2835 (AA913938)
tttttttagcttaaacagcagaaatttattggttcacagttctggaggctatatgtccaaaatggcagggttggttccctctgagagctgtgagacagaacctgttccatccttctctcttaccttctggtggtttgctagcattatttggcattctgtggcttgcagttctctgtctttatctttaaacagcattctccctaagtttgtgtctacatccaaaattttcccttcttacaaggacacgagtcatattatattaggggaccattcctactccagtgtgacctcatcttaactaatttgcaatgattttatatccaaaaaagtgatatggtgaggtgctggggtttagaatttcaacatataaatttcagagggacacaattcaacccataacttgaagataaggcaataaaaattattgtctgaataatataaaga

SEQ ID NO: 9208 - DNA, 487 bp, Homo sapiens
  III.2836 (AA928055)
agttgacaaacaatgaatgggattgataattatcttctggggtccttgtgaccttccaattttcccagttgaagttctctatctgtagggtatgctctgtccactataaaagcctagaaacaatcaccaacctggtagcagtgagcaccctagatcctagattgtgttctccaaatactttttcctactaaaagtaaagctattggagaaatagctgattccaggtctaaaacaaaaaatatagaaatgaatctggaatatttggacatagcagatagcaagtaagctatcaaatactaggctcatgtcaaatggatcaagaagtctacttgacaggcctcccacaggccaaaaacagagtaatttgaatactaattaaggataataacttcaatggattgatatagtaacatcgttaaaatgatactaaaaaattctaggccttgttcataatgatattaaaaatgaaaaaaaattaattgattat

SEQ ID NO: 9209 - DNA, 269 bp, Homo sapiens
  III.2837 (AA035034)
  misc_feature (43)..(43): n is a, c, g, or t
accggctctactgccacctcttccagctccaccgccggcgcanagggaaaggcaaaggcaaaggcggctcgggagattcagccgtgaagcaagtgcagatagatggccttgtggtattaaagataatcaaacattatcaagaagaaggacaaggaactgaagttgttcaaggagtgcttttgggtctggttgtagaagatcggcttgaaattaccaactgctttcctttccctcagcacacagaggatgattctgacctttgagtgaag

SEQ ID NO: 9210 - DNA, 452 bp, Homo sapiens
  III.2838 (AA035522)
  misc_feature (391)..(391): n is a, c, g, or t
ttgttttattttattatggctagaaagacactgttatagccaaaatcggcaatgacactaaagaaatcctctgtgcttttcaatatgcaaatatatttcttccaagagttgccctggtgtgacttcaagagttcatgttaacttcttttctggaaacttccttttcttagttgttgtattcttgaagagcctgggccatgaagagcttgcctaagttttgggcagtgaactccttgatgttctggcagtaagtgtttatctggcctgcaatgagcagcgagtccatcctggcaggcggctgtggtggtttgaagagtttggacaggtcctcctcagggagcgagggttctcctcggctctggcgctgcatattctcctgctggcgacgctngctgatactgatgtttctgctgctgttgtttactagtattcctcatgtatgtgttgtattt

SEQ ID NO: 9211 - DNA, 275 bp, Homo sapiens
  III.2839 (AA045082)
  misc_feature (201)..(201): n is a, c, g, or t
agtgcaaacaaacatttattgtgaaatattcatcctaccctttattaggtattacatcatcaaagcactttgtggcaatgaaaatagctttttttacccctctaattcacccaatattccattaaagctgcaaaaaatgtgcaatctgcttgaaaaataggttgctcttatttactcatttgtgaaaagtcaaaaattaanaaagaaaatgatactagcatacagggcctctagagccaattcacctttccatttcccaactactccccaaaata

SEQ ID NO: 9212 - DNA, 620 bp, Homo sapiens
  III.2840 (AA045398)
  misc_feature (238)..(238): n is a, c, g, or t
  misc_feature (250)..(250): n is a, c, g, or t
  misc_feature (252)..(252): n is a, c, g, or t
  misc_feature (257)..(257): n is a, c, g, or t
  misc_feature (262)..(262): n is a, c, g, or t
  misc_feature (264)..(264): n is a, c, g, or t
  misc_feature (268)..(268): n is a, c, g, or t
  misc_feature (279)..(279): n is a, c, g, or t
  misc_feature (288)..(288): n is a, c, g, or t
  misc_feature (308)..(308): n is a, c, g, or t
  misc_feature (381)..(381): n is a, c, g, or t
  misc_feature (391)..(391): n is a, c, g, or t
  misc_feature (394)..(394): n is a, c, g, or t
  misc_feature (395)..(395): n is a, c, g, or t
  misc_feature (402)..(402): n is a, c, g, or t
  misc_feature (407)..(407): n is a, c, g, or t
  misc_feature (427)..(427): n is a, c, g, or t
  misc_feature (455)..(455): n is a, c, g, or t
  misc_feature (465)..(465): n is a, c, g, or t
  misc_feature (492)..(492): n is a, c, g, or t
  misc_feature (578)..(578): n is a, c, g, or t
  misc_feature (591)..(591): n is a, c, g, or t
  misc_feature (619)..(619): n is a, c, g, or t
ctgctaccgagatgctcagccagcccaaccaccccagcggcgaagtcaaggctgaaaataacattgagatggtgggcgagtcccaggcggccaaggtcattgtctctgtcgaagatgctgtgcctaccatattctgtggcaagatcaaaggcctctcaggggtgtccaccaaaaacttctccttcaaaagagaagactccgtgcttcagggctatgacatcaacagccaaggggaagngtccatgtcgangngcaantgccnancccnttagggaaacnccatcaaanaccggagcataaatgttaanggaaagtgaactcccaggaaatacacatgctcccaatcaaaaaacaacgggctgggccacctttttttcccangaaagttaantanngggcttntttanaaatttgtatgattataatntgggggaaaggtgcattggttttataanaaggcatttnaaacaaattatctttgttaattatttnggggagtagttgggaaatggaaaggtgaattggctctagaggccctgtatgctagtatcatttcctttttaaattttgacttttcncaatgagtaatangagcaccctatttttccagcagatgccng

SEQ ID NO: 9213 - DNA, 517 bp, Homo sapiens
  III.2841 (AA429734)
  misc_feature (160)..(160): n is a, c, g, or t
tttcacagcagattttttttttttttataaaaagtagattcaggagcacatccaattataaatgattgttaggaaaatcatataaaacaatggaatacataaaagtgtcaagagtaatcgtcagggtgcgaaattccttggtggccagatgcccatgganagcagaaattatcctggcagcatcactaagaggtcgatgtccacagaagattctccagggatgcaagcagcatgggcaggtggaggttttgaatttcataccctgattcatagttttcacaattccatgtgcaatttcagaaagattcatcattgactgctgacatgtcgccctttgggctggaggaacgggaggagcccttgtctgtgctctctgaccccgagctgctctggttctgctgttctgaccctgcactggaggtcactgtggatgaggatgtcgatgaggagcgagtcttttccttaaagtctgtgataatgacggtgacgttgcccacagttactgccaactgctgtg

SEQ ID NO: 9214 - DNA, 402 bp, Homo sapiens
  III.2842 (AA446086)
taggagtatatactactaaaaacggaggaggatataaacacaaaattcaggatggcagctacttcagggcaggaggcaaaattacagtctgggaaaataacatgatatggaaaacagcagtagaggtttctgccaccaatttggcaacacattggctgcctcccagatctaccaccctgaaatgaaaagaagcctttcgagatgcttattatctctgagtcaaacggaaaagaatcttatggacgccacctcagattttagaccagcagatatggggggacatcaatcacatagaggcacacctcattttaccgcactcaactcacagatgggtagttttgttttgtttttaacaaattaaaggttttgtggcaaccctgcatcaagcaagggtatcagtgc

SEQ ID NO: 9215 - DNA, 252 bp, Homo sapiens
  III.2843 (AA496848)
tgggccagcttggctttggcactaaatagcatcttctaaaggcctgattcagagttgtggaaaattctcccagtgtcagggattgtcaggaacagggctgctcctgtgctcactttacctgctgtgtttctgctggagaaggagggaagaggaatggctgatttttacctaatgtctcccagtttttcatattcttcttggatcctcttctctgacaactgttcccttttggtcttcttcttcttgctcaga

SEQ ID NO: 9216 - DNA, 529 bp, Homo sapiens
  III.2844 (AA496890)
gagtatttaatgtcgttttattgctctcaaagcatacagagcacttccaattactccaagaaataggaaataaaaaatatgactctaagtagaatttgcattaggtttaactttataggcatgggtgatttatacttagtagcctgaataaaatatgctcatatgcctcaaaataacaagtcagtctactccaaatttgatcagtttcaaacacataagggaagataatataatgttttgctattagtccatgtaacccaatgctcccattggtcaagaaatgttctctgacttttctttttactcagactgttgtcaaaccaatgataactatatacttcttaactccagtattgctaacataaaactaacactgtgtgttccatatacgcagatgtttgtgtgtttgtttggctagagacaaagcttctctggagtaaaaatgttagttatacatctagacacatagtggaataaaagttttagtttatacatctagacacatataccacattacactgattatttt

SEQ ID NO: 9217 - DNA, 300 bp, Homo sapiens
  III.2845 (AA904738)
gcattgttactatgttacaatggttgttttattattaaagcagtgccaaggaggttacacaacagcttggatcaggaagtgaaacaagggcggtgatcccactgaagctacaggggatggggatttgggacggtaaaatgttaattacccaagatggaatgtgggctagagtccagcgttgtgctcctggagatcatttcggtcgcaaaagctcactggcaatgggtcctaagcgtcctgccctcctctggctgaaatgttggattcacttcgatgaatgctgctatagggaaagaaccc

SEQ ID NO: 9218 - DNA, 392 bp, Homo sapiens
  III.2846 (AI311095)
ttttttttttttttttttttttttttttttttttttttttttttttttttcaaaaaaaacctgggggtttaatccgggttggatttaaacaaaggggcgggggaaaaaccccccggggaggggaaaaccccaggggggcgggccccccccaaagcccgggggggggggcgggcccccccccctccccccctttcccccccccataaaagggggttgggggaaaaacccagccgggcaggggggcgggcccccaaccggtgggggggggcccaagggaaagggcctatagccaccggggacccaacccagggaggagggggggggccccagggccctttgcccaaaaccccccgttttctgttcccaaatggaataaaaaaaaaaaaaaaaaa

SEQ ID NO: 9219 - DNA, 352 bp, Homo sapiens
  III.2847 (AA598808)
tttttttctcataaatcttttaataacagtaaatgaagaaacattataacagtaagccccatggtgagggttccttttcattcaaggatcttcaacaacagaaacacctgcgactaaaattcagaatgctaagtacacaaattaatgaccatttatttccaaaggcgactgcagataccatttcggtacaatcaaaaggttttacaagacagagaaaacacattacaaaatgccccaagaggtgagcaaactggtgggggcacagagcacgcaagaaccagcctgacaaaaatcctaagcctgctgctgtttagggagagtacaaagactggttctaagggaagccactgtg

SEQ ID NO: 9220 - DNA, 438 bp, Homo sapiens
  III.2848 (AI221746)
tttcctcttaaagaaatctgtgttttttctttcatagatgatcacagcttgccatcacgtgtgtgcacgtgtgtgtgttggtattgacttatttaacgctcactcccagctagactgaaatcttgatgagagcgagaccatatccgactttttctccacagtatccccagctcctagcatagagcctggcataaagtagatgcacccgaaatatccatcgaatgaatgagccaatgtgtacaggtggaaaatgagtggatgggcggagatgtcctctggcagcagcagatcatggcattgttcttcatcagggtgacctctcccaacctctcctgctgcccccaaggcaggtccgggagccaccactggaagcccagatgtggaatgtcctcctcctcctcctccttggaaggaagaagcctctgagtcctctcctct

SEQ ID NO: 9221 - DNA, 425 bp, Homo sapiens
  III.2849 (AI281197)
tttatggtaacacaaatgttatttttaatgtttttaattacaggtgctccttgacttatgataaggttatattttgataaacccattgtaaaatgaaaatatcataaattgagaatgcatttaatacatttaacctatggaacattatcgcttagcttacttaaatgtgcacagaacacttacgttagcctatagttgggcaaactcatctaacacgaagcctgttttataacaaagtgttgaatatctcatgtagtttattggacactgtactgaaaacagaatggttgtatagttacttgaggtatgctttctcaccattcgaaaagttgaaaagttttaagttgaaactttgttgaggactatctgtatgtcccgataacattatgttaaacctgtattacgcagaatacaatttgaagacc

SEQ ID NO: 9222 - DNA, 468 bp, Homo sapiens
  III.2850 (AA699358)
ttttttttttttaatgaaacatactattttattcaggctgaggaatcattcataatttctccccatgtccctatgcttcagtaatacggttttttttaatcaaaataattttttaaagaggaaaaggagaaagaatatcctatcttcagttcccctcactgtgggactttggatcagtcacttgatctctctgggcttcaattttcttatctggatgcctgcgtggctgcacagatagaagtcaaactcaaatgggtgggtgatgttggtgtccactgtggtcccagctgggatgttaccactcttcccaattcgctcattcttgtcagcacagaaaaggcgggtgtgatggcgtttctgcaccacaatataagtgatcccaggctggtagtccttttccagtttgatgcaggcatcacgaatggccagtagctcatagtggagtatctggggtagctggccttcagg

SEQ ID NO: 9223 - DNA, 289 bp, Homo sapiens
  III.2851 (AI266303)
tactactactatacggctgcgagaagacgacagaaggggaaacctgaacagataaataagaagaaatgctaaacatcactatcagaaaaatgcacaataaagcagtaataagggcctggtgcagtggctcacacctgtaatcccagcactttgggaggttgaggcaagaggattgcttgagcctaggagttcaagaccagcctgagcaacaaagtgaggcaccgtctctagaaaaactaaaactaaaaaaaaaaaaaaaaaaaaaaagtcgtatcgatgtcgagcgatc

SEQ ID NO: 9224 - DNA, 334 bp, Homo sapiens
  III.2852 (AA214595)
  misc_feature (102)..(102): n is a, c, g, or t
  misc_feature (282)..(282): n is a, c, g, or t
  misc_feature (309)..(309): n is a, c, g, or t
  misc_feature (327)..(327): n is a, c, g, or t
attttttgcaacagggtctcactctcttgcccaggctggagtgcagtggtgcgatcatagctcactgcagccctggactcctgggctcaagtggaaaatgcnaggtctttatagacaatgtcacccttgccagcctagtgtctgtccaatacattttccagggcctggcctggaattgtctgcatatttgtcacttcaattttgagaggattatttatatttttctcttctgacagtcatgtggtaaatggtaacccttggtgatgaaggggtgtttaagcnttttggtaaatacccagtttgcaaggncaccctgaaaaagggagnaagttgg

SEQ ID NO: 9225 - DNA, 506 bp, Homo sapiens
  III.2853 (AA448006)
tttacttttcatgttttagttactttcttgcaaacagcagtccaggaaagcaagcaagcaggtaaaactccgggtgtgcatgaggagatgatccaaggccagtgggctcccagtgagaaccaaacaggagtggccaggctccactcctggggccagagtgaaaccggggtttaatcactgggctatgtggtctctgtgtctctggcctgaatgagatctcttcaatgtcgggggacagggatccctggaagagcgtgaaaaatacagtggtcactgtgcagttctctctgctggagcctgtcctgccatcatacaaggtgctgtgacagcaatgcaaggtgaaaggagatcaaatggcccagctcagcagttagtgtttgtccctttttgctcttcagagttcctgaatgagagcttttctggcttcagtaccaatgatcacagaaggaacatcttcctgatgacagcttagatggaagtcaatgaccctggcagtgctaagaaca

SEQ ID NO: 9226 - DNA, 460 bp, Homo sapiens
  III.2854 (AA448149)
ctgtcatagcattttgtgctcaccacgaaggatggtctctgccttctcttgtcggtgtatgccatctgaacctaggaacacaaagtatattggcctcaaacggagacccagggttgccagttttccgtgggccttcccctcccttgaaatgtctttaattacctccccttcatcgtcaggccacgtgtgacttctgttcttagcactgccagggtcattgacttccatctaagcttgcatcaggaagatgttccttctgtgatcattggtactgaagccagaaaagctctcattcaggaactctgaagagcaaaaagggacaaacactaactgctgagctgggccatttgatctcctttcaccttgcattgctgtcacagcaccttgtatgatggcaggacaggctccagcagagagaactgcacagtgaccactggtatttttcacgctcttccaggga

SEQ ID NO: 9227 - DNA, 242 bp, Homo sapiens
  III.2855 (AA490474)
acatatttgaatttttaatttgcactgctgtattttaaacctaaccataattagtcatttaaaataattaagtaggcctgaaagtcagccatgttaatttctcaatttaatcaattcttaaagccttcaaaaattgacattttttttccaagacccttcattctcttaaataactttaattttatgaaaccatgtatactaaagaaaaacttttccaagattccaggtgattgtgcatttgt

SEQ ID NO: 9228 - DNA, 367 bp, Homo sapiens
  III.2856 (AA490697)
atacaagtggtttccattcaaatttacaaaagcattatttattagtaataaaaatatagaaggaattcagttttccttttatccccaattttttgcttttaaaagaccatttactaacatcctactgtagatatttcgagagacagatgaaaataataataataaagattattatagccaaatcatccagttagccaggagtttgatgactggatatttcagagtctactgcgggttttaaatattttgttagcaaatgaattcatctgtatgatgagagacttacatgttttatagctgaaaacctaaggagtgacaatagtacatgtgacattcttaacagttaaaaactgagtaagtcctgttc

SEQ ID NO: 9229 - DNA, 489 bp, Homo sapiens
  III.2857 (AA699710)
ttttaggatgaacattctgcatttaatgaaagcaagattttaaaaattggcttctattatacaacttctaggtcttgtaaaattatacatgtcttggggaccacttagatgctatacaggggtgagttattctctcccaagaaatcttctgtgattacagttgagttccaggtccaacggcttcatataaaacttcctttagagagactggaggtggttactgcctttagtggcatttgcatgttcagcgtgactgagaacactcttgatggtgtgacttcatcacaaagacttgatcaggtgtcaataatttttaaatggccatgtttcttaatgaattctctctctggttcactgcatggaggtgagaggtgaagccagctggacttcttgggtctagtggggacttggagaacttttctgtcttacaagaggattgtaaaaagcaccaatcagtgttctgtaggtatcaagaggactgtaaaatgc

SEQ ID NO: 9230 - DNA, 248 bp, Homo sapiens
  III.2858 (AA029117)
  misc_feature (228)..(228): n is a, c, g, or t
  misc_feature (235)..(235): n is a, c, g, or t
gtagggaaaaaaaggtttattttcaaggatttgtgcagacaatggtgaataaaaaattgtatttcaactataaaaaggagctgacttcattccaccctggcctacagggtttatggtgatgccagtttgaatctgaggcaatactgctatccccattcctccacctgtaaaagattcccccagaggaataacattctataacttttagtcaaaaatatgtaagacacntcaaacnaagttaatggagg

SEQ ID NO: 9231 - DNA, 563 bp, Homo sapiens
  III.2859 (AA029881)
  misc_feature (336)..(336): n is a, c, g, or t
  misc_feature (425)..(425): n is a, c, g, or t
  misc_feature (470)..(470): n is a, c, g, or t
  misc_feature (509)..(509): n is a, c, g, or t
  misc_feature (563)..(563): n is a, c, g, or t
gttagtaactcctgagcagaccattttagatggctcagcatttggcaggaagacttctccattccctgcttatatctatggaaggatcagctgttggatgtctagaacttctctatttaaaaaaaaagagtaggtctaaaattaaattattataagcaagcatagacatgggtcttccagttgaattgtccattaccgtaaaacttaatggtggacaagttagctgtggttgattcctgtgtggcagtaaattgtcttctgtctgcttactccaaataataaaagctgctaggaagtttagattttgaaataggcagtttaatgctttgagggttnctagaaatacagaaaagtcatcaagtaaacactgcatgtctaatcatctccagagttgtggcctgttatcccctccaggaattgggccnccagggtaaaatttccaccaattccatacggtttttccattggtncatttcctgagggacccttgagaatgagagaaaggaatncaggtggaacaggaaggggagttaccccctggtgggtgtgagtttgggacctgn

SEQ ID NO: 9232 - DNA, 398 bp, Homo sapiens
  III.2860 (AI078225)
ttagcggggaggagtgaagagagtgaggtttggggatccttctcggagagagaaaggcgggcgtcgtcccttgtgccccgcgcaggccgacgcgcttagccgattccgcacgttgggcaagtgggggcacagcgtccccgggcactccggtcccggcaggtcagcctctcccgggcagcgctcacacccagtcctccgagcctggggttccacggccgaaatgcctgcgacagagaattagagatagaagctcgtgaatgtccctttcttcgaagggctgggaccccgggcgggccgctggccagctcgcccgcagcccgttgccatgtgctccctgttgctgctcccggtgattgacaggccggcgcacagtcggcgtgtcagccgcgaaccaaagt

SEQ ID NO: 9233 - DNA, 474 bp, Homo sapiens
  III.2861 (AI276892)
ttttaatataaagcaacgttttattaatttcaaagacattattaaaatcatgaaaaaaatccctatctgttaaaattaccaactgaaatatatggagaaagtttcatgacaataacaaaaggtacaaataagaaataaactaagatctttctttcctatcactgccaactggtaaacaccttcctccttctcaaacttctgtaggctctttcaaactgtagttcctaagacaagaaagcagctaggttttaaagtttcattaaaaaatctcctcccctaacaatctaaaatgcacaaagtgtgtgtgacattagaatgtaagctccacaagggcaggcaattttctctcttgttcattattacactccaagtgtctagaacaatatgataaatttaaccatccatttcagaaaaatatgattatttcagagactaaagcaaagcccatcaatctctacttccgtattccaaatg

SEQ ID NO: 9234 - DNA, 381 bp, Homo sapiens
  III.2862 (AA293000)
gttcggcacgacgggagctgctcctatcttcatctgaggtagaatcctccagtaactgttttaactgctgtatccttacgtccttttcatgtcgtttattgtctcgtatgatgtcatacatgggatcttcatgtgccactctgaactgctctaacttttggttgcctttgataaagaaagggcattctttgtcacccgttcggtgaccatagcgtttgcaacgccaacactgcataactttgacttctttcccagtggcatcaaagtcctttagttggtgcatgagccagaaattccctggcgtgttcattgcctggtacatctggtatgcaatcttctggcttagtctcatgtccgttgataagcccaggaggaggtttt

SEQ ID NO: 9235 - DNA, 412 bp, Homo sapiens
  III.2863 (AA398529)
gctgcagcacgtcgggagcagaagcggcggcgacacgaccgcagcagctgcagcagctcaagcacctggagtccttttacgaaaaacctcctcctgggcttatcaaggaagatgagactaagccagaagattgcataccagatgtaccaggcaatgaacacgccagggaatttctggctcatgcaccaactaaaggactttggatgccactggggaaagaagtcaaagttatgcagtgttggcgttgcaaacgtcatggtcaccgaacgggtgacaaagaatgccctttctttatcaaaggcaaccaaaagttagagcagttcagagtggcacatgaagatcccatgtatgacatcatacgagacaataaacgacatgaaaaggacgtaaggatacagcagttaaaacagtt

SEQ ID NO: 9236 - DNA, 433 bp, Homo sapiens
  III.2864 (AA428282)
ttttaagtggcagcttttaataaaagtacagttcgtaataggtagggaaaaaggtcaaggatataatttctacatactaacatatacgttgttaggtatataaaatatataaaatcaggactggtgtcacttaactttttaatgtgtcttttcttcgggcacgtggcaggcacttgcagagaaggtaaacatttacagagtacctgttattttccaggcattgttcaaagtgctttcaagagttctggtttgacagaactaaagaattttgatttttcttccagcaaacaaaagaaaacctaggttctttttattactctattctagtaagaacagaaagggaatcttttgcactttaattaacatcgcttaattccatggctatcaaagatgactcaattcctccgcagaattactatgtgactattagaaa

SEQ ID NO: 9237 - DNA, 392 bp, Homo sapiens
  III.2865 (AA445909)
atacacaccccttcttcccactccgctctcacgactaagctctcacgattaaggcacgcctgcctcgattgtccagcctctgccagaagaaagcttagcagccagcgcctcagtagagacctaagggcgctgaatgagtgggaaagggaaatgccgaccaattgcgctgcggcgggctgtgcacgtacctacaacaagcacattaacatcagcttccacaggtaacctgggcagtggagtgggggtgacggaaactggagttcctattgtggctatctcttgtgtggaaggaacaggaggattctgctaattctaataactttcccagctggtagcagggaagcatcgtatgtcctttgtgtttctcaaatctgcccaattgttctctgctt

SEQ ID NO: 9238 - DNA, 241 bp, Homo sapiens
  III.2866 (AA461451)
gggccgcgtgactcactcgatcctgcgggcggcgtggagcactcgctcgctccctgcccggagccgccaccttccctcgctttccctagccggaattgcacgagagtgtcccttctggtatccctgggaagctcagcttcaagagccttcgcaggctccaggagctgggcggcgtcccccagtcaggggaagcttgcgttgcggctccagccttggggtctacttgctgtctgcgcgtccg

SEQ ID NO: 9239 - DNA, 424 bp, Homo sapiens
  III.2867 (AA812925)
ttttaagatctgaatattaatataattattttttttgtagaaataggagttgctctagcctgtcccttttactcctctccaccctactccccacaagagtcaagaacttttgtgctctgttcccttcctttatcatttgctcttcttctttcttcagtcttgagtgctcggcagttgattcctgtgcttgggttccctaaaactgtatatatatatatacacatatataaatcaaagcgtgttcttcccctcactccgggttcttctagctgtgggtgtcacccacatagcgctgaaacaacgaacaagggagcattgtcctcggctagtgggcgcctggtccatgtggcagctcaaacccaggaattgtggggtctaatcgaggtggttagatgaggctcctcgttttcgggaatggtggtcc

SEQ ID NO: 9240 - DNA, 451 bp, Homo sapiens
  III.2868 (AI095270)
  misc_feature (402)..(402): n is a, c, g, or t
tttttttgaaggaccaaaaaagtttaattataaacagtcttacatcttgtaggaaaacgcaagtggggcaaccactgaaggaactttataaaagcatttgactccctgtaatatttgtagcattacctgagtattaaaagtaacagatcaagaaaacaaaggtactcttaatacagtaatatacaatccagtgctgccaattccatttttagttaatgaaagcaaattatacaaacaaagtaaataactaaaagaaaaacaaaaaaaggaggggggctggagataccaacaatactaaatagaagtcgttaactctaaaggagtttagaaaggtaagttacatccacaacaggaaaggatataaaaatagaggaaaaatttaattccgtgagtcaaccccgngtaacatttcggattattaaccagataagtaaaaagtggtagagtgggc

SEQ ID NO: 9241 - DNA, 432 bp, Homo sapiens
  III.2869 (AI184226)
agatggagtctcgctctgttgcccaggctggaatgcagtggtgcgatctcggctcactgcaacctcctcttcctgggttcaggcaattctcctgcttcagcctcccaagtagctgggactacaggcgcatgccaccacgccgggctaatttttgtatttttagtagagactgggtttcaccgtgttagccaggatggtctcaatctcctgacctcgtgatccgcccgcctcagcctcccaaagtgctggggttacaggcgtgagccaccgtgcccggctgagaacattttacatatatgcgaaatagctacccagtcctgatcgactagagcactgagtgacacacattaaatgttaagtttgaaaagactgtaaaacattcacatatgacagctcttagtgaagtaagagcctctcatattccataattgt

SEQ ID NO: 9242 - DNA, 396 bp, Homo sapiens
  III.2870 (AI150267)
  misc_feature (328)..(328): n is a, c, g, or t
tttaaataattcttttattttgtaatgaagaagtgtgacttctgcacttgggtttgtggttacaaattcatattcgttataattcattctttaacaaattagttgcataattactatataattgtttcctgttaattttttttcttagtgtcaggctcattgaggtctgattgacatatagtaaaatttatccttcttagtataatattctgagttttgacatgtaaaactaccacagtcaagatagaaaacttttacagtactcccaaaagtttcctttgtacccgtctcatcgcctcaaacccagatcctaaaaaccagtgataanttgccttttctagaatggcctgcaaatggaaccattcagttctagctctttgaatctggtttctttca

SEQ ID NO: 9243 - DNA, 479 bp, Homo sapiens
  III.2871 (AI004422)
  misc_feature (414)..(414): n is a, c, g, or t
ttttaattttcaaaatacctttatttttttctctttgggtggtcattccatcacactgttaacagtgcacctgctgtaccatttcatttggataattctgacaatctccacttcttcatgcgtctcagtcagtcctcagtttcttcggcttctgttattgtccctgttacatcatccttatcctcgtcactcttcatcgagggcccagcacttggaggcccaggactcgcaggcttcagcactaacttgctgctggatgaggccaactccgccttttcgctggacttctgtggcagcgcgacatccacagggatggccttttctttcctgctctcctgaatgactctgtagatgatggtgatgacgaaggccccagcgatgatcacaatcaaggcagagaacacgtggatgtanatgggaaccgctttcttgtagcagacgccttcgtagaagcagcacccgagctcctggcatcggtc

SEQ ID NO: 9244 - DNA, 264 bp, Homo sapiens
  III.2872 (AI203802)
  misc_feature (207)..(207): n is a, c, g, or t
ttttataaggcacattttttatttaaaaaaagttgtgaattccttgtaaacattggttcccaggacccctgcagataccaaaatccatgcatactcaagccccacacttgaacctgcagaatccaagtatacaaaaagttggccttacctatctgcaggttttgcatcccacgaatactgtattttttgatctgcattttggtgcanggtgtgaaacctgtggatatggggggccaattctattttattgaaaaaaaatccaca

SEQ ID NO: 9245 - DNA, 416 bp, Homo sapiens
  III.2873 (AA427610)
tttatgcccatatataacttgttgccacctttactaacttccccaccaactaggctggtttggcttcttctgatcagcctttgggtgctccttttcttccctctaatgtgccgcctcctgccccaatgtggccaataagaatcatgcgtgattgaaacacacaagcaaccactggagcagagttaccatactgatcaatatctgggcaggtaaacaaagatgtaggcatcatatttcaagatcatatgaaggactgtggaaatcgttactgaaaagagtttcttagggatgcaaacttaccaaaaacacagtttgtaatgatacaagaatttcaatcactacataagaaagcattctcccaggcatcatgagtagtaataaagggagaaaaatacatagtccttgatctcaaggaa

SEQ ID NO: 9246 - DNA, 376 bp, Homo sapiens
  III.2874 (AA284644)
caggccgggacgtggcagttaaggtcattgacaaactgcgcttccctaccaagcaggagagccagctccggaatgaagtggccattctgcagacctgcgcatcccgggatcgtgaacctggagtgcatgttcgagacgcctgagaaagtgtttgtggtgatggagaagctgcatggggacatgttggagatgatcctgtccagtgagaagggccggctgcctgagcgcctcaccaagttcctcatcacccagatcctggtggctttgagacaccttcacttcaagaacattgtccactgtgacttgaaaccagaaaacgtgttgctggcatcagcagacccatttcctcaggtgaagctgtgtgactttggctttg

SEQ ID NO: 9247 - DNA, 398 bp, Homo sapiens
  III.2875 (AA290766)
gagatcaaggccatggggcacgagatgagtccgttttaattgctggggaaacagggaggggccttggaaatagctccccccaccccactccccacgtgtcccatccagtttgggcaggaagccactttccctagaacagttcattgctgggatcctgtgaagaaccgctgtggagggcagcagctggacgagggcacaggacctcagagaacactgatgcgctccgccagcccctgcatgtcgtggtcctgtggtggacaggccccaccgagatccctgtccgtgggcagcccagacccaggcagcggatgctctgctgcaaactgctcccagcgcgcgtcgtcactctcatgcgtgatgtatcgctctcccatcttcccctccagctctcggaggtc

SEQ ID NO: 9248 - DNA, 506 bp, Homo sapiens
  III.2876 (AI348076)
  misc_feature (365)..(365): n is a, c, g, or t
  misc_feature (372)..(372): n is a, c, g, or t
aatagttatattttttaatagaggtacatcactatttaaatttttggaagcccatttgcacatctctaaaaccactgcaaaatgggtccatattggaataggtccaatatgggtccaattggaataagccatactggaatagggtgggcccctaatcccatacgactggtgaacttaaaaaaagatggcctcacccaaggagctgctgcccacacggggctgctggacaaggtgcagagggatgtggcagggaaaggggaccagaagacaccagtgatctgctaaataaatgaaatggtgacgtcgcttccccagtggccctgcagagtgtggggcggcagtggctggcctttagggggcagcanggtgcangggaaagagcaggcctttgaatcacgagatgctgggttaaagtcctagttctgctgttcactagctgtgggccttggcaagcaacttcacttttctgagcttcaatttctgcttctgaaaaatggtgatgaccc

SEQ ID NO: 9249 - DNA, 499 bp, Homo sapiens
  III.2877 (AA131893)
  misc_feature (286)..(286): n is a, c, g, or t
  misc_feature (461)..(461): n is a, c, g, or t
  misc_feature (480)..(480): n is a, c, g, or t
  misc_feature (495)..(495): n is a, c, g, or t
cccagccacagccaccagccggtccccagcctgcatcccagccttcttggctgctagtcccgggtccacctcccacaggaactgtcctggggcatagacatcctcactgctcctctccagctatcctaggccactgtgtacacaccaggggactgaccccagagtgaacgggaagaggcggcccagggcagaagctcagacagggacacctcttcggtgcactgaaaggtgtatatacgcttgtgtgcccaccccaaggcccaccttcccccaccgcccccagggntcccactcaccagggcgaccgtcaaggcccttttcctcccggagcaggaacccaaaaccctggggccctttctccaggtgcaggcagcggggcttggtgggcagtgcaagccctctgccaggggtgcagccaggggcaatcccagctggcgacacttgttctttcaacttttggncctgcaccagcaaggtaanctgcttgttcaattntgca

SEQ ID NO: 9250 - DNA, 470 bp, Homo sapiens
  III.2878 (AA131894)
  misc_feature (63)..(63): n is a, c, g, or t
  misc_feature (81)..(81): n is a, c, g, or t
  misc_feature (193)..(193): n is a, c, g, or t
  misc_feature (376)..(376): n is a, c, g, or t
  misc_feature (422)..(422): n is a, c, g, or t
  misc_feature (470)..(470): n is a, c, g, or t
taatttctatgcaatcagggtcctttctggttggtgctaagtactggaggagcagctgagcgngcaggggtgcccccgggnccggctgctggaagtgaatggggtcagtgtggagaagttcactcacaaccaactcaccaggaaggtgtgactgcctgtctcccactctcctcccccaatccgggcctgggcncacctcgggaaacgcctccttccccatgcgcctaacctccttatctggtctcctacctttatcaccatcctccccctctacagtttgtgccaggctccacttagtgcctgggaggaggggctgtggggggagcatacctcttctctccctgcccaggtgttatactgatgccctgctgggtcnccacagctttgggcagagtggacagcaggtgaccttggctggtggnagggcagaaggtggaagaacagtgtcgccagctgggattgcccctggn

SEQ ID NO: 9251 - DNA, 561 bp, Homo sapiens
  III.2879 (AA609457)
tttttgcttagcacaacaaatgtttatttctgtcacctcacagtccaaagctgagctgggagaaggtgggttctgctccacacagtcattcatatctccatgttttctccctagggccagtcatagtccacgtggatgaagaacgtgattggccagcctgagacgcaccccagaggcagaggagatctgatgattggtagctccatcagatgtgggaggaggagttcatgatcacaaggtcccacaacaggccatctgcaagctgaggggcaaggaaagccagtccaagtcccaaaactgaagaatcttccaaatttaatacaaaagccacatttggattttccgatgtcccaagtgtgtctaggcactgcggaacgtcgtcatgtctttgggttctctgctggggacgcaccagtcatcagcctcgtggttggtgttgtaatgcttccaggcagctttgttatacactgggagtctttctattgagtctgttgacagagccttaatgtagataactgcatctgtcccgtaaccctctagggaatacagcttcaggtctcc

SEQ ID NO: 9252 - DNA, 440 bp, Homo sapiens
  III.2880 (AA775856)
gcggccgcatgcagctcaagcgaggcgcgcaggctccacaggtcgcggtcgtggtctgggcctgctcggggcccgcgtcccgctcggcgtccggctccagtggcggctgctgctgctcaggccccgcgctgcccgcgccggctccgggggggaatcggggctcgctcctcccgctgcctcggccgcctctagcctgccgagagcagggggcgggctggccagaaaggggcgggggtgcgggaaggccacggcgtcgcccgcccggcgaatgtactggatgaagtcctcctggggggcatcccatcctcctgctccgtgctctcactggctgcccgctgccgctggaagtggtgccgcttgagggaacctctcgtgtccagactggctgcccgctggctgggctccagcttccacttcttgaccttgaaataggggctggc

SEQ ID NO: 9253 - DNA, 383 bp, Homo sapiens
  III.2881 (AA490611)
ttttttttttctgtaaaattgaataaagattttattataccacacacacaaaaagcaatcggtacagaaaaggcagttttcagttattctgttgagaatttctttccatgatttctcccattaaagtatagttttcaaagcaaccaccacgacaaaggaagcatctaattagtccgttttcttctgatccaagaatgctgaacatttactgtcccatctgtagttgtatcagcagtgtaatgaacacagtttatattacttaactattctttgaactccaagaactgttgaagtcttttctgatgttctgcagatgcttgcacagcattcagatgttcaccaaatgtagtagttattcgatagatggcagttttcagtgatgc

SEQ ID NO: 9254 - DNA, 287 bp, Homo sapiens
  III.2882 (AA490803)
gtgacctgtatagttcctatgtaatcttttacttcctgctgctgtcagtggtaataataataataagtattttcaatgtggagttctatgcagttgtgccttctattccttgctccagactagctctgataggggagatcattcatcctcagcaactcatgcactcatttattcatgctgcaatgggaatggtgatggcctggtgtgctgcagtgataacccagggccagtacagctttcttgtggttccctgcactggtactaacagctttggtagccctgctgcg

SEQ ID NO: 9255 - DNA, 480 bp, Homo sapiens
  III.2883 (AI024776)
gagacggagtcccgccctgtcgcccaggctggagtgcagcggcacgatcccggcccaccgcaagctccatcccccgggctcacgccattcccctgccccagccacccgagtagccgggaccacaggcgcccaccaccacgcccggccaattttttctgcacttctagtagagacggggcctcaccgtgctagccaggatggtctcgaccccctgacctcgcgatccgcccacctcggcctcccaaagcgctgggaccacaggcgcgagccaccgcgcctggctccactagctttcttgctctttgccttatgccatgaggacatgtcccaaataagggctgctccttcagcctggatcctggatgaagatgacattcagaaaaggagtagagctttaattcctcttgtaatgaagcatacatttcatttatcttatgtacctcctttaaggatccatcttcttcaaaaaatttagagctg

SEQ ID NO: 9256 - DNA, 400 bp, Homo sapiens
  III.2884 (AA461106)
ttttgagatggaatctctgtcgcccaggctccatcaaaaaaaataataatataaataaataaataaaagaaaaaagactggcataagatacaaaaacaggtcaatgtgacatgaaagagagcccggaaacagaccacaggtggatacagacagcacagaggagctctgcagcgcctggagaacagttcccaggggaatactgctggaccaagcacatctgcaggagaagagaaaccaagctgaatccgatttcattaacaaaatcaacagttcatcacatttatcaacagagatgacttcatctagcaggaattttgtggaggaaatttctgtacaaaggtatacacgtgtaaatacacacacacacacacacacaccatcttctaaatgaagtcatttc

SEQ ID NO: 9257 - DNA, 416 bp, Homo sapiens
  III.2885 (AA461421)
aattcggcactgagggggattacaggtgcgctgtaatttttgtatttttagtagagacgggtttcaccatcttggccaggctggtcttgaactcctgacctcatgatccacccgcctgggcctcccaaagtgctgggattccaggcgtgacgaccgcgtccggccgcctgctaatttttgtattttcaatagagacggggtttcgccatgttgtccagactggtctcgagctcctgacctcaagtgatcctcctgcctcaccctcccaaagtgttgggattacaggcataagtcaccgcccctggctgatactacttattttaaaatgatgaacaaagtgaagggcagtttctgtagctctctacttgagtcacttggagcagggattctgaacgctagagacctgaatacccagt

SEQ ID NO: 9258 - DNA, 361 bp, Homo sapiens
  III.2886 (AA909674)
tttttgaggtgtgcctgaaattgagtttattattgaacgaatgaaagttctctctcaactcaggttctttgcagaggctggtcccttagcctgggatgcaactccctaatgtgccatctggctcactcctactcatcctttggatctcaggtcaggtgccccctcctccaggaagccctccctgactcccaggctgagtcgggcttcctcctttgtgctcccacagccctctggggtcccacatcacagtgctgccccctctgtcatcattatattgggatggatctgactccaccactggactctgagtcctgtgggggcagagctggcctgtcttgtccattgctgcgtttccagcatg

SEQ ID NO: 9259 - DNA, 606 bp, Homo sapiens
  III.2887 (AI188104)
tttttttttttttttttcacagaaaactccagttcattgttgggagaagttgaagatgaactcaatacctggagtcatacatggcagtcaacgcatggacaccggagactgttaagacgccgactggagtcacacacggcagtcaacgcgtggacaccggagactgttgagacgccgactggagtcacacacggcagtcaacgcgtggacaccggagactgttgagacgccgactggagtcacacacggcagtcaacgcgtggacaccggagactgttgagacgccgactggagtcacacacggcagtcaacgcgtggacaccggagactgttgagacgccgactggagtcacacacggcagtcaacgcgtggacaccggagactgttgagacgccgactggagtcacacacggcagtcaacgcgtggacaccggagactgttgagacgccgactggagtcacacacggcagtcaacgcgtggacaccggagactgctgagacgccgactggagtcacacacggcagtcaacgcgtggacactggagactgctgagacgccgactggagtcacacacggcagtcaacgcgtggacactggagactg

SEQ ID NO: 9260 - DNA, 538 bp, Homo sapiens
  III.2888 (W88429)
  misc_feature (2)..(2): n is a, c, g, or t
  misc_feature (126)..(126): n is a, c, g, or t
  misc_feature (127)..(127): n is a, c, g, or t
  misc_feature (129)..(129): n is a, c, g, or t
  misc_feature (133)..(133): n is a, c, g, or t
  misc_feature (146)..(146): n is a, c, g, or t
  misc_feature (147)..(147): n is a, c, g, or t
  misc_feature (165)..(165): n is a, c, g, or t
  misc_feature (214)..(214): n is a, c, g, or t
  misc_feature (215)..(215): n is a, c, g, or t
  misc_feature (297)..(297): n is a, c, g, or t
  misc_feature (328)..(328): n is a, c, g, or t
  misc_feature (509)..(509): n is a, c, g, or t
anagataatttttctagagggttgggagttcaattaatagaatggtttatgctgggcatcataagaagtttatataaattcaaactgtagcctaaatgagggccagcctgtggtttgaattctcannanggangcttttgttttgnntactttccccacccaaantccaggctgactgacagacaaacttccttattgtgtctttttgcctatnnacagttctttccgggcccccattatattgaagatgtcatcccttggggcctaaagccctgtcttttttctctctctgaggantccgtgaaaacccaatgggtgaaaacccaanggcccgttcagcttgtggagattggcagtgacccctgacttctccccggcctcgccccagcccaagccttggcacctgcttactgctcgggttttagggtattctttggtttttgactcatgggatttctcttactgtcttgtagggcaggaggcttttagaattgtgtagtttgcattancactggaaacaaaaattatgatgtttttc

SEQ ID NO: 9261 - DNA, 509 bp, Homo sapiens
  III.2889 (W88430)
  misc_feature (495)..(495): n is a, c, g, or t
  misc_feature (508)..(508): n is a, c, g, or t
taagcaacgtcagacatgcatagccccgggagaacccagggccacaagtgcattcaacgtacagatgatcagtgtgtcaatgtatcctgcattgcacattaattcccacagctagctgcattcttcatcgacacacaagccaagcaatccaccactaagagtcataaaaagcactttgaacaacacagaaagacaaaaatacagcaacatcagaaaggtaagtaccttatttcttgatgttattatctgtttaatgactactcggtctgccagcaacaacacttttgtcactgaagaaagaagtaatcttgcagcctttatcactcctgttttgtctgtaaaaattgtgatctgcccatcagattccagatggttcaagttggttatgtctgtaagtgctgcaattgtttctcctaacaagaaagacgaggggagaaagttaacaggcatacaaattaaaatctagacttctctctaaccttggaaggtaaggcncaatgaggagaana

SEQ ID NO: 9262 - DNA, 305 bp, Homo sapiens
  III.2890 (AA026917)
  misc_feature (48)..(48): n is a, c, g, or t
  misc_feature (238)..(238): n is a, c, g, or t
  misc_feature (261)..(261): n is a, c, g, or t
  misc_feature (269)..(269): n is a, c, g, or t
  misc_feature (273)..(273): n is a, c, g, or t
  misc_feature (283)..(283): n is a, c, g, or t
actttggacccagcatgtcctgaggttttacccattcgtcaaactgcnctgctgtgagatagccaagttcgatagcagtttcctttaaggttgatccatttttgtgtgctgtcttagcaatctttgctgccttgtcataccctatatgaggattgagagctgtcaccaacattagagactcattcatcagcttgttgatcctttctgtattggcctggattcccaccacggcagtttntcctgtaaaggaaactgaagcantcccccangcangccctggctnaggtgtaacacattttgaatca

SEQ ID NO: 9263 - DNA, 468 bp, Homo sapiens
  III.2891 (AA026918)
  misc_feature (4)..(4): n is a, c, g, or t
  misc_feature (30)..(30): n is a, c, g, or t
gcgnccgctgatagtaaaccaggattatgngtcttgatccaaagattgctaatgcaataatgaaggcagcagatgaggtagctgaaggtaaattaaatgatcattttcctctcgtggtatggcagactggatcaggaactcagacaaatatgaatgtaaatgaagtcattagcaatagagcaattgaaatgttaggaggtgaacttggcagcaagatacctgtgcatcccaacgatcatgttaataaaagccagagctcaaatgatacttttcccacagcaatgcacattgctgctgcaatagaagttcatgaagtactgttaccaggactacagaagttacatgatgctcttgatgcaaaatccaaagagtttgcacagatccatccaagatttggacgtactcatactcaggatgctgttcccacttactcttgggcaggaatttagtggttatgttcaacaagta

SEQ ID NO: 9264 - DNA, 444 bp, Homo sapiens
  III.2892 (AA291690)
cctcgcgtacagcgtgttttaaaggacaccttggaaaacaagggggtattagggcatttaaaagcaaggatccgagctgaagttttcaatgccctagatgatgaccgtgaaccccgaccatcattgtctcatgaaaaccttctaattaatgaattgattcgagagtatttagaattcaacaaatataagtatacagcatctgtcctcatagcagaatctggtcaacctgtagttccgttggacagacagtttctcatccatgaactaaatgcatttgaagaatcaaaggataatacaatacctcttttatatgggattttagcccatttcttgcgtggaactaaggatggcatccagaatgcatttctgaaagggccttcacttcagccttcagacccaagtcttggcagacaacctagtagaagaaagccaatggatgaccac

SEQ ID NO: 9265 - DNA, 335 bp, Homo sapiens
  III.2893 (AA291708)
tgacttgcatattttttttattaaatgatacattgaaagtataaaaagttgccgcagtacaaacaaattacagaataatgcatataaaagcgctatggactacacgtgacaattctgcttaacttccatcttgatgattttatatcagtatccaaaattatatactccagcattttttccgaatatagtcttacatgattgcaattcctgaggtaaactaagtgtccactgccaacatccttggacgaaaaccaagtcccccgggagaattcagatatttatattcacacatacaatacaacggaattcatcaatgtaatcagatattgcagatt

SEQ ID NO: 9266 - DNA, 470 bp, Homo sapiens
  III.2894 (AA634433)
aggttaaaatacatttttattaaatgttagaataaatttatacacaattcacaaattctttacaaagaattgccaatctttttccaattttgtagtagtctctacacattcagaaattctgctgttaaacaggatttataaaatatttctttcagaaagcatcacaatgctaattttaggcaaataatgttttaaaactgaagtctttgcatggaggtgagctcaaacacccttattctttattgcagtgatgaaataatgagaaaaataaacattaaactgacttactaagaaaacaatgaataagtaattctgtaaacttctcaaattctcctaaaattttttattactttcagaagcaatactattgcaaggtatcaacaaccacactatgtacccaaataaaatgaatgtcagaaataaaaatactgtcacaaagaagcaccccttattggaagatgtattgaaga

SEQ ID NO: 9267 - DNA, 326 bp, Homo sapiens
  III.2895 (AA608804)
tttttttttttcaatttgaaaacaaaacgtttattcatttacttccgctgcagatttcttgactgctgaatttcatgagaagggattgttcagggagggacatggggctgaagacctggagaggaggtggtgctaccgctgttcaaatctgagggtggtggagatggagccttggggaggagcaggtgctgccttttaagtctatgagagtcgttgagctggaggtccagggaggagccagtgctctcactgatgtcttaggttgtggagctgaagacaatgaaggagccagtgtggctgttctgtgagactcgtggagctggaga

SEQ ID NO: 9268 - DNA, 380 bp, Homo sapiens
  III.2896 (AI168031)
ttttttttttttttttttttttttaacgaggcaaaacaaatatttattagaaatcaaaaaaccatttcttcaatggcacaaacatgttcttactctttgtatgatttctttcttgaacatagagtttcgcacacacatacacactaagaacaagtaggtaaatgagaatttacaaggatccggcacattcaagggagaatggggtgacgattctgtgtttggaaccaagatcacagtaaaaaatatgtaaatcaatgcagaaatcaagtacggcttacaggcccggatgacggcccatctacctgggccctgcccagagcgaaaggtcacaggtcaccaggccttgaggaaggacaggaatgtcaataataaagggctct

SEQ ID NO: 9269 - DNA, 489 bp, Homo sapiens
  III.2897 (AA460540)
gggcgattcagtaatttcagcattaatgggaaacttttggctcaaatggagatcaatgattcaacacgggccattctcctgagcagtgacggccagaacctggtcaccggaggacaatggggtagtagaggtctggcaggcctgtgacttcaagcaactgtacatttaccctggatgtgatgctggcattagagcaatggacttgtcccatgaccagaggactctgatcactggcatggcttctggtagcattgtagcttttaatatagattttaatcggtggcattatgagcatcagaacagatactgaagataaaggaagaaccaaaagccaagttaaagctgagagcacaagtgctgcatggaaaggcaatatctctggtggaaaaaactcgtctacatcgacctccgtttgtacattccatcacacccagcaatagctgtacattgtagtcagcaaccattttactttgtgtgttttttcacgac

SEQ ID NO: 9270 - DNA, 456 bp, Homo sapiens
  III.2898 (AA460541)
ttttttctcagcttgaaaagaggctggaaatgggatgcaggttaggttcaaagcttaaactttgtaacaactggacacaaggttcctcagaattgtcaaaagtctcttgtgacacatcctacaaccttttctcaataaacaacaatatatgaaataattaccaaaacatctcctaattcatataatttacatgatataagcttgcttgatagcagctggtgttcagtcgtgaaaaaacacacaaagtaaaatggttgctgactacaatgtacagctatatgctgggtgtgatggaatgtacaaacggaggtcgatgtagacgagttttttccaccagagatattgcctttccatgcagcacttgtgtgctcagctttaacttggcttttggttcttcccttatcttcagtatctgttctgatgctcataatgccaccgattaaaatctatattaaa

SEQ ID NO: 9271 - DNA, 344 bp, Homo sapiens
  III.2899 (AA525014)
gctcgaccctgtatacctttttcatgttttattttttctccaaagccaattgtttgtctgttattatgtttctacttcctgctaggacacgttttgtcttgtttcttgttgtattactagcacttaacacaatgtctgactcatagtagatttactaaatgtttggtggataaaaggatgaatgaatttttcttaaatatttttgtttaccagttaacataacgatctgaaagaggtcatttgattggtgggatcaggtacttgtaccaggatagaggaaaatggtcagaattttattttggggggccatactatttaaagcagaaaaaaaaaaaaaagtcgac

SEQ ID NO: 9272 - DNA, 446 bp, Homo sapiens
  III.2900 (AA452239)
tgcgaccgcggcggcctgagagctgactctgcagctgaggtagagagacaacgatcaggaaccctaagaagaggcgccagaggagccgccttctgcctcagaacggcgtgactcggagaattggagcgttattcagtatattaatgtcttattgataatggcagaacatccaccactactggatacaactcagatcttaagtagtgatatttctcttttgtctgcccctattgtaagtgcagatggaacacaacaggttattctggtacaagttaacccaggagaagcatttacaataagaagagaagatggacagtttcagtgcattacaggtcctgctcaggttccaatgatgtccccaaatggttctgtgcctcctatctatgtgcctcctggatatgccccacaggttattgaagacaatggtgttcgaagagttgtcgtgg

SEQ ID NO: 9273 - DNA, 486 bp, Homo sapiens
  III.2901 (AA976065)
gaaaagcggttgagatgaaatggtatgagcagataaacattaacagaattatcttgtcttaatgatgaattctttgggtgatttaacaggatgtgagttttaaaactccattttcaggaaatacacagaaattccttatttttctattagtgatgggtatataattggaaataatattctcaaacagtaagaaacaacagaaacaggtatgaagtctttctggattgagttttgaaattaaaaaatcagtttggagccaatggggggagaaaaaacagccttcccttttacattttctggatccttgtatgtggttcagtttttgtaggtggtttaggaatttagctaagttaatttttagatatttgaaatggtggtggacagagaaattcaaaatgaattacagctttttggcaggacaatgttcatagtccacagttcagctcaaccttcccctcccaccagggaacacaggagtttctgtta

SEQ ID NO: 9274 - DNA, 442 bp, Homo sapiens
  III.2902 (AI733204)
gaaaagcggttttgatgaaatggtatgagcagataaacattaacagaattatcttgtcttaatgatgaattctttgggtgatttaacaggatgtgagttttaaaactccattttcaggaaatacacagaaattccttatttttctattagtgatgggtatataattggaaataatattctcaaacagtaagaaacaacagaaacaggtatgaagtctttctggattgagttttgaaattaaaaaatcagtttggagccaatggggggagaaaaaacagccttcccttttacattttctggatccttgtatgtggttcagtttttgtaggtggtttaggaatttagctaagttaatttttagatatttgaaatggtggtggacagagaaattcaaaatgaattacagctttttggcaggacaatgttcatagtccacagttca

SEQ ID NO: 9275 - DNA, 501 bp, Homo sapiens
  III.2903 (AI793135)
tttgctcagtggtcaaagttctcaacattcaagcttataaataaatgcatatcttggcaggtatgattgtatctgtatattatcattacaagagagttcagtatagagaatgatgtcgaggtgactttagggtaactcatagtaaaagtggcttgttaaagtgaattctctttgtagagaattactcacaagaaatactttcttaatcactggttttataacaatgattcacgataacagaaactcctgtgttccctggtgggaggggaaggttgagctgaactgtggactatgaacattgtcctgccaaaaagctgtaattcattttgaatttctctgtccaccaccatttcaaatatctaaaaattaacttagctaaattcctaaaccacctacaaaaactgaaccacatacaaggatccagaaaatgtaaaagggaaggctgttttttctccccccattggctccaaactgattttttaatttcaaaactcaatccag

SEQ ID NO: 9276 - DNA, 480 bp, Homo sapiens
  III.2904 (AI263399)
  misc_feature (479)..(479): n is a, c, g, or t
tattaaaaccaagaaatttaataatgtgttaacgtcattttctaatacaaagtccacagggcggttttatcaattgtttcaataatgtcctttataacttttttattttccacatccaggatcttatccaaggtcacaaattgcatttacttgcatgcgtcttctctcagctggaacatttcctcaatctttgtctttcatgggtggcattttcttttcttcttttaaatttcaatagttttaagaaaacagatggtttttggttacacagatcaatcgtgtagtggtgaagtctaggattttagtgcacccataactcaagtaatgtacattgcactcgataggtagtttttcatccctcaccccactcccacccttccttcttctgagtctccaatgtccattataccactctgtatgcctttgtgcacttatagcttagcttccacttataagcaagaacatgtggtatttggttnt

SEQ ID NO: 9277 - DNA, 464 bp, Homo sapiens
  III.2905 (AA699475)
ttttttttttttgtacacctccccttggagaaagatggtacttccagttcttattaaacctcttgtaaggggatcaaagaattatttgttttgcactgtattgcatgtttggggtttcatttgggaagaaagagagttgagtaatagctactttttaaccttctgaattcagatccaattaaggaaggagccagaagtcagacaattgatggcctgaatatcagctttattactgatatagctgatcagagcacatgtcttagatttgtgaccagatgggctttagacactcacctttccagtcacaggcaggcttggcatcccagatttcccacacaagtaggaagagaaaatctgcctctccaaaaaaggccccccatgcagctgagtcttcatccaagccctactgatgagataggtctgtctcttcaaagggaaggcccttgtaggtgagggatagaagc

SEQ ID NO: 9278 - DNA, 417 bp, Homo sapiens
  III.2906 (AA427568)
tggtattgcaaaataaatttatttgaagataaactgtcttataaaaggtcagaggcaatttgagatcccagattcagcttgtctcataaaaagattcaacttcaagtagcacaatttcttgtctgcttttaatcctgaacattcttgaagcacgaaacagccaactgtttacacaacacatctgtgacatctgactctggcaccggtggcgccgcagctttcagctctgaggacccacgggctgcagccctcagctttgggagggcccagatcaggccactgtgacctctggctttgcagcagacaacaggtcccagcatcccagcccttccctcccctggcacctcccaaaagcacaagaatgcaaaccgagactggcccaccactgaggcaggggtggactcccgcttgagtgtg

SEQ ID NO: 9279 - DNA, 424 bp, Homo sapiens
  III.2907 (AA427651)
  misc_feature (334)..(334): n is a, c, g, or t
cacgtagctcccgccagcgtggccagagctgtcgcaccgtgagcgtccttcctcctccgttgggggctgcagcacaggtaaggctggtgagcacttgctcttggttggccaggcccaccaggaagtcaccaggacagtccacccgcccatgttggcacactcaagcgggagtccacccctgcctcagtggtgggccagtctcggtttgcattcttgtgcttttgggaggtgccaggggaagaaagggctgggatgctgggacctgttgttgctggcaaagcagaggtcacagtggcctgatctgggccctcccaaagctgagggctgcagcgtngggtcctcagagctgaaagctgcggcgccaccggtgcagagtcagatgtcacagatgtgttgtgtaacagttggctgtttcgtgcttcaa

SEQ ID NO: 9280 - DNA, 313 bp, Homo sapiens
  III.2908 (AA443794)
ttttggattcatgatttcgttttatttctgaaacaatttatgactttttaaacttcagaactatgaggtcttaataaaattgtaggtgctacaaacttagagtgaaaatatatttttaaggaatatagcgaatccatatttacttctactgacagaactgcaccaaatattggtactttcagttcctttggacatttttattgtggtaaaatacacataacgtaaaatttatctttttaatttcatacccagttgtatggctactatttttaaaaacatagaaaatgtgctggtgaggaaatggagaaattgg

SEQ ID NO: 9281 - DNA, 439 bp, Homo sapiens
  III.2909 (AA454610)
tctcttttgagacagagtctcactctctcacacaggctggagtgcagtggcacaatcttggctcactgcagcctcagcctcctgggttcaagcaattctcgtgcctcagcctcccaagtagctgggattacaggcacgtgccaccatgcccggctaatttttgatagagacggggtttcaccatgttggccaggctggtcttgaactcctgaccttaagtgatccgcccgcctcagcctcccaaagtgttgggattacaggcgtgacacacgcgcctggcctgaaggttacttttcttttcagtggtttggggcagggagttacacagcttaatagattaagaagaataaaatgctgaatgctatcatttctttctaacatatttagcattaataaaaagtgagtatttctgaggtcatcacaactgcctcccctcgtg

SEQ ID NO: 9282 - DNA, 386 bp, Homo sapiens
  III.2910 (AA458534)
taatgctaaatatgttagaaagaaatgatagcattcagcattttattcttcttaatctattaagctgtgtaactccctgccccaaaccactgaaaagaaaagtaaccttcaggccaggcgcggtggctcacgcctgtaatcccaacactttgggaggctgaggcgggcggatcacttaaggtcaggagttcaagaccagcctggccaacatggtgaaaccccgtctctatcaaaaattagccgggcatggtggcacgtgcctgtaatcccagctacttgggaggctgaggcacgagaattgcttgaacccaggaggctgaggctgcagtgagccaagattgtgccactgcactccagcctgtgtgagagagtgagactctgtctca

SEQ ID NO: 9283 - DNA, 490 bp, Homo sapiens
  III.2911 (AA905621)
acatatattcaaagatatttattgtagccttgcttatgctggaaaaataagaactgcttatcagtagttcccatttgagtaaattaaaatatatccatattttgtaaaaaaaaaaaactccataatacaatttgagaacagtggccaggtgtggtggctcatgcaagcagtttctttaactctgttgggatgccattcgtgggcaaagctagatttgggacaagttgcccagctctgctaggaagagtcagtcctcagggggaagtttcttttcacctccgggatccccagggcttcctgggttgactcaggacttcatacgcagcctggatctccaggaagtgcctctgtgcctcctctgtctggtccaggttgtggtctgggtgccagaccttcactagctcctggtaactccgatgtatttcttcatttgttgccccttctgagaggcccaaaaccttatggaaacagaagatgacaaattagaatc

SEQ ID NO: 9284 - DNA, 295 bp, Homo sapiens
  III.2912 (AA909980)
tttccttcagttagttttaatgaagtttctgcaaggtttatataccatgaaagttgtagctaaggtaaactagtgctttacctttcaaaaaaaaaaaacaaacagtgaattttagataaatggcgtccagaaggcaggtccagagattgacatctcatgctttcatgtaaagtaacaggaaatgcacatatttacaagaaagcaacgcctgatcccatgtctccatcctgcttcctcctcagtgggtatctatctggatctcacagtgggctcaagagacagcagcaggctcagg

SEQ ID NO: 9285 - DNA, 431 bp, Homo sapiens
  III.2913 (AI123910)
ggaaagacaactaaagtttgaaatacaatcctacagacactttttgagtgcctactatgctagtcactgcactaggtgctggggaatggaatgttcaagacgttctccataacctcatagcagcgggctccagcggccatgaggagtacgaggagtattttccttgacttctaggagtatgatgagtattttccttgacttctctccacttcctaggaacaaagcacctatttattaatatttcagaaataggaaaatgctcatgaaagaagagagacaccatcctcactggattaaactgatgactgttccaggaaggagtcttgagacattgctggactgatatgtgaacactgcttgttctctccaaatccacttgcaaagtggacgcacctggtccctgctaaagcctttttctttcctggcttctc

SEQ ID NO: 9286 - DNA, 235 bp, Homo sapiens
  III.2914 (AI216879)
ttttttttttttttaataaggctagtagattaataggtatcaactgcagaatcaacttgtttaagtccagaaaaaaacacctaccctgaatattttggtgacgatcatgttaaacgaatatatttacctgggccagttggacctgtttgtggtatcgagtcaccctatccaagaacaaggggtgtttttttctcatgtttagaactcacaccttcactgcacacagaaggaggct

SEQ ID NO: 9287 - DNA, 337 bp, Homo sapiens
  III.2915 (AA677448)
ccacttttaattttgatggtaataataatggacatttataaacaccttatgcaacataatgaattcttcaagttgtttttagtcctactaacaatgttttcttttttatggatgaggcaactgaagtcaagatattaagtaacttgcccaaatttaaaacacctaataagtggcagggcatggttctgaactgaatgcaagtcattctaaagcccttgctccttccttcagacttctagagatggaaatgtttgctaatgattttttaaagtaactaagagaggagtgagcactggtacagaagaatatttatcatgagattcaattttcttgtacc

SEQ ID NO: 9288 - DNA, 588 bp, Homo sapiens
  III.2916 (AA151656)
  misc_feature (255)..(255): n is a, c, g, or t
  misc_feature (315)..(315): n is a, c, g, or t
  misc_feature (499)..(499): n is a, c, g, or t
  misc_feature (553)..(553): n is a, c, g, or t
  misc_feature (569)..(569): n is a, c, g, or t
ataggtaaaatatggaatttattcagaaaaaccactcagtacaatgtgtactacaggatatcacttggctcacatcacagacatggactatatgacttcacaataaattagacgggaaggcagccctttactcccaggatggcctgcaggcctttcagcagatagagtttattacaaataccacagtagactttttggctattttcaagcggaataagacagcctgaggccagccagtgggactttcagctgccnggggccttccccatctccttccccttcaaggtgggctgtctcccacagtaaaccgcacanggggtgttcatccctggatcactatacaggttccttgtcatcaagctgaggacattacttcatgattcttattaatccaggctagaaagacgtcgagctctcccagggatttaatggcagcagcgtggacctccagctgatcatagttgtcatggatgactctggtggcattggtggcttctgnctgcagtgacaatgcctctgttctgacattgcgcagagttttctgcatgtagangaagagttggcaatgngctgattttctcaagattt

SEQ ID NO: 9289 - DNA, 594 bp, Homo sapiens
  III.2917 (AA151736)
  misc_feature (39)..(39): n is a, c, g, or t
  misc_feature (40)..(40): n is a, c, g, or t
  misc_feature (43)..(43): n is a, c, g, or t
  misc_feature (47)..(47): n is a, c, g, or t
  misc_feature (50)..(50): n is a, c, g, or t
  misc_feature (56)..(56): n is a, c, g, or t
  misc_feature (59)..(59): n is a, c, g, or t
  misc_feature (60)..(60): n is a, c, g, or t
  misc_feature (62)..(62): n is a, c, g, or t
  misc_feature (63)..(63): n is a, c, g, or t
  misc_feature (65)..(65): n is a, c, g, or t
  misc_feature (66)..(66): n is a, c, g, or t
  misc_feature (68)..(68): n is a, c, g, or t
  misc_feature (69)..(69): n is a, c, g, or t
  misc_feature (70)..(70): n is a, c, g, or t
  misc_feature (71)..(71): n is a, c, g, or t
  misc_feature (73)..(73): n is a, c, g, or t
  misc_feature (76)..(76): n is a, c, g, or t
  misc_feature (77)..(77): n is a, c, g, or t
  misc_feature (80)..(80): n is a, c, g, or t
  misc_feature (82)..(82): n is a, c, g, or t
  misc_feature (84)..(84): n is a, c, g, or t
  misc_feature (95)..(95): n is a, c, g, or t
  misc_feature (96)..(96): n is a, c, g, or t
  misc_feature (97)..(97): n is a, c, g, or t
  misc_feature (98)..(98): n is a, c, g, or t
  misc_feature (99)..(99): n is a, c, g, or t
  misc_feature (100)..(100): n is a, c, g, or t
  misc_feature (102)..(102): n is a, c, g, or t
  misc_feature (109)..(109): n is a, c, g, or t
  misc_feature (113)..(113): n is a, c, g, or t
  misc_feature (231)..(231): n is a, c, g, or t
  misc_feature (235)..(235): n is a, c, g, or t
  misc_feature (241)..(241): n is a, c, g, or t
  misc_feature (243)..(243): n is a, c, g, or t
  misc_feature (250)..(250): n is a, c, g, or t
  misc_feature (256)..(256): n is a, c, g, or t
  misc_feature (257)..(257): n is a, c, g, or t
  misc_feature (262)..(262): n is a, c, g, or t
  misc_feature (263)..(263): n is a, c, g, or t
  misc_feature (269)..(269): n is a, c, g, or t
  misc_feature (273)..(273): n is a, c, g, or t
  misc_feature (279)..(279): n is a, c, g, or t
  misc_feature (281)..(281): n is a, c, g, or t
  misc_feature (282)..(282): n is a, c, g, or t
  misc_feature (283)..(283): n is a, c, g, or t
  misc_feature (289)..(289): n is a, c, g, or t
  misc_feature (292)..(292): n is a, c, g, or t
  misc_feature (299)..(299): n is a, c, g, or t
  misc_feature (300)..(300): n is a, c, g, or t
  misc_feature (301)..(301): n is a, c, g, or t
  misc_feature (305)..(305): n is a, c, g, or t
  misc_feature (310)..(310): n is a, c, g, or t
  misc_feature (313)..(313): n is a, c, g, or t
  misc_feature (314)..(314): n is a, c, g, or t
  misc_feature (325)..(325): n is a, c, g, or t
  misc_feature (329)..(329): n is a, c, g, or t
  misc_feature (331)..(331): n is a, c, g, or t
caccccaaaatcttgagaaaaatcagcagcattgccagnncgnggcnggnccgtgngcnngnngnngnnnncnggnngcncncnttaaaaagccnnnnnnangggttcngggnacccaatgccaccagagtcatccatgacaactatgatcagctggaggtccacgctgctgccattaaatccctgggagagctcgacgtctttctagcctggattaataagaagcagggngggnggcggngngggcgtnccgtgnncgggnnaggggngggncggtgngnnngcgcgncgnggtggannnggtngcggnggnngcgctggggangtgntnggaagggccctgcagctgaaagtcccactggctggcctcaggtgtcttattccgcttgaaaatagccaaaaagtctactgtggtatttgtaataaactctatctgctgaaagggcctgcagcattcctgggagtaaagggctgccttcccatctaatttattgtgaagtcatatagtccatgtctgtgatgtgagccaagtgatatcctgtagtacacattgtactgagtggtttttctgaataaattcatatttaccttaaa

SEQ ID NO: 9290 - DNA, 406 bp, Homo sapiens
  III.2918 (AA620736)
ttttgagtaatcagtccaaatgtttatttcaatggtagattaagactagcaaccacaaccaccaaccatccccattgcaattatttgatggaatgcttaactttccatctagtggaggcacagtcctagaaaagcagcaagaattcattctatgtggaacagcttgattgtcatagattgtaggcaccatagagaatcagagtgaagagcaatcactgatttaaattgaggtacagctgtgtccttatttcatttcaaagagtaatgaagcagaaatgcagtgagagctcacacatttgggtggcttgggaacggaaatgttttggatatgtgaaaatgcagatgggtccaggttcccagtatggctccacacagttctctcccagctccctagcagttctccgag

SEQ ID NO: 9291 - DNA, 585 bp, Homo sapiens
  III.2919 (AI141530)
atcccctgactaccagatacccgatgatactgagtggggatgggacaagaagcctgcacctcccagccctgtccacatcctgagaccgaggggcctgtgtcaccagtacctagggctagaggaaagggcttccaaatggctcaggaagacgagggggtgtttctgtccacctctacgaccagatgaccacacctcccatgaggaattccttacccaaaagaaacgaacagaataatgttgcttaagtatgaactgacccgtcagatcaccctgacactgaccccatgacaccccctcaaggtggctctgtttccccatcatctgggcttccctccctggtctcctgcactccctgagcctcactgggggccgacttgtcccctctgtgcccactccaaagagaatgagaaaacaagagcagaaggccccccacaggtcgaggcaagaggtttggcaacacttcccttgacttggaaaattcctctactagcaaatctgcttccacatggcaaaaatgagaagttctgggccagcagccatgagcacagctgcaggagctgcctggacccgccgcatgggccaaag

SEQ ID NO: 9292 - DNA, 414 bp, Homo sapiens
  III.2920 (AA479943)
ataataaattaatcttaaccttctgtcacattttttccattatctacttttaaattttttaaagttttgactcttttgtaataacatttaacttaatatgcaaagacaaaaaacaaaaaaatcacactggaaaatggaaaggtgtgcctgtgaattccttatgcagggtgttattgacaagcactggctcaggcaccagatgttctgggatttgccacctgtgcggctcagagaagccaactgacccctcaaggctgcagggaaatagcggtaaaaacacctcggaagctgtcacgtggattaaatgaggcgtccttcagaccatatttcttccagttcctggcacacagtactctataaatattgacatatgtatcagcaatataataatacgaattataactctgttttggt

SEQ ID NO: 9293 - DNA, 377 bp, Homo sapiens
  III.2921 (AA909676)
tttacagtcacttgattcaggggtcttgttttaatgatggggctgtgaaggatcaaaggggtcagctagggctcaacactcaaagggcagctttgggccaagtcaatcaaaccagcctggtgagctgagatgcacgttacccagtaaatacaggtattgggatagactgtgtctctgcagtgtgatggttaattttgtgtgtcaacttgactgggccacaggatttccagagagctggttaaacagcatttctgagtatgtccagatgagatcatcacttcaaccaggagactgagtaaagcagatggtcctcttcaatgtgggttgggcctcattcaacccactgaaggcctgaatagaacagaaaggcacaggaa

SEQ ID NO: 9294 - DNA, 441 bp, Homo sapiens
  III.2922 (AI219532)
ttttgcttgagagggatactttttattaacaatgaacagtattgatagagctgatctccattctctactcttcgttgaagaaaagaaaaaatgttgctgttgaaacctggactgggttggcatttggataaccacctgatctcccagcagcatttgacatagtggactactccctccttgaaatactttctacacttggcttccaggccatcacaatctcctggttttcctcctgcctcactggccgctcgttctgaggatggaagaatgaggcagcttaagaatctttcttacataatcatagactttgctactgcacaagtagagtgtacatgcaaattgtttcatttctgcggagtactcatctgtttctctccaattatataactcccacttaaaatctgaaaattgagctcgtagcagacactctgtttcttcaga

SEQ ID NO: 9295 - DNA, 294 bp, Homo sapiens
  III.2923 (AA403000)
gttgtgaactgtgttgaaatgacaaggaatgagaacattatataaacttagttgatacagcagtggcagcatttgagaggactgactgcgatgctgaaaggaggtccactgggattacaggtgggagccacggtgcccagcctgtaaacataacttccatatgcactgggaaaccacgaaatttgtgtgactcgctttattgccgtatctctaccgtagtggtctggaaccacggctgcaggtcctctgaggtgcgcctgtggagaggcccagctgtgctctggaaatgtgcac

SEQ ID NO: 9296 - DNA, 452 bp, Homo sapiens
  III.2924 (AA412030)
tttcttaaggtgtgtatttatcttccactataaaaactacaaacagctatttatttccaggcaagagttttaagaagaaccaaaatgcccccaaatctcactccactattgacggtttaaaaagtgaccacgtacgtgtggtgaaaaggttacaatagtgccagaaaaagcagcgtctgagcacccagggtcccatgcgccctgcttccctcgaaggtcactcttagcagctggtgcacatttccagagcacagctgggcctctccacaggcgcacctcagaggacctgcagccgtggttccagaccactacggtagagatacggcaataaagcgagtcacacaaatttcgtggtttcccagtgcatatggaagttatgtttacaggctgggcaccgtggctcccacctgtaatcccagtggacctcctttcagcatcgcagtcagtcctct

SEQ ID NO: 9297 - DNA, 386 bp, Homo sapiens
  III.2925 (AA969599)
tttactaaacactttacatgctttatttcatttgttctcataataaccctctgggcagagctcaatgcccctattttataaaccaggaaactaaagcacacagtgattactaagtggaaaagctggtttctgttgcagagagttgggtctcctgtgaagtggcagggagaagctgacagataaagttttgttaggcaccatcccaggtcctttgcagtcatcctctcattccaacctcttatggtagaaactgaggcttggggaggttaagtaacttgttcaaaggtatttgatttaactgtgcatctatgatctgaatccaggtctgtctgattccagttgcttcttaacaattgcagagtttgattgtctagaaaccactggta

SEQ ID NO: 9298 - DNA, 467 bp, Homo sapiens
  III.2926 (AA437285)
tttgttttttaaagatactaaattttgaggaggttattacacagcaataggtagccagaatagtgactttgacaagagtcacttttgacggtccagtggtaacaggagccaggttggaagtgggtgaatgaaagtgaatgaagagtgtagacttctttctcaggaagtgtggctgtgactgatgtgggaagtggagtccaggagagtccgtttatgttgaagatgggcaatcctggagtatggctgtatgttgatggcgatgatgcctggatttaacttcatatcgctgaaagaagtgctgaacaggtaggaaaaacagtcttgaatcgctgacgccatccctccatcccccagcagcagcagcttggtgtggagagtgtttttgtgcactggggagaggtagagcacggcaattttgaagtactgaactcagtggtgcccttccagctgccccgtcgtgtgacatt

SEQ ID NO: 9299 - DNA, 466 bp, Homo sapiens
  III.2927 (AA442364)
gtttggagcgggtggagcaggaacagaggtggactggaatgtcacacgacggggcagctggaagggcaccactgagttcagtacttcaaaattgccgtgctctacctctccccagtgcacaaaaacactctccacaccaagctgctgctgctgggggatggagggatggcgtcacgattcaagactgtttttcctacctgttcagcacttctttcagcgatatgaagttaaatccaggcatcatcgccatcaacatacagccatactccaggattgcccatcttcaacataaacggactctcctggactccacttcccacatcagtcacagccacacttcctgagaaagaagtctacactcttcatgcactttcattcacccacttccaacctggctcctgttaccactggaccgtcaaaagtgactcttgtcaaagtcactattctggctacctattgctgtgta

SEQ ID NO: 9300 - DNA, 420 bp, Homo sapiens
  III.2928 (AI223259)
tttattcataatttcagttttaattgcataaaatatttgcttctcaatcattatcagtctcacattttcaatattttttaaaggctatcaaagagagaaacataacggcggtagagaggaagtcaccaaggttgccactcagaagcaccgacagtcaccgctcaactggacctccagtcatttcggagaggtgactgggagcgccgagggctgggggccggaggagccgctcccctactcccgggctttcggagagggtaagttgcagcgctgcccacaaaatccggggcgtcatctcagtctgcggactcagagtttaggacctgagaatatgtaggataaattcaggataaaatccaaggagagcatttcgttatcttcaaatgatgatgcacttacaaagctataaagctagagaca

SEQ ID NO: 9301 - DNA, 466 bp, Homo sapiens
  III.2929 (AI276056)
ggggggataatcaatatgattgacttcatttagttttatatacctatactcttgtgtactaataccttttaaataacttgcagatatggattctttaccacagaatatctaatgtattaagaactttaagccattcagaaagagaaaacatttttaatatttaatttgaaaatcttcacattctgtcccaaactatcttttggtactattgctcctggcaacttagccgcatgatcatttttggaagaaagctgtgtacaagtatccttgttactgttaatatcatctctcaaaacatgaagtaaatatcgtttggtcaaaattagggcttcaatcatgtttaatgtcaattacgtcttttaaaacctcatccttactaatataaaaaacaatactgttttataatgatggtttccgtcggtgctccacgactggaaaggggtataaaacaagtactattgcttag

SEQ ID NO: 9302 - DNA, 312 bp, Homo sapiens
  III.2930 (AA706800)
cagagacagggactcattctgtcacagcagcacgatcataactcactgcagcctcaaactgctgggctcaagcaatcctcccacctaaacctcccaggcaactaggactacagatgtgtgccactacccctgactaatttttatttttattttttttttgtagagaccaggtcttactatgttactcacacaggtctctaactcatgggttcaagtgatcctcttgcctcggcctcctaaagcactgggattacaggaatgagccacccacacggccaacaatttttctttaaaaataaaaataatggcaaa

SEQ ID NO: 9303 - DNA, 555 bp, Homo sapiens
  III.2931 (AA417096)
tttacccatgaccatgaagtttatggtttgactatctgtaggaagggtacaaaaatacatcatgcaacaaggtcattcatttggaaatgtaatgctttctgaaaaacttgagcattcacttttcttcacttgcctgttctaataagagaggtttggtgtggtgatttttcaatagaaaggatgttaccaatatataaataacataaaaggatcacatgagaattaaagtgaagtaacttaacatacaattttcattctaatcttatacaataatttttcttgactattgatagatcacaataaaggtatgctgatgatataagttattttaagactttggggaaaaaggcttccgtctctggcattgaccttattgtggaggaccctccaaaatcttcagctctgcaccagcaggtatgctgagtcatgtatgatgacataaaccacaaggagtcaaggagctaaaacaaccacagcgactggctcagatctcagatgtgcaagatgaatcctcaggattttcacacactgaagaaacttgtcaggtctgtagat

SEQ ID NO: 9304 - DNA, 490 bp, Homo sapiens
  III.2932 (AA417182)
ccagttctgagtgttggagccaagatggctgaggtaggaacagctccagtctgcagctcccagtgagaccaacgcagaagattcttctttggagcagaataaaagatctggcccatcagttcacacaggtccagcgggacatgttcaccctggaggacacgctgctaggctaccttgctgatgacctcacatggtgtggtgaattcaacacttccaaaataaactatcaatcttgcccagactggagaaaggactgcagcaacaaccctgtttcagtattctggaaaacggtttcccgcaggtttgcagaagctgcctgtgatgtggtccatgtgatgctcaatggatcccgcagtaaaatctttgacaaaaacagcacttttgggagtgtggaagtccataatttgcaccagagaaggttcagacactagaggcctgggtgatacatggtggaagagaagattcagagacttatgcaggatccaccata

SEQ ID NO: 9305 - DNA, 443 bp, Homo sapiens
  III.2933 (AA598959)
ttttttttccacacgcgaatcacgcactttattattgcgtatagctcagtgactgtcaggaacctgaaaagtatgtccttcaacacagctctgcgtgcccgcgccctggggtgcaagcgagtctcctccgccctccgccgcctccccccgcgcgcgtccccctctcctccctgcagtgactccgcgggtcgcttcctccacccgcccggagcgcagaggagaaagcgagcggctgcagatttgccccggtggcaccgtagccacaagccaacccgtaattgcaaagcaaacaaggctgaaatactggattggtctcaatcgtgacaagatctacgcttttgccgccaatctgtttgtgcagctctatttaaaggcacttgattgaggaaatgttgaaaatagcggtgagggtttcctaatgagacctcaggagggaagcggag

SEQ ID NO: 9306 - DNA, 497 bp, Homo sapiens
  III.2934 (AI125433)
tttttttttttttttaattatagttgttcccttttgtcctcttgaaaggtgaagaaatttctgattattacagtaatcactaaagaaaaatgctcaagtcagctcagacattaaacatttttcagaatattttttaattcaaagaaggctacctttcacattcatactcagaaaaagttactttagaaagaaacactataagagagactcttgtcacaaagctgtccacatgtttttcccctacctctaagccctggccatgacaatatgcactgtaaaatcatcaggcaacatgcactgctatttttatgatcttggcaacattctgatgatgctgccatacaatgaactgaattgccatattgggaaactgacagatagtgaagcgtccccattattctagcaagttaagactctctcagttgtgggcagataatcgtgcagagggaaatgatcacagtggacactattcatggtagttagaatgcactatacct

SEQ ID NO: 9307 - DNA, 412 bp, Homo sapiens
  III.2935 (AA449480)
agtatcttggccagtttattacagaggacgataaatgattccatgtggatagggcataacatacagagaatgagactatgccagaaatgggaggaggcatttgaaacaacatgagtatctcagggacagatggattgattctgctattggtaggcctggaagcgaaggtcagaagtagcaaaaaatggataccaaaagcactatttgtcacccaagctaagtggaatagctggcccagtaggagaaatgcaggttttgctctacactaagttctccaactcttgataagcctccaaaaacaaatgttaggggaaaaaaacgcagctggttatgaaaagatatatctcatttcattaaaaaatcaatgtcaatgctgttaatagaatccttttatcttcaggacagaggcaat

SEQ ID NO: 9308 - DNA, 455 bp, Homo sapiens
  III.2936 (AA449643)
ataaactactagatattctttcatatctaagaaataatcagctgtatcctggggagtcatttgcacacagtataaaaacatggtttgagagtggccagtgttcgggctgtggaaaaaccatagagtctattcagctgagtccagaagaatatgaatgtcttaagggaaaaatcatgagggatgtgatagatggaggtgaccagtacagaaagacaacacctcaggaacttaagagatttgagaacttcataaaatctcgtcctccttttgatgttgtcattgatggtctcaatgttgccaaaatgtttcctaaagttcgtgaatctcaacttctcttgaatgtcgtctctcaactagccaaacggaatctgcgactgctggtcctaggccggaagcacatgctaagacggagttcccagtggagtcgggatgagatggaagaggtgcaaaagcaa

SEQ ID NO: 9309 - DNA, 533 bp, Homo sapiens
  III.2937 (AA458889)
gcgccgttgtgacctaaccgcagcgcctgtgtgcaacgtggtggggctcccggcaatgctcggctctgcccaagtaggcccgccctgggctgcgcgagccgctttgccaaggggtttccttctcactcagacgcatgatggccccaggtgtggccgcgggaccgagggatggacgggctggacctggctcgccgtaggagacgccccccacccctgggctggagtccagcaggccgctgatcctgcatccccagaccatggggcctccaaacaccttcccagctcctgtcccacgtgtccggccaggctcaggaaccgggctcagctgcactttcctcttccccgcaggctgtgaagctacgggaacaggagcagaaggaggagaagctgaggctccagcagcaggaggagcggcggcggctgcaggaggccgagctgcggcgcgtggaggaggagaaggagcgcgcctgggcctgcagcggaaagagcgtgactgccgcaagcgctgctgagcatcctgctgagcaagaagc

SEQ ID NO: 9310 - DNA, 494 bp, Homo sapiens
  III.2938 (AA459080)
tcagtgccagtgtgactatggtggcccgtgcacctcctaggccgtgcacgcagggaggtcgccaagcagacacagaaatccccatgtgggggaatgcagcagctctgccaacctcacgactgtcggtctgtgcaattttcctgactgagagaggaccggccgcattaaagctatcggatcaagttttaaaggactacgtgtttgaaactgaagtgccaagtacgctgcggtgagtggagaaagatggatctctaaagcatggtgtcttccttcctgccggcgggctccgtggacattcgtggctgcagaagggtcttcgctttgcaggggtggacggagagcggccaaggagcgggcacagaagctcgagcaagtcctggtccttccccggaaagggcgttgggaaggccttgccggtcaataaccggttccaggacttgcggttcctgtcggggaacctgaacgcgaccgtcggtttcggggcggtgggggct

SEQ ID NO: 9311 - DNA, 454 bp, Homo sapiens
  III.2939 (AA868709)
tttgcttattaattcgaattcatcattacgtgtgtgttttacagaaatacatacatagttgaatgacaattttctttaaaactttccactttagttttaaaatgtagttaatcttatcaatacaatacatgaatgtatatccacactaagtttaccaccttaatttgagttttgcaaaaattaaatatggacaaaggtatatatatagacagccacttagtgacccaataatctttctctctatgatacacttaagaattttttagacaataaaaagtcacttattaactagctcagtgaaaattagtccaaagtaacaaaatcatttgaggctgcaaaacaacaatatcactattgatattaggagtttttcaaagaggtaaaattctaaaatttttacatagagtgcaagctaagtagctaagtcaaatgacttgcaatatttttctgaaat

SEQ ID NO: 9312 - DNA, 374 bp, Homo sapiens
  III.2940 (AI244995)
ttttttttttttttttctttatatattatccagtctcagttatttatttataggaatgtgagaacagactaatacagaaaattggtaccagaagtggggtatttctataaagatacctgaaaatgtggaagcagctttgaaactgggtaacaggcagatgttggaagagtgtggagggctcaaaaaaagacagaaagatgagaaggtttggaacttcctagagacttgttaaatggttgtgaccaaaatgctgatagtgatatggaacagagatggccaggctgatgacatctcaaacagagatgaggaacttaactgagaactggagcaaagatcacttttcctatgctttagcaatgaattcggaggcattg

SEQ ID NO: 9313 - DNA, 355 bp, Homo sapiens
  III.2941 (AA424846)
ccgccacagcacctgcacatcactccgcagtggtagcaggcccgaaggcaggtaacagcacatacagggggccaggaaagacaaggcaataagagccatccaccggagcaaaacttctcgtcgctagtatcgcacgagcaagggtctgtatagtctccctcggggtccgacatacagtgatagagcatgctgtccgcgcaccacatgcagctcacccggcggatgcaagttctcacggagtcgggcgcgtcctggcagtggccccggcggttctcctcgtggttgaacatgtccctgcagtacacgcaccgcgagcgctctccgtcctccttccgccgccgcgacttgccccggg

SEQ ID NO: 9314 - DNA, 386 bp, Homo sapiens
  III.2942 (AA426626)
gactcctcagactttggcctaggcgaggaccccaaaggccgcggggcagcgtgatcaagacgcagccctcccggggcaagtcgcggcggcggaaggaggacggagagcgctcgcggtgcgtgctactgcagggacatgttcaaccacgaggagaaccgccggggccactgccaggacgcgcccgactccgtgagaacttgcatccgccgggtgagctgcatgtggtgcgcggacagcatgctctatcactgtatgtcggaccccgagggagactatacagacccttgctcgtgcgatactagcgacgagaagttttgcctccggtggatggctcttattgccttgtctttcctggccccctgtatgtgctgttacctgccccttcg

SEQ ID NO: 9315 - DNA, 260 bp, Homo sapiens
  III.2943 (AA889091)
caaattggcaaacagctttattttctttttagaattccaatacctagtttggtgagacaggaggtttcatgagctgcctgtgggagggtaagttgtttcatcacttctggaaggcaatttggctaagtgtcaagcactgctaaaatattcacatcccttaatccagcaatttttctttagagcaagtttcccattgtgtagttcgtaatattgaagtccagatgaaaacacttgcccttgaacttttgtgaataagtagt

SEQ ID NO: 9316 - DNA, 449 bp, Homo sapiens
  III.2944 (AI131045)
  misc_feature (417)..(417): n is a, c, g, or t
ttattgcactttgctttattgctcttggcaagtagggcagtttttacaaattgaaggtttgtggcaaccctgcatctagcatgtctatcggcaccatttatccaacagcacgtgctcactttgtgtctctgtgtcacattttggtaattcttacaatattacaagtttattcattattatgagatcttctatggtgatctgtgggcagtgatctttgatgttactattgtaattgttttggggtgctacgtatcatacccataaaaggtggcaaatttaatcgataaatgttgtgtgtattctgactgctccaccagtgaaccatttccctgtctctccccttctcttcaggcctctctattccctgaggcactacaatgttgaaattagaccaattaataaccctacaatgacctncaagtttaagtgaaaggaagagttgcatgtct

SEQ ID NO: 9317 - DNA, 414 bp, Homo sapiens
  III.2945 (AA428575)
tttgcttttctaagtgtttattcatcccatgacttagtgtgtgtcaggcactgtcctggacactaggatgtggtggttaaagcagcccagagtctctgccttcaaggagctgatgttctggtgggaggagggcatcgggggatcctcagtgaggagtaaatgtcacgagcccagtgggaaagtgaaggagggaatggggtccagcgggggaagggaatcccagggacatctgggcaaagacgttcccaggaggggactgcaagcgcggtgtccttggggcgggattgcactgggagtgtttgaaggtcagccgggagactgcgaggcaggagctggtggagagaggacgtggaaggaggtgaggccggggaagtgaccggcaggccacggaggactcaggcggctgttcccggc

SEQ ID NO: 9318 - DNA, 496 bp, Homo sapiens
  III.2946 (AA429531)
agcctgcgtcacgtgccgtctgcctctgcacgtggccatctcccaaccagctcactgcgttctgaatgaactcagaaattgcctgcctcaattctgagattttcagctcataagcactgggagagaacgttcagacccgaggtgctgtatcaaccttccgctaagcactcctggcaacatattcaatgtcgacattgttcaccgtgtctccagatcaccagagggacgtgggcaccttgccgcagcgcctcaccaatcacgaccaaaacataaaggggctgacttaggggccagggctcgttccacatgcaaactcaaattacaccccggaaagaggcagcacagtcattctccctgtgcctgggaacacacagtacagagggccgggcttccagcgctgctccctgcagtggggcctcaagacgaatggccagcgctcctgtgcacggctcccataaataccccagtgtgatgttcccatttctccttcccagag

SEQ ID NO: 9319 - DNA, 571 bp, Homo sapiens
  III.2947 (AA527929)
cttttttttttttttttgagacagagtcccactctgttgcccaggctggggtgcagtggcgcaatctcagctcactgcaacctccgacttctgggttcaagcgattctcttgcctcagcctcctgagctgcttgacttacaggcaccttgcaccaagcctggctaatttttttggaattttaattaaagaccgggttttcccatttggccaagcctggctcaaatttccggactcacggtgtccacacgggaaagagcttccaaggttgtgtggattatcaggtgttagccacatgtggctggtgccatatcttacatgaatttttgaacaatcatatcacagagcccggttcactatctctttggaggcccatattttaaaagggcttattggcagtccaggttaactcccggatggttctcaggtctgaacggacccggatgttgtgatgtattattaccgtggattcggggccggataccttaggggtaagaatttctcctaaagtgactatttgagactgggcaaaatgggcccagagcttcccggggaaatgttatcgcgcaccaa

SEQ ID NO: 9320 - DNA, 178 bp, Homo sapiens
  III.2948 (AI791310)
ctctactactactaaattcgcggccgcgtcgacatttacttatatattagacatactgatacattttaaatgattccagttcatcctttttttgaatttcagttaaatacacattctaacatctcgctcaggaaaaagactattgttttctttgataataaactgaaatatgtaacca

SEQ ID NO: 9321 - DNA, 327 bp, Homo sapiens
  III.2949 (AA552179)
ggtcgatggattaaggtaaaacaaacacctttcctttattttagaaacacgttatttttgggaaccgagacgggaggattgcttgaggccgggagtttgagaccagcctgagcaacatagtgagattccacttgtaccaaaaaaagaaaaaaattagccagatgtggtggcatgtacctgtagtccccactacttgggaggctgcaatggaaggattgtttgagcccaggagatccaggttgcagcgagctatgaccataccactgcactccagcttgggcaacagagtgcaaccctatctcggaaaaaaaaaaaaaaaagtcgacg

SEQ ID NO: 9322 - DNA, 508 bp, Homo sapiens
  III.2950 (AA628425)
ttatgttctgtctcaagtctttttatttcgcaactttcgacatgtttgttctccctcgcccccgcttctcgccccagtctctggctcttcttagtagatacgcgtttttttccagctcttgcaagcggggcctgaaaggtttcgggtccgggctgctctgggcacagtgtatccgaggccccaggctggggaagggatcttgccgaagcatctctgcatttccacataggactgacagtgttcatggatgttggttttgcagttcttacagcgaacgccaaacttgttgttgagaacaatcatccgggcacagacatcacagaactttggcttcttgaagaagtgatccttgaattttgtggggctaatcgttgaccagcttaggaggttctgggggtggctcctcctcctcctcttcttcctcttcctcttcctcatagatgtagtagatgggcccacccccagctcccactgcctccccattggcctggggctctgggggaagttc

SEQ ID NO: 9323 - DNA, 491 bp, Homo sapiens
  III.2951 (AA922861)
gcaggaatttaatgcactctgatttttccggagatctaacaataacgcacatcaaagtgggtggcactgggctctgttcagaacattccagcaactggtcactgcagcagcgcactcacatggcggtgggcgctcgggctgacctcaccttctggaaggtgcacctgtgtgcgcaggcatccgagtccatgtcacgtgctggcaggcaatcgccatcctttcacaacaggtcacgaagccgactgattttgaatggctgtgtgggtaatactgcccatgaccttcattccagagagcaacaggcatcaggaaacgtctgtcacaacaggcagggctggagcttgacacggttgagaatccctgatgctcaacccgtattttctggctaccagttgaaagaaagggtgagaggatgcttggctccgagcaagtggctgagaaacgcagccataacattcagctccttctcaccaaattctttaccccaaaga

SEQ ID NO: 9324 - DNA, 292 bp, Homo sapiens
  III.2952 (AA417059)
cggagaggaggctggagaggagcctgggggttgcacgcttgggggtgagtgaccacaaggccgaggtggataagtcaacccaggtggacatcgacaagatgctgagtgtctgcactgctccacttgtccccccgctctctcctcagtacaagtgactgtcccgccccactggtggctcccctccttccacgcctgaatttggcttcaggcttcctgtgggcctaggctcatggtggcgggggcaaatttggcacctgccccacttgggactttggtcttgctgaaaataaat

SEQ ID NO: 9325 - DNA, 209 bp, Homo sapiens
  III.2953 (AA417081)
ttttgaaaaagaaaaatatttattttcagcaagaccaaagtcccaagtgggggcaggtgcaaatttggccccggcaccagagggcctaggccacaggaagcctgaagccaaattcaggcgtggaaggaggggagccaccagtggggcgggacagtcacttgtactgaggagagagcggggggacaagtggagcagtgcagacactcagc

SEQ ID NO: 9326 - DNA, 405 bp, Homo sapiens
  III.2954 (AI138298)
tttaatttggctgagcgccttttttcctacctccaagagctgttaattttgttcgctgccgagcaaaagtcaaagtcagagtctaaacagcttgtaatgagttttcaatggcccatctcaatgaaattgagggcaaagaccagccggctcaggcagtgtcagccctcagaatttattagtgagggcgcactgtgttcaggggaaggcatagaggagggactgcagttcctgggctcttcaagaggacccccagcccttattaaaaagttgtgacagcgacaggacacatgctatctgacccatctgccacaatctccactgcggcggggtcaaacttggttgggaatgaaggagagggaagtcagatgaaggaaagaagtgtttccatctcatagtgatggggct

SEQ ID NO: 9327 - DNA, 472 bp, Homo sapiens
  III.2955 (AA425930)
tattgagcaaaatttatttttatatgtacatacaagagacatattctttgacatataaaaaatacagaaatatttacatgtatacaaaaatattaaaacagatttcagaaataaggaaaacaagcaagtttttacaaaggatactttcttgggaaatacacacaatgaaaaaaagctttagaaaggtgacaacacatttaatagactccagaagttgatatttctgttggtatcaattgagtaagaggaacataaaatgtctgaaatgctaacagatggaaaaccagacatatttaagactgtctaggtaaaattgcatgggtttcctttaccataaaattgaatcaatttttttttaccctcagtatcactatctacttttcctttttgcttaaaatatttaaattgtttgatttgtattgagaattttaaactttttctcattaaattgtaaaaatattttaagaggttg

SEQ ID NO: 9328 - DNA, 210 bp, Homo sapiens
  III.2956 (AA428799)
ttcacctgcaaaatatgattgctatttacaacgggcaacctgcaaacgagaaggctgtggatttgattattgtacgaagtgtctctgtaattatcatactactaaagactgttcagatggcaagctcctcaaagccagttgtaaagataggtcccctgcctggtacaaagaaaagcaaaaagaatttacgaagattgtgatctcttatta

SEQ ID NO: 9329 - DNA, 452 bp, Homo sapiens
  III.2957 (AI001999)
tttgttctatgccaaaggttatatgaacaaggggttaagataatgtgtatgaatgttgtacttctcccctgtattgtaggactggcgggactgttgggtagacgatgccatctggcgcttgctgttcaccatgatcctctttgtcatcatggttctctggcgaccatctgcaaacaaccagaggttcttggactcttctgtttactctgagttaaggtgtattacaacaaaatggtgatagcaggtagagtctggggaaatctgtattttctttcctggtgttcggtctctcttctgaggaagtacatcaagtcagttcttttccccagcaacaaaaatgtagtaacacattgtttctgtcttatgatccaggattcatgtcactgggtatacaccttggggtttattaaaacataggttgctgttcccttcgagtttcagattcagtagaa

SEQ ID NO: 9330 - DNA, 480 bp, Homo sapiens
  III.2958 (AI269914)
  misc_feature (302)..(302): n is a, c, g, or t
tgaaacttaatggaaattttattttctcacagttctgcaaactggaagtccaagatcaaggtgccagcagggttggtgtctgataagccccagggctgcagacctgccaccaatcctttgctgaaagccatctgggctgtctcccaggccatgctaccacaaacacccctgctgtgaatagctttgtacatccattaccataccacttgcaagcatctgtaggacgcactctcaggggtagaattctgggtcaaaaggcagacgcatttgtcactgtgaggccattgccggctgccatccantgggggtttgccaacaaccctgccccacacagtgtgaagacaatgtgcctcacaggctcatcggagtggcttcatagaaggtcgtgatttaattcacacgggagttctcaagccttcaattctatctgtgagttaggtcctcaaggcttcctctgctccccagtcggacaacccatcg

SEQ ID NO: 9331 - DNA, 451 bp, Homo sapiens
  III.2959 (AI201300)
ttttttttttttttttttttacatttgagttcttttattaaggaaaagctggttcctgggcactaactccttagaaaggtgacaggcttcagcagctgggggacaaggagattgttcaggctgcatgcacacccactcctcactcctccagcacagcgaccagtttctgcctctttggaaggttccagaagggttgtccaggacagtgcacctggaagaactcagggcaggtaccatccacaaagtcctgggtcacctgcttctcacaaacacccgagcttggcttccagctccctgctgcataagcttccagtaagccaggagatgtctgagttcctgaccctccctgagcattcggcttacctccttactctttgcccttgagcaagacgctcgctgcgccgccgtgtccacctctgtaaaatggggataatgaaaacagcaccgccct

SEQ ID NO: 9332 - DNA, 364 bp, Homo sapiens
  III.2960 (AA431403)
ttttaatagcaactctttaatgctaatcaaatgtcattagaatcagtattgggtgcttttatcaacactttttgttatatcaggaaatcataaaatatgtacataaaacttgtacattttatcttaattaaaaaacataaatgttaattctttcacctatatttgatcccaggccaaggtattttattttagtataactcagcagattagatttccttgtcatctttcttacataaaagggacccataattcatcacctcagatttccagttttcatttatttcaagtggagcaataacttaagtacacttgcagagaactacgattagaagatttacagtaactttcaatttggtacaattag

SEQ ID NO: 9333 - DNA, 491 bp, Homo sapiens
  III.2961 (AA431808)
ccttttctctttgagatggagtctcaaaaaaaaaaaaaaaggctagtttattagtcaacagttttccattcttgctctgagacagactactggagacagcagtacagaaatattagcatgccttatgtttgattaactaaggcaagcataactcaaagctgtaaagaatcccttcccaaatttgagaatggtttaaaatcttccttatcacttggctactgcaccaaatacaaatgtatcaacttagaaaaatcctatacagatcagagttgaatgacaactaccaatttcgttgggaaaaatatccctgcattcaaaatgctaaaaaccacacatgaggttaacaactgtttatagtgctactcaaagggctggtcctggtaagatgtggataaatcaacgcaccactttcttcactgagagttttgctaccaggaaaaaaaaaagtcaccatctgaattaacagtgtggttagtggtgtaatttcttta

SEQ ID NO: 9334 - DNA, 422 bp, Homo sapiens
  III.2962 (AA934384)
tttttttttttttttaacgttttgaaccattttgtttgtccaaaaagatggcattttaaaaaggaagagtgtgaacaggagaaatatggaagagaagaggaagcagaagtggccaagggagagaacctgatggagaaaataaggaaagataggaggggccaaagcaaacagaaggctcatggctggtagttactctattaatggaaatagaatcacacaggcagaaagaaaagtgagtagataaaggaaagacaatttaccttgaacttttaattccaagctaatatctattaaactactcctaggttgatagaatttccccccattaactgcctcaatccacagaagctttggtaaattttagcacaaaggaacacttggaactgttacgtgttactgttcttcattccgaaccttctgtt

SEQ ID NO: 9335 - DNA, 464 bp, Homo sapiens
  III.2963 (AA416959)
tttgttcatataggactccaaactttaatgatatacccatcatacagccaggaagcagaacaatccctcaagaaaaaaagcacaaatgccaagatgctctccaaccacaatttttttaaatctatgaaacaatttccttacaaattaagtagtttttatagtagtgacatttgtcattgatgtgatctgtttaatatgactgtagtaagaaggaagttgggcctgttactgttttcagaaattgaaaagagtaccatcattaagataaggaagagaaagatttgtatccatctttttgggacatgtaaggtgagagtgaagtgtcacagttggagaatttgtggatattgctggaagaattggaaatgctctctagtaagcgggtaattcctcttccccgaacgctgctgttttggccagaaatttttgccctagatgggtagtcaccaatgggtgtgtttgat

SEQ ID NO: 9336 - DNA, 414 bp, Homo sapiens
  III.2964 (AA470046)
ctacaacttctcactgtagaggaccttgtagtggggatctaccaacaaaaatttctcaaggagccctctaagacttggattcgaagcctcctagatgtggccatgtgggattattctagcaacacaaggtgcaagtggcatgaagaaaatgatattctcttctgtgctttagctgtttgcaagaagattgcgtactgcatcagtaattctctggccactctctttggaatccagctcacagaggctcatgtaccactacaagattatgaggccagcaatagtgtgacacccaaaatggttgtattggatgcagggcgttaccagctaagggttgggagttcaggattctctcatttcaactcttctaatgaggaacaaagatcaaacacacccattggtgactacccatctagg

SEQ ID NO: 9337 - DNA, 209 bp, Homo sapiens
  III.2965 (AA621197)
ttttaatttttgtacatatatttacacatatgtatctttatataaactgcttgcagcaaaataggctccgtctgaaaaatcagtctggcacttgtggttaacagcaaactgacacaaatatgcaaaaagccgtccaaatcacacaacagttaggagctacatagggcagctggcagggagacaaacatgtagtacttgcttgggtcaga

SEQ ID NO: 9338 - DNA, 421 bp, Homo sapiens
  III.2966 (AA478950)
taaagtaataattctcatggaaccacaagatctcaggacatcttggaatcaggattttcttcgtggaatttatatccagttaaaaggagccagtcaagttgttcccttggttttgcaatgaaacaagcaaatcaatcttttcgatgttctggttggtgtttatagaggatgccagtggagaattctctggcatttgctgagaaagaagtgttgtcacaggtggctggccctcgttttgtggttggcctggctgacttatggccatcaactgatcaggcaatgtagctggtccagaggttaaaagctgactacagttattttgaatgccaaataagaacattcctgatgtctgctgagatgagccaggagaattctgcagttggttcattgtgcctcctgctgtgttgtgaaataaagtagc

SEQ ID NO: 9339 - DNA, 493 bp, Homo sapiens
  III.2967 (AA479997)
tgcagcaccgaactcaatttctccacttcagtcaacatcaaacagtgaacaacaagctgctttccaacagcaagctccaatatcacacatccagactcctatgctttcccaagaacaggcacaacccccgcagcagggtttatttcagcctcaggtggccctggcatcccttccacctaatccaatgcctcaaagccaacaaggaaccatgttccagtcacagcactcaatagttgccatgcagagtaactctccatcccaggaacagcagcagcagcagcaacagcagcagcaacagcagcagcaacaacaacagagcattttattcagtaatcagaataccatggctacaatggcgtctccaaagcaaccaccaccaaacatgatattcaacccaaatcaaaatccaatggctaatcaggagcaacagaaccagtcaatttttcaccaacaaagtaacatggccccaatgaatcaagagcaacagcccatg

SEQ ID NO: 9340 - DNA, 248 bp, Homo sapiens
  III.2968 (AI079619)
ttttttgggaatacattgtattcatttattctccttatacataaaatttgtgctttgaaatgtcttcaggaagatgccactctggggtggaaaatggggaatgacaagaaatgcagtcggcaggttctattcgtacatgttcagtctcttcctccccttctttgtccacacttgttagatgcaactcaatcttttttctagggaaaaggaaaccatcttgatgccttttatttgtgacaattgattgc

SEQ ID NO: 9341 - DNA, 400 bp, Homo sapiens
  III.2969 (AI086338)
tgttgttttttttttttttttttttttgctattacatctaacatatgcatggctggggaagtgtcattttaaaggtctattgcccatagtacgtccttttaagcaagtgattcagatatgttatcacagcctcttcacagctaaaacaagaaactatttttctaagatcatcatattccatttgaaaaataacatgtggaatgatctacgagggtatgatcatgtatcatctaaaataaattgtttgcatgtagaacatagaggatattcaaacattttctcactttccaattaacacattatttcatttaaagcaccacaatttggctaggacattctctactaacatggatctgtttattttttaaaatatcaactggctataaaagctatgggttat

SEQ ID NO: 9342 - DNA, 419 bp, Homo sapiens
  III.2970 (AA699342)
tatggtcaggaaaattttattaatttaagcgaggcactttttatttatgccattaaggagtatgatttacttatttataatttcatttttacttgtaattaacaattacaaataaaatgataattatacattaaaaaaaaaaaagaagtgacacttttcaacgaggtcttcctgatcaccctttttaaattacagtgccatccccatacctggcacccagcgtctcttaaacaattttttttattaaaagaaataatttaaagccaaagaactgagaaatttgctgaatgacaatttgtagactttacgaagttccaagattaaaaatctgatctgttgatgcttatactatcttacacattattttttaattacatatgttgggaatctatagatttctttagatatggttatgtgaa

SEQ ID NO: 9343 - DNA, 392 bp, Homo sapiens
  III.2971 (AA428183)
ttttttttttttttgtgcttgtaaactttattttccatacagtagagaaacatacagtacaagcaacactgggaatccatttacagcaaagctcacaaatgccccttgagacacactcgttccctggatgagggggtggtgcccagcagcctgcatgcctctgggcggcacttccatgcgagcggctgctgcatcccagagctgcgtgggaaggggaagccggctcagtcctcacaccccgcagctccacgtccactgtcctctgcaggctgccccatggccgccttggggaggagaagcttccccaggcagcagccaactttcacgtgctccccgcggcctcctgcctgcctggggaggaaaacctcatggcagggcggggctcagctccg

SEQ ID NO: 9344 - DNA, 490 bp, Homo sapiens
  III.2972 (AA428394)
cgttggatccacatcccggtgccagggagggaagcccaacatccccttgtacagatgatcctgaagctcacttccaagttctccggatattcacaaaactgccttccatggaggtcccctcctctcctagcttcccgcctctgcccctgtgaacacccatctgcagtatcccctgctcctgcccctcctactgcaggtctgggctgccaagcttcttcccccctgacaaacgcccacctgacctgaggccccagcttccctctgccctaggacttaccaagctgtagggcagggctgctgctgccagcctggggtccctggaggacaggtcacatctgatccctttgggtgggggggtggggtccagcccagagcaggcactgagtgaatgccccctgctgcggctgagccccgccctgccatgaggttttcctccccaggcaggcaggaggcgcggggagcacgtgaaagttggctgctgctggggaat

SEQ ID NO: 9345 - DNA, 442 bp, Homo sapiens
  III.2973 (AA448165)
tttttgatttttggcatccttatctggactgcctttctttaggaataaacagatgatacagagcaaagtttgtaaatctcaaatgcagcggttaacctctttgaggctggcccactgggtcaccaggggcagcttctaagtgggaaatgtttcgatggaattctggttacataaggaagttgctttgaaaatctgggatagttttctataatggaatcattcccttgtgtctttattcacgatgaagtgtagagtgaaagatgcctccactgggggtattggtgcacgagaaaagccacctgtgtgacgtaaattcattctgtttaggcaaagctgggactgccacattggcaatgtcagagaaggtgcggacccggctggaggagctggatgactttgaggaggtgagcaagtcatttgtggaatacagggagtgggagag

SEQ ID NO: 9346 - DNA, 472 bp, Homo sapiens
  III.2974 (AA878731)
taaattggagagacttccatctttattttttttctacttacaaaaataatgcaggctctttgtgaaaaatttaaacattacagaaatatataatggagacagtgaaagtccatcataatctactatccctccctgagataaccaatattaacaagtttggtatttatagcctcattttttagtatgcatatactaacatatatatatgttttaacaaaaatataaataatcattaacataaaaaagtattatacaatttgcttttttcccccattcaagatatcttgtatactcttccacatcagtacatatagattaacctcattctttctggcaggtacaaggaatttcatcttattgatgtacaccaatcccctactcataggtacctggataacttcaaaatttcactcttatgaataacaccaaaaaattcaattagatacaccttcgtgcagtatgagtgtctgca

SEQ ID NO: 9347 - DNA, 552 bp, Homo sapiens
  III.2975 (AI732890)
  misc_feature (530)..(530): n is a, c, g, or t
taaattggagagacttccatctttattttttttctacttacaaaaataatgcaggctctttgtgaaaaatttaaacattacagaaatatataatggagacagtgaaagtccatcataatctactatccctccctgagataaccaatattaacaagtttggtatttatagcctcattttttagtatgcatatactaacatatatatatgttttaacaaaaatataaataatcattaacataaaaaagtattatacaatttgcttttttcccccattcaagatatcttgtatactcttccacatcagtacatatagattaacctcattctttctggcaggtacaaggaatttcatcttattgatgtacaccaatcccctactcataggtacctggataacttcaaaatttcactcttatgaataacaccaaaaaattcaattagatacaccttcgtgcagtatgagtgtctgcacagaataagatgccagaattataactgctgaatcaaaaggtatgaatatgcaaaattntctaatagatattaccaaattg

SEQ ID NO: 9348 - DNA, 490 bp, Homo sapiens
  III.2976 (AA934861)
tttgaatctgtgaaatcattccactctttaatgaggtcctcttagaaggggagggaatagatctcctttagtgacatgactttgacaagcaaatcaattcattccatttgtttcctctttgaaaacagcaatcctcgagcgttacataatctaatcttcatgcctcactggtttgttctgtcctcctgaggaattggcagatggtgccaatgcggagacccgcacacacgcctcgcaagcctcatggtaacaggagagttgctcacagtgtctgtctctttgctgtggggtccctcgctggcatttgtttccctggatcggttggctctttagcatccctcaggcaccgctggcttcttgccctcggctatcattccaagattaaattggaaatgcatcatcaggtgctgccagactggcttctcttctattctgagactgatatctgtggctgacttacagggtcgtcatagtcccacgcacggtattg

SEQ ID NO: 9349 - DNA, 362 bp, Homo sapiens
  III.2977 (AI001737)
ttttgactaatttttccatttatttaaagtaaattggtttatttagatttcatacatttttaaaatcatctctggtagcatatgctattacatatcttgtaaacataatataattaatataaataatatatattttatttaatttaaaataatttttctcccttacaactgtagtcttattttcatctgtcattatatccttattacaattgctattttctttatttttttgagttatcatctcaccccagttaaagtggcctatattcaaaagacaggcagtagcaaatactggtgaggatgtggagaaaaggaaatccttacactgtacgtaggtatacaaattagtacagccactatgg

SEQ ID NO: 9350 - DNA, 425 bp, Homo sapiens
  III.2978 (AI190004)
tttttcattgcggggtatatggagagtcaggaaacttcctttgactgatgttcagtgtccatcactttgtggcctgtgggtgaggtgacatctcatcccctcactgaagcaacagcatcccaaggtgctcagccggactccctggtgcctgatcctgctggggcctgggggtctccatctggacgtcctctctcctttagagatctgagctgtctcttaaaggggacagttgcccaaaatgttccttgctatgtgttcttctgttggtggaggaagttgatttcaacctccctgccaaaagaacaaaccatttgaagctcacaattgtgaagcattcacggcgtcggaagaggccttttgagcaagcgccaatgagtttcaggaatgaagtagaaggtagttatttaaaaataaaaaacacagtc

SEQ ID NO: 9351 - DNA, 401 bp, Homo sapiens
  III.2979 (AI187080)
ttcctgagacagagttgtgctctgttgcctaggctagagtgcagtggcacgatctcggcacaccgcaaccttcgcctcccaggttcaagtgattctcctgcctaagcgtcctgagtagctgggattacaggcacctgccaccatgctcagctaatttttaaaaaatatttttagtagagacagggtttcgccatgttggccaggctagtctcgaactcctgacctcaggtgatctgcctgcctcggcctcccaaagtgctgggattaccggcgtgagcaccatgcctggccttatattttttaaaatgagggaacaaatgaataaatgaccaccatgttaggggctggctctgaacagaattgtaaagtgggccaagcttgctctcaaggtcaccttaagc

SEQ ID NO: 9352 - DNA, 323 bp, Homo sapiens
  III.2980 (AA536040)
gctcgacaagaaaaacaaggctctcacagtggctcgtgcctgtaatcccagcactttgggaggctgaagcaggcagatcacctgaggtcaggagttcaagaccagaatggccaacatggtgaaaccctgtctctactaaaaatacaaaaattagccaggcatggtggtgggcacctataatcccagctactcgggaggctgaggcaggagagttgcttgaacccgggaggtggaagttgcagtgagctgagatcatgccactgcactccagcctgggcaatagagaaagactttttctcaaaaaaaaaaaaaaaaaagttttg

SEQ ID NO: 9353 - DNA, 265 bp, Homo sapiens
  III.2981 (AA864536)
atttactaagagtcaagatttaataaaattaatttatatttccttgtcaaaggcattatcaagtgtaactggcatttttttctttaatggctgatacatagcaataatgaatatagtttctacagttgtagccttaaattgggaaaaggcaccagtagctttacccaccactgcaaatatcaatgcagggaaagaggcaaacaacatcccagttttatcacaaaattagttttgacctaatagaccccagaaagggtctcaggaa

SEQ ID NO: 9354 - DNA, 112 bp, Homo sapiens
  III.2982 (AA522487)
gtcgacctttgggaggccaggggaggaggatcgttagagcctgggggttcaagaccagcctgggcaaagtggttaggacccattctcaaaaaaaaaaaaaaaaaagtcgacg

SEQ ID NO: 9355 - DNA, 112 bp, Homo sapiens
  III.2983 (AI732553)
gtcgacctttgggaggccaggggaggaggattgctagagcctgggggttcaagaccagcctgggcaaagtggttaggacccattctcaaaaaaaaaaaaaaaaaagtcgacg

SEQ ID NO: 9356 - DNA, 145 bp, Homo sapiens
  III.2984 (AI791511)
ctactactactaaattcgcggccgtgtcgacttttttttttttttttttgagaatgggtcctaaccactttgcccaggctggtcttgaacccccaggctctagcaatcctcctcccctggcctcccaaaggtcgacgcggccgcg

SEQ ID NO: 9357 - DNA, 450 bp, Homo sapiens
  III.2985 (AI183386)
ccctttacgaattttatttttattccggattgttaatgcaagacgacagtttgaatctccatttacctctgcctgaacacaagaagccctgagtcttttgaagccgggcaccaaagttaaagattcacttcccgcattccccatggccccctcttgcagcttagctcggctctgagcccccgaaacgcccttcgaggcgggggctttcctgccaaggggcgataggtgggccatcccgaggcgggaacgagcaggtaggtgttggctggctttctcctgggtgagtagttaggggaaccgcccctccaggggacttagatgacattaaattatcccatcacacaaacttcccgtggaggtctgcccccaggagggcaactatcggattaatccaccatgtagaaggcatattggatcactttgtctttaaaacaatcgaaaccaacgctc

SEQ ID NO: 9358 - DNA, 518 bp, Homo sapiens
  III.2986 (AI150071)
tttccaactctaaacaatatttttcttatctttaatctttatttgaaacagcttgtctcttttttctttcattaccttaacattttaaagagtacaggccagttattttgcaaaatgctcccccatgtgggtttgtctggtgtttcttcacaactcgattcaggtcgtgactttttggcaggaataccctacaagtgatgttgtgtcttcagtgtatcacatcaagaggcacatggcaatttgtcccattattaatgttaacttttattacctaggtaagaagctacctgccaagtttctacaccgtattcgtttttcctctctaattattatggggacacactttgagaccatttaactatccaattatttcctcaaacttttcacccactagtatgaggatctattaatgattactgactaaatcaattactactaccacagttaacaaaagtgattttctattctagcactcctctaatatttaggtggcatctactgtaaggaaaacttccctt

SEQ ID NO: 9359 - DNA, 446 bp, Homo sapiens
  III.2987 (AA977307)
tttgagacagaatgtcgcccaggctggagtgcaatggcacgaatctcggctcactgcaccctctgcctcccaggttcaagcaattctcctgcctcagcctctgagtagctgggattacaggcatgcaccaccatgcctggctaattgttgtatttttagtagagatggggtttcaccatgttggtcaggctggtctcgaattcctgaccttgtgatccgcccgcctcggcctcccaaagtgctgggattataggcgtgacacccgtgcctggcctggcaagcttcttcttgaagaaggatgaacagttctcagcaaagaggagtcatcattcttctgaaccaccataaacattccagagaagaggtagatagaaggctagatcctggaggatgtgctgtggtgagctaggccctcaggcaggtggtggtgcccagcagaaatggca

SEQ ID NO: 9360 - DNA, 451 bp, Homo sapiens
  III.2988 (AA429570)
ttttttgattttgaattttttttaattattgagaatttaggggaaagaccatcaggcttcacactttaaatctctttatgtgggcctgccacacggcgtctttgccagcttttgtatgtactgaagctaaaacatttgttcagatgctgattggcaaggcaagtgactttaaaacatggtttttttttctttcaattaaaaaaagttttattcagggctgccttctaggatgaaagattctcaaggccctatcaaagacgtaatgcaacacttatcgtggtgattcttaagactcctttgaattttatagggatatcctttttctcaaagatttttcaggattgccttctgataatctatttcgtttctggagttagcacagtaactcgtaaaccaagtgctaaaagatgaaatctgaaacacagatatagaataaacgtgttttggatat

SEQ ID NO: 9361 - DNA, 337 bp, Homo sapiens
  III.2989 (AA429701)
cagatcccgaacccgctgtccagctaaggagtaaaaggcgaggaccagcggcttcaaacctattggatcggaggggcaggaggagaataatttttgtcagtaatttctcaaatgttcgtgtccttttctctaaaaataagtacagatcacattcctgttttcgaaaatgataggcaaaagttggggaacattacatgagatccaaaacacgtttattctatatctgtgtttcagatttcatcttttagcacttggtttacgagttactgtgctaactccagaaacgaaatagattatcagaaggcaatcctgaaaaatctttgagaaaaaggatatc

SEQ ID NO: 9362 - DNA, 450 bp, Homo sapiens
  III.2990 (AA897339)
tttaaggtgattaaaaagtcttagtttaataaaaagtaggggctaaatatgcacgtgttttataacttctttatttggctcctttcgttccactatttagcttgtagaaactgtctacctaaaagttgaaatactcaattcccccacatgtgttctgagagactgagctcgtttgactgctgattccttggtgttccaaggtttcctggaaaaagatgaacaggtaatttagttgaagaccaggcatctattttggttcttcttttcagatgccccatgttgtattccagctcagtgatggtatcctgtggactgtttttgagcctgtgccccaaggtgatgtttggctgtgtctccacccaatatttcatcttgaattgccttcctcataattcccacaggtcaagggagagaccaggtggaagtaattgaatcatggaggtggtttcc

SEQ ID NO: 9363 - DNA, 331 bp, Homo sapiens
  III.2991 (AA939028)
taaaaacctattttattgggtttatctggacattgttgttgtcgttgttttaagttccaggcagccaagcagccatggatggattactcttaaaacctgatcataaaatattgtccacatgggcaaaggcactaatcaaaactgtgaaaggaaaggtttgaattaaggaaaaagttcaatgagacacaagggatttttcattgcaaagtttctctaattttgtatcccaggctgacccataaaggaacaaaatattctgccttgatgacaacatgtgatttagcgtagtctgtattacagaatggccacagcttgaagatggcagaatggt

SEQ ID NO: 9364 - DNA, 383 bp, Homo sapiens
  III.2992 (AI733384)
taaaaacctattttattgggtttatctggacattgttgttgtcgttgttttaagttccaggcagccaagcagccatggatggattactcttaaaacctgatcataaaatattgtccacatgggcaaaggcactaatcaaaactgtgaaaggaaaggtttgaattaaggaaaaagttcaatgagacacaagggatttttcattgcaaagtttctctaattttgtatcccaggctgacccataaaggaacaaaatattctgccttgatgacaacatgtgatttagcgtagtctgtattacagaatggccacagcttgaagatggcagaatggtttccccagagtctggagcagaacttgtagttttgtctacacacaatgaccca

SEQ ID NO: 9365 - DNA, 439 bp, Homo sapiens
  III.2993 (AI791795)
aaaaaagcaattcctcaggaaaaaatggtcaatgggtcattgtgtgtagacaaaactacaagttctgctccagactctggggaaaccattctgccatcttcaagctgtggccattctgtaatacagactacgctaaatcacatgttgtcatcaaggcagaatattttgttcctttatgggtcagcctgggatacaaaattagagaaactttgcaatgaaaaatcccttgtgtctcattggaactttttccttaattcaaacctttcctttcacagttttgattagtgcctttgcccatgtggacaatattttatgatcaggttttaagagtaatccatccatggctgcttggctgcctggaacttaaaacaacgacaacaacaatgtccagataaacccaataaaataggtttttaaaaaaaaaaaaaaaaaaaagttg

SEQ ID NO: 9366 - DNA, 483 bp, Homo sapiens
  III.2994 (AA478764)
actggatccacgctcgctccacccggaaaaagcgctgtccctacaccaaataccagacgcttgagctggagaaagaattcctcttcaacatgtacctcacccgggaccggcgctacgaggtggccaggattctcaacctaacagagagacaggtcaaaatctggtttcagaaccgtaggatgaaaatgaaaaagatgagcaaggagaaatgccccaaaggagactgacccggcgcggtgctggcgggacgctcaagggcagcggatttgttgttgttgctgttttcctttgtgggtgtttggtgcttgatttccagaaactctccagcgacttggacttcttcttttttttttttttctttttagatagaagtgactgtgtggttggtctctgaggtatttgggggactctgtatttgctcgtttacgtgttggaaaaaccaagtggctttggggtttcgccctatcccactccctctctttc

SEQ ID NO: 9367 - DNA, 466 bp, Homo sapiens
  III.2995 (AA479985)
gcggccgcccacgcgagcccagccttcaggggagagagcagcgctccaatgcactgaggacaaaccccaacccgcccgaggccctgggctcctctaagcctcactggagatctccaccgaggtcccgcgtgctccctgaggaaagggggctttcgcaactggtgggcaaccccgccgggcttcaccgtgggctagcagccggggtgtccgcactgttgtcgctctgccttcattcttggaattggggcgcacttggcccctgtttgggcagtgctgggggtgaggggactaaactacagcacttttcagaaacatgggggacatttacacaagagagggctccccaagccagcttgcactcacaaaatatagcatttcttaaggaaccaatggagcaggaaagagagggagtgggatagggcgaaaccccaaagccacttggtttttccaacacgtaaacgagcaa

SEQ ID NO: 9368 - DNA, 417 bp, Homo sapiens
  III.2996 (AA428758)
agagaaatgaaaacatatgtcccacaaaaaattatagataaatgttcataggaacattatttataaaaaccaaaaactgggaacaacccaaatgctcaactgatgactggataaaaattaaatgtggcatatctatacaatgaaataatgattcatgctatgacttggatgaatcttgaaaacatatgatacgggaaagaagtcagctttaaagaccacacattgtgtgactccatttatatgaaatgtccagaataggcaaatctatagaaacagtagattagtagtttgctagggttaaggggttcggggaaaatagagaatttctgctaatgagtgtgagtttcttttaagggtgatgttctaaaattgattgtgtgctgatagttgtacaactctgtgaatccacttaaaatt

SEQ ID NO: 9369 - DNA, 389 bp, Homo sapiens
  III.2997 (AA429345)
ttttaaaaagttttattgagatataattcatataccatacgatttacccatttaaaatatacaatccaataattttaagtggattcacagagttgtacaactatcagcacacaatcaattttagaacatcacccttaaaagaaactcacactcattagcagaaattctctattttcccccaaccccttagccctagcaaactactaatctactgtttctatagatttgcctattctggacatttcatataaatggagtcacacaatgtgtggtctttaaagctgacttctttcccttatcatatgttttcaagattcatccaagtcatagcatgaatcattatttcattgtatagatatgccacatttaatttttatccagtcatcagt

SEQ ID NO: 9370 - DNA, 453 bp, Homo sapiens
  III.2998 (AI732732)
ttttaataagttttattgagatataattcatataccattttatttacccatttaaaatatacaatccaataattttaagtggattcacagagttgtacaactatcagcacacaatcaattttagaacatcacccttaaaagaaactcacactcattagcagaaattctctattttcccccaaccccttaaccctagcaaactactaatctactgtttctatagatttgcctattctggacatttcatataaatggagtcacacaatgtgtggtctttaaagctgacttctttcccttatcatatgttttcaagattcatccaagtcatagcatgaatcattatttcattgtatagatatgccacatttaatttttatccagtcatcagttgagcatttgggttgttcccagtttttggtttttataaataatgttcctatgaacatttatcta

SEQ ID NO: 9371 - DNA, 457 bp, Homo sapiens
  III.2999 (AI734128)
agagaaatgaaaacatatgtcccacaaaaaattatagataaatgttcataggaacattatttataaaaaccaaaaactgggaacaacccaaatgctcaactgatgactggataaaaattaaatgtggcatatctatacaatgaaataatgattcatgctatgacttggatgaatcttgaaaacatatgataagggaaagaagtcagctttaaagaccacacattgtgtgactccatttatatgaaatgtccagaataggcaaatctatagaaacagtagattagtagtttgctagggttaaggggttgggggaaaatagagaatttctgctaatgagtgtgagtttcttttaagggtgatgttctaaaattgattgtgtgctgatagttgtacaactctgtgaatccacttaaaattattggattgtatattttaaatgggtaaatcgtatggtata

SEQ ID NO: 9372 - DNA, 353 bp, Homo sapiens
  III.3000 (AA459009)
ttttttttttttttttttattttttctctttattgttacatacaatgtataaacacataaaacagaaaacagtagggatcctctaggatctctagggagacagtaaagtagaaagaggtctcagaaacatttttttaaagtacaagacattcagtgctcggcccaaaggcgtagaaggtttagagccagcagatagctgtactaaaggctccgtctctctccccagagccaggacaaccccagggagctctccattagcagccagtccacgcaggcaggatgctgcggagaaagctctatgctgagaacattccccttgatggaaagaagggcaacacaaaaggggtaactaa

SEQ ID NO: 9373 - DNA, 499 bp, Homo sapiens
  III.3001 (AA459230)
  misc_feature (242)..(242): n is a, c, g, or t
ggaggaactgtcttcccagatgtccagctttaacgaagccatgactcagatcagggagctggaggagaaggctatggaagagctcaaggagatcatacagcaaggaccagactggcttgagctctctgagatgaccgagcagccagactatgacctggagacctttgtgaacaaagcggaatctgctctggcccagcaagccaagcatttctcagccctgcgagatgtcatcaaggccttgncctggccatgcagctggaagagcaggctagcagacaaataagcagcaagaaacggccccagtgacgactgcaaataaaaatctgtttggtttgacacccagcctcttccctggccctccccagagaactttgggtacctggtgggtctaggcagggtctgagctgggacaggttctggtaaatgccaagtatgggggcatctgggcccagggcagctggggagggggtcagagtgacatgggacactccttttctgt

SEQ ID NO: 9374 - DNA, 408 bp, Homo sapiens
  III.3002 (AI033615)
ttttttttgagatggaggtttggggtgtcacccagtctggagtgcggtagcgccatctcggctcactgcaacctccacctcctcccccacaactaagaatgttcgggcctcaaaagtcaaccaaggccgggtgcggtggctcacacctgtaatcccagcactatgggaggctgaggcgggcggtcacgtgaggtcaaaagttcaagaccagccaggccaacatggtgaaaccctgtctctactaaaaatacaaaaaattagccaggcgtggtggctcatgcctgtaatcccagcactttgttttacaactttttccattgctactgggtggggtgaatcttcatcacaaatatccttctttgttgataattccttgttttcccatcttgattcccaatctgaaatata

SEQ ID NO: 9375 - DNA, 498 bp, Homo sapiens
  III.3003 (AI282163)
gattggatattttgaaggagattttctagcaatgcttttaaatcattttgttcctgaaaatgtgaaatataatcaggaggcatcttttccataaatatcttgtaatattcttgtagaagttcgaagttttcctgattaatactttcttgcaaagagacatctccaaacctttcagccagagtttgctgttcattgattccaacattaaaaagtactggatacacatgaagcaactgtccttctttaatctgtagaggtagtgactcaaacattctggctggaagcttgacctctaacacgtaatgttctcgtcttcctgttataactggcaacacatcattggatttggcttcaattattttaaatgcgactttctttaaatcggaaatgccaacggccatgtcctctagcattccaaattcaatcgcttgatgtactttacagtcctttcatattgactatcaaccccactgggtaaagctgtgtaggaagccctgg

SEQ ID NO: 9376 - DNA, 436 bp, Homo sapiens
  III.3004 (AA458899)
ttctcttgtatgccaaatatttaatataaatctttgaaacaagttcagatgaaataaaaatcaaagtttgcaaaaacgtgaagattaacttaattgtcaaatattcctcattgccccaaatcagtattttttttatttctatgcaaaagtatgccttcaaactgcttaaatgatatatgatatgatacacaaaccagttttcaaatagtaaagccagtcatcttgcaattgtaagaaataggtaaaagattataagacaccttacacacacacacacacacacacacacgtgtgcacgccaatgacaaaaaacaatttggcctctcctaaaataagaacatgaagacccttaatttctgcccggagggaacactgtgtcacccctccctacaatccaggtagtttcctttaatccaatagcaaatctgggcatatt

SEQ ID NO: 9377 - DNA, 446 bp, Homo sapiens
  III.3005 (AA459094)
atctacatcctcagcagtagtggagatggggcccaacaccgagactcagggtcttcaggaaagtctcgaaggaagcggcagatttatggctatgacagcaggttcagcatttttgggaaggacttcctgctcaactaccctttctcaacatcagtgaagttatccacgggctgcaccggcaccctggtggcagagaagcatgtcctcacagctgcccactgcatacacgatggaaaaacctatgtgaaaggaacccagaagcttcgagtgggcttcctaaagcccaagtttaaagatggtggtcgaggggccaacgactccacttcagccatgcccgagcagatgaaatttcagtggatccgggtgaaacgcacccatgtgcccaagggttggatcaagggcaatgcaatgacatcggcatggattatgattatgccctcctggaa

SEQ ID NO: 9378 - DNA, 409 bp, Homo sapiens
  III.3006 (AA872454)
catagtttgtagcttttattctgagacattaaatagcatccagaaaggtgctgtgggtacagaatgcaactgagtgtgtgttaaccattcacatttcacttcttcctaaagaaaaacacctggggaggctgggtggcaatgctcctcttgtgaagagtaacacgcatcactgaaaatatatgcagctttacagaacggataagtctttctggatttccactgcaacacagattttggctagttctcttgcatggctattgaacatcatgtatcttttcattctgttgagttgccttatgtttggcgttcctgggtgccctttgaaatgtcaggcctctgtatgcagtgtacctaaggggaaattactcctattgtcggcagggattttcatagcagaagtctggctgtt

SEQ ID NO: 9379 - DNA, 414 bp, Homo sapiens
  III.3007 (AI221588)
ttttattgcgttattttattggttgctttggggtttaacttacaacagtccaccttcaaggtgtgttacactacttcacacagtttaagaactttacaatagtgtacttctgtttatccccttctgttattgttgtcatgcattttgcttttacatagttataaatcccataacacagttattttgtttatatgacatataataagattaatagagacccagccttcaagtaggatttatcctaggagtgcagggttggtttaacatttgaaaatcaataggccgggcatggtggctcacgcctgcaatcctagcactttcggaggctgaggcgggtggatcacaaggtcaggagttcgagaccagcctggccaatatgatgaaaccttgtctctactaaaaacgtaaaaaatt

SEQ ID NO: 9380 - DNA, 453 bp, Homo sapiens
  III.3008 (AI215656)
tttttttttcatgtttcaataaaactttatttataaaaataggaagtgggccacatttgccaacccctgtgttaaactgtcacccagagtagattattaggatctgcacagctgttgcctgccgcataacaacctaaaagccagattattgtcatcttcatcattgagacattcaatgtgctttttcctgttctctcgatcaacatcaaaagcaatcaacacagacagaagatgctgtgaccacatgtggagggagacttctttccaccactaagcaaacaatgagctctgcagcagacaccagccaggtgcccgccaattcaattccattgctatctatgtggagatagcatcacatcccacaggctaggggctcagtccccaagacttgcccacttcagacaccagtcacaagtccaggactctggaacttctgacggacaggcttcaagt

SEQ ID NO: 9381 - DNA, 417 bp, Homo sapiens
  III.3009 (AI299305)
ttttttttttgagatggagtctttctctgtcacaggctggattaccgtggcatgattttggctcattacagtcgccacctccttgattcaagaaattctcctgccttgtcctcctcagtagctgggacaacaggaatgtgccaccatgcccaaataatttttgcacttttagtacaaacggtgtttcaccatgttattcaggctggtcttggactcctgacctcagacaatccacccaccttggcctcccaaagtgttgggattacaggcgtgagccagggagcacaaccctgtatattatatcttgtaggactgtgccaatggtgatgaacagtctcaacttttattttggaaagtctttatttttatattctttttgaagtaaaataattttgaatcgagtattactggttagaa

SEQ ID NO: 9382 - DNA, 462 bp, Homo sapiens
  III.3010 (AI333702)
tccgtggatagcatttattgggcgccattctcagtgtgaagacagataggcaggaagagctgagggaggctgtggcagccacgacctttggagtccgggggctgcccggggtgggggtgtggtcgtgagggcatggtcacccacacatattgcatattctgtggcagtgtgcccaggcataaggcattggggaagcagagaggctgcctgcagtgaaagggagtgagggggaagcaacactggccttccaggtccctaggaaagacccagcagagactgaacagtctgccacgctgtgccccacggccattccgcacccttccccaccttctctccgcagctttggttgtggctccctcgggactgacaggacaggacccttcgagggtagggtcacacacaggacagaggcagccagcactgcccccccacccccaacataaacacagagggcaccttcag

SEQ ID NO: 9383 - DNA, 423 bp, Homo sapiens
  III.3011 (AA250763)
acattttgcaaaggtaaacacaagtgattctctttattcatggcagttatgtgctataaaatcacagcaaacactgaatttctgaatactaaacattcctcctaggagaaatatggggttaggttcctgtgagcctctggtcccaacattttcgttaacccattaatccataaccttgtttcatgtgtgtttctttttaagggcaacttacttaatatgtattgttgattcattaacatttaacttatggccaacagcactataactcatgcccaacagcactataactcatgcctgactgaagattatctaacatacatattttctttctttctttctttctttctttctttctttctttctttctttctttctttctttctttctttctttcttttctttccttctttctttcttctgttt

SEQ ID NO: 9384 - DNA, 441 bp, Homo sapiens
  III.3012 (AA397577)
gaccctccgagccagggatagaatttatcctgaagaatgagtgattgcaagaagcccaccatggccatgtaaaggtgacaaccagtacctggtctagagcctctccaaggatttttgcaactcagccacttctccattctacaagacttcaattcattttcttatgagctagaagagaaatattggtcaactttcataatttattgaggcagctgaggttaggtgggttatgaagaccccaatgattccatgaaagaggggagcaaacttcaagtcttatgactcttatctcatgctgtattcattggttgaagaataggttgcttgttacatggaaacagatgtttacagatatcatcaaagaaatgttgacatcgaaaagactgttacatattttttgctttttggtggctacagcaagattggcagaaatgtctttta

SEQ ID NO: 9385 - DNA, 327 bp, Homo sapiens
  III.3013 (AA399689)
tttttcagagaccaattcttctctttattatacaaatgccaataaagcccaggagagaaaataacagaaaaaaaaattgtagctaatggcaatcactgataaggaatcataaatgagactcagaatatcttaaaatagttgtgcaaatgacaggaaaatcaaaacaaccttcttccagtaaatgtctcatgaagcaattgtgtataagcaaactgcagtagcttgcctacaatagctaacaacatcatctcacttaagatggatgaggtaaaagacatttctgccaatcttgctgtagccaccaaaaagcaaaaaatatgtaacagt

SEQ ID NO: 9386 - DNA, 240 bp, Homo sapiens
  III.3014 (AA428755)
atctattagatacctatagtgtagttactgaatagctgggaaacaaatacacctagttagaaatggcactgctttataaaaggcactagagaaaagacgagactattcctatatttaaatgctgctggcaagtgaattcctttgtatataaatgaaagataccattcattaaaatgaaagacttgttttaagtgtgattcttacatttcattcatttatgatagagtaaatggctttata

SEQ ID NO: 9387 - DNA, 412 bp, Homo sapiens
  III.3015 (AA496280)
tttaaattaatcatttgccttttataatctaaatcagaaattgaaaaacaggaacattgtagaggtaagtggctgaaaatgctctgcttactgcacacaagcacatcatgacaaagaatgctagaagtagctttcctcagaagtaataattgaacatttaaaatattattttctcagaaaagttaaagcttttagtgtaaaaagcatggtaaatgacattttaacttaatagttaagtatacagcaaattatagattacaagcaattagttacccacatttcaccagaaccttcagtgaaagtgtctactctcaacattgaccagaaccttcctgttctgaagtgtctactctttagagttgcttcagctttacatatctgtaaaacctaagattactcaatgagaagttac

SEQ ID NO: 9388 - DNA, 567 bp, Homo sapiens
  III.3016 (AA572949)
gatcgactttttttttttttaaattcaaagacagattctcactctgtgcccaggctggagtgcaagcatggctcactataacctcaaactctcgggctcaagcaattgtcctgcttcagcctcccaagtagctaggtctacagatgcaagccgccatgcccggccttccaggattcaaatttaaatccatctaactctagagctagtgttcttaaccactttactgtgttttttggtaatttgagttggaaaactatctatatccttttgcataagtggtatacagaccaaaaataataccacggagaactgccctctccttgaggaatttcgacactgccacaaccagctatacctctacagtgggtacactgccactcaggtcataaatgattgctttagggatggacatttcaaccaagttctctcaaccaaaaatctggagtaacataaaaaagccaggcagtagagaaggaagaacccagaggaagtcattctgttatccattccattaagaggaagataacttgtttgccagtcaataacatttactcatatatggcttac

SEQ ID NO: 9389 - DNA, 420 bp, Homo sapiens
  III.3017 (AI139757)
gcggccgccaattttttttttttttttttttttgaaaactattttttaattgacaaaaattatatatatttatggtatacaacatgtttgaaatatgcatacactgcagaatggctaaatctagctaactgacatatgcatgatctcacatacttaccttttttgggtgtggggacaatacttaaaatctgctctatcagctattttcaagaatatactacattgattttaactatactatagtttctatgttgtagtacagatctcttgaacttataacaatacttttaatatgacattataagaaatttttgcaaaatttaacattattatatgccattccaactaaatgctgaagagaactacatgtatcttggggccatatacaagaaaaatctcttactattttggggattgacc

SEQ ID NO: 9390 - DNA, 523 bp, Homo sapiens
  III.3018 (AA131767)
  misc_feature (66)..(66): n is a, c, g, or t
  misc_feature (367)..(367): n is a, c, g, or t
  misc_feature (418)..(418): n is a, c, g, or t
  misc_feature (430)..(430): n is a, c, g, or t
  misc_feature (440)..(440): n is a, c, g, or t
  misc_feature (448)..(448): n is a, c, g, or t
  misc_feature (510)..(510): n is a, c, g, or t
ttagtgtctggatcagttcattcaaaagcaaaaatatactgggagtccaggtgtaaaggtatacanaagaaaacatccttaattaggcattaagtctaatactgtgaaccaatgagcatctttagggacttggctccatattgtgtaaggattaggaactattgggaggattgaggtaactgcctaagagtctgagctgacactgatgtcagctcccccagctgccatcaggaactcctttgctatatgagctgggtgacaagtcagtccaaagtctgagttacagccgacccaactggccagacgtgggtgcgacttcccactccacctgacaaaagcagtaaaatcttgtgtctggtgcttagangagctgggttcagtgttgacggaagctgaagacagacggaagctccactanaacattgttcanggcggccctngaggacancgtggagaagaaatcctccctgctgagctccagccacagattttccacttcctcagcttttntcccggcggggtt

SEQ ID NO: 9391 - DNA, 564 bp, Homo sapiens
  III.3019 (AA131780)
  misc_feature (16)..(16): n is a, c, g, or t
  misc_feature (18)..(18): n is a, c, g, or t
  misc_feature (20)..(20): n is a, c, g, or t
  misc_feature (313)..(313): n is a, c, g, or t
  misc_feature (469)..(469): n is a, c, g, or t
  misc_feature (477)..(477): n is a, c, g, or t
  misc_feature (531)..(531): n is a, c, g, or t
  misc_feature (549)..(549): n is a, c, g, or t
  misc_feature (555)..(555): n is a, c, g, or t
cctggaggaggcggcngngngcagtacctccagagcgcaaggccggcgggagaaaagctgaggaagtggaaatctgtggctggagctcagcagggaggatttcttctccacgctgtcctcgagggccgccctgaacatgttgtagtggagcttccgtctgtcttcagcttccgtcaacactgaaccagctcatctaagcaccagacacaagattttactgcttttgtcaggtggagtgggaagtcgcacccacgtctggccagttgggtcggctgtaactcagactttggactgacttgtcacccaagctcantatagcaaggagttcctgatggcagctagggggagctgacatcagtgtcagctcaagactctttaggcagtttacctcaatcctcccaatagttcctaatccttacacaatatggagccaagtccctaaagatgctcattggttcacagtattagncttaatgnctaattaaggatggttttcttgtggtatacctttacacctggactcccagtatntttttgcttttgaatganctgatncagacacta

SEQ ID NO: 9392 - DNA, 464 bp, Homo sapiens
  III.3020 (AA436172)
ggctcataaacaacagaaatttatttcctacaattctaaaggctggaagtctgagattaggatgccagcctggtcagggtctgatgaggactcttctgggccacagacagctgacttctcattgtacctttatatggcagacggagagctagagagctctatggggttccttttataagggcactaatcccattcatgaagtctccacctccatgacctaatgacctttcaaagccccgacctcttaataccatcataagggggttaggatttcaacacagaaatcgggagggagggataaaaacattcagtccaaaattcctatgtttaatatatattgttatatacattgtttaaaactgtatactgacttatgtgactatacttaacactattcaactaacacttaaacatagtaaagatggtaaattttattttaaaaatcaaaattaaaaataagacaa

SEQ ID NO: 9393 - DNA, 436 bp, Homo sapiens
  III.3021 (AA436299)
atgtaggccttctgcttgattttgcggtgaacctaatattgctgtaaaaaacaaaatcaatttttaaaaaatgacagctttttattgggtattctgtctctatctcactctcttgtcctgtggagtgagcttggaaccaaatttcccccagttgaaccagaaaaaacagagaaataagtgtttgtcatttttagctgctaaattttggggataatttatcctgcagttacatataactaatatacatgatatatctacatatcttttcgacccttctgttttcagattatgttttctctttttaatccagactgacaatttctgcctctaactggattgtttagtccatttacatttaatgtaattactaatattacagggttgaatttaaatctaccatcttggtatatgatttctatctgtcccatctgattgt

SEQ ID NO: 9394 - DNA, 338 bp, Homo sapiens
  III.3022 (AA437050)
atttctggctacagtttcaatatttaagaaaataaaaaatagacaaacagatggaaattttagcagccattttctaaacaacattttagtgactttataataatcatatagctacattatattattaaacttgatgatactaggttattttattcatgttatttttatattttccccttactgacacttaatatttattacatattgacaatcttctaagtactaaaacattatttcatttaataatcataaaaccaaacatgctattgtgttattacaaactgcagaataggaaaccgggaccctgaggagtttaagtaaattctccagagtcagaa

SEQ ID NO: 9395 - DNA, 295 bp, Homo sapiens
  III.3023 (AA437318)
ttttttttttcatattttaaaatatttattttttaatttatgtaattccaatttattttgaaatatataattcacgtgtgtgtgtgtgtgcgcatgacagcccctgcttaccttgtgactagctgcaaacaaccagatgagctttgtctgaatgtaaacaactccaaatgcatctctctccatggcttgagcgttcttagcacctgtgggaaatgacacattcagcagataatagacaaagtttttactttgtatctagtggcgttaaatgtatctgtaagtgaaattgagctat

SEQ ID NO: 9396 - DNA, 426 bp, Homo sapiens
  III.3024 (AA490566)
ggaaaatactcaaaaagaaagttgtgtctgtactgaatatgtacagactttttccttgtcattattccctaaacaatacagcgtaacaactatttaaataggatttacattgttttaggtattataaattacctagagatgatttaaagtaattgggaggatgtgcataggttatatgcaatttctgcaccattttatgtcaaggattttgaacatcctcagattttggtgttcgagggcatcctggaatcaattccccatgataccgagggatgactggatattaatcgatttccctcaagcctgcccttgctgtgaactagtgctacaacacgggaaatccatctgctctctggcttaaaatatgtatctcatctaaaattgttcgttaaagtgtgaataaattgctaagtggttgttgcttag

SEQ ID NO: 9397 - DNA, 228 bp, Homo sapiens
  III.3025 (AA496968)
tgttaagtcacaaaacttactacgatcagtctagagctcagaaaatggtcaatgtgaatttggtacataaaacaaagttctcataattagtggttctggttctaggtcaagggcacaaatagtgtatttcattttcctgttctacatgcttaatagtcagtgaaatattttgcccaagagcccatgctatgttggattttaattacaaaggtaaataaaagctctgct

SEQ ID NO: 9398 - DNA, 165 bp, Homo sapiens
  III.3026 (AA911488)
acagagcaaacaggtctgtatctattaaaatttaaaaagcgttaatatttagcagcattgttttatgttgtattcataacataataatataacaatatattaaatgttaatatatattgttaataatataataatataacataaaataagtgatacttattttcc

SEQ ID NO: 9399 - DNA, 458 bp, Homo sapiens
  III.3027 (AI204080)
tttttgatgttaacaactttgtaattaaaatttaaagttacatgcaaagttttaaagtgagcattttccaggaagaggtgattttctaagttcttgaatgcctctcccttttgtgaggaggctgcgtcgtgggctgttggtgtctttggcagaaggtgagtctagggttcctgttgtgggtcctttgttctcacgaggacagtgcccgttttccccgtctcatgcttgcccagactgttcccgtgcgcagagagactggcctgtttcacctgcagctgtgctgtttgagctgcagctgtgtagcctgcactggcccgtctgcctggcactcacaccgtttgctgatcagcacttgaagtgtgtctatcatagctgagacactgaatattttatgtttaatttttattaaaatgcagatttaaaaacttgattccattattaggtagcatttaagtatg

SEQ ID NO: 9400 - DNA, 421 bp, Homo sapiens
  III.3028 (AA430161)
tttttttttttttttgagcctcatttgtacagtttttattcttgcaacttttctgtagctttgaaatcatttccaagtaaaattaacttttttaaaagaggccatacaatatagcagtggtcctcaaccagggctgtgtcctggacacaccctagagcaccttagatgctctgggacccaggcatctgtagttctcaaagtgccccggtgcttccaatgtgcagccacgggcaggaaacaccagcctagtgggtgagctcactcactaaatttcagacatgacgagcagtgcttttgctctctgaagaacaagcactgggtaatgccaacacctagcctcagctacacgggggaagggcagaaacaagatgttgaatttgcatggccctggcaacacagacaacatccccttctagtggtt

SEQ ID NO: 9401 - DNA, 313 bp, Homo sapiens
  III.3029 (AA445975)
gtaaaaactaactccttttcacaaagtggaagttaccagaatgtgatttcagaggccccgggggatttatcatgtgaggggtggggggggggggttgtggtgtggggtggttggggtgtgatgtggtgggggggtggtgcggggggggggggaggggtgagggggtggtgggggggggtgtggtgtgcgaggtgagggggggttggtgtgagggttgcgcgggggtgagcaagatttggactgtgatgttggttgttctccactctttctacaggacagaacagggcctctagagtgggaaatggcttttggg

SEQ ID NO: 9402 - DNA, 279 bp, Homo sapiens
  III.3030 (AA970908)
tttagatttacttttactgttttatttttcactttcctggaaatcaatatatttcatgatcaagacagagggaactcatcagtgtgcgacaaaaattttttaatttcaaggtctgttgccctgaatataatgactgtgaccattgaatttgtattcaaaattaagttttactctagttaacctgctgatatagtttgtatatctgtccccactcaaatatcatgttgaattgtaatccccagtactggaggtgaggtctggttggaggtgattagatgt

SEQ ID NO: 9403 - DNA, 499 bp, Homo sapiens
  III.3031 (AI733259)
tttagattttcttttactggtttatttttcactttcctggaaatcaatatatttcatgatcaagacagagggaactcatcagtgtgcgacaaaaattttttaatttcaaggtctgttgccctgaatataatgactgtgaccattgaatttgtattcaaaattaagttttactctagttaacctgctgatatagtttgtatatctgtccccactcaaatatcatgttgaattgtaatccccagtactggaggtgaggtctggtgggaggtgattagatgtcctcacaatagtgagttctcatgagatctggtggtttcaaagtacttggcacttctctcacttgttcactctggttttcaccatgtgatgtgcctgctccccctttgccttctaccatgactgtaagcttcctgaggcctccccaaaagcagaagcaccatgcttcctgtaaagcctgcagaaccgtaagccaattaagcttcttttctttataaaatat

SEQ ID NO: 9404 - DNA, 513 bp, Homo sapiens
  III.3032 (AI793283)
tctgaaacaaaaattgaaatacaattagcaatagagtggcacatttttccattacctaacatttcatcaattttgacattctatattttaatacaagctgactcaatataagcctaattccttttttaagagtcctgtctttgagtttagaacgaataagtattgtgcagatagacccatttatccttgtgtattatgtttcttaacttggtatcattgtaagtatgaaagttaattttcttctgaatatttccttaaacaaattgaatgaatacagtttgaattttctaacttcttgactgagagatttaaattttggaattttgatttgttaaggtaattatcactcaattacatgtcacagtgatgaaaatagaaaactgtaagccacagaaataatttaagtctatgttttacctatatgaaggaacagtctgtgattcaccaggaaatagtagagacacagtttccaagtactggtgggctcttctgccttgtagaagtgtatgttag

SEQ ID NO: 9405 - DNA, 110 bp, Homo sapiens
  III.3033 (AI216649)
gaaaagaagaaaatcaacttcttcttcaagtgtttcttctgctgatgaatcagtgtcttcatcatcatcctcttcctcttctggtcacaaaaggcataagaaacataaga

SEQ ID NO: 9406 - DNA, 386 bp, Homo sapiens
  III.3034 (AA229601)
tttttttttttttttttggctgcagagtctcgctctgtcgcctaggttgcagtgcagtggtgctatctcggctcactgtaacctgtgcctcccaaggagctgggactaacaggcatgtgccactgtgccccgttaaacagctcacttttcaatgaaacaattactcagtattttgaaaattaattcttagtggctaaagagattttaaaacattggtttttatgtgctttgaaattgtaatctttgtttgttagttattaaacctactctaagactgagaataaaaactatgtcaagttacgtttgagtctcactggcctagaacgcagggttttaactactcatcccagatgactgccagactaaatgcttaattttcatcatga

SEQ ID NO: 9407 - DNA, 208 bp, Homo sapiens
  III.3035 (AA229693)
tcgacctcagttaaaaaaaaaaaaaaaaaaaagattgcatcctcctctttaaattttggaggaatgtatttgtgaggtcatgatgaaaattaagcatttagtctggcagtcatctgggatgagtagttaaaaccctgcgttctaggccagtgagactcaaacgtaacttgacatagtttttattctcagtcttagagtaggtttaata

SEQ ID NO: 9408 - DNA, 309 bp, Homo sapiens
  III.3036 (AI216351)
ttttttacctaggtatttgcatttatttcaaatcttttctaagtggcatattagtttgattataaatctatgagggattgttttgctttgtattgtaatgaatttttagaaatttaaattgcgtactcttacaaaagataggagagcatattgtcagcaacgaagatgtacttgaatcttctccacccactgtccagagcactcttcgttttagttttggaagtgaaaagtccaaagttggtctcaccaggccaaaaccaaggtgtcagtagggctgcgttctttctggaggcactgggcccagggtgg

SEQ ID NO: 9409 - DNA, 465 bp, Homo sapiens
  III.3037 (AI306553)
ttttgagacagagtcttgctctgtcacccaggctggagtgcagtggcacgatctcagctcactgcaacctccgtctcccgggttcaagcaattctcctgcctcagcctcccgagtagccgggactacaggtgtgtgccaccacgcccggctaattttttgtatttttagtagacgtggggtttcaccacgttggccaggatggccttgatctcctgaccttgtgatccgcccgacttggcctcccaacgtgctgggattacaggcatgagtcattgcacccggctgatcctcttattagaattttaaaaaaatacctttaaattctcctttgaggaaaaacaaatctcttaaaggttaacataaaactactattaaagaggaaaagatataggtcatgtaacttagagatacaaaggacatacttcttaaaaggaaaaacaaaccctaatgcacaatatttacca

SEQ ID NO: 9410 - DNA, 456 bp, Homo sapiens
  III.3038 (AI344588)
tttaattttaaatgtgctttttttatttgtacaagaaaaacccttaaggcacatgaaaaataaagaacatttcaggtctcaaatcagtggtagatcctgaaggatatttcatttcagtaagttattatatacactgaaactcactgtaagcaaactgtatacgaataagtattaagtctcagctattatgtcaccataatagaaaaaaagtaatttcaaagagcgaaaaacaggaatatttaatttctatcttctttcttaataacgtatcttccaaacgttattaagaagtactaagaagacacacttcattgattcactggattttatatctgaaagggtcattagcgatcaacctgttaggctccctcgttttatagataaaaggaacatcaaagaatgatttgccccaagtcagaatgctcactgatgacagacttaattcccaacccctaa

SEQ ID NO: 9411 - DNA, 476 bp, Homo sapiens
  III.3039 (AA393636)
  misc_feature (74)..(74): n is a, c, g, or t
cagcgttccgccgcgcgaggggccgggagctggggcggaaagcggaaccgagagcgctttccgccgtggcagantgaacctccgggaaagacgctgggaggcccagggatgctcggcgcaactggacgctcatcgggagtcacggggtcggccctcaggggaacggggactatccgtatcaactcggtgtttgttcgttttcttcaccttgcggtttgtgccctctccacatttcctctctgtgtctaccattctccttcgggacgtggcaaaccgtgagccgctgcgtttgagttttgggaaaccctgcggaaacgcctgggccggtggttttgcgcgtcctaccctgtgtcacctcagggttatgatctggcccctggcaaggctccccaagtgtgatgcctcccccgtccagatgactgcattttgaggatggagtcagtctggtggcattttttgcttaagtaaacattgta

SEQ ID NO: 9412 - DNA, 328 bp, Homo sapiens
  III.3040 (AA400825)
  misc_feature (249)..(249): n is a, c, g, or t
gacgtatatatttcattttattgaaacattcagaaaatactgggagtgaagcctgacttgcaatacagttctctttgctggcaatgagcatctgaaataatgacacttttttctttagtgcatatgaactgtttgtctccagaacagaaaaccaaaagtttaaaaacaagatactcccgttgacatcaagtcttcagaattattcatctgatgcttcctagtttccaaagtttcgcttttttcgatttngcacaggcagctgttgaacgctgatgctacacaaacggttacaattgtttacttaagcaaaaaatgccaccagactgac

SEQ ID NO: 9413 - DNA, 382 bp, Homo sapiens
  III.3041 (AA443596)
ccagagtggactttttatttcacgatgaccatgtggaaaagttgggggaaagagacccaagtctgtctgtctccttggttggggcccactggattttcatacatggttcacacaaccataagcccccactggctaatgtcacaagagttctgagtgttgggatatgaggaaagaataacagtgggaaagtgttcggggcagatgtgtttttttttaagggggaaagaaagaaaagatttcccctccccaaatggtaccctgggggcagcttgtttgttcatgtgacattgattggtactacttctgttctgattctgcacacttgtgactggaaggagcctggttaagagctggaagtgtattttgctctggtttggggtct

SEQ ID NO: 9414 - DNA, 377 bp, Homo sapiens
  III.3042 (AA456633)
agtggcttaaaacaacaatatttatttttgtcaggtatttgcaatttggacagggctcagtgagaataattcctttttttgctccactcagcatcgactggggaagcttgaaggctggagactagaatcatctgaaggttcattcatatacctggtggttgagtctggctattagttgaaaccttagctggggctataagctggaacatcttcactggcccctccatgtggcctgagattcctcacaatttccaacaagtcatgaagtcacagagtgttaattcttcagcactcaattcattgaagctgttcaattcaagagaatagaaatggattttacctcttgatgcagggaagtggcaaagttctagaagatc

SEQ ID NO: 9415 - DNA, 349 bp, Homo sapiens
  III.3043 (AA490626)
ggaatgaccacagcaatatttccagcccttgatgatcttctagaactttgccacttccctgcatcaagaggtaaaatccatttctattctcttgaattgaacagcttcaatgaattgagtgctgaagaattaacactctgtgacttcatgacttgttggaaattgtgaggaatctcaggccacatggaggggccagtgaagatgttccagcttatagccccagctaaggtttcaactaatagccagactcaaccaccaggtatatgaatgaaccttcagatgattctagtctccagccttcaagcttccccagtcgatgctgagtggagcaaaaaaaggaattattctc

SEQ ID NO: 9416 - DNA, 445 bp, Homo sapiens
  III.3044 (AA426302)
aagttctgctccttcataaggaccttgaagtactaggaggaaaggtgctttgtgtgtggagttttccatgaagtgcagtcccaactaaaaggctgcgttaaagattcactgcgtgctgtcctcacttgttctacaatgagtgccaaatctgctatcagcaaggaaatttttgcacctcttgatgaaaggatgctgggagctgtccaagtcaagaggaggacaaagaaaaagattcctttcttggcaactggaggtcaaggcgaatatttaacttatatctgcctgtcagtgacaaacaagaaacccacacaggcgtccatcacaaaggtcaaacagtttgaaggctccacatcatttgttcggagatcacagtggatgctcgagcagcttcgccaggttaatggtatcgatcctaatggggattcggcagagtttgatttgttgt

SEQ ID NO: 9417 - DNA, 313 bp, Homo sapiens
  III.3045 (AA426303)
gaagccgatgctattgtagcatttattagcaagatcattagggaaatgtaaaaatgcaacaccctttctttcacattaacatctgaaaagaaaaaacaaaaaccactctaagtgtccaaatattggaaaaaaagaagcaagcggaggtcccgaattcttgtaaaaactgctgaacaaactcttcagtttctcttaagaagagtcaccaggataggcagtttctcaacatttgtgcttcatggcaagcttgtgcgcagtttctgcaaactgctgggcgctgttcttcaggtcttctgtcttctcctctgctcgg

SEQ ID NO: 9418 - DNA, 367 bp, Homo sapiens
  III.3046 (AI239677)
tttatcagtaaaatatttattggcattcagtgctcctgaggccttttacaaactgaaatatatggacaccatttacaattcaaaatctctattgttaatatctaacatcaataaaaatgtaacttttattcttcagtaacttgtaattagaaagcctttttttaaatcagagaactgttaaatggaataattattccagtgttcataagtcttattttgtgtggatagtgagctaggattagatgaagatgatcattaacattgcttgtagccttacagagaagattgtgcctacagttgggaagtataactgcgtgaaacacaagtggattaatattttaaaatattgatttactatgtaataatt

SEQ ID NO: 9419 - DNA, 361 bp, Homo sapiens
  III.3047 (AI287555)
tttttatgagatggaatctagctctttcgcccaggatggagtgcagtggcgcgatctctgatcactgcaacctccgcctcccgggttcaagtgactctccagcctcagcttccagagtagctgaaactacaggtgagtgccaccacgcccggctaattttgtttgtatttttttagtagagacagggtttcacagtgttagccaggatggtctcgacctcctgacctcgtgatccgcccgtctcggcctcccaaagtgatgggattagaggcgtgagccaccgcgcacggcggaaaacgagattttttagatcaactttacattgccaatgcccatggtattccctccacaacaaactcca

SEQ ID NO: 9420 - DNA, 423 bp, Homo sapiens
  III.3048 (AA484940)
ggcacgagggcttaggcaaacagtctgggatggaactataattgtatgtatacatataatttggattggtcagatgagaacaccaaatgtggtagctagctcacctttatttatgagatttttattgggttgatttgtcttgaaagaatcaaatctaagagaaatgtttggaatggctagatgatcctaacagaagaaatcttacaggtctttactgctaaacctaaggagatgagagtaaacagtaagtggccaactcaaagaagcatggactatgttgaaacatggactatagctgcaatttcccagtggtgcagttttcaagcgctttaccccaggagagaaaaaaataaataaatgaaaagtagccatttcaccattcagaggatagatactgttgcccagtgaaaactgcatgaatta

SEQ ID NO: 9421 - DNA, 450 bp, Homo sapiens
  III.3049 (AA485215)
tttttttttgtagaatgatttgtgctaaagcaatacatctctttctatcatatactgatatcttgaaaacttttataacgtttctagtcacattcagtattttaaaaataggattgattctaagttttgagtttatggtgtatttgaatattagagatattatctcttatacatttcaaagctttgctgcattctaaactcagtcctgccttagccttagtaacggcaatgaagtgcggggatagaatgttcactatttttttatgtgctgttaaaatttcatacctcctgttctatcttgaagtcttacagttttggaatggtgagtgggggaaacaagcataaaactattacataattcatgcagttttcactgggcaacagtatctatcctctgaatggtgaaatggctacttttcatttatttatttttttctctcctggggtaag

SEQ ID NO: 9422 - DNA, 391 bp, Homo sapiens
  III.3050 (AI204073)
tttgcctgtaattttcaagcggaagtttattctgaaacatatttcaacatcacattccttgggtaaattgcctgtagcttaaacataacagcagcatctcaaaaccctcagaactctacttacgaatgaaccagattttactattaatacattggttaggccagttttctttgtatattcttgctgggcatcagaagacttaaacctaagctgtctgtcatctctgcgggagaacagtgcggtggtgggtggtgtcgagactcacagaaggagccgatcaagggatctcggcaggagctgctggtggacaaggcattcccagcagaggacaggaaaagttggtggcattaacattctaggcacctgctgcaggtgtcaggccccagccctg

SEQ ID NO: 9423 - DNA, 382 bp, Homo sapiens
  III.3051 (AA705439)
ccttggaactattttttttttccattttcaacctaacgtactctagagttaaccaaaatgagtttgcagttacaaagtgattaccttcctataaaaatcattccagctttggctaaaagtaaacagtaacctgcccaatatacaaatcctcattatgaattcactggctcctatctttaatgagtatataatccccatatgtattattctattctcacactgctataaagacatacctgagactggataatttataaacaaaagaagtttaattgactcacagttccacatggccggggaggctcagggaacttacaatcatgacagaaagcaaaggggaagtagacacatcctcacatggccgaagaaggagacagagagc

SEQ ID NO: 9424 - DNA, 360 bp, Homo sapiens
  III.3052 (AA937152)
atatttattttttatgcttaagggtacatagtgctgcttataaatgatgcataagtgacaattttatactgtgagcattactctgactcttggaatcatagaatctcaaggttggacgggaacttaatagttggatttgttctatattcagactgctttacacctccatgaggtcctgactgacacatactactcatttagatagtgctccctatctgaaaagtcttggttttcagataacattttctttcctttaggcaaattattcctgttttacccatgaaggacaaatccaaatatcttgtcttcatgagaactcattgcacatttagaaataggccccatgtctctgccaatttt

SEQ ID NO: 9425 - DNA, 420 bp, Homo sapiens
  III.3053 (AI149568)
tttctgttcgtagggttttctctcctacaccttaataaagccaaagtttatttactattaaagttacaatgaagtacttatgaaagcatacaaatttgtaaaataagtccttatgttttcaagaaaattaccagatataacattaacgacaagatgaaacaaagatacgaatcatgacttttgtcctgttttaaagtcaccttatggaacaatacatcatgaaatcaatagttgtacatctaggaaatttaccactggagctctcttccactggtgtggatattctaattggtctcaggtggccgtctctgccattttggtgattggctagaatccaagggtgtttttgaagatggcacctggaattcacaaaacatggctaattcttctgagaagagatgggacacaaacatgaaagag

SEQ ID NO: 9426 - DNA, 479 bp, Homo sapiens
  III.3054 (AA405390)
tagctttactgagattttgttgcttatcacacaattcaccattgaagtgtcctgggctgatctgatgccgatggctccgagtcaaatgctctctaaaggaaattctcagaagatctccggggaaaagcacacataatttatagaattagaaagcaaaggatttgtaagacatcacaaggaattcagttaccagttaggactggtcacctccaaacttaagtacaaagaacttatttacttcttccaaggaaatttatttgggggattttttatgtggccatgatgatgctgtcagtggccgaagctgcattctggcaactccagatcctgggtgactttgcctagctctgcccggcctggtgttgcaggaaatacgctaattccaggcacggaagctgggagtgcatccggtctggggagactttgcctttctaagaggctctcagtgctgttgatggtgcacattcgacctttgagac

SEQ ID NO: 9427 - DNA, 435 bp, Homo sapiens
  III.3055 (AA406226)
ttttcacaaacgaatcacagtttttattgtgtgaattttcactaaatatcctacaatgaatattcgtcataagaaaaagtcatttttaatgtcatgatttcctggaaatatagaaagaaagaaaaacagaaaaggcacaactgcccccgagcacagcagcagaatcttggtggtgggcgctcccctgccacgcccggggatgctcctgcttcaggagttcacttggctcagttatggcagcaggttctgatgctgcagagctcagagcagaaaggctaaggacgcctgcttagggcccctactgtgtgtgtgcatgtctgtgtgcacgcatgtgtatgtgtaggtctgtgtgcagggctgtgtgcatgactgcacgtatgtggatgggtgcacatgactgtgtacctgtgtgtgtatatgtgtgggtgggtgcgc

SEQ ID NO: 9428 - DNA, 375 bp, Homo sapiens
  III.3056 (AA482144)
atttagatattttctcccaacctaagaaaaacacacataatgtctacagagtaaaagagaaaaccagtatgagttgacatgactttattcctagcatttcttttcttcaaaaattgtggtaatttacctacacattagatcactctaccttggctacttccaatttgtattatagctgtggaatgaattcagtagccctggaagtctagtcaaggtggttgaatataataaaatgtatgctgttcatcatagtttttcttaatactacagttactttgtttccaagtttgaattttttgccagatttggccaacatagaatctagtttcataagcaaaaatgtcagaaaaattccctttcccttaattagtagca

SEQ ID NO: 9429 - DNA, 383 bp, Homo sapiens
  III.3057 (AA491280)
ttttttttttattgtaaaagaaacgattttttaatatttcagttgctgttgttagggtagaaatagagaaatgacagggccagtatttggccacagtggcaaccaactaggacttgagaaagtaggactattttgatgctacaaagacataagacagaaagcaccatgttaaaccttagcatactcagaaaatttccagccacatctttcagtcattcatctttcatagtcacaacagaaaaacacattttttcagattagaaaatgttgagaatttttgtagaaaacctaccaatatttgaagcgggtgccatgcacagtattggccctgtacaccacgcagaaaagcgtggaaagtaaaagagatatttgattattaagga

SEQ ID NO: 9430 - DNA, 406 bp, Homo sapiens
  III.3058 (AA926729)
cctggcattcctgtcgccccctctccccatagcttgcctcctccttctcacagtcgggcgcccggctcctcgagacgcaggaccacctcagatctccagtcctgcacctgccggctgagcaaacgaggagacggggagaaaagctgtctgtcgttcctgaaggaacaggacctccgcactccaagaaggaatccggcgcccagtggggctgcaggagcagaggaccgtggcggcagtagcaggagaggcaggagtaggagcagtggcttctctggaggtggcactgtctgcccccttgagcctcttcctaacgcatcttgattcaaaatccctgctcaccacggatgcacagtcacagctgaagattgtagttatctaggaggattctttcttagttgtaaatcta

SEQ ID NO: 9431 - DNA, 282 bp, Homo sapiens
  III.3059 (AA983692)
agacagagtcttgcactgttgcccaggctggagtgcagtggcccatctcggctcactgcaacctccgcctcctgggttcaagcaattctcctgcctcagcctctcgagtagctgggattacaggtgcacgccaccaggcccagctaatttttgtatttttaatagagacggggtttcacaatgttggccaggatggtctcgatctcttgagcttgtgatctgcacacctcggcctcccaaagtgctgggattacaggcatgagccgctggcacccagcccat

SEQ ID NO: 9432 - DNA, 361 bp, Homo sapiens
  III.3060 (AA939240)
tttgtcatctacttgttctatcagctattgatggttggtactactgacagcatcataaattctcccagtatatttggggatttgtccagttcttttgcttctatcaatttttgctttatatatactatctcactatgtgcatgcagatttaggatagtgaaaacttcctgatacaattacccttttattattataaaacatccatcttttatacaaattctcctaactttataatgaggctatatcctgagaaacccactgtaagtgaaaaatattgttaagtcaaaaatacatttcatatactatagagtgttggttatttaccctcatgactgcttggctgagtggaaactgcagcttg

SEQ ID NO: 9433 - DNA, 379 bp, Homo sapiens
  III.3061 (AI248624)
atgtctgattctctagacagtcctcgggtttgttaatttattattattttttcctgttctaagaaatgctatttctgcttaagtgctgctggatttggaaatcattttcatgactaaatatttgtctgcctggtgagagcccagcgtagggctgtgctgtccgtagatactcaatactgattaatggatggccgtgcatgtctgtgtgggagtcgtgtgcttaggatctgctcagctctccgaaagcaacagaaatggtgtggggaagaagaaaatcacaggattgtgatccaaccatgatcacggctttctggattggacttcatcttctggagggtccacaaggtccaggtacaggtgcaatgggagtagggagcct

SEQ ID NO: 9434 - DNA, 417 bp, Homo sapiens
  III.3062 (AA699515)
ttttaaaagaattaagattttatttacatgattgattaaaaggggtatgggaatgtagttaaaactagtaagaagccttgaacttgggcttaaagtcacagtttaaatctcagctccactctttcctagcaaggtgaccttgggcacattatcttctttgagcctcagtttcctcatctgcaaaaacgtgataataacagcacttaattcacgagtccgctgtgaggactgaatgaaacaacccaagcaaaccacttaacatgctactaggcacgaacactcagcacacattagcaaacttgtcatctgcaactttgcaaactccttgaatactggactcggaatggccccataatatctcatctataataactaacttcagtcttccattcattcacacatacaaaaaccatttac

SEQ ID NO: 9435 - DNA, 459 bp, Homo sapiens
  III.3063 (AA706916)
  misc_feature (428)..(428): n is a, c, g, or t
  misc_feature (429)..(429): n is a, c, g, or t
ggcttttctgtattttctgaacctcctgtgatctttgcaatcagaaggaaaagggaaacttcagcttaaagcaaaagcaattatctgaaggctcgtgtgctaatcgcccacagatgtaatcggtgtccagtgcagcctccaggaatttctgcttcctggacccctcctacctactggggctcggtaccctcccacccatccagcaggtgacagtttggggctcctagtgggataccaggcacacaacgtggagtcaggcagaccaggttggaatcctgatgttggcagtgactggctgtgagaagtacatttaacatgtctcaagttctcccgatctgttaacttgaaggttggactagaatgacctagaagactagattctagagggttgccagatttagcaaataaaaatgcaggatgtccgttgnnttgcatggaacatacttaaatcatctgttt

SEQ ID NO: 9436 - DNA, 298 bp, Homo sapiens
  III.3064 (AI024166)
ttttgagtgaaaatgtatttattgagcaatcaaatgaaagcactccaggcccagaatatgctcttctatacaacttattttataaatacaaacccagtctcattcaaacattcgaaatgaaagatttgcctttcaatggagaatctgcatttcaacataaaggtgtcttagttattcaatagagatgcaagatccgattaatgctgtatatttagcatttagaaagcctgaggattccagaaggctcgttttgggcctaaagatggcagagtgacggtgcagacggtgcagagtgaaa

SEQ ID NO: 9437 - DNA, 416 bp, Homo sapiens
  III.3065 (AA397964)
caagttgcccagtgatttagtatgagaatctttattgtcgtaaaagtgcctaacaatgctaggcaggaaggcaggaagcaggaactgagggcaatgtgtccttggaatggcccagagaagaggctgagactcttaccttgactctgagctgacttaaagggtctggtataatggcagttcttttactgaactgcactctcttctagtaagtataaaaaagttctactggcaataataatagcaaacatgtatcaggttcttactgtgctaagcactttaattctgttattggactttcaaaacaacttactgaggatgataccattacttttcctgtattacagcagagggaactgaggtttagagagagaaaataatttgccaaagtcatataattgttgtcttatataattgtt

SEQ ID NO: 9438 - DNA, 411 bp, Homo sapiens
  III.3066 (AA435902)
ttttgtggtgaatagtataaaagactcacttttaatcctttagacacagccagaaacaagaaggagtttacaatctggatggaaagattaaacaaaattaaacaatatcatatgacaaatgagaattagcgtaggaccatttatgatcaattgccaaatacatgaggcaggcataaattctccaagtatgctgtgggaagagaagtcactgggtcccaggaagagtttacgatggaagtcgaggaggttccacagttcttgcaggataaatagagcctgctttggcagagatgaggagtaacacatttgagacaggaaatagaaaacaacacactctgatctctgtagaaatgaaaatgccattctctatgggatgaacaattatataagacaacaattatatgactttgg

SEQ ID NO: 9439 - DNA, 75 bp, Homo sapiens
  III.3067 (AA427516)
tcacagctgtaatcccaacactgggaagccaaggtgggtggatcacctgaggtcaggagttcgaggccgggctgg

SEQ ID NO: 9440 - DNA, 276 bp, Homo sapiens
  III.3068 (AA430726)
tttgttgctttattggggaatgacatgggtccccttagagaattattaatacgacttacaggaaaaccccctttattaggcacaaaaatatcaattaggaaatactcctttagcactttgttctaaaatagtaaattttaaaatttgattcacattgcttttccgtggtagaataaatgaatatgctaagaattacaacaccctgtagtattcctggtaatagtaacaaccagaataatcagattaataatccacttcctgtactcatagatagtt

SEQ ID NO: 9441 - DNA, 275 bp, Homo sapiens
  III.3069 (AA447087)
tttcggaaggagcagtaccccagataatcttttattcaacaaatataaattggcattttattcaattacaaaagattgctagtgtagttgggaacctttacaataaatgtttggggactctcaaagccagtgagggtatgatctatcagttacaacatcagaatatatactctattttatcttgataagatttatatgctgaaatgtaaacactcctggattgaaaaaatgtatatagtgattgagagatttcttggctctgatagcattagagg

SEQ ID NO: 9442 - DNA, 453 bp, Homo sapiens
  III.3070 (AA608979)
tttcaattttacatctagtcttttattttacaaaaacacttgtgtaacatcatgaagatattggaaagggattgttcactgcaatactgtttgtaacagctgaaaatgagaaactgaagaatctagtcatagggagaaagtttaaatacagcataatgcatttgtagtctgcaatgctttgccacctgcctgacagattcctgccccatatgtgttttctgtacgttgcccttgctcatagaacccattgatctttgcagcctaggaagaatgctcacctctctgcctcaccaggaactttctggacactgatttgggattttcacagaaaagcagaagctttgagagcttaacaggtgcgtgcccccctcctcccactaagggccaggcctgggcatcagagtgggccacgtgacccttaccctggcaggacagggcagggggttactgttg

SEQ ID NO: 9443 - DNA, 439 bp, Homo sapiens
  III.3071 (AA573068)
gctcgacatagtggctagccatatagctcagtaactaagttacaggatattaaagagggagtgtgactcagagaaaagaggaaaaaatatcaccccaaaatggatgtgtcatataggacttaatagccttttactaaaaaaaaaaaaaaatgcacttttggcggggcatggtggctcacgcctgtgatcccagcactttgggaggctgaggcaggtggatcacgaggtcaggagattgagaccatcctggccaacatggtgaaactctgtctccattaaaaatacaaaaattagccaggcctggtggcacatgcctgtagtcccagctacttgggaggctgaggcaagagaatcacttgaacctgggaggcggaggctgcagtgagctgagatcgtgccactgcactccagcctggatgacagagcgagagactccatc

SEQ ID NO: 9444 - DNA, 416 bp, Homo sapiens
  III.3072 (AA884625)
tttatagtcaaccactgacaatgctttattagaaaggaaaatggtgtcgagaaatttatagggcagcaaactgcattatgcctaaccttttggacgtattaaagcatgtcatttccagtcttacagcctcttgttattcataaataatagatagcactggacacaatcatctgacatttgttaaggtaataaatataccctaagtgctgatgggtctcgcactccatgatttaaaagcacacagcagaaatttaatgtaacttaaaatgtctcatgtaattctatggatttgcagattcagttcaactcagcagatcaataagcacagagctctgttgagtgaactgttgtgctaggcatcttttattattataaagcaggaccttactttggtgaatgacacatgaactcaagtc

SEQ ID NO: 9445 - DNA, 360 bp, Homo sapiens
  III.3073 (AI147983)
ttttagcgtttccaagaaatgtctttggagtgtggactgagatgtacgtttaggaacaggtcctgtggccagagtggggagagaggggccttcccattgtcaaaatctcatcaatcaaaatgtataatagcaacattattaataaccctatagttgcattgcacttggtgctcttccaagcacttccctagaatcctaaaatgaaggcagggcagatattatatccatgttacaggttaaacaacattgtaacaggactgataacaccatgaatgagaagtcatttgatcaatgggtaagtgtctcatgagaaagagacttttagtaggcctgaaatctgtctttgggggtcatagatgc

SEQ ID NO: 9446 - DNA, 413 bp, Homo sapiens
  III.3074 (AI242063)
ttttttttttaagagacaggattttgccattttgcccaggctggtctcaaactcctggactcaagcactccacctgcctcagcttcccaaagtgctgggattacaggtgtgagccaccgcacctggcctccaaattatatttaaaataaatattaacttatttcagtatcagcagcacttaagtcattaactccctatcttgttccagactaaattatttataagaaaagaattaaatcaagaagcttatgggggggaaaaaatcccggcagtataagcagcaatgctattttttcttataccacattattgtgtaagaatgttgcatgtttgtggaggaggggagatgtttctaaatataaaaaacataccactcacttaaggtgggggggaggttcaaaaacttatttaga

SEQ ID NO: 9447 - DNA, 319 bp, Homo sapiens
  III.3075 (AI245778)
gtcagtcattgtttctattggcacaatgggaggccccgcccctcacggcggactcatcgcatgggggagggggctccgcgggttgccggctaaccgtgagagagtccgggaggtacactatacggaccggcctccaaaggcggaatcgataacgagctgcagcgccgggtgcagaggacgcgggcatcccgaagcccaggaagaggtcagggccgggaccccagaacgctccacagggtgcggctcccgcgatggggtggatcctggttctaacaggcgaggaactcctggccaaggcctctggcccgccccgaacggt

SEQ ID NO: 9448 - DNA, 485 bp, Homo sapiens
  III.3076 (AA620765)
tttctaggcttaggagaagataaactccagtaggagggccttatggttatcttagcatttcccatccactcagtaaaataagcacctggaataagcctcttcaaagctgcagcccaggtaaagacacaattattaagacagttctgacagaggcagacacactgctgcttggcttctgaaatgtaacaatgacctaattctgtaaatgtttttctttaagaatcatctgaattcaagatttgctttaaaatactacagaaaataattatacggggggcggggaggacagataaaacaagaagtggcaggctgttgataacagttaaagatgagacacgggaacactggagtgttattttactactctctgtacatatggttaaattttttcatattaaaaaaggttaaagagaaaattatctttggaaagtcagcaaaaatataaagagcattatctgaaaatgtgcactaaaagagtaacatga

SEQ ID NO: 9449 - DNA, 212 bp, Homo sapiens
  III.3077 (AA031370)
aaattaactcactatggtttttcacctgggaaggaaacaaattacgtactagagggcattgactggttaaaaacttgtgtatcccgggaaggacctgcggtacaggagtcagccatgtctgtgctgtgtggaaccacctgatgacatggttaacgaggaagacgatgtgttgacccggctgccgtttgaggactttggtcacccagacccag

SEQ ID NO: 9450 - DNA, 505 bp, Homo sapiens
  III.3078 (AA031371)
aagaaaagacactcgatgtattctaagaatataagtcatttaatactgttaattttatagcacaaaataaaacaagctatgatccccaaaaataattttaaaagcttacacagaaaatattattgcctgaagtttatgatctttaagttacaggtcaaaagagttttatgttgttgttgttgttgttgttgttgttttaaaacacacagtgaagaccgtctaagaagcaaggccactgttcctcctgtagggacaacgatcctgtctcagagacctgtccttctgctcctttagaaaacagaaccagcacagcgtccacaccgacagcagttactaggggcatagtcctccggtcgcagagggtggagttgaggcagagctcagtggtgtccacagaaagcattagtcttaggtactgtgttaaaacaatcaagaattcattcatggtttaagaggttaataaccataatattaaaaggattaattataaacacctgggcaaaaa

SEQ ID NO: 9451 - DNA, 407 bp, Homo sapiens
  III.3079 (AA046428)
  misc_feature (16)..(16): n is a, c, g, or t
gagacagggtctcgcngtgtcgcccaggctgaagtgcaatggtgtgatcatagctcactgtagcctcgacctccagggctcagcctcccaagtagctgggactacaggcgcgcaccaccacgcctggctagtttttaaatttcttgtagagatgggtcttgctgtgttgcccaggctggtctttaacgtctaggctcaagctcaagctcttgccttgccctcccaaagtgctgggattacagacgtgagtcaccacgcctggccggtaatttctcattgtgaattgattgggtccctgtaagtcacagagcctgtcctgagtcccttcatctgaatgagggtgaaaagactgagttttctgtcccgggtgacaaggacagaatctgtcttgtgaaacaaccagaaga

SEQ ID NO: 9452 - DNA, 468 bp, Homo sapiens
  III.3080 (AA056181)
  misc_feature (302)..(302): n is a, c, g, or t
  misc_feature (365)..(365): n is a, c, g, or t
  misc_feature (454)..(454): n is a, c, g, or t
  misc_feature (468)..(468): n is a, c, g, or t
cactgccccgctagacggctttcttaggggaattttcttctggttgtttcacaagacagattctgtccttgtcacccgggacagaaaactcagtcttttcaccctcattcagatgaagggactcaggacaggctctgtgacttacagggacccaatcaattcacaatgagaaattaccggccaggcgtggtgactcacgtctgtaatcccagcactttgggagggcaaggcaagagcttgagcttgagcctagacgttaaagaccagcctgggcaacacagcaagacccatctctacaaganatttaaaaactagccaggcgtggtggtgcgcgcctgtagtcccagctacttgggaggctgagncctggaggtcgaggctacagtgagctatgatcacaccattgcacttcagcctgggcgacacagcgagaccctgtctcaagagcaaccanaaaaaaaaggcggn

SEQ ID NO: 9453 - DNA, 314 bp, Homo sapiens
  III.3081 (AA402433)
gtagggggccctccccacatggccctcgctctgtctatgcaggggcccaaagcccgcactttgtccgtgtgtcttagccctgtggttttgtctgtgtgtgtgtgtgtgtgtgtgtgtgtgtgtgtgtgtgtgtgttcttggtgctgtggcctgtgtgtctctgtgcctatgtggctgtgctatggtttctatgagtctgctccatccatgtgtctgtttgggggtctatctctccatccctctgttggtgctgtgcccttgctatccctgaaagagggaggactccgctgcagctccaccaataaacttgtgtc

SEQ ID NO: 9454 - DNA, 293 bp, Homo sapiens
  III.3082 (AA411852)
tttttgcagtgagacacaagtttattggtggagctgcagcgtagtcctccctctttcagggatagccaagggacagcaccaacagagggatggagagatagacccccaaacagacacatggatggagcagactcatagaaaccatagcacagccacataggcacagagacacacaggccacagcaccaagaacacacacacacacacacacacacacacacacacacacacacagacaaaaccacagggctaagacacacggacaaagtgcgggctttggggcccctgcatag

SEQ ID NO: 9455 - DNA, 386 bp, Homo sapiens
  III.3083 (AA461119)
ttttttaataacgcaaacaccttttattcacatttgctgagtagcaattacagtgttttcttcattagttttccaacactggtaatgtaattatgatgcaattactaacaatataagtaccaatactttgaccaacaataatcacaatggtttataacaactgaactcaaaggccacgttgatttttccacccacaacttgattctgatttttctagagtcattcataagaacaagaagtagtggatcctttcttcctccttagtatctgaaaattctgaactctgaagagaaattccatttggtttgtcattttcacctctgtgcatttcggcagctcttaacttttcttcaattctttactctattagagtgacttttctgcct

SEQ ID NO: 9456 - DNA, 392 bp, Homo sapiens
  III.3084 (AA461436)
atcctcttgaaatctgtaagaaaagtaatgcttgtttaaagatagtgccaaatcttgctgaagaatgatcttgcagaaatctgattgtgaagaaggaaatctaaaaaggccaaacaagcttcagtagagataacaccaggaaagcagttactcaaacaagactgaaagagaagcaatcaatcaataagaacaagtcccaggacttcagactaggctcagaatctatgacacattctgaaatgagaaaagaacagagccatgaggaccaaggacacataatggatacacggatgaggaagaacaagcaagcaggcagaaaagtcactctaatagagtaaagaattgaagaaaagttaagagctgccgaaatgcacagaggtgaaaatgacaaa

SEQ ID NO: 9457 - DNA, 366 bp, Homo sapiens
  III.3085 (AA781421)
tttcaatgcagttggtctcgtggtttaacgatgtttacagaaaacacctgactccagtgaaatgtaattcacgagaagagccagagttcatacaaccacaggaccacagtcacattttagtgaatgtattcctagaggtctctggataaaatccttgctgataatgagaacagtggttctcagggccaatcttcagacttgcttgaggctcctagggcttccacccaatgtatctgtaggcaggtccacacacacattatgcaaagagagatctttgagatgaaccctgagttccgtgatagcagcagcatgaggaattctgtgtatgcgcgcggggcgggggaggcaggcgtggccctgagacgc

SEQ ID NO: 9458 - DNA, 367 bp, Homo sapiens
  III.3086 (AI142688)
acatgttctcgtttatttgtgggatctaaaactcaaaacaattgagcccgtggagatagagtagaatgatggctaccagagtctggaaagggtagttgggggtggagaaaatgagcgatggttaatgggtacaaaaatatagttagatagaattaataaaatctaatatttgataggacaatggagtgactacaatttattatacatttaaaaataactaaaagagtataactggattgtttgaaacatgaagaaagcatcagtgcttgagctgacggatactccatttaccctgacatgattgttacacattgtatgtctctatcaaaatatcttatgtaccccattaatatatacatctaatagg

SEQ ID NO: 9459 - DNA, 434 bp, Homo sapiens
  III.3087 (W85868)
  misc_feature (301)..(301): n is a, c, g, or t
ctcctttctcatgctaatttgctcaaaacaaccctatcttattcttgttctagctgacattaccttatgcattattaatcctgaactgaagtgtgaaaatttggaagattaattatatggttattctagatttaacctttatcaagctcagaaacttttcttatattcttagtttgacaaaaacttttatcataactaagtagtgatctctatcaactgctttttctgtatgaactgaggtaataatagacttttagtggtggggtcttactatgttatccaggctggtatcaaactcctnggcctcaagtgatcctcgcacttcagcctcttgagtggctgggatttacgggcataagccactgcacccagctgatttcctgatgttaactcacctttaaatttcctggaataattctacttgatcatgatat

SEQ ID NO: 9460 - DNA, 406 bp, Homo sapiens
  III.3088 (W85952)
  misc_feature (257)..(257): n is a, c, g, or t
  misc_feature (320)..(320): n is a, c, g, or t
  misc_feature (355)..(355): n is a, c, g, or t
  misc_feature (361)..(361): n is a, c, g, or t
  misc_feature (393)..(393): n is a, c, g, or t
gttaaaaccgcagccaaagccctcttcttcctatttctcccgaaacccagatccagatggttttacaaatgaactcttccaaattttaagaaattgttaatgtttcccttattaagatattgtccttaaaaaatgagcttattctaagaggcttatgtaatcttgactccaaaatcaaataaagacatttagtaaactcattttaaaatttaagtgagggaataaaagaaaagaaaaatagcattccttttgatttngaattaattctaaataaaatgatattcagtccgatcttaagtgtgttaaaaataatatcatgntcaagtaagaattattccagaaattttaaaaggtngagttnaaccatcagggaaaatcagctggggtgcagtnggcttgattgccc

SEQ ID NO: 9461 - DNA, 442 bp, Homo sapiens
  III.3089 (AA397601)
gatacttccaagcaagcaggtgttcttttcagaagccagaagctgataacctgggctttctgatctaaccccagcccaaattcattgcaatggaggaattggggaggagattcttcctactgagaagtgggtgccaactctccctttcaaatttgttcatcaacaaactaaaggggatgccagaaatgtctggagcaatggaagaaccactggaataatgctcctgcctgattgtatctacttaacccactctccaagagccagaatcagatttcaaccgtatggaatcatctacaatgcagcagatgggtttacaagtctcttggtctcttcatgaagaaggcgcacaatcgtgtcccaagtccttgaggacttcacagggtgttctagtgtcctgagaatatacctgcctaagggcgtatctgttagggagactcccatg

SEQ ID NO: 9462 - DNA, 363 bp, Homo sapiens
  III.3090 (AA435833)
ttttttgaattagggatgtattgtgtaattcataatcagggagtttgggtggtgcagaggggtgattccaggaacagaggtccacagacagccctctgtgagaagggctgagaagaccctggcacagctggagggacaaacacactctcttcacctcactcagcctcttccctcggctcccctccctcatgggagtctccctaacagatacgcccttaggcaggtatattctcaggacactagaacaccctgtgaagtcctcaaggacttgggacacgattgctgcgccttcttcatgaagagaccaagagacttgtaaacccatctgctgcattgtagatgattccatacggttgaaatctg

SEQ ID NO: 9463 - DNA, 526 bp, Homo sapiens
  III.3091 (AA521472)
tttttttttaataaatattatattttcgttagtaaatttttacttacctggaaggaagtagcactagaaaagctctattgaagtctttcctaaaattctcgtcttcctcaggaacatagctattttaaatgttgcaatagggaaaacaatacttgggaacccaggggggaaagtgagagaggaatagtaaagtgtgatacaatgagagtttcattgtattcctatgggaagtactgggaatttaacaattaaccattccacaattaaccattttctttttttgtttatgcagacacatttcttagtttacctaaacacagtaaagagtacatcttccttttgaacatcttttcaactagtactcaaaatccttagaccaaccctgaaacagtagaaccaaaatcttcatattaatacattttactctcattattttcaaatatgtctttgtctctaaatcatttcctaggttattaaatcaacccaggtttcggtcccaagggttccttgggaggttttattgaac

SEQ ID NO: 9464 - DNA, 431 bp, Homo sapiens
  III.3092 (AI079293)
tttttgacacaccataatgaaggtttatttcatcatcatttcacaatcaaggttggttggagggggctttgatccatgcagtcctccagggccccaagcatctgctatcgagcggttctgccatcccctagggccttggaggcctccactggatcatccatgtctgaccagcaggagagagaagagcaagagtgtggaggatgccacaggcagtttcatggcctgagcttggatgtggtggatcccacttctgccaccttcactgcttctcaggtcacatggcctcacagacctgcggcagaagctgggaaattcagtccaggtgagcatcaccagccactggagagaattgggtttggaagtggcgtaggaaggggagatgataagtgcatttgtttcaccaagagtggtttaagaacattatcttcttc

SEQ ID NO: 9465 - DNA, 334 bp, Homo sapiens
  III.3093 (AA481025)
tttttttttttttttaaaagtcaaaattggtagctctgcacagtttactatttgccattttagatctacaaatttggatcaatatttagttgtgacaaagggaatcaactctaggtgcatttgctccactcaactggaacggctagattctatctttaacacaattagggatacatgtcttaagggcagatgtggacattagttacttctaatgtgcgcagatagacacatattatttaatttcttttccacttatatccacaaaacttatactacctatgtgcaatttgcatatatgagatatactttgggtccacaaaagagaaataatttc

SEQ ID NO: 9466 - DNA, 178 bp, Homo sapiens
  III.3094 (AA481077)
cacgcagggggctccaagcagaagtggatgcagatgagttcacttgggactgttgatgctccaagtacgaacactcactctttgttatgcccttgaatcaggacaggagcatggggaaagctgtctcatgaaagaaacccaccagtgggacttgaatgtcactgagtagaacagatgt

SEQ ID NO: 9467 - DNA, 482 bp, Homo sapiens
  III.3095 (AA405043)
aaactcaaggatttaagatgattagacagatggtcaccaaaattagtccacaagtagaagaatttacagcaccatgtcatacatagttcatcctaatttctaccaacttcactgggcaacaatcaatcgttttatttccctcaatgactcttgttatcttcagacctgaaactgattcggagaccatggggcccacaaacctaatcagagtaacatgtgttcattgagtacacatgtagacatgagaatctcactttccccttttttctcttggtaaaatgttcacaaatgttcaggtaacacctgctactccagccattcaggccttaaatctgcagctctacattttgtatccaggtcttgagatttgggaaatagaaaatttttatctaaaaaatgaaagtacttttggttatcaaactcagacattgaaatgaacgtgcagttatgtcgttcccccctttaaattatgtatcatcgct

SEQ ID NO: 9468 - DNA, 447 bp, Homo sapiens
  III.3096 (AA406213)
tttttttttgtcagaaatttttatttatttaaagaaataacattggttattgattagatatatatcattatggtttagggtatgagatatagtgtccaatgtggtattattagtttaatatatatctacttgtggcaatagtgaacagtttcaagcgatgaatacataatttaaagggggagaacgacataactgcacgttcatttcaatgtctgagtttgataaccaaaagtactttcattttttagataaaaattttctatttcccaaatctcaagacctggatacaaaatgtagagctgcagatttaaggcctgaatggctggagtagcaggtgttacctgaacatttgtgaacattttaccaagagaaaaaaggggaaagtggagattctcatgtctacatgtgtactcaatgaacacatgttactctgattaggtttgtggg

SEQ ID NO: 9469 - DNA, 508 bp, Homo sapiens
  III.3097 (AA431428)
tttgcccgtggactcaatcttttattttcttaaactgtacacaaacgtacaatactttaacagcaagtctatgggaaaattgtttggttttaaattattatgaaacagaatctaaggggagctttattaaataaacataaagatgaggatttaaggatacacacctgcattctatcatagtcatttttactctaccttctgggtgtgtaaggatggaaaagacacatcaaaccgaataaacaaaatccattcataccctgaaacgttggcaggccactcaagggactgctcagaacgtccacctcatctcagatggcctcaccgtctaataaaattaaaactgatctgttggcctctttggttccaaaattatgtataatacatttaactgtaatccctttttttttttttttgccggccataaaataactttttttcaaatggccggttccgactaatccaggcaccaaatccgtgcaacatttaaaggcatcattcggcttaaaaa

SEQ ID NO: 9470 - DNA, 415 bp, Homo sapiens
  III.3098 (AA431832)
cagacctgctgtccctaccgctgcgcacgcaggggtaccaagtgtttgcgcacggaggccccgcgctgggacgcccctttgagggacccagccttgagacagctgctgtgagggacagtactgaagactctgcagccctcgggaccccactcggagggtgccctctgctcaggcctccctagcacctccccctaaccaaattctccctggaccccattctgagctccccatcaccatgggaggtggggcctcaatctaaggccttccctgtcagaagggggttgtggcaaaagccacattacaagctgccatcccctccccgtttcagtggaccctgtggccaggtgcttttccctatccacaggggtgtttgtgtgtgtgcgcgtgtggttctcaataaagtttgtacacttta

SEQ ID NO: 9471 - DNA, 333 bp, Homo sapiens
  III.3099 (AA504504)
agccccttccctcctggctgtgagccaggcttctcaaaaagccacctgccgccagccaagtcccactgagggccctagtcaggtgcattctaacgagctgggggcagtagtgggagcccccctgggagctgacggggtgttgtttgtgcaagcatttagatcaaaagccccgaaaaatcaattgggaaaagttaacgagcaggctaatgaaagcagatagtcgctaaattaccctcctggagcctgggctagtcagccagagaggtcggggtgaggcccgtgctgtttgcttttctgcagaatcccctcctgcctgcctctgataggaggggc

SEQ ID NO: 9472 - DNA, 293 bp, Homo sapiens
  III.3100 (AA504586)
cggcacctgtacctccggggtggcgctggggttggctccatgaccaagatctatgggggacgtcagagaaacggcgtcatgccagccacttcagccgaggctccaagagtgtggcccgccgggtcctccaagccctggaggcgtgaaaatggtggaaaaggaccaagatgggtaagcagggtagagggggctgcattgatggagtagccttgaggcccggtcatcaattccccaacgaatggtcctgcatagtctgcccagcccctcaggcccctcctatcagaggcaggcag

SEQ ID NO: 9473 - DNA, 310 bp, Homo sapiens
  III.3101 (AA528629)
gctcgactttaaagaccacttcataataagaaaggcagcagaacattcagtagggttaaatgaagtccttttacatacacttttgtttttatcttcagctagatttttaattaagtactggttatgatgtatatattttggtgctagttttatttggggttgctttttttgtttgttcacaataacctagtcatatgatagttacacattgtggttatgattgcctgtgaacaaaccgtacatttggagggactatttgcaatattaataatgtctcataaatctgtaaaaaaaaaaaaaaaagtcgacg

SEQ ID NO: 9474 - DNA, 428 bp, Homo sapiens
  III.3102 (AA405123)
cagcctcctctggatcttttctggttccttcgctcctagaactgtgtctgatggcttatgaaggcaaatgacaaatgtttgccatatgcacatgtatgtcatgaatgaatacatccaggttctgacttcctcggggcaacctctactttctcaatgcccctcttaagatgggggtgggggagggtcctcctagaactgaacatgatattccaggtgtgatctaatacatttaaatgtccaaaagctctttcttccctaaacgttcctttttaaaagctactgttctcaattaatgggtgtctcatcttcttaagtatattaataagaggtattttgatgtttccctccattctgtggattacctcttgattctctggattctttgtgattccgttttgttttaaggatgttctcaggtgtctggtgat

SEQ ID NO: 9475 - DNA, 450 bp, Homo sapiens
  III.3103 (AA406203)
tttttttttggaaaggtaggaaagctttaataaaaactgaataaaaggtataaaaataaataaattctagcttatcttctcttgaggtcttctgtacttctttgcagatgtcacaaggtttggggatatagaacatgtgatgatgacagagctgggtccatatgaacttttcaaatagagggaatatgaagctaatgagatgtgcagaatcctggaaggacttgggtattaaaggccttgggtatctgaagacatgggtgtgaggaaggcctgcacagagagcttccaatcagcattttagtgcctcatcattaatttggacttataagcaaggatcaccagacacctgagaacatccttaaaacaaaacggaatcacaaagaatccagagaatcaagaggtaatccacagaatggagggaaacatcaaaatacctcttattaatatact

SEQ ID NO: 9476 - DNA, 543 bp, Homo sapiens
  III.3104 (AA501869)
ggtacgacaaaaaaaacacaggagcttcttcaggaggagacacgccagaaactaaacctgagcagtcggatccggcagctggaagaggagaagaacagtcttcaggagcagcaggaggaggaggaggaggccaggaagaacctggagaagcaagtgctggccctgcagtcccagttggctgataccaagaagaaagtagatgacgacctgggaacaattgaaagtctggaagaagccaagaagaagcttctgaaggacgcggaggccctgagccagcgcctggaggagaaggcactggcgtatgacaaactggagaagaccaagaaccgcctgcagcaggagctggacgacctcacggtggacctggaccaccagcgctcggtcgcctccaacttggagaagaagcagaagaagtttgaccaagtgggtcggccacgtgtcgtttcctcctggcagagctcttgcttttgttcgtttggtttaaaataatcttatttaaaggcatttgatgtgatacatgtttatatcaaattggaaaaggga

SEQ ID NO: 9477 - DNA, 411 bp, Homo sapiens
  III.3105 (AI040691)
gtagataccagttagcgtgctagcttgagggagcagaatctcagcagatctccttaaagaaaagccaatgctttaaaggagatgttatctggaaaacatgcagacactgaaaatctagtttatgcagtatgatccctggtatttggcaagggctattccagaagtcaagatgggaaagggagaaggaagcagtgaggaaggaagaaatcactgaacttgagtctcatacttaatttgaccttaaagactatgaccttaaagacaatgtccagttagattgtccttccactttagacaagtttatcaagttcaattcttctggataaaaaatatgtatcactggaaatgaggttttatacttgaattcatttcatttttaagcatatggcacttaaatattactacaatata

SEQ ID NO: 9478 - DNA, 531 bp, Homo sapiens
  III.3106 (AA834967)
tttagaacaaatacatttattgtttgtcttcttagatggttgtggtccgtgatgccccaaaacaattacaacagtaacatcaaaaatactaaaggcagatcaccataacagataacaataataataataataatagtaataaaagtttgaaatattgtgagacctaccaaaatgtgacacagagacacaaagtgagcacatgctgttggaaaaatggtgccaacagacttgcttaatgcagggttgccacaaaccttcaatttgtaaaaaactatctgtgacgtgcaataaagcaaaggacaaaaaacaaggtatgtttgtatcaatttcacttcctaatactatttatgtcattgattagataactctttaattcaagatttcccatatgattacagtatctcatccccttatctttgtttatttttaccatcagtacaatttttcaagacaacataaacagcactgtagttcacattaaccatagtcctgctaagactattgaaaaaatccagtctaatgctcagtctt

SEQ ID NO: 9479 - DNA, 343 bp, Homo sapiens
  III.3107 (AI183387)
  misc_feature (282)..(282): n is a, c, g, or t
gaaggaacaaaagcacagatttattgaagcaaaagtacattccagaaagcgggatgaggctcaagcaagtgccctgtgtagaaaatctggggtttaagtaccctttagaggtttcctatttggttacaccctatgtaaataaagacttggcctgccaccagtcagaggctgaagtgaatgctcctttgtctccagaccctattctctggcctcagtgggatcctatcactacaaaaatttattttttatttttcttatttttttttttttacaacagtacanctgatctacaaaaattttaaaatgagccgggcgcggtgactcacgcctgtaatcccagcac

SEQ ID NO: 9480 - DNA, 239 bp, Homo sapiens
  III.3108 (AA035080)
  misc_feature (226)..(226): n is a, c, g, or t
agagaacttaatgttcaaaatttgctttgtggaggcatgtaataagataaacatcatacattataaggtaaccacaattacaaaatggcaaaacattttctctgtattcattgttgtatttttctacagtgagatgtgatcttgccaaagccaccagaccttggcttccaggccctcctgtagtgagttgattgtctgcacttgccttgcccaatagccagtaggnacagcttttgccc

SEQ ID NO: 9481 - DNA, 420 bp, Homo sapiens
  III.3109 (AA035497)
  misc_feature (220)..(220): n is a, c, g, or t
  misc_feature (274)..(274): n is a, c, g, or t
  misc_feature (403)..(403): n is a, c, g, or t
aagaaagctaccaattcttatttgtatgagaggaaggtgttaggcatctgaagtaacccaagtgattcttatctgcagtcagggttgaggacccttgtttaaatatgctttttacataatacatcaagcatgttccagcatttttctttctcttctgattgatttcatgcctaataagttttacagtttatattgtaaattatttaaacattcatcagcnggataaacatttctacttgattttttaaagattaaatgatattcatactaaganctaatcatgcttcatttagctacaacaattttcaaatactcaaatcaatcaccactttggactggaggttatatatatttcagttgtaaacaagaatgatccagaatctgaaaataagggtgtggggcnaaagctgtagcctacct

SEQ ID NO: 9482 - DNA, 472 bp, Homo sapiens
  III.3110 (AA098880)
  misc_feature (18)..(18): n is a, c, g, or t
  misc_feature (472)..(472): n is a, c, g, or t
gttaaagtttgatgtttncagactctaaagcctatgtttttgtaacttaattggactttcagagtgttaaattatggcttcagagtttggctctacctaaaatttagttagatgccaaccagggagaaattaaacctaatccttcaccccaaatatcagaggttagacaaacccatgttaattggagccttatggttattcatattggaggcaatagctttatttagaggaagcccaggacagggccgtctgggatgctagttctggaaatgcagaagcagccactgtatccctgcccaccccctccatccagcccttttggtactactcagtattgttgacaacatttgggaatcataaagtaacataggaccagtaagtattaagagaatgattctccgttagaattggacctcagccgattttgagccaaaatttaggaactattcagaagacagtttctttcttttgn

SEQ ID NO: 9483 - DNA, 323 bp, Homo sapiens
  III.3111 (AA099225)
atttcattcattttataatactttgttttaattattatttagaacataaatcaatgtaaaaatgtgggtatatacatacaaaaatacataaaactaaaaagcaaaaaaatggcatttaacatttagccataataatatataacatactacaggtcacatgtacattttcattcatgataacttagtatgcctaataattatgttaaaacaatattcttaaaatgcttatgtatacaatggaatcttaaaatgtgtgtgattcgaaccatttacactgtcttaagcactcaaaagaaagaaactgtcttctgaatagttcctaa

SEQ ID NO: 9484 - DNA, 422 bp, Homo sapiens
  III.3112 (AA279521)
tgttaccaatctgaagtggctgggggttggagaaagaaaaaaatgaaggggaaaaaaaggaaggagaaaagaaaaaggacagaaagttataaccagagtacagacacaggcatttagtatttctgaagaatagtaaggtccagtatctggcaatgggaataggttgctgaaacaaggtgtaggtgatgactgctggaactgatgtatgatgaagtgagaggtgacaatgttgccaagacattatatccagacactcagattgccaaagataatacagacatgaataggataagaaagagttggtcaaatttcctactggatgtgggtgaatgaccaagatatcaattaaggatagaagacagacaataaaatgaataaaatataagataattccatgatgaaaccataaagaaaaatgtttt

SEQ ID NO: 9485 - DNA, 500 bp, Homo sapiens
  III.3113 (AA279522)
gttgtttgtgctttggcattacatctaagaaatcagtgtctaatctaaggttcatatagatttatggctgtgttttcttctaagacttttatagttttagcttaccctcaactttttaacagactgcttcctctgcatgttctgacttttctctagaaatatggcttcttattcagtccatgtgctacaagagtggatgcagtgcttttgagcttttatatttttaactgcataggaaaacatttttctttatggtttcatcatggaattatcttatattttattcattttattgtctgtcttctatccttaattgatatcttggtcattcacccacatccagtaggaaatttgaccaactctttcttatcctattcatgtctgtattatctttggcaatctgagtgtctggatataatgtcttggcaacattgtcacctctcacttcatcatacatcagttccagcagtcatcacctacaccttgtttcagcaacctat

SEQ ID NO: 9486 - DNA, 500 bp, Homo sapiens
  III.3114 (AA393205)
ctctgcagtgggagcagctctcctgccacagctcctcaccccctgaaaatgttcgcctgctccaagtttgtctccactccctccttggtcaagagcacctcacagctgctgagccgtccgctatctgcagtggtgctgaaacgaccggagatactgacagatgagagcctcagcagcttggcagtctcatgtccccttacctcacttgtctctagccgcagcttccaaaccagcgccatttcaagggacatcgacacagcagccaagttcattggagctggggctgccacagttggggtggctggttctggggctgggattggaactgtgtttgggagcctcatcattggttatgccaggaacccttctctgaagcaacagctcttctcctacgccattctgggctttgcctctcggaggccatggggctcttttgtctgatggtagcctttctcatcctctttgccatgtgaaggagccgtctccacctcccatagttg

SEQ ID NO: 9487 - DNA, 411 bp, Homo sapiens
  III.3115 (AA416930)
cttattaatacagtatttatttgtcttttctctgtcaaaccctgagccaaccacgttccccaggctgcctggggaggtataggaaaaggaacacacggggccaaccagacgcgggagaacttatgggaggtggagacgggctccttcacattgcaaaagaggatgagaaatggtaaccattcagactaaaaaacccccatggcctccgagagggcaatgccagaattgcgtaagaagaagacctgttgccttcaggaaaggtttcctgccaaacccattgatgagggtcccaaacccagttcaaatcccagccccgaaccaggccacccaaattgttgcaagccccagttccattgaatttggtgccggggtcaaggtcccttaaaatgcccctgttttgaaaactccggc

SEQ ID NO: 9488 - DNA, 480 bp, Homo sapiens
  III.3116 (AA405234)
gatggctgctggaagtgaatagctcctctggaagatgagtggtgtctcctgaagctgagtatctgcgtgtctgtgaccttgtagtttctacttccagatgtggtcaagagaactgtgaatgtgtgtgcaccagaaacatccactgggacattcatagcacccttctcatgacatctccactccacaggccacccaaaatgagtgagagagtaaaatgtggagtgtctgcgcactgggatgctccacagcaatgggaatgaacagcctgctcagacacacatcaacttgggttgcctcagggaccttacgccaagcaggagatgccagacacagagtccatcctgagagagtctgttcctgtccaagctcagaaacacaggaagccacctgtgctgtagcagcacacggagatgcatcctttctggtccaccccacggccctcattgcagtcagggatcctctcccagaaagtcctgctgc

SEQ ID NO: 9489 - DNA, 479 bp, Homo sapiens
  III.3117 (AA406177)
tttctgttataaattacccagtctcgggtatgtctttattagcagcctgagaacagatgaatacagtgggttattcacgttatctcctgaaatattcacttccaggcccttggaaaagctgagctgcacatcatgtgatggttagaggtgtctaatggtcattagaggacacagagcggtgccaccctgtgtccattgaatgaactgcccacaacaggccctcccagtgcctcccctgccaggctcagactcatcatcttgggaaggacaatgtgtcccacacggccctttccttggggccttcctcaccgtctgtcttggatgtagcctcagccatcagtgccagtgttcctgggatgcttggcaagggcagggtcctgggttgcatccagaacagggatcagaactgcaggtgacgcaccttggagtctgcagcactccaaggccagctggttcctgcacattccaggctcccagag

SEQ ID NO: 9490 - DNA, 528 bp, Homo sapiens
  III.3118 (AI074447)
tttttttttttttcgtcctgcgtctgctttattttattcagcataatgttttcaagatgaatatcaaatattttttataaaaagtatacattttacatgcaaaatttattaagtttaacactgcaatcaaatggcaaagacatcatcaaaaacatgtacgaagcaagcaccttttgctggcatcacttcattggatcctcacagctgctctgtgagatgggctttacagatgaaagaatagagcccagggaagataagtgacttacccaaggacatgcagcttgtaaaccaacaagcaaacatgcacattcaggtcttctaatttccagtcctttttaatttacaggatcagctgcctcccatcccatttataaggatggtcaaaacaaaaagataccaatgttggacagcaagtcagggaaggagctagaacttgataaactagcttttgtaagtgataacgggagggaagtgctgggaagggcgtggtccctttaaataacaggaaaggagggaaaggaagtgctg

SEQ ID NO: 9491 - DNA, 377 bp, Homo sapiens
  III.3119 (AA669503)
gaaactctggggctgccatatggttggataataattatagacggaaaaaggaaagtgacatacagaaaatggagatgaggtatagaaatagccagattggttaaggtgtggcacttgccttatttgaacatggtttgaacagttggccacttgtgatgggccaaaactctgtggttggtataagagaaggttatagtctatttacacgtccagttaggccactaggtgaggagaaacctttaggcctaaattaaaatatgtaaggaggcagctttaggctaaacttaatttaacaattctcttggccatgcgcggtggctcatgcttgtaatctcagcactttggagggccaaggcaggcggatcacctgacctcgt

SEQ ID NO: 9492 - DNA, 207 bp, Homo sapiens
  III.3120 (AA398388)
tttaatggttgttagtatatttatagttgtgcaactatcactgatacagaatggctgggttcccagctaaaccccacccttaagcctggaatcacggccttgaaaacagctgaccctgtttttctgcccaaatgttgtttttttggcctgccacgcccctatcctgtggccataaaaaagacttcagctggcagagcaacacaagcg

SEQ ID NO: 9493 - DNA, 364 bp, Homo sapiens
  III.3121 (AA399511)
tcggggacaccggccgtcactcctctctggcgggaataggctctgtgcgggcctcacagcagcgtccaaccctgcctctcggaccggggtacctgtccggcgtccaggaagaattaggtcatatgaacggattgaagagtagtgtatgcggggatttgattgagtggtggctcctggtgggatgggaactggaaagcagacggtgaaagagggtcatctttccctgaagccgcaccatctgaagttagctgcgtctatctgtagtcttcaacactcttgctgcttctctgctcaccgctcagccgcttgtgttgctctgcagctgaagtcttttttatggccacaggataggggcgtggcaggc

SEQ ID NO: 9494 - DNA, 444 bp, Homo sapiens
  III.3122 (AA423956)
tttaaggcaagaataaacatttattctctcacagagtttctcagggtcaggaatccaggagtggcttagctgggaggttctagcttgggatctataaagggattgtagtcaagaagttggctggacatacagtcttctgaaaatttgactaaggctgaagaatctgtttccaaggtggcgctctcatggccgatggagagtcttcagttgcttatcacagggacttccttgcagagctgtttgagtgcccctctggcatggcagttggcttcttctgcaatgagtgatctccgaaaatgcacgctttcctggggcagcaacttgtttctctccgattccaaaagaatgaaataaaagaactccaaaaaaggaatgtagcaaggacatactttctaaagtgcaaattcagtggtttatagtatattcagagttgtgcagcaccaa

SEQ ID NO: 9495 - DNA, 442 bp, Homo sapiens
  III.3123 (AA437063)
ggcccggcagtgtgtatgtggggataactgtgaaaagatataggacttcatttggagtgataaaagtcttcaaagttgattgtgttggtggctgcacaactctgaatatactataaaccactgaatttgcactttagaaagtatgtccttgctacattccttttttggagttcttttatttcattcttttggaatcggagagaaacaagttgctgccccaggaaagcgtgcattttcggagatcactcattgcagaagaagccaactgccatgccagaggggcactcaaacagctctgcaaggaagtccctgtgataagcaactgaagactctgccatcggccatgagagcgccaccttggaaacagattcttcagccttagtcaaattttcagaagactgtatgtccagccaacttcttgactacaatccctttatagatc

SEQ ID NO: 9496 - DNA, 443 bp, Homo sapiens
  III.3124 (AI125516)
ttttcgggcaggcctagagtttactgctggtgactcaacatggcgggggtctttgcagggcaggggcccaggctccagtgtccaggcagggcattctctccatagccctaaccagggtgggaactgctcgccaaggggagactcctggcctgatgaacccttatcaggcactgtcctggctcagggtgtctcctggggctcccggctggggctgggccgagcaccaagtggctggtctccagtgagcaggacttgggggcaggcctcgggtgggatgcagtgggcctcatgctccaccaggcctgcagggcactggcagccgggcacgcagggcctcacgcagtgggctgccagctcccccagggggatatgctgattgaagcaggtgcggggacagggtgggccgcactcatcaaacacgaagccacgctccagggggcagc

SEQ ID NO: 9497 - DNA, 366 bp, Homo sapiens
  III.3125 (AA954050)
tttaggtcttaaaacaacataagtttattcttttacagttctgaaggtcagaaatctgaaatgcatttttacaggactaaaatcaaggtgtcactacagccagttacatctgaagacttgagcagaaaatccatttcttatctcttccaacttctagaggttgctggcatgcgttacatcctggctacattctcccagtctctggcttccatggtagcatcttctactacctctgcctctgactctcctgtggctctcttataaggactgttgtgattgcataatccaggatagtctccccaattcaatattcttaatcacatctgccaagtcctttttgccatataagggaatatttatgagttc

SEQ ID NO: 9498 - DNA, 514 bp, Homo sapiens
  III.3126 (AA947756)
gcaatatgtgtggtactttattttttatgttctttttttaaatctggggtattagtctgtgctttgggagaaatgcactagctctgcaattcccagctgggcaagtgtgtctctagtatctccacgcaactgatacactggtcccttccccatgtcctctccaggcactgtgggtcttgggaagtggttcttgtcagcccgagggacactgggttctccactgtccttcacaggaaattctagcttcctcagcctttgtgccaccacacttatagcttcctgtgcaaagtatttgacatccatgtcttcatcttgacctaacttctgtagtactggcttcacttctccctgtaaagcattggtatctagaattggtccaatcttttgtagagatttggccacattgaagcgaacatttgctacttggtctcctgccatttttaatacgaaggggcagcattggttagtaggttattcctgaccacaggcctcagaacgtggcattatgcagaat

SEQ ID NO: 9499 - DNA, 415 bp, Homo sapiens
  III.3127 (AI123175)
aaaagatgaaatcaaacagaatagaaaatagtgtgcacctcctgcaggaaggccactggtttgtgctacacccgcacgtgagcctgtgcgagacaccatcagctgctcccaactttccttttccttttgttcctgagcacaaggactacacttcccagcctccttcacggttgggcgtggcacgagactgaggactgaccaggagtggtgagtgcaaggcaagtgcaccatttgcaggctcgacccgcaaaccctcctgtactcacttcccatgcccttgaccctttggctggctggacacatatgcaggaaaagcccctgggagattatagagccacaagagtgaaggacctgggcctgaataagaaattgcctgcacctgtaaccaccattcgctgttggcatcgtgacatgt

SEQ ID NO: 9500 - DNA, 391 bp, Homo sapiens
  III.3128 (AI201040)
tttttttttttttgcttttgtcacatttattcaaactagcacctccacagtcaaagtgttgtcatcctacagcctcaaggcccctcactctcaatgtatggaatgtcatggtacttgatgttattgcatgcccattgctgcaaggcatcacacaagatatcctgagacaggcggtgtgcatattccaagatcacagtattggtccctggaggttccttcacttcctctttgacattaactggagaagccatcctaggtagacatctctcttctggcataaagggttcttcactctcatgctgcttctcaccttcatatatggtaggaaatgggaaagtttgctttgatttcatgcagcccatgttatgaaaagctgtttgtggaggaagca

SEQ ID NO: 9501 - DNA, 418 bp, Homo sapiens
  III.3129 (AA281525)
cttaatttcttggcactacccatgttggatacctcatttgcttccccaaagactgtgcccaaaatttctgttgtttctacaatgattctgcctgccaacaaagtctgaaaatctctcaagtttgttataaaaacagcacagttagaacatgatgacattcctggagggaaaaataagtccacttatttgtttctaaaatgcctgtatcccaagcaactagaacacatagttggctatacttaatgaggagtcaagacaaaccattcaattcttctaaaaaagtaagaaagtattcaaagcaccagagtcacaatgttgagctcaggtgcaattttctattcactttacttccagcatggtcgggttaagagtggactacatagcttgaagcggatttcgttgagattcgttgtaattg

SEQ ID NO: 9502 - DNA, 351 bp, Homo sapiens
  III.3130 (AA281526)
gcatgattgtaattattttctttattctttctcagatcgtttatttatatatatcccctattattttcagcttattttttacagcttctatcccacaaggaaatacagttatactatacttgtaatcaaatgataaagcaggtgataaaactcgcagacccagggtaatcttgggtcaaagctggcaagaaaatctgaaagcagactctctggagccactacttaggcatgctcattcagttgttgattcaattacaacgaatctcaacgaaatccgcttcaagctatgtagtccactcttaacccgaccatgctggaagtaaagtgaatagaaaattgcacctgagctca

SEQ ID NO: 9503 - DNA, 365 bp, Homo sapiens
  III.3131 (AA626333)
tttattttttattgtatttttattttttgagtactttctgtggttagtcaagtcgatatctggaactcactgatatggagtgccaaccctccatgtaacagttgcagtaacttgtttctgtaactggctagtcataaggctgaaataataaatttccttctttccttacacatcccatggttcctcttccctcagccagtagctcagcttctcaggatttatacggggtggggtgtaccaaaacatcattccctaaaggacctcaatcattcccctctttgagactgttatagctgtcccttagaagttagtggcatacatgggaagtgctaaaaatgccctagagaatccttgggttccagatg

SEQ ID NO: 9504 - DNA, 350 bp, Homo sapiens
  III.3132 (AA889865)
tttgcaggttattatattttaatctccagattagatgcttgaatacaatacaatctttgttggtgaattctgtcagatatttgcagaagatatatcaaaccttcacaaactcttcctgaaaatgctggagaaaggattatttttcagttcatttgatgagggaagtttttaccgaaactgcaacgaaatctttctgcttttgctgacgttgtcagtcaggattccttgaccacatttatctcggggggccaagtgattttcttcccagccagcttggattcctttcactgcatatctcagtcaatggatttgttctagggaagcaatttctttcgttctgatttatactt

SEQ ID NO: 9505 - DNA, 306 bp, Homo sapiens
  III.3133 (AA873123)
aggtgcttaatggatgtttattgtatggatggattcatcgtactcccaccaaggtccctcgcccttgaaaatggctaccccgggccagggctcctcaacagactgaaggtccagatcctactccatcctggcggtctcgggtggcccctgaggagggcaagccttctgctccacaggcaaggacagtcacagctaagtccgcggggggcgcggagagcgagggctttccaggagccaatgagtctttaactccaagaggaagccctgcattctccgcaaatggaaaccaggaatcgggagcgcgtc

SEQ ID NO: 9506 - DNA, 447 bp, Homo sapiens
  III.3134 (W85884)
  misc_feature (18)..(18): n is a, c, g, or t
  misc_feature (447)..(447): n is a, c, g, or t
gctgagatgctccctgtngctccagggtactcttgaggttggtgtagacacccatagctcatgacttgaagtgcaggtgcccaacctcgatcatcttgtgtgtttctccaggattcagtgcaggtgaagggcagcagtgatttttttagtagaggtgagggagcagacaggtaaaaacttatcccaaggtggtgaacaggtggtggcaggtaggtccatgcatgaacagagggtcccagcccctgacacatgttcattgacccattggacttcaccagcaaaatacaaatgcaaagacagttatacaaaattttaagattatgagtagaaaatcataagccactgatgagggccaccttctgaggatgtggtgctatgtgggtgtatggtctcatgcccttgaagctgggccccagcagaagtagaaggtagagagcatgagggccn

SEQ ID NO: 9507 - DNA, 410 bp, Homo sapiens
  III.3135 (W85968)
  misc_feature (287)..(287): n is a, c, g, or t
  misc_feature (336)..(336): n is a, c, g, or t
ggtgagagaggtttgttgttcaggaggagaacgaagaaggtgtgaagaccagcctctgtggatactcatcttcatggcaacttcactgcccccaatacagaattatttgctttttataacacctcagcctcctttaccacagccacaaaaatgtcagactcacatttcaatcttagatcactacttcctggcttttcggccctttctcactctatacaccacactccacttacttttcaactttaccaagacttctacgtgcctgatccctgcacttctactctcanggacattcctggcgtcttttcctttctgtgcttaacctagaactctatnggataatatcccaaatatcatcaaaccggcattatccatggcctcatgctctctaccttctacttctgctgggg

SEQ ID NO: 9508 - DNA, 546 bp, Homo sapiens
  III.3136 (AA454223)
ggggtccctattcctgaggtacagaagagtttcctctctcctgtttcctcaaatgcctttctggtagctctgggctctgagagcattctgagctgctctctccctgtgagtagtagtcacctgcaagtctcccatcagtcactgtctcgccagagcaccctatgtggaccatctcagtgccccggtgcagcagacaggtgctctctgagtcctgtgtctcctaacccaacggtgccaaagcttcatctcccttcaaaagcacaacacaatcccagggatgcctggtcactgtccccagtatgagccttctgtttctggggtccctcccacccctcagctctggctgctggcccacataggactagcttggctgaggggaacaagatgggagagtagacagacatgggggaggggaggccaccccagaagtcttcgaggcttttgaggtttaggtctgggacaagaaagagtatttgtgtgtatgtgtgtgtatgagtgcgtgcaagagggtatatgtgtgtgtgtcttcccacaaccccaccgtac

SEQ ID NO: 9509 - DNA, 464 bp, Homo sapiens
  III.3137 (AA454224)
gttcagaagtttgttttttttttttcacttttttcttttttacaaaaacatgcatacatagacaaggtacggtggggttgtgggaagacacacacacatataccctcttgcacgcactcatacacacacatacacacaaatactctttcttggtcccagacctaaacctcaaaagcctcgaagacttctggggtggcctcccctcccccatgtctgtctactctcccatcttgttcccctcagccaagctagtcctatgtggggcagcagcagagctgaggggtgggagggaccccagaaacagaaggctcatactggggacagtgaccaggcatccctgggattgtgttgtgcttttgaagggagatgaaggtttggcaccgttgggttaggagacacaggactcagagagcacctgtctgctgcaccggggcactgagatggtccacatagggtggcctctg

SEQ ID NO: 9510 - DNA, 547 bp, Homo sapiens
  III.3138 (AA532655)
ttcttttccaaggatttatttaatggggatgtgttcaaggcaagaccgaattcagaaggatatcgacgtcgtgatccagaagtccagagctgaggactgcctgtttgcaggtgagttcttgcttttccagaacctcggacccagcgcccccttcccagttctctgaccgcgacgtgtgtggctcggggtcgagtggagggtttgcacgtccgcattccggggttcatttggcgacacatgctgcaacgaacgcgggaccaaaagccggagggggcgccactcagccccttcccctccccccacccccaagtctggggcagctactagctttgagggcagaacccgcgtggcccgagccggggtctaggcgaaggggcagtgcgtggtatttccagccccgcgtagtgcccgaaggttgcaagcacgccaactgggttccagcagcggcggcaaagcgggtttcgtgaacccgccagtttgcttaaagggctaagcggcgagacgggaaatggagcttttacatggcccctaaaactatccggggcca

SEQ ID NO: 9511 - DNA, 436 bp, Homo sapiens
  III.3139 (AA969657)
atatcagaaatataactttaatctcaagttaaaaaacacaaagcaatagagatacattcagaaaaaaaaaaagttagtcaatcaactaaaagttggtaaaaatttttacccagtaacaaacagaaggaatgggcatgtcatgtgattttcgttgtatttcagaggctatcttcctaatgtaaagtccaaactcttagcaataaattgtaaccaagctctttaacacctctgcttcccttttaagaactgttagttttcaatatgaagaaggcaatgtaataattatttctggcagcaaatatgtgttcatgcaattcttacctgcccccccttaggctggtatttgatgttgtctgttgatccgattttggatttgacaatcttcaggtctggcagtggttggttaataagccgaagctgcttgggagtcgcagga

SEQ ID NO: 9512 - DNA, 268 bp, Homo sapiens
  III.3140 (AA150746)
  misc_feature (66)..(66): n is a, c, g, or t
  misc_feature (251)..(251): n is a, c, g, or t
ttttttttacattttaaagacatttttattgagctaattttaacaacattgctttactggtgacantgccccaaaccaaaacaaagccatcatgaatgctattcaacatcctcactgtaatccagtatgtttttgtacttggaatatagttaaacttttgacattacataatcaagcaaatagcagtgcatactatattattcaaaaagactttatctatttcatttaaaaaatcaagttgcaagtggccncagcttttatcaacaat

SEQ ID NO: 9513 - DNA, 425 bp, Homo sapiens
  III.3141 (AA150873)
tgtaaatacttttgctttgaaaactttttcattgtcctaaatcaccctgactctgaccagtctttcagttctccaaaagcccaatttaattgtatagttttgtcatggcttcatataataaagagcctattttaagttgaaagtagtagtcagaaaattgttaatttcctaaagctcaggaaactagggtgtcactttttttgcactgcagcatatacactaactagcttattaaaatttacaaaatgtctttttgaatgtatcaaggatatatttagtttgagtggaatttgtcagcagatatcagtaacttattgccgcttatattgtacaatgttaaacttcaattcctgtaacctggttagtattaatgtcagtgactaaaaaacttagagttagttttagggcactttttattttgagag

SEQ ID NO: 9514 - DNA, 504 bp, Homo sapiens
  III.3142 (AI150092)
ttttttgtcattcaaagtcccattttattaaatgctttgaaaatgaggcccagaaccttcagtcaatttatgatttagtgtaggaaacagacggttcatggtaatctgtctgaggagtttcatttcagggactgagttggctgtcgctggggaggcccgagttgtgtgtgtcactgagtgaccagaattctccattgagttgccgatcagataggttcctccagagctgctgatgagttgtcctcctgtgacgcccatctgaatcccaccagtgcccaccatactgtgggatgagaccacggtagtcacctgggcggaactcccttgagtatcaaagtaattccctccagtattttggctgtacatctgtgtctctgtgtaaggatacgttgttgttcggattgctccattggtatagacagtatcgcttccttccacatactgcacctgagccggatagacatgttgtaccctgctgacagtctgtacctgctgtaccttgtg

SEQ ID NO: 9515 - DNA, 371 bp, Homo sapiens
  III.3143 (AA858116)
gatacagacaattaattgcacatagcattctctcttcactgaactccactgatcctatccttattgccacatcatctaagttcttttggattcagctaggatatcaagtgtccccagtgcctacaaacacaaacttaccccaggtctagcctaggtgcaactcctatgcactttagtagtactttttatttccctctaccatcatacgtcttcagtgcaatgtaattttctctttaacttatcacttactagaataaaaagattttgtacctgtgaatactttacagtgtttggcatttaggtgatatcatctgtaggagaaccatgtgtttggagtcacccaataacatcacttatatgaataaacagtg

SEQ ID NO: 9516 - DNA, 538 bp, Homo sapiens
  III.3144 (AI732943)
  misc_feature (216)..(216): n is a, c, g, or t
  misc_feature (228)..(228): n is a, c, g, or t
gatacagacaattaattgcacatagcattctctcttcactgaactccactgatcctatccttattgccacatcatctaagttcttttggattcagctaggatatcaagtgtccccagtgcctacaaacacaaacttaccccaggtctagcctaggtgcaactcctatgcactttagtagtactttttatttccctctaccatcatacgtcttcagnggcatgtaattntctctttaacttatcacttactagaataaaaagattttgtacctgtgaatactttacagtgtttggcatttaggtgatatcatctgtaggagaaccatgtgtttggagtcacccaataacatcacttatatgaataaacagtgaaaataaaccaccctatgagctttggaccttctaattcaagatcctgctgtcattgtcagctttaagccaaaccaatctggggtgaaaggtggggtatgtaaagtcctttgatggtttattcacaactattacccagccctctaacatcttacctcacctactcatc

SEQ ID NO: 9517 - DNA, 535 bp, Homo sapiens
  III.3145 (AI791262)
  misc_feature (458)..(458): n is a, c, g, or t
  misc_feature (476)..(476): n is a, c, g, or t
  misc_feature (508)..(508): n is a, c, g, or t
gataaattcacctttagttttgaggcacagcaacccttattatattatagctcttacttatattcacagttctccaaggaaaaatcaaagctaattcttaaagaaaaatgtttagcagtcctttgaataaattttaagaaaataataggtaaaaccgatctctggacatagtttatgtgagttttcagaggtctttgcaagtgtcttagtaaaagtttaaagaaaataaccatagtgtaagtaggaaagtcttgacatgaggttgtcagcttggccataggaaataatcaatttactgcctttcagaattcactgtttatttggctttttgctgttcttgtgtgtcgaattccttggtgggctgaagcactttcttaatgtttggagaaaatggcagaaaatagtcttttgaacaaattccatctagtagcagtttggtggggatgagtaggtgaggntagatgttagagggctgngtaatagttgtgaataaaccatcaaaggactntacataccccacctttcaccccagatt

SEQ ID NO: 9518 - DNA, 471 bp, Homo sapiens
  III.3146 (AA969218)
aactcaaaatgggtcagtaaattatttgaattttatttgcaaggctagtgtgatgtgctaaattatgtacccccaaaattcatgttgaagccctaacctagaatgaagaatgaagtccttagagtgtgactatatttggcgataaggactttaaagaggtaattaaggttaaatgagataataggggtgggccctaatccaacctggtgtcccaataagaggaaacaccagggatgcaaggacacacagaagaaaggccatgtgaggacagcaaaaggacactgcaagccaaggcgggaggcctcaagagaaactaaacctacacacaccttaatcttggacttctagcctccagaactgtgagaaaagaaatttctactgtttaagcaattaactatgtggtattttgttatggcagccctagcaaactaaaacagctggattccagaattagattatttcgtatgctga

SEQ ID NO: 9519 - DNA, 419 bp, Homo sapiens
  III.3147 (AI003997)
tttgagatggagtcttgctctgtcacctgggctggagtgcagtggtgtgatctcggctcactgcagtctctgcctcccgcgttcaagcaattctctgcctcagcctcccgagtacctgggattacaggtgcccaccaccacgcctggctaatttttgtatttttagtggagacggggtttcaccatcttggccaggctggtcttggtgatccacccgcctcggcctcccaaaatgctggcattacaggcgtgagccaccgtgcccggcctctgttaagatttttaagagcagaatcaagaaattgaaggatttgctgttattcctacctgcattggacttgacctgggtgttgggtgagtagcaatctgttactgtttctctatgtggacgatgaggaaagggttgagaaatccagcga

SEQ ID NO: 9520 - DNA, 470 bp, Homo sapiens
  III.3148 (AA011447)
  misc_feature (75)..(75): n is a, c, g, or t
gtgacaagcaaccttaaaagagacacaaggagactggcagacagaggaagaagaggcagcaatgtgaccccggangtggaaatctcagtgatggggccaggaatgtcaaggaatggtcaaggaatggctacagcaccagaaaaagaggcaaagtgaggcttctcccctagaatctctaggagcgctccagccctgctgatgtctagatttttggagttctggcctccagaatgtgagagagtaaactattgtttaaagctaccaagtttgtggtaacttgttagagcagccacaggaatgaatgtacagggaatcagggcagtctcatacactgatggtgggaaaacaaaccggcacaacccttatggtgggaaatttgacaacattgtacaaaaactacctacacatttcccttgtgacccagccattccactgtttaggaatctgccctgaagatacaactccaccta

SEQ ID NO: 9521 - DNA, 452 bp, Homo sapiens
  III.3149 (AA011448)
gatcattccatcatgtattgatgcatacaaatatcacattgtaccatataaattatacaattattgtacaaatatatacatcaatatacaattgtacatacaatacatacaattgttgtacaaatatatacaattattacttgtcaattaaaaattttaaaaaagaaatctgaaataacagttgccccctatgagcatctcacgataaatccctttaatctcctctacatatactgagtattaaaaaacagaatcgtctagaacattgttgctgttctgagacctgtctttctcatttaacacaagtgaacatttttctttgtcagcaagtagcggtaaacatcatccattctaatggctgtattttttaataggtggagttgtatcttcagggcagattcctaacagtggaatggctgggtcacaagggaaatgtgtaggtagtttttgga

SEQ ID NO: 9522 - DNA, 292 bp, Homo sapiens
  III.3150 (AA044101)
  misc_feature (283)..(283): n is a, c, g, or t
tttttttttttgaatagcaaatagtttattggtaagtacacggtttcaacgggagtaataaattcacatgaaaaggagacaataatcaagtcaaaagaataaatgcttactaatcatcagaaaatctgtggccattagggctggcacgtaaaaatccaaaatcactcagaggccaaatcttaaagaagattcgtcctcttattagtccatatggaataggtccatagcacctggaatctgtagaattctgtagattgtcaccttctaaccaaacatgacccantggcacctc

SEQ ID NO: 9523 - DNA, 260 bp, Homo sapiens
  III.3151 (AA044135)
  misc_feature (239)..(239): n is a, c, g, or t
  misc_feature (254)..(254): n is a, c, g, or t
cgacttcggcggggccaggtgagaaaggcccacctgtgtcctggttgagggtctccagggttctttggggcccgaggtgccaatgggtcatgtttggttagaaggtgacaatctacagaattctacagattccaggtgctatggacctattccatatggactaataagaggacgaatcttctttaagatttggcctctgagtgattttggatttttacgtgccaggccctaatgggccnaagattttccttgantgattt

SEQ ID NO: 9524 - DNA, 363 bp, Homo sapiens
  III.3152 (AA421055)
tttcaagcacggtaaggcaggttttatttaggaccattgcaataggtatagggaccactgctatcgattttgtagtcggggagtgggattgggctcaactctgaatgtaacagggaaaataacttatagccaaggagcagtgtatcttgctccttggctataaattacaagtgggtgtcagtggatggaaaattactaaaaggaaacgtcagcgttagagcagtcttgctgaagacaggacaggatgatcagccctcacctgaggaaaggtgaagggctaaggaactcgattgaaggtgggagttctcggtaaaccaatttagcagggcttttgttaaaactgtattttacgaggaagtgccc

SEQ ID NO: 9525 - DNA, 447 bp, Homo sapiens
  III.3153 (AI148446)
cggactccgttgccagggcgacgagtgcacctctcgattggagacagggcattccgtggcgctccccaaacggtgacaaacggtgataggacagggacaggccaactgaacctcgcagagaaagcactgggccctatccctttcgctgctcaacctaaactaggcgcggtggctcacgcctgcaatcacagcactttggaggctcaagcggaaggattgcttgatcccagaagttggagaccagcctggcaacatggcaaaacctcgtctcctaggtaggagctgtttaagaggatgcacctgggccgggcgcggtggctcatgcctgtaatcccagcactttgggaggccgaagcgggcggatcacaaggtcaggagatcgagaccatcctggctaacacggtgataccccgtctctactaaaaatacaaaaaattagccgggcat

SEQ ID NO: 9526 - DNA, 505 bp, Homo sapiens
  III.3154 (AA039908)
cctctcagcaggaagtagccagaaagattacgactccccatctccctgcgattctcatgataaataaatatccatgcatgataaaaatcgtgtaaattgacagtggggactgtgacaagcaggtctcactaatgcagacctccataacaactgtttcagtactgactgagtggttaagttaaatgttaaaaaccagtgcccttatacaaaggctggaatgtaacaaaagcccaccaagagttttgcctaggcctttcctgaacctcaaagcatgattaaacaagttttgctgggggtctgaagaaactccccaaacctccgttatttagcaggagataagagaagggtaatcaccccagcacttggacccatttagattaagtaaactttactgaggctccagaagaaggtcttcaagactccagaccttagttatagattaaaagaagttaatcacttatgtctttagatgaatgcacacctacacatagatgtagagcttaga

SEQ ID NO: 9527 - DNA, 237 bp, Homo sapiens
  III.3155 (AA045642)
  misc_feature (2)..(2): n is a, c, g, or t
  misc_feature (222)..(222): n is a, c, g, or t
  misc_feature (232)..(232): n is a, c, g, or t
tngcacgaggttttacagttgtttgtagtaagagaactcccattttcatcagtggaactggacaactacactggtccaattcaggcaaatggatagagttcacagcaccaaaccagcagccacaggaaattaatataactgcgaaggaaaagatttcccctgctcgagtctccctgcactcctacccatctgagagaaacagaactgttgagtagctgatgnaatgtttttngggat

SEQ ID NO: 9528 - DNA, 365 bp, Homo sapiens
  III.3156 (AA045643)
  misc_feature (20)..(20): n is a, c, g, or t
  misc_feature (29)..(29): n is a, c, g, or t
  misc_feature (61)..(61): n is a, c, g, or t
  misc_feature (75)..(75): n is a, c, g, or t
  misc_feature (84)..(84): n is a, c, g, or t
  misc_feature (89)..(89): n is a, c, g, or t
  misc_feature (92)..(92): n is a, c, g, or t
  misc_feature (95)..(95): n is a, c, g, or t
  misc_feature (111)..(111): n is a, c, g, or t
  misc_feature (114)..(114): n is a, c, g, or t
  misc_feature (323)..(323): n is a, c, g, or t
  misc_feature (331)..(331): n is a, c, g, or t
  misc_feature (349)..(349): n is a, c, g, or t
  misc_feature (362)..(362): n is a, c, g, or t
agggataccataaatcaacnttgtaagcnttgtaacacatctggaagggaatattcttganatagcggtgatganggtctttanggatnctnganagggagtgatgagtcngantttgccagaatgtcccagcatagtcaggagaaagagaacctctctggtcgatgtacatgttctaatcccatggagattagggcaccagactatgagatttggtaacatttgctatcaagatgaaccagctgccttcattctggctttatatttcccaatcaacactgaacagtgtttagctgctgatctgagtaagctgacacatgtantggttccnagttccattgaacaaggnaataaattgggtngtt

SEQ ID NO: 9529 - DNA, 354 bp, Homo sapiens
  III.3157 (AA401986)
  misc_feature (296)..(296): n is a, c, g, or t
  misc_feature (331)..(331): n is a, c, g, or t
ttcggcacaggcttgaagagagtcttgtaatatttgaagaaagtgatgatgagcaagagaaaggagataaaggagttccaaaattaaaatctacaatataaaaagtgcaatttttaactgggcaaaaagttgggaagaagtaaaacaaataaccatagcaaatgcatgggaaaatcttctttacaaaaaggaacctgaatatgattttcaaggcttagaacatggggattatagagaaattcttgaaaaatgtggggagttggaaactaagttggatgatgatagggtgtggttanatggagatgaagacaagggttgtccctaaaaccanaggtggaataacaaaggaagttg

SEQ ID NO: 9530 - DNA, 426 bp, Homo sapiens
  III.3158 (AA412006)
tttttattattttcaaactgtaaattttataaccattatataaatgggcactgatatacaaaataatgtcagttgctaaaacaagacaattcacagctggcctacatcatataatggcagaaatctttaaacacaaaatctaatgattagaaccagaagttgaaggcccactgaaggagtccttaatattatgaggcctaggtttcaaaaagctaccaattctagaatggattttactctggaactgtttcttgactatttcttgttgcatctctttcagtgtgaagtggaatctctgaaactcaggtgtggcatcaacaaagtcaagaaggtagtccaaactctctcttacagcagataatttaaattcagcagtctgcttctcagcttctcctcctttttgaacaacttcctttgttattccac

SEQ ID NO: 9531 - DNA, 212 bp, Homo sapiens
  III.3159 (AA479978)
tttttatttttcatctggagagttctttatttataaaattattaaagtacttctctgaatacacatcaatcaaagtgctcacctttgtgcattaggcaattaaacaattctaggcactgccacagccactaatatcacagcataaaaacaaagattcaagttgtttcagaataagatctctttaggaataagacatttaccatcaatgtttg

SEQ ID NO: 9532 - DNA, 347 bp, Homo sapiens
  III.3160 (AA548702)
gcgtcgaccacactgaaggtatttgttaatgagggttccagaagcgttaaaagtagcaccaccaaaagccgggtgtggtggctcacgcctgtaatcccggcattttgggaggccgaggtgggcagatcacgaggtcaggagatcgagaccatcctggctaacacggtgaagccccgtctctactagaaatacaaaaaattggccgggtgcggtggtgggcaccagtggtcccagctactgggaggctgaggcgggagaatggcgtgacgcgggaggcgaacgttgcagtgagctgatatcatgccactgcactccagcctgggcaacagtgtgagactccatctcag

SEQ ID NO: 9533 - DNA, 425 bp, Homo sapiens
  III.3161 (AA878775)
tttgtttctagaatagaccacactttttcaccctgtgccaacatcagaatgtcaaacataatttgaactgtttttgggtgactcgggaacacacaggaacagccatcatatcatacctgtgttttcataaagggcccttccgccaccccctgccttgactaccgcaaagtggtcccgtcacccttgttttctcttcacttttccccctgctgtcttccctcttgttggggctgggaaataggagctacttgggatttttcctgctctttcaccagcaatgcagggaaaatgtttctttcttctgctggtcaatgaatcaatcatagaatatattttgcagtttaggatcttaactacttatcattgttgtgttttaaaagtcttccatttcccctaatgggtgaggcagtcaggaatctgcatca

SEQ ID NO: 9534 - DNA, 356 bp, Homo sapiens
  III.3162 (AI015338)
tttcagtctcacagacactttatttcaaggttttatctgtagatatttgttttttccccataggccttaatgggattgcaaatgtccctttgcagattctacaaaaagagtatttccaagctgccaaatcaaaagaaaggtttaactttgtgagacgaatccacacatcactaagcagtttcacagataacttctttctagtttttatttggggatattcagtttttccccttaggcctcagggggattacaaacgtcccttcacagattctataaagaaagtgtttccaaactgcagaatcaaagagataaatccacacatcacaaagcagtttcacagatagcttctttctagt

SEQ ID NO: 9535 - DNA, 424 bp, Homo sapiens
  III.3163 (AI268744)
taataaaaaaatgcttgctttatttgcttttgaagataataaaacattaatttatacacttaaaaattaatcattaggacattaaacactatgaaatgaaaataccagatttaacttattctatctttaaattaattacagacaaccacagttgctaacagtatgagttctgcagttatacagaactaagtccattagctgtgtgacccatggccaaatattttccttctctgtgcctgcatttcttcatctgcaaactggaataatgatagcaactacttcagaggactatgtgagtattaaatgaagtaatccttgtgatgagtttctcagaatgccttgcatattataaattcttaacatgtgttggcttcatcattattttgttattttattatatatatatttttaaattttaacagct

SEQ ID NO: 9536 - DNA, 160 bp, Homo sapiens
  III.3164 (AA043776)
  misc_feature (156)..(156): n is a, c, g, or t
taattaatacttatgggtcatgaatccctgctcctttgacctttttaatagctcatgaatccatcccattgcctccccaactctgcccacacctgctgcaacactaatgccttgattttcctacctcagtctccttttctattaatccctcttttngcgt

SEQ ID NO: 9537 - DNA, 353 bp, Homo sapiens
  III.3165 (AA043777)
  misc_feature (159)..(159): n is a, c, g, or t
  misc_feature (167)..(167): n is a, c, g, or t
  misc_feature (168)..(168): n is a, c, g, or t
  misc_feature (172)..(172): n is a, c, g, or t
gaagttataaaagcttgtttttctttattagaatacttttttcaattctgatttgtcacaatttagattctttttctaagaataagcagaaatttacaaaatttaatttttatttatacattcatccgttcaatacacatttcaagaaagctgtattgnaccccttnnagtnggtaagttccagggccaaagaaccaaaataaatccaaggagagagaccaacaaatgtatatttataacacagagtaataaaacacaaataaatgtggagttatttaagcatgtaagatggtacatgctctaccaaggtatgggggcttctctaagacacaagatcagattaaagtcttgaa

SEQ ID NO: 9538 - DNA, 169 bp, Homo sapiens
  III.3166 (AA593210)
atattaaagaactagtccataagacccaatttaaaacttttctttttagtagttctagacagaaaggagaaaaaaaaatagaagagaggatatattcgttgaaataattctggaaatgttaagaagtgaaggacatgagtttccacattaaaggtgtctacaatggata

SEQ ID NO: 9539 - DNA, 467 bp, Homo sapiens
  III.3167 (AA412199)
tgagtccagaattcagctcttatgaaaagtgagagtgcactccagttttcacagcagcaataagtgcgggaaacaaaaagatcctcttcccaggaaaagttgaggggggaagagttcagacactgttgtagctggtgaatcattgaagtcacctggtagtaccaaataagggctgaggcgcctggaggtctttgtggggtcttccctctttaaatgcaaacgtaagaaggtatatgtgtatatacatttatatacgtgcacatgtatactcgtacatgtatgcacacatacccatacatgtatatgaactccgttctgatttcctctgaaattttgttgataccatctaaatacctctttgaatcaaaataacttaattttagctcattcctcaagagaaagagaaggatccccaaggaagaaaaactgttgtaccttctgtgattctcaaaccaaaatgtgatgcg

SEQ ID NO: 9540 - DNA, 382 bp, Homo sapiens
  III.3168 (AA416979)
caaaattacaacttttaattttatgagctccaaattattaaacaccaacagtaaattgtgtgcatgagaagaacaaagacaaatacaaaatatagaaactttttcttccagccacaaaaaacgaagtctatgtatgtatgagaaatagaaacaataactaaacaattagtgttaaattcaagacctctgggaaagctgttgttattatttaccttagaatatgaaagtttaaaggtcaaattttcaagttaaacttttcaagttaccttccccccaaaaaagatttacatgtaggcttaaatttagaacagttaaagtataaatgttgaaaatttcaacttaattcagaatggtttcagaaagatatgatacaacaatttaa

SEQ ID NO: 9541 - DNA, 400 bp, Homo sapiens
  III.3169 (AA425107)
tttataagtagttagatcattttataaaggatgaaaagacaactgcgaattttaatcttagaggtatatgcagaatgtttacatgcagtgtatgtatattcactatttagttccattttttaactactaagaaaaatagcaaatcacccactaactgcagaagagcaaatgtaggaaaatcagtatttaatgaaaagtctagccattctctaagcttgaaaatcaacgtttttttagcattgcacttaagggcaataatattacaaagtctgaatcttcatttactcaaagagaagaaattaaattgatgaagcccacttgattgcagataataaacagttattggcagtagattcttctactcatgttatgctttatgaaactgtccacctaagtccac

SEQ ID NO: 9542 - DNA, 465 bp, Homo sapiens
  III.3170 (AA429328)
gggacggcatcggaccgcgcagttagcgcgcctggcctgggccggccccggtcaggttctcaagctgtcgtccctatggggcatgtgttttccttgtcccggggagtccgcgcctcccacgccggacctggaagagaaaagagcaaagcttgcagaggctgcagagagaagacaaaaagaggctgcatctcggggaattttagatgttcaatctgtgcaagaaaagagaaagaaaaaggaaaaaatagaaaaacaaattgctacatccgggcccccaccagaaggtggacttaggtggacagtttcataaagcataacatgagtagaagaatctactgccaataactgtttattatctgcaatcaagtgggcttcatcaatttaatttcttctctttgagtaaatgaagattcagactttgtaatattattgcccttaagtgcaatgctaaaaaaacgttgattt

SEQ ID NO: 9543 - DNA, 264 bp, Homo sapiens
  III.3171 (AA446230)
tggacatcacagcaaacactacaaccagtaagtttctgcttgtattaactggaacatttccaaagcctgtcctactcaggataaatgcacaaaagaaaaattagtagttgacggcagaattcttaagagagcagttttgcattttttaccaagtaatacttatttaacttctagggcagtaaagtaagagaaattgttactctccacctcctgccatcatgaatttaggaaatgtagaaagttattctgttaataaagatgtga

SEQ ID NO: 9544 - DNA, 323 bp, Homo sapiens
  III.3172 (AA446231)
tttctcttcaacagcaagttcacatctttattaacagaataactttctacatttcctaaattcatgatggcaggaggtggagagtaacaatttctcttactttactgccctagaagttaaataagtattacttggtaaaaaatgcaaaactgctctcttaagaattctgccgtcaactactaatttttcttttgtgcatttatcctgagtaggacaggctttggaaatgttccagttaatacaagcagaaacttactggttgtagtgtttgctgtgatgtccaatgtggtagtcagctagggtggctataacaaatttctgta

SEQ ID NO: 9545 - DNA, 295 bp, Homo sapiens
  III.3173 (AA493987)
ttttttttttttttttggatacggaggcttgctccgtcacctagactggagtgcagtggcatgatcctggctcactgcaacctctgcctcccaggttcaagtaactctcccgcctcagcctcccaagtagctgggactacaggcgcccaccaccacgcccggctaatttttgtattcttaacggagacggggtttcaccctgttggccaggctggtctcaaactcccgacctcaagtgatccacccacctcagcctcccaaagtgctggaattacaggcgcacgctcggtcgacg

SEQ ID NO: 9546 - DNA, 298 bp, Homo sapiens
  III.3174 (AA938457)
ttttttttttttttttttttttttttttttttttttttatgcttaagaaaattttactaagaaaatataagaacacacatctcattacaacatatcacaacagagaaaaaataattcacataattctgaagtttttagactgattcttggaaccatttttaacaagtcaatctggtataatatgttctatacaaggcattcctcttaaactagcattcccataagcaattactacaagactacccattccgtcatcttatcaacactcagatgtgaaaggctaagcaatgacttgcaa

SEQ ID NO: 9547 - DNA, 407 bp, Homo sapiens
  III.3175 (AI264647)
gtacctgtcgtcgcacaggttggcgggcagggccgcgggcatgtggatcttccacgagagccgcttgctccccgcgagcacgtccttgggcccggcctccagcagcagcacgcgctcggcggggtcctccgtgagcctcccagccagcacgcagcccgccgagcccgcgcccaccaccacatagctgtactcgtcccggctctcagagcctgcgctggccagggcccgggcacccagggattgctgctgccccagggctccccgtgccagggctccaggccggcccaggcctcgtaggagacaccacatgcttctatctagtccaagtcctctgatccacggaggggaatgagatgactcacttctccctcacatccagaagtgacaggatacggtgcactctgtga

SEQ ID NO: 9548 - DNA, 450 bp, Homo sapiens
  III.3176 (AI733810)
ggccgtccaggccccgctgcacctctgtgtggtagcaccagttgtacctgtcgtcgcacaggttggccaccagggccgcgggcatgtggatcttccacgagagccgcttgctccccgcgagcacgtccttgggcccggcctccagcagcagcacgcgctcggcggggtcctccgtgagcctcccagccagcacgcagcccgccgagcccgcgcccaccaccacatagctgtactcgtcccggctctcagagcctgcgctggccagggcccgggcacccagggattgctgctgccccagggctccccgtgccagggctccaggccggcccaggcctcgtaggagacaccacatgcttctatctagtccaagtcctctgatccacggaggggaatgagatgactcacttctccctcacatccagaagtgacaggatacggtgcactctgtga

SEQ ID NO: 9549 - DNA, 470 bp, Homo sapiens
  III.3177 (AI792632)
cacaatcacaaagagtgtgtaggccagccccggtcacagagtgcaccgtatcctgtcacttctggatgtgagggagaagtgagtcatctcattcccctccgtggatcagaggacttggactagatagaagcatgtggtgtctcctacgaggcctgggccggcctggagccctggcacggggagccctggggcagcagcaatccctgggtgcccgggccctggccagcgcaggctctgagagccgggacgagtacagctatgtggtggtgggcgcgggctcggcgggctgcgtgctggctgggaggctcacggaggaccccgccgagcgcgtgctgctgctggaggccgggcccaaggacgtgctcgcggggagcaagcggctctcgtggaagatccacatgcccgcggccctggtggccaacctgtgcgacgacaggtacaactggtgctaccacacagaggtgcagcgg

SEQ ID NO: 9550 - DNA, 491 bp, Homo sapiens
  III.3178 (AI290634)
ataataaaaatttattaagcattaatttagcaaaaatatgagattgattttagcctggtatttgaaaaggtggacagctgagcagtttggtataaaaatattcttaatcaaaaattgaccttttctaatagcagattcatagacaccataatgccttcattttcctagagaaagtagaagaaaagaacatgagtaatctggctattatcggtaagatgtaaatataactaatgtctactgtgagaaatacttttacaaaagggctacggatctgtcatccccaaatgggaagacctgtactagggtctcattgcctcagcatagatttagcagctagtgggacatatggtacaggaaagcctcatcacaaagagaggagaacatgactcacaaaaactgacttttgggttgaagagagacaaacattggctatacatcacatttccaatgactttactttctgcatacatcagaatccaatattccccatt

SEQ ID NO: 9551 - DNA, 249 bp, Homo sapiens
  III.3179 (AA282071)
taatgtaaaacaagaccagtcacaagtttattctgtaatttttctttaacaggtattcaattctgtagaaaattgcaaatatttatttttaatatttacatttgggtctgtaaacaaagctggtaaaaaaatcctaagaatttccatacatatttatagaaatttcaagaatatgatccttatcacttctgaaaagtatgcattttttaaattctaaaagccagtaaatgtagaagttgaaggggacga

SEQ ID NO: 9552 - DNA, 471 bp, Homo sapiens
  III.3180 (AA282335)
tcggcagaggcaacagtgaaggagcagaatttcctgtataaagagacccaggaaactgaaaaaaagctcctgtttatttcagagcccatcccccacccttcaaatgaattgagagggcttaatgagaaaatgagtaataaatgttccatgttaagtacagctgaagatgacataagacagaattttacacagctacctctacataaaaacaaacaggaatgcattcttgacatttccgaacacacattaagtgaaaatgacttagaagaactaagggtagatcactataaatgtaacatacaggcatctgtacatgtttctgatttcagtacagataatagtggatctcaaccaaaacagaagtcagatactgtgctttttccagcaaaggatctcaaggaaaaggaccttcattcaatatttactcatgattctggtctgataacaataaacagttcacaagagcaccta

SEQ ID NO: 9553 - DNA, 354 bp, Homo sapiens
  III.3181 (AI014698)
ttttttttttactcgttggggatgtgactttatggtttcttagctagctttgactcagcattttcagtgtgaagactctgtatgagttccttagttgtagagaatctttgtgtgatggctttctcagatgctgatgatagtagtgatgtgctggatttgtgagcaggttcactgtctcctgtggggctggaatggcagaggtctcatgaagcttctctcattccctagtgatgtgccctgctgttccagctgttcaaatcagaaaggcatctcttttcatctgcaggaatactgatgttccatgtagactttccccctatgagcccagcacggcacctgtgcctctgatgaaaa

SEQ ID NO: 9554 - DNA, 421 bp, Homo sapiens
  III.3182 (AI081565)
ttatgaaaaacacgtacacttgggtctcagaatgtcagaagtgttgtgaaggtaaaggaggttttgtttgtttgtttgttttcatttagtttgttaaatagatgcccccagagtcttcctagtgcttgtcctacaccaaccccacctcctgccattccccaaggaacccctgagtcttctcatagtttagtaactaaaagatgaatgcccagctaaatgaggggacttagtaacagctgtagccttaacaccagtgtccatcctgactcacggatgccaactcccaccaattatttcaagtatgagatgttttacctttcatcacgtactaatgagagtcagtgtagccacagaaaaaggcttaagaaagttaacatcctgattgtgacgctgcaagtcaggtttaaaactggaagcacgg

SEQ ID NO: 9555 - DNA, 529 bp, Homo sapiens
  III.3183 (AA420985)
aagactctgtttggggtactgctggcagccatcttgcccaaagaaagagagcctcatgtgggcaaaggctgatgaggaaaggaagctgggaaatgcagaggaaaaaaaaaccccagcctgttcacattgtttgcgccactagaacagctcttcctagaagtcagccctactctagacctttagattaaacgaagccgataaaataccttgcttatgtgagcagtttggattgaatttttcattatttgcaactgaaagcattcgattggaagaaaccaacagtagaagaccaaatgggacgcaaagtcagcatcgttgctgggagaggacataaagagaggaacacccagttgaaactccacaatgccttcctgttatgccccagatatggagcagctgatgtagtcacaagccttaggccttgttcttgcccctacagagcctgaagttacggaagcaaagtccaagctaaaccctggatcaagattagcagcagtactgtacaggccacagctgtacctgtaaactg

SEQ ID NO: 9556 - DNA, 397 bp, Homo sapiens
  III.3184 (AA469969)
tttcacaatgagaattcttttattttatcaaggagaagctaacatttggccttgttggtaacttgtcagaacagagggaagagggactggcatccttcatgaggaggtgatgccactagttttcctgaaggtgtgcataaattgcatcaggccccaatgctctctcacgctactccctgcacatcaagagtaagcaggggttaatgattggccagtttacaggtacaggctgtggcctgtacagtactgctgctaatcttgatccagggtttagcttggactttgcttccgtaacttcaggctctgtaggggcaagaacaaggcctaaggcttgtgactacatcagctgctccatatctggggcataacaggaaggcattgtggagtttcaactggg

SEQ ID NO: 9557 - DNA, 335 bp, Homo sapiens
  III.3185 (AA428539)
tttggacagaaatatagttataattaagcattaatcaggctgcacttcggcctacttccttgttgctaatagtcacaaggcactagatactgacatttgcatctctattgttcctatagataggatttcagacatcagactaagaattgatttgcatccctgttgttcctgtagacaggatctctgacattagaatcataaggcttttgtttaaggatcgcttaagatgtttttcagaccacgagttccggtgaaacagttgagttcaaccagtttgaagaccccccacagaggaatgggatgagcatgagaatgtagtttcttcatctccttgt

SEQ ID NO: 9558 - DNA, 444 bp, Homo sapiens
  III.3186 (AI284273)
gtctcaaatgtcaatttatttttcatgagaaaactctgagctattttatgaagggacacgtaatactaggaaagctatgatttacaaattatttccttcaaccatacacatgtattcatgtattcacacacaccagcacccaggatttaactggcatttacacttgctatcaccccatttttattaagttaccagaaaggtttttcatcagataattttttttctagccagatttagttgataattctgaaaatccctaataaactcatatgagctttcaaagatacaataccacatatatacaaaatcagtaattaacttaaaaattgtacactaaatccaacgaaagtcattttatgagaagtccaagtcaaagcaagcaatggaatcccctgtggttgtagggtgcagagaaaactgatgactgatgtgacatagtaactg

SEQ ID NO: 9559 - DNA, 448 bp, Homo sapiens
  III.3187 (AI311926)
tttttttttttttttttttttttttttttttttttttttttttttttttttttttttttttttttttttttttttttttttttttttttttttttgggggggtttaaaaaaaaaaaaaaaaaaaaacgggcccaggagcggccaaccaatttttttaacgggccacccgggaaggggggggggggacccggagggccaggggggcaacttttcccaaaaggggttggggggtcggggggaaaaaatgggggggaaccccggcccaaaaaaaatgggggcaaaaaaaaaacccccccaccccctggaggggggggaccaaaaacccccggaacccacggggcaaaaggggcttggttttttgggggcccccaaaaccaagggggggcaaaaaaaaggggccctggaatctttaaaaaacccggggggaaaggcccggggggttccccca

SEQ ID NO: 9560 - DNA, 337 bp, Homo sapiens
  III.3188 (AI277233)
agatctcacctctttattttttctgcctttgtctgcctcctaccaccacttctcaaagcaaatgtgttctttgggtacatggttgttttccagttgcttggagaaaaagtctgtcattggaggtgggccacaaatatagaacaaagtctcttttgaaatatgatctcttatctccttctccgttattcttccttccgtgatgtatggcttgagttccgcattgatttgtgtagtctgttttgtaacatgcaaactgcatgcaatcttctcaggaaattcatttactaaatcaaggatatttttcttaaacaggagttcgctggtattttttgcactg

SEQ ID NO: 9561 - DNA, 230 bp, Homo sapiens
  III.3189 (AA032214)
  misc_feature (46)..(46): n is a, c, g, or t
  misc_feature (110)..(110): n is a, c, g, or t
  misc_feature (228)..(228): n is a, c, g, or t
gcttgagttaagaatatttatattttttccaattctttacactttnattaacacacttacaaaaaataacattcaaacactgagaaaattaaataactttggaagcagantcattgttttctgcttacatataagtgacaattctgggctgttggcacaaaataatcaacattcataaaacccttactactatatatcaaacataagttaaaatcataggcactagtnta

SEQ ID NO: 9562 - DNA, 225 bp, Homo sapiens
  III.3190 (AA033669)
tatgtatttggtgtataatgcaaggaagaaactttatccttgaatttgagggtgatggggtgggtcaggaaaggatggcgccagaattctacatgataatgaactaaaaaatgttgcttttcagaggaagataaagcatcttcttttgggaggggggtatctcatgtctaagtaagtaaaagaaagaagtagctactgtctcttttaaaaaccacgtacaaaaca

SEQ ID NO: 9563 - DNA, 298 bp, Homo sapiens
  III.3191 (AA629276)
tttgttagccatgctttcctgtttattccacaaggtgaagaatattttccaaagatcattttgtctggatacactctcttcttgttggcatcttgatcagaattgtattaagccagttcatttatttgggaagatctggcattcaacgatattcagctttccaacccaggactgtggtctgtctctccatttgctggagtctcctttaagcccagcttcctcacatgcctgcgtgctgagcagtgcttctgtccattaaatactccaaaaccctattttcaactgctcactggacaca

SEQ ID NO: 9564 - DNA, 169 bp, Homo sapiens
  III.3192 (AA455020)
gattcgtcggcccgcgggggggcggcctcccggcatcttcgcggcgaccaaggactaccaggaaggggagcggctgggatggcgcgtccgggccccgcgagtacaaagcgggcgacctggtcttcgccaagatgaagggctacccgcactggccggcccggattgatga

SEQ ID NO: 9565 - DNA, 227 bp, Homo sapiens
  III.3193 (AA455825)
gccttttccatcttcttctactctatcaccttcttcctcactgcttgcatctgcagtatttccaccttctccctcagtttctgaagagctctgttgctgaattgcctggtagccagtaaactttactcctggcgttattttctatttcccacaatccttcgttaaatcctttccgtttgtttgagcttgccaaacttgtctttgtactccttatatggaaaaaggtc

SEQ ID NO: 9566 - DNA, 499 bp, Homo sapiens
  III.3194 (AA923234)
ttttgtagagcaaaacaaaaacggcctttattcccaaacaaatagcggaaaggcaacatttagaccacagccatttacctctcagagctctttggggcgaagttgacactgtgacaaggtatcccagcccatcttttggccctgggaaaggctaaaattgggaaggaaatgcgtttatgttggttgtggttctgagggcacgtctgttcccagctaaactcctgcagtcagcagatgccctgaaataaatcaaacctcctcatgctgttgggacagcgacgttcgtgtacacctttttggagggcaatttagcaatagcctaaaagaaaatgcacatactctttggctcagcactttgaccgctaggaatttactacagatttccttgctgagtgagccaggctgcgtgcacaagttcattgctacattattagttatgctgaaaatggaaacaacatgtctaccaacaggggactgcttcaataaatttagtgggagc

SEQ ID NO: 9567 - DNA, 465 bp, Homo sapiens
  III.3195 (AI092553)
  misc_feature (462)..(462): n is a, c, g, or t
ttttttatttaaaatttggttgatatattgacaataacggcaaagacttaaccgtttgatgatcacagaaaatcagaaggtatgattcaatgacatattaatcaatttaaaagacccattgatttaatacaacattaatggaggcaccaaaacaacgcattgttatcaaatcaggcctaaaataaccctgaaaaactcaatacaatatcaattaaatttggaatagtttttaaaacgcatctagaggagagcaaaagatactcaaagtcttctttattaggctactaataaagaaaagtaatacaaaaaggatatattaaaactacattaaggctcagattttaaaacaggagaaccaaggaaatccagttatggctattactgcgttcttatagtcttacagtgcctaagaagttaagcccttagagaatgaaaagcatgcacagttcattatgtacaagnatt

SEQ ID NO: 9568 - DNA, 365 bp, Homo sapiens
  III.3196 (AI217192)
tttcaagatttattatgctcttcacttgtataatgtacagatttccaaacagaacactgcattttaggtaggggtgttcatttaaaagtccttaacaatttatttttatgtggaaaatggatgatcttcacctgcactctcagtatacgtgaaagatttgtataactttgaaattgcttctggagggtttcatttttgaaattgaacaatagtcttctgcagtcacaccctctgaaaacctgccaatttccattgaactgatagcactttatccgtgtgtattctcagattgctgagctagagagactgttgatgcagaaccagcatggcaagtctctgttccaacaattcttgccacagactgc

SEQ ID NO: 9569 - DNA, 241 bp, Homo sapiens
  III.3197 (AI264658)
aaatctactaatttttgatttccaacaataaaatttataaaaataattatacattcataaaatgaattatttcacaataaattattcacttctattacctgaaaaaagttgaatactatataaaagtaataacttcccttatcaatattttgaaaatatgctgaaaacatcagttccttttttccagcatctatggcagttcagtatataaaaatataatattataaattccctgaccata

SEQ ID NO: 9570 - DNA, 609 bp, Homo sapiens
  III.3198 (AI733811)
cagtgattttttttttctcagtttttatttagaaagtttagtgaaacaaacatagcatcacagtttagtaatactttaatctcactataatttaacatggtaaaaaatctactaatttttgatttccaacaataaaatttataaaaataattatacatttataaaatgaattatttcacaataaattattcacttctattacctgaaaaaagttgaatactatataaaagtaataacttcccttatcaatattttgaaaatatgctgaaaacatcagttccttttttccagcatctatggcagttcagtatataaaaatataatattataaattccctgaccatagttattgaagcagaatcattactaacaatttcaaagatacagctgtttagtaaatatacacgaataaattacagggttcactaaaaatgaattttatcttttatacttcaaaggtatttgctatgttctgaatttttgtgttttccaaaattcacatgctgacacctagtccccagagtgatggtattaggaggtggggcctttggagggtgattcagtcatgagaattagtatctttattaaagagactcgagagagctacct

SEQ ID NO: 9571 - DNA, 574 bp, Homo sapiens
  III.3199 (AI792633)
  misc_feature (512)..(512): n is a, c, g, or t
cttataaacaacagaaatttatttctcgctgttctcaatggtgggaagtccaagattaagggatcaacaaattaggcctctggatcatacatggcattttctagctgtgtccttatacataaaaggaaaaaggtagctctctcgagtctctttaataaagatactaattctcatgactgaatcaccctccaaaggccccaccttctaataccatcactctggggactaggtgtcagcatgtgaattttggaaaacacaaaaattcagaacatagcaaatacctttgaagtataaaagataaaattcatttttagtgaaccctgtaatttattcgtgtatatttactaaacagctgtatctttgaaattgttagtaatgattctgcttcaataactatggtcagggaatttataatattatatttttatatactgaactgccatagatgctggaaaaaaggaactgatgttttcagcatattttcaaaatattgataagggaagttattactnttatatagtattcaacttttttcaggtaatagaagtgaataatttattgtgaaataattcat

SEQ ID NO: 9572 - DNA, 434 bp, Homo sapiens
  III.3200 (AA405814)
ggactcacgggcggggcatgatggtggtgggtacgggcacctcgctggcgctctcctccctcctgtccctgctgctctttgctgggatgcagatgtacagccgtcagctggcctccaccgagtggctcaccatccagggcggcctgcttggttcgggtctcttcgtgttctcgctcactgccttcaataatctggagaatcttgtctttggcaaaggattccaagcaaagatcttccctgagattctcctgtgcctcctgttggctctctttgcatctggcctcatccaccgagtctgtgtcaccacctgcttcatcttctccatggttggtctgtactacatcaacaagatctcctccaccctgtaccaggcagcagctccagtcctcacaccagccaaggtcacaggcaagagcaagaagagaaactgaccc

SEQ ID NO: 9573 - DNA, 487 bp, Homo sapiens
  III.3201 (AA405815)
tttttttttgcatttgtaacatgcacatttattcagaacaaacaactcattaatttattccaaaataatttcacttgataacttgaaatacagagtaaaacaaattggtcaggtaaatatacatgtaacttaaaaagaaacagtcatgtactttaggcataaggacaatgcttttctcttttacaaattcttagttaggtcaaattctctggaagtcactacatttctttactgtgatgtgttttgggtgaagttacaacctatttgcaaatcacatcactggtttgtccaagcagaggtagatgagaggtaagctcctctcctgctaaaagtctcctaaaaacagcaagaaaatatttttatgtgttcaaaaatgctcatttatttatattcctaaattttcttttactcagtataatatagataatttaaaagtaagtagaatatttttattatatatgttttatttttatacttctagttaaat

SEQ ID NO: 9574 - DNA, 477 bp, Homo sapiens
  III.3202 (AA884502)
tttgtgagtgcttccactttattattctttttgagaaatcttgtggacatttttggacctgtgtttttccacgtagaataagcttgtgtatgttattatgttcattttccgatccatgaacatgggaagtctctccatttattcagatgttccttgatatttttcatcagcattttgtaatgttcatcctgcatcctttctcagggacagggccttgaggtggtccaggctgctggacacagctccaagatggatctaccaaggggctctcctgggccgtgcagaacatatcagcacttggcggcagtttcactttgctgctgtcctgagccgagctgttagcagactgagctttactgtcctgtgccggctgttcagagaccactgtgcctggccgaagactgaggcagggacttcaggccagggggcagggctggcttttcctgcctttcacttcaggtgggagcggctgctgaa

SEQ ID NO: 9575 - DNA, 451 bp, Homo sapiens
  III.3203 (AA609449)
ttttcgttccatgttttttatttgtgcactgggaaagaagtcttccctcccatcacatgagccacgtggtgagtcctctggaggcttgaagattatccccctccctgggagtcttgggccatggagggtgggggcggtgaacggaaggggattttgtctctgccctcagcctggtgccctctccttccaggaatgtcccagcggaattgtcaatgaggagaacttcaagcagatttactcccagttctttcctcaaggaggtgaggggacaaggcccaaggggaagcagttgtccttctctaggctgagggagggagggattctggaggagctgggaatgccaaggtgatggggggtatggggagctccttagagggaggaagtcctctcctgtgtggaagccaacttctccacactcaccctgcagactccagcacctatgccacttttc

SEQ ID NO: 9576 - DNA, 360 bp, Homo sapiens
  III.3204 (AI005417)
ttttgagttggtaagaacaattcccaaatttaatgaagatcaaataaagccactagtagcaccattactcaagtccaggaaagtggacaacagggtttggggaagcacttcagagtgcctgccgaataacgccattggagacagcccatcttcacacccataatagagttagagctggctcctgcttgtcctccaggacttggtttgaagccacctcctctgggctgccttgtggcccaccttggccaggtgaggccctttggctgcctgagcagcatacacctgctctctgaaatgtgcctggcaaccatgtgggcacctgtcaacccatttgtctcactcccaccataggctctgtga

SEQ ID NO: 9577 - DNA, 461 bp, Homo sapiens
  III.3205 (AI222168)
ttaaaagacagatacacacacatatacaacatacggtttccgaggagagtgagggctccatgcttgtgagagaggaggaggaggaatatgccgaataaccctcaggtttctcccagatttgaacatgttgtactgtggcatgaggtcagcagagacttactccagccctgtgaggctgaattctaccctgacaaagcagtatcactgtaatatgaagcaagaggattcagggcatgttggcagctgtacagaatgcctgttctagaaagtaatggcaattccaaaacaagagatctatggtgtcacatgagataatcttcagcccagttaagcaataagcacccaaaatactttgaatcccaaacacaggcagctcagaagtttaatggtagaaaagaacttttctccttgaccctattttggtctggaggaataatcaggaagaagaaaactggaagatc

SEQ ID NO: 9578 - DNA, 402 bp, Homo sapiens
  III.3206 (AI247408)
tttttttcaaaattacaaaactatttattagggttaaaactttctagatgtacataaatagaaaatcaatgtaaaatatacatgcaaaagatacacatttctacaatgttcagtgaaatcttgatgctgaacatcagatacatttcagatgctgtatgtgtacaaattcaactttcctatgtatatgtggtcactttattttgtgctgtggaccagtaaatacatatgcaagaaacaaaccttcgacatgccatttgattctgaaaaaatgtctttggattatcccaccaatcatattgatgttctttagaacttcactctcactaaaccatacagcagcatgtgggagaaaagttcatacagaaggaggagggacttacttctcctccttgcgattattat

SEQ ID NO: 9579 - DNA, 388 bp, Homo sapiens
  III.3207 (AA033867)
  misc_feature (111)..(111): n is a, c, g, or t
  misc_feature (112)..(112): n is a, c, g, or t
  misc_feature (115)..(115): n is a, c, g, or t
  misc_feature (126)..(126): n is a, c, g, or t
  misc_feature (255)..(255): n is a, c, g, or t
  misc_feature (329)..(329): n is a, c, g, or t
  misc_feature (383)..(383): n is a, c, g, or t
aagaactctgctaagtcagtttggcaagaagcctccatccccccatatctgatcagggtcctcagcctccgccacccccaggcgatgtctgcttaccttgcctgccttcannacncttccttttanctgggtagggtcctcagcttccaccacccccaggcgacagtctgctcaccctggctgcccgcagcaagattcctgttatctgggtagagtcctcagcctccgccacccccaaggcgatgtctgctcacnttgcatgccttaagcaagattcctgttacctgggtagaagtcctcagcctctgctacccacaggcaatgtctgntcaccctgactgccttcaagcaggttttcacttttacctgggtaagggtccttnagttt

SEQ ID NO: 9580 - DNA, 193 bp, Homo sapiens
  III.3208 (AA034055)
  misc_feature (187)..(187): n is a, c, g, or t
ttttgaaaaaaaatgccctttaatgctcacagaaggtctctccgaggggcagccccaccaccctcctgtttcccttcctgcatttccacgtttttctgggcccagatgcagcctcccctcccacccctggtccctccgccttggttccggctgtcgctttcatccctcctcctcatcagccccttgnagaaat

SEQ ID NO: 9581 - DNA, 369 bp, Homo sapiens
  III.3209 (AA282272)
tgtgatctgtcgaagactgtgctgtccctgtggccaacagaattgggagcgaggggcagggcttcctcattgccgtgagaggactgaacggagggaggatcaatattgcttcctgctccctgggggctgcccacgcctctgtcatcctcacccgagaccacctcaatgtccggaagcagtttggagagcctctggcagtaaccagtacttgcaattcacactggctgatatggcaacaaggctggtggccgcgcggcttgatggtccgcaatgcagcagtggctctgcaggaggagaggaaggatgcagtggccttgtgctccatggccaagctctttgctacagatgaatgctttgccatctgcaacc

SEQ ID NO: 9582 - DNA, 314 bp, Homo sapiens
  III.3210 (AA282273)
aaaagccaaattggacgagagttttattattccaaaatccagttaagtgtttaatcaaatacaattaaacatttaaaataaaaatcaactatagtagaaccagaggtggtgaaggatagattttatcaatgtgattaaaaatatttaaaaggaggaacagcttcagaaaaggaaacaaaaacacaaaaaaaatattcaaagtgtttatcaggaaaagaaacactgaatagcactcctagaccacaggcttcttaacatgaaacccaacgaatattcaaaattcaaaagtctcagcccttgatattgaggcagtc

SEQ ID NO: 9583 - DNA, 421 bp, Homo sapiens
  III.3211 (AA416767)
tttggtttctcaagcttttcatgctttttagactcctttgcttttttaaggggaacattccccacctgcagctcgtcctccagctgagaggcagtaggccggctgaggtcatacttctcctcatactcattactaagaattttgtcctgggccttctttttgggaggtttctcctttgctggcttgggaggacctggcaccacatttgggtctcggtggccatgttcccgcctgtccatgcggttgtcccggaaacggcctgggccagcagcccttgtgctgggttctgagatggtggtgggaggggcatttgtgaagctctccaagctggtggccttgctgggcctcctggttgtctgtggcctctccctgtgctgatccttccgggatggagggtaaagattctctgaaactgagggtc

SEQ ID NO: 9584 - DNA, 384 bp, Homo sapiens
  III.3212 (AA482918)
gctcgactttagatctgggtgtggtggctcatgctcgtaatcccagcactttgggaggccaagtggggaggatcacttgaggccagagttcaagaccagcctgagcaacatagtgattggtattaggtcttcttcacatgtttggtaaaaattcagcaatgaaaccagtaagccccaggctattcttctcaatatctacaaacaaaacaaaaaagttagccaggtcttcgatgtgtgcctgtagtcctagctacttgggagtctgaggtggggggattgcttaagccctggaggttgaggctgcagtgagtcgtgattgctctgctacactccagccggggtgatggagccaagaccttgtctcaaaaaaaaaaaagagtcgac

SEQ ID NO: 9585 - DNA, 449 bp, Homo sapiens
  III.3213 (AI126275)
tttttttttgacagagtatttatggttttatttaacacaaataaagtgtgtacatgagctgtctattaatttttcttgctgtgcagcctggcattgggactagtgactctgctgggctgtcgggttactctctccacagtggctttaaccgttcttggagaagcatgttgagcaatctcagcacagtaagatttgttgcacatcagcagcacttccagctctttgacatcgtggaacaggaatttttggaagccactggggagcatgtgttttgcttctttttgctcccacaaccaatgttggggatcaaggtctcgcctttgatttttctccccaccctgttgtcaatgcctctgggttgctgctatatgcgtacatctaattttgatatgtcagtctgactggtgaaggataaacttcttggtccatcttagatgatcttgggcttc

SEQ ID NO: 9586 - DNA, 211 bp, Homo sapiens
  III.3214 (AA028031)
  misc_feature (179)..(179): n is a, c, g, or t
  misc_feature (201)..(201): n is a, c, g, or t
agttcaatgttttattttataaaatagatggagaaactaaaaatcagagaggttatacggcttaactgcatgcagttcctaatggcagcccaaggatttcattcttcaagaggaaccttttgaacaactgtgacatcagctaggtctgcagcagcactgtggttcatgctccagctganggagtgaacctcacaaaagggnggctacaccc

SEQ ID NO: 9587 - DNA, 644 bp, Homo sapiens
  III.3215 (AA143012)
  misc_feature (509)..(509): n is a, c, g, or t
  misc_feature (552)..(552): n is a, c, g, or t
  misc_feature (591)..(591): n is a, c, g, or t
  misc_feature (605)..(605): n is a, c, g, or t
ttggttttctcataaatccaatataaatttgtaggttggttcagggtcaaaattgccagtgctttattagacagatgatactgatagacacacagagcccaggtcctggaacaagacaatcctgtagtgccaagatctggtcagttgcgttaaggagctgggtttgattctagagtccaggtttatagagaaaccctggctagattgagcctacccatggggagacgatttcaagacaggatgagatctgggaagaattttgttgtcatctgccagggaaattatcacaggactcattgaatgcaataacatgtgagtaagttcccttttgattctgggaatcagcgattttccctgtggattaagacaaaccaacgccagaaggtctcctgtgcttattttaaccatctgctcccatcgtgaaccctggagcatgcatttcctagaagtggtttcatagctcctgtgtgttcatggaaaaggggagtataatgatggggatgctggangtttttaatgtttccaaggaaaggaacccacactgctcccagngttctttccatggcctgagtagaacggggcatgtatgcnggtgcttaaatccncctcgtgagccaagggccttttaagaaaaaggcaccagg

SEQ ID NO: 9588 - DNA, 349 bp, Homo sapiens
  III.3216 (AA151117)
  misc_feature (221)..(221): n is a, c, g, or t
  misc_feature (244)..(244): n is a, c, g, or t
  misc_feature (249)..(249): n is a, c, g, or t
  misc_feature (265)..(265): n is a, c, g, or t
  misc_feature (278)..(278): n is a, c, g, or t
  misc_feature (308)..(308): n is a, c, g, or t
  misc_feature (330)..(330): n is a, c, g, or t
taaaataaacattttatttaaaaatatatgcatttttttttttttaaaaaaagaacacatgccaactttggtattttagccactgctttttgtctcttcccaataacccacatttctttctgattatgctcaattgagccaaagagaccaacgtgaaaacgccactccacaaggtcccacagagaacctatgcttgcactttttttctttacaaagtgtcnctttgtgcttcactgagggaggnttttnagcacccagcaatacnttgaccaccggtnccttactgcagggccattggaaaggaatcnctgggagcagtgtggggtccantcccttgggaacattaaaa

SEQ ID NO: 9589 - DNA, 322 bp, Homo sapiens
  III.3217 (AA988505)
caaaacattcctttattattagaaataaattatttgtataaaaaattgcatgcatcaatcattgcatttatttttagcacaacccagggcttcaatctggtcagccattacaagaaacagactcattgtcttatacaagttaaacaatgtgggacaggaacgggagttctcacaatcacagaaaaatacaagaataacatcagacattatttatttcaacagcatttttttcacgagctaacattagttttccttttgtgatttgttttaactgctcatgaataagcaatactttagcttgacactcattggttttattgta

SEQ ID NO: 9590 - DNA, 447 bp, Homo sapiens
  III.3218 (AI792016)
ttacagcaatcattcaatctgaaacagggaaatggcacaatctgaagagacgtggtatatgatcttaaatgatgaacatgagaccgcaaaaattcactcctggagatctccgtagactacaatcaatcaaatcaatagtcagtcttgtaaggaacaaaaattagccatgagccaaaagtatcaataaacggggagtgaagaaacccgttttatacaataaaaccaatgagtgtcaagctaaagtattgcttattcatgagcagttaaaacaaatcacaaaaggaaaactaatgttagctcgtgaaaaaaatgctgttgaaataaataatgtctgatgttattcttgtatttttctgtgattgtgagaactcccgttcctgtcccacattgtttaacttgtataagacaatgagtctgtttcttgtaatggctgaccagattgaagcc

SEQ ID NO: 9591 - DNA, 510 bp, Homo sapiens
  III.3219 (AI820620)
caaaacattcctttattattagaaataaattatttgtataaaaaattgcatgcatcaatcattgcatttatttttagcacaacccagggcttcaatctggtcagccattacaagaaacagactcattgtcttatacaagttaaacaatgtgggacaggaacgggagttctcacaatcacagaaaaatacaagaataacatcagacattatttatttcaacagcatttttttcacgagctaacattagttttccttttgtgatttgttttaactgctcatgaataagcaatactttagcttgacactcattggttttattgtataaaacgggtttcttcactccccgtttattgatacttttggctcatggctaatttttgttccttacaagactgactattgatttgattgattgtagtctacggagatctccaggagtgaatttttgcggtctcatgttcatcatttaagatcatataccacgtctcttcagattgtgccatttccctg

SEQ ID NO: 9592 - DNA, 424 bp, Homo sapiens
  III.3220 (AA481448)
gtgccaggaaatcacggtgcccatgtgccgcggcatcggctacaacctgacgcacatgcccaaccagttcaaccacgacacgcaggacgaggcgggcctggaggtgcaccagttctggccgctggtggagatccaatgctcgccggacctgcgcttcttcctatgctctatgtacacgcccatctgtctgcccgactaccacaagtcgctgccgccctgccgctcggtgtgcgaggcgccaaggccggctgctcgccgctgatgcgccagtacggcttcgctaggcccgagcgcatgagctgcgaccgcctcccggtgctgggccgcgacgccgaggtcctctgcatggattacaaccgcagcgaggccaccacggcgccccccaggcctttcccagccaagcccacccttccaggcccgccag

SEQ ID NO: 9593 - DNA, 336 bp, Homo sapiens
  III.3221 (AI205630)
ctaatcctgcgaatatgggtagtgcttcgttccatggacgttacgccccgggagtctctcagtatcttggtagtggctgggtccggtgggcataccactgacatcctgaggctgcttgggagcttgtccaatgcctactcacctagacattatgtcattgctgacactgatgaaatgagtgccaataaaataaattcttttgaactagatcgagctgatagagaccctagtaacatgtataccaaatactacattcaccgaattccaagaagcggggaggttcagcagtcctggccctccaccgttttcaccaccttgcactccatgtggctctcc

SEQ ID NO: 9594 - DNA, 364 bp, Homo sapiens
  III.3222 (AA452805)
gagacggtgtctcgctgcactccagcctgggtgatgcagcgagacaccgtctcaaaaaaacaaaacaaaacaaacaaaaaaaaaaaaacaaaacccccacacaagtctaattaattagttttccaaaaccaaaccaaaacaaaagaaaaaaaaaaagccagattttggagttttagaacagaattctctcttccttaaggttcacttcctgttgtccaaagaaacgcaagatggcagctaagccactgctttgtggaacagcaaacatgcagtatctcgccatggcctcaagctttctctggtgaacacgacagaatcagtcccatgtacaaacgggcagcaatgagaaggaagaccctttcca

SEQ ID NO: 9595 - DNA, 587 bp, Homo sapiens
  III.3223 (AA452941)
gtcggtgtccgagaactccgcgggtctcccactacatcatcaactcgctgcccaaccgccgttttaagatcggggaccaggaatttgaccatttgccggccctgctggagttttacaagatccactacctggacaccaccaccctcatcgagcctgcgcccaggtatccaagcccaccaatgggatctgtctcagcacccaacctgcctacagcagaagataacctggaatatgtacggactctgtatgattttcctgggaatgatgccgaagacctgccctttaaaaagggtgagatcctagtgataatagagaagcctgaagaacagtggtggagtgcccggaacaaggatggccgggttgggatgattcctgtcccttatgtcgaaaagcttgtgagatcctcaccacacggaaagcatggaaataggaattccaacagttatgggatcccagaacctgctcatgcatacgctcaacctcagaccacaactcctctacctgcagtttccggttctcctggggcagcaatcacgcctttgccatccacacagaatggagctgtctttgcgaagcaatccagaaaa

SEQ ID NO: 9596 - DNA, 435 bp, Homo sapiens
  III.3224 (AA446906)
tttttttttttgtgctgaccatttattgggacttgactgaccagggcttgtaaggatggacacaaaacttcaagtctttcgtaatgaaaggattgattcaaaataaatattctaaaaattatgtcaaacactaatgaataagtgacatttacaaatagtttataagagaatcatttgggtgaacaattttcatttcacaaaataaatagctcatatccaaaaaagacacctctccttaagcagggaaaaaaaagcccaacaaaaataaagtcatgcccgtggacagccctaatgttagttttagggaggaaaacaccaacactgagacatacaaaagtatttgaggagaattacatgttattaaatttgtcctagaacctgggggagagttcagggaaagagaacagctggtatatttaagaaagatttaaatag

SEQ ID NO: 9597 - DNA, 107 bp, Homo sapiens
  III.3225 (AA447027)
tcggcacagggcggggattgcgactctcacaccctgagctccggtgctcctttcctaactccactggctgcggcatctgtgggaaaagtgtggctgggtcttcgagg

SEQ ID NO: 9598 - DNA, 430 bp, Homo sapiens
  III.3226 (AA563602)
gttttaaagagatttattttgagccaatatgagtgaccatggcctggggaacacaggctcaagaggtcctgagaaagtgtgcctgagacagtagaattacagtttggttttgtacattttaggtggacaggagttacagacaaagacataaatcagtacatggaaggtacagattgtgttcaactgaaagcagtggctcaagcctgtaatcccagcacttagggaggtcgaggtgggcgaatcgcttgaggtcaggagttcgagaccagcctgccaaagtcctgggattacaggcgtgcaccaccgcacccagccagttttgctttatgcagtttcagttacccacagtctgaaaatatgtgagaacagtacattttgaggccacattcatttaattacagtataattgttctatttattgctgtcagtt

SEQ ID NO: 9599 - DNA, 296 bp, Homo sapiens
  III.3227 (AA400402)
ggctcttctggtgtttcagcttggggagagaggagtggccttcctcttgcagttgaggcgggcggctcagccggatctcgtggcggcgcatcttgctccctctcccaggcctttacccgctccctaggattcccgggccctgtagtgggagttgggagacgtgattctctttcattctgcgcctctcattggctctctgaccttgtgcggaagtcctttagctgacctcagtgcattttttagaagatggagattgtattcacagtgactgtcagctttttaacggcgggaactga

SEQ ID NO: 9600 - DNA, 339 bp, Homo sapiens
  III.3228 (AA400403)
aaaactggcattaattttccacacttttaaggggtttgaccatgggagttttccagccaagtcttcaaaatcctttagaacttcttcctttgtttgtttgaactggtaatcttgaaactcctgaaccaccacaaataagttatcaactgatctcagacaatgaacctgtgccagactttccactgaaatgacaaaatatatcttgccacggtctgctgattttgcatgatgacccaagtttctctctgacttcatctgcagctgtttgctcaaagccagtaggtacagtggctccaatagtgactagaagctcagattcacttccgaggtcgctttctg

SEQ ID NO: 9601 - DNA, 181 bp, Homo sapiens
  III.3229 (AA228915)
taaatctcggaatttggcctttagtaagcatagaatagcaaagtgtaatacctgagctgggggaaaaagtccttgaattctttaggaaagacttaattggtgggtacaaagtgaaatgctcactggaatcaggaatcagaaaccagttctgatcacctatccctacatatccttcttcact

SEQ ID NO: 9602 - DNA, 381 bp, Homo sapiens
  III.3230 (AI204092)
tttgactttacaaaaatgttcattagcagttttattcataacagaaaaaaactagaaacccatatgtctatcagtagaaagggtaaattatgacatattcatccaatgaaatatcactcagcaataaaaataacatacaacatatttctgacacatgtaacaatgtgcatacaccagccttaatgcttagtgaaagaaacaagacacaggagtacatactctatgattacatttatgtgaagttctatagtaggcaaaactaatctacattaatacaagtcagaacaaaggtggcccttgagagccggagatagcagtaactgggaaggggaattagagagcctcctagaatgcaggaaatgctgtcttgttctgagagac

SEQ ID NO: 9603 - DNA, 385 bp, Homo sapiens
  III.3231 (AA043797)
  misc_feature (333)..(333): n is a, c, g, or t
ccctggctatcccttccacaccaccaaattcaccatctcactcaccttgcccttctcctttaccctttgagcctcgagtgcatctctctgaaaattttttggcctctcgaccagctgagacattcctccaggagatgtatggcttgagaccctcccaggaaccctcctgatgttggccagttgaagatgaacttagtggacaggctgaagagactggggatagccagagtggtcaagaaccctggtgcccaagagaatggaagatgccaggaggagaaattggtcctcaaaaaccagattctgctgtttatttaaattcaggtagcagtttantaaggtggactaaggagggaatcagagtcttccagtcataattggggtaagc

SEQ ID NO: 9604 - DNA, 397 bp, Homo sapiens
  III.3232 (AA043798)
  misc_feature (285)..(285): n is a, c, g, or t
  misc_feature (347)..(347): n is a, c, g, or t
  misc_feature (362)..(362): n is a, c, g, or t
  misc_feature (377)..(377): n is a, c, g, or t
  misc_feature (384)..(384): n is a, c, g, or t
  misc_feature (392)..(392): n is a, c, g, or t
aattgcacaactgatatttaactacaggttttttctctggacatattgacatattaaagtatttctcttcttgaaaatattttaaaatacaattgcagtaaaaacaattgcatgtagacattattctccatctgttttttttgtaggagactgtggaagacaggagggagttgggcgtgcacacagaatttaccctaacagcttttgttagggaggtggtcccaaatactttatattgggactccgtactcaggtgactttctggttaaaatattgaaagacggntgcaactgggctttttttaccttgacaacttgagacaaaatgacaaattgtcagtggtccgnggttccaggcccacntctccaaaaaaattngggttancccccggntatcc

SEQ ID NO: 9605 - DNA, 313 bp, Homo sapiens
  III.3233 (AA621236)
ttttatagataccttttattcaggcagtatactttagaagtgtgttcaatgactttttggtattacagttggttttaagtaacttgttacacatttaaccagcatcaaataaattgacattatacataggagatgctcaaatactttgaatggatacagctaaatgagggttcactgtattttaaccaccgtggttgtcttcactaagccatgaagtcattgtattcatcaagtttctccaataaaacctttcaacagtggaaatatttgctttttctcctgcatgctgaaaagtcagtagtcatgtgattat

SEQ ID NO: 9606 - DNA, 458 bp, Homo sapiens
  III.3234 (AA434419)
accaatatagtaccatgtttattttatattttattgagatacagtatagtcccattagaatgaacaattcttctcagaatcacctgggggagaaaaaaaaaagaacagatcctaaatgttcagttcagtggcttttgaaaattttatctaaccactactcaaaacagatacagaacattcccattattccagaaagtctcctgattctcacctttttgaattataattttgtgccatctgtaggattttccaaccatcatattagcattgtgttattatggcatcttttatcttctgtatctattttttccttgcaggagactgaagagccaattgtagagtgtcaggattgtgaaactgaagtttccccttcacagactgggggctccgtaggtgacctgggggatatcagctccttctcctccaaggcatccagcttacaccgcacatccagtggg

SEQ ID NO: 9607 - DNA, 423 bp, Homo sapiens
  III.3235 (AA434517)
ggcgtgactggagccttccctccctgtctgatgccaaggcctgcatcaccatcctcctcacacactggcgtccctgtctgactgaccccttttctaggactagagaatgaagacaagttagtctgatagcacctgctactgaatcttttcttcacaaagtctccccttggccctcagactacatgacaggcctacatgtgctgagcctttggggcagcaggaagctggttcacacacccaccaccaaaatctcatgcagggagtggggagcgtgggataacaagtaaaggacattctccttcatgtaagtctattccctctgacaaagcttcctactgctgctgcaaaaacagcacacccaatttctgctatgccttctcctctactttaggctctggacacctgcaaagaataacaaaaagc

SEQ ID NO: 9608 - DNA, 429 bp, Homo sapiens
  III.3236 (AA460824)
tttttttcacactgaaacacatctttttattatatactaaatttaaaaatacaaatcttattaaaaatgcttatcaaacattgtatacataagtactgtcaaatactattgggttttgacattatgtacatttgctaaggttaattagaaacagaacaacgtaatatcactttgctgacactgaatttcagcagttaagtgttttaaaatttggcaactatgaagtagtgatctgcacaggaagatgtttggagaggtaaaataataagaaaacaaacggaataatgcagacatttctgcagtaagtgttaataagtagatttcttcctcatcctcttaactcattgtaacagaaattaaagtgcacaagaccaccaggaatacctgatttggtgtaccctaaatatacactacagccggctgtgctgc

SEQ ID NO: 9609 - DNA, 459 bp, Homo sapiens
  III.3237 (AA461126)
cgttgatttgcctcttaggtccgatgaccaataggtattctgtatatggtaggggtttctttctaaacatttttctttggttttaaaaaaagttatgcaaatttgtcttatctttagtaaactatgactacatttatctgcaatttttaaaattttccatatctttgtcattcattgtgtgtttgtaaataaggccgatagaatgtttcctataaatggtttgtactagtacattagtgttaaaccagaactgaaatttaaacatatatatatatgaggatgtatatatggcatcatcagcttatttagaactgatggccataccttacaatcttgttttacccaaaattaagctattggggttgaaagctaaaaggagcacttttgtagaatagcaacttttcttttcctctttcttgattgtatggtggggtggtgacctatttttacaaattatac

SEQ ID NO: 9610 - DNA, 248 bp, Homo sapiens
  III.3238 (AA889089)
tagattaaaaataagtttaataagaattatacctatcccatctctaccccatttctacccacaaaaaatacatccttcagtgtcagtaataaaaagatgtgatgttgtcagtacttacataatggtattcagacaagaaggttcaattccatacttggaaatcaaagccagaggaaaaggaagccaaaatgttacagataatgattaagaaatgaacataagagggaaaacatgtatgcaccagaaag

SEQ ID NO: 9611 - DNA, 406 bp, Homo sapiens
  III.3239 (AI247437)
tttattgttcatttattctgttcccttatataagctaggtattaggctaggtatggaaatacaaaaaggaataagataaggcagctgccttcaaggatctcactgtctagggaaggggaaacacaaatatctcaacaccattgagtgagtgtgatgatagagatacgcattcagtcaacaaacatgtcctatgtgctgggtgctgtgctaggtgctgaagatacaatgaacgaagcaagcatggtccttgaattcaccgagctcctattccttgaaatcccacctcctggaatcccccatcagcaagtgtccgctgtacctggcctgctaccacctaaagactgagcgcagccagcaggactgggaaaggcagggcgatgatggcagtgaagggtaagcgggacca

SEQ ID NO: 9612 - DNA, 498 bp, Homo sapiens
  III.3240 (AI075249)
agtagagacagggtttcaccatgttggccaggctggtctcaaactcctgacctcaggtgatccacccgccttgtcttctcaaagtgctgggattacaggcgtgagccactgcacccggcaatacttccctttttctaacatatctttctcacagtgctcatttagagtaagaaatatttggaaatccatatatacatatatatgaaaattatatatatggaaatattatatatatacaaatgtatataaataatatgttggctaccttagattttttatttatattttatagagaagttccttaaagggggaaaatatttttatgggaataactctttatacagtaaatctcttaaagcactaaatgcatatacatttatcaaatacatggagatttgatttccttttgaaaatctaccatgtgtgctgaatactttgagtacagttaatcataaaaaaaacttttgattaattatttcaaataaaaatattaccatg

SEQ ID NO: 9613 - DNA, 361 bp, Homo sapiens
  III.3241 (AI151464)
atctctgctattttaatgaattttgtcaaaaatattgattacattgctttaatttcttaaaatctataaggtttatatttatggtcaatatgaaattcttttaaaattttgatagatttacacttaataataaaccttaatttagcatttgaaatttattcaaaatacttttacactctttctgtgaactgaaaagaatcttggtccttcatagaattaaactaaaatcactacttggtattaacgcattgatcctatcgattcaattaattccattcaagcaaaccaactgagtccctatactgtttcaggctctgtgttagacatgcggcgtagaatcataaatgagccataactcatt

SEQ ID NO: 9614 - DNA, 489 bp, Homo sapiens
  III.3242 (AI125847)
tttactgagtttttatttaatgggctttatcggagaattttaggcatggacgaatgacaggaaaacaattttagagggaaggggctcttacagggtccatcaaatcatgcgcgccaagtgcattacagaaccagtaggtatagagctggcaccctgcctgcaggctcccagcgtaccggagacagacctgaagggtgtggtccaggcccggggtgggggggccagtgttctggaaaagccaagggaagggttcaagagggctgagcaggttcctggtgagtctccctatcagcagagcaatgagacacactgacctctgacctgtatctgcagtgatgtatctgtacctgtatcctgtggccacagtgtgatggagacagatgagtccacctgttgttgcagagcagcataggggtgctccccaggagaggagcagaggactctgggctctggggtacctggtccagacttgggtgctcagggaaagct

SEQ ID NO: 9615 - DNA, 370 bp, Homo sapiens
  III.3243 (AI239691)
tttaattggcttatttctacaagaaaatggggacttttttgtaaattactagaaaaagaatttcagcagtagcttgagaacattaggatttttgtaggataactcttaccatcttatttttcattttgccagatagaatgcttaacaccaaacgaccatattccaagagatctattatgaaactgtgttaatatattttgtaaagccaaagatatggtagaaaaactcatctaaaagagggagagcccacagtattggtgataatcatgagactctacacttgaacacagcctagtattcaccagtcttacctgtttccatacacaatcctgtcacactggaggatgtgtatatgctgaatcagcaacaa

SEQ ID NO: 9616 - DNA, 405 bp, Homo sapiens
  III.3244 (AA634487)
tttctgttcaaggtatttatttttcaggtaagaaagacttgttgatatttaaatgctggtgggggaaaaaaaaccacagagaggaaaaagtaaagacaaagcaggcaagaggcggagaaggctcacgatggctttaagaacctgctgaactcggcggctgtgactttagcatcagtctccatttacctgatgttcttggaagctctcggcagcccaggctgatctgggattgggtcttatcaggagttgcctccatttgcaagaacgtggtgaaattgacagaagacacagttacgtcatggtttggggggaactgctagcaacgagccatcaatatttaaggagaaagtaacagaatccagggaatgggagccccaggaaaactgaacaagtttggggagagac

SEQ ID NO: 9617 - DNA, 473 bp, Homo sapiens
  III.3245 (AA731522)
  misc_feature (434)..(434): n is a, c, g, or t
tttttttttgttttcaatatactttatttcatcctaaattgatataattttctaaatggctgtatttaaccaatttgcaaaattactgcaaatttaacaatggactctcaagatagtatgagacagctccagcacaccactggttggttgtcttattcttgagctgggagaattctttatatattctacatcagcactgcccaatggaactttctgcaataatgaagatgtcctataattttgagtggtccaatctgatatccactagttatctgtggctactgagcacttgaaatgtggctagtacaaatgagagactgaattttaaattttacttaattttaatccatttaaattcaaatttaaatatccacataaggctagtggctatcataacagacacgaaagaactgactctctcccatgcgggatanactttgggacaataataacgttaataagagttatattgt

SEQ ID NO: 9618 - DNA, 437 bp, Homo sapiens
  III.3246 (AA669110)
atggactccttgggaccacacctgtttaagcgtgcttatttatcaattcctttccccgagtcagttctcacttctgctttttcactttgaagttctctaagactcttatgtcacatctctgaatcctcatgttcctcctttctctcccagaattacactgaatatcctctcttgaccacttcaattcttcagaaaaggctgccttctcttcccacaagagggggctttctggttattgcatctttagatctaataattatttctctttagtatttctttcctaaaaacagctgaaactcgtttctttatttcacctccatctccttctattagtgtcctgggtggcctcacagcattagcatttttatgaaaaaaatgtttccagcttaactttcttcctctacatcccacttccctttttatttttggtgcttgtg

SEQ ID NO: 9619 - DNA, 243 bp, Homo sapiens
  III.3247 (AA135867)
  misc_feature (218)..(218): n is a, c, g, or t
  misc_feature (230)..(230): n is a, c, g, or t
  misc_feature (237)..(237): n is a, c, g, or t
gatgccagcttaaaaatcactgttgtgctctgcatttcgtgtgttagaagctgattctaggctgaggaaagcaagagttctctacttttgctcaatattgaggcttacccagtttgactctacagctagtgaagtggtttattgcttcaataaaaatatacttgaatgatgaatttatttatgttttgttttgtttttatttagagatggggttttgncaagttggccangcctggncccgaa

SEQ ID NO: 9620 - DNA, 412 bp, Homo sapiens
  III.3248 (AA135868)
  misc_feature (380)..(380): n is a, c, g, or t
caggtttattttcacattgtttaattttatgtacatttcacatatcataaatacacacaatacaaaaagctatacaaaaaccctactaattcaacatttaaaaaagggagagggagatactgcatttgatttctgacacttttctgtttaaataatacttaaattcagttttcaagaagacaacaaattgaaaatcattaatttttcagagggctttgtgttcacataaattcatcattcaggctgggcatggtggctcacacctgtaatcccagcaagttgggaggctgaggcaggtggatcacctgaggtcaggagttcgagaccagcctgggccaacatggcaaaaccccatctctaaataaaaacaaaacaaaacntaagatagattcatcattccaggtatattttt

SEQ ID NO: 9621 - DNA, 402 bp, Homo sapiens
  III.3249 (AA451715)
ttttttattatctttagaactttattttgccaacactaatttaatcttgcaaacaaagcagttatttctttgcaaatcattttgtaacaaagaggcctttctatggttgtatttttacaaaaacatttatcccagttaaaatggaacacaataacattgtttaggatagttgctgaaatctgctaaaatacaaattgcaatgagatagtttggtgttttttagttgtccaaatacagctttataattttgttgttttggtattctgaggcaaaaagattagttaattttgtgaatctgtatgtcttgggtccttagtacctggatggcctcttacaaatcaaaaatatcattctatgtgctatgtggtgagctagggggatggatgtcataatggtgagatc

SEQ ID NO: 9622 - DNA, 476 bp, Homo sapiens
  III.3250 (AA453328)
gtcacacaacaaactacaagacatcccatataatatttttaatcttcccaacattgtagaactcagtgttggacacaacaaattgaagcaagcattctatattccaagaaatttggaacacctatacctacaaaataatgaaatagaaaagatgaatcttacagtgatgtgtccttctattgacccactacattaccaccatttaacatacattcgtgtggaccaaaataaactaaaagaaccaataagctcatacatcttcttctgcttccctcatatacacactatttattatggtgaacaacgaagcactaagtggtcaaacaatacaactaaagacacaagttttcaggagatttccagatgatgatgatgaaagtgaagatcacgatgatcctgacaatgctcatgagagcccagaacaagaaggagcagaaggggcactttgaccttcattattatgaaaatcaagaata

SEQ ID NO: 9623 - DNA, 434 bp, Homo sapiens
  III.3251 (AI150413)
tttactacactggaatgtaattaagtgtgaaattatagggcagattatcagtgctaatagtttagagaaagaatcagtgaagactgacgtagaagtaaattccaaagttcactcgtcgaccaaactacccttctaaacgctccacctactgatagtagtaccataacctgggtagctaccttgagaattagaagggcctttagaggtccaactcctttaagaaagaaagaccaggcacgggaaaggcctccgcagacatgagtctagcacctgggactcatgaagttctgaaaagaggggtgtcctgaaggtccaaggcgcctttgttgggggtccgggaatccgcggtgtgccaggtcggaaaaggcgtccgctttcctggagaggaggctaaggtgccgggcgcttcggtgaggtggcggatgttggggggc

SEQ ID NO: 9624 - DNA, 362 bp, Homo sapiens
  III.3252 (AA427730)
tccccattgcctggggagcagccctcaatttcgccttgtgcctcccctcttccaggtgccaaatagccataacctcgtcttggaactgttatgtggcctctctggggtccaggtttcctggtcaagcctgggaatgccagggaggaaagggggtctggctacagcgaccctggtcttaggcaaggggaacatttctcctggagagcaggtctacctggctgcctgctgccagccagggcgatgcctggaagcctactgacattgcagggagtcagcctcgcccccaccccctactggttttccaatgctttggctggagggcaaaattttactactactcatctttttggagaccagggctg

SEQ ID NO: 9625 - DNA, 419 bp, Homo sapiens
  III.3253 (AA427731)
ctgggggctgcttttatggggacgacctgacagagggcatggtccgtacaaaaccgggaacaatacatacatatatatattatatacagagatgcggccctcccgacggctgggcaggggtggccgctggccatagcagcccgaagcggccccgcccaccacggttccgccccctccatctgccggggtgaagtgcgcgacgccaggactgagacagccagctccttcaggggatgggggcacatctggggataggaaggggtggggacaagaaatactgatcgaagtcatggtctatttacaggggacaagaagccaaaacggatgggatgggtggtctgtttttaaaaaatgaacaaaaacccagttagggcaggggcatgaagtggcaaaatgagatggattttgaaaggggaggg

SEQ ID NO: 9626 - DNA, 449 bp, Homo sapiens
  III.3254 (AA496862)
agcctcccaaagtgctgggattacagacgtgatccaccgcgcctggccagagcttgacagttggattgatgaaacctgagaatgtatgctttatatgttgttcattttaatttgttatatctagaaatttagctcttactgttgactataacacatacatgacgtgagtagaattttatctagattgagttttcagaccgtaattggtttcaagaaaataaataaggtattggaagtgaactaaaattagtaactggctttggcattagactttaatgcacttaaattacatgatctcatctgtgagataatttgacagaggaggacgatggcatgtattatgtccatatgaggaaagggcagagaaatagaccctgcaagattcattagtgttactccttcctcctgttcgttttctttcttcgttttccccccctggtaagcattaa

SEQ ID NO: 9627 - DNA, 515 bp, Homo sapiens
  III.3255 (AA496901)
ttttttttttttgtatttttagtagagacagggcttcaccatgttagccatgatggtctcgatctcctgacctcgtgatccacccgccttggactcccaaagtgctgggattacaggtgtgagccaccgtgcccggccaattttttgtatttttagtagagacggggtttcaccatgttggccaggctggtctcaaactcctgacctcaagtgagtcatggcctcccaaagtgctgggagtacaggagtgagccaccacacccagccaaaaaaaattttttttaatgcttaccagggggggaaaacgaagaaagaaaacgaacaggaggaaggagtaacactaatgaatcttgcagggtctatttctctgccctttcctcatatggacataatacatgccatcgtcctcctctgtcaaattatctcacagatgagatcatgtaatttaagtgcattaaagtctaatgccaaagccagttactaattttagttcacttccaataccttatttattt

SEQ ID NO: 9628 - DNA, 421 bp, Homo sapiens
  III.3256 (AA713779)
tttttttttcagtagtttttccagaagtttctcttttgtttgaaaaaaagagttttcaaataatcagcttttggttttgttgatgctgttcacttttctatttcaataagttcggttctaatctttatcatttccatccttctgctatctttagatttatctgttgtgactacctggattatttagattgtttttttgtcggggggagggtcctagaggttatatggcaaacttacatggtaacataaagaaacgcttttggcagggcatggtggctcatgcctgtaatcccaacactttgggaggccgaggcaggtggatcacctgaggtcaggagttcgagaacagatggccaacatggtgaaacccagctctactaaaaatacaaaaaaaaaaaaaatagccaggtgtggtggcacat

SEQ ID NO: 9629 - DNA, 396 bp, Homo sapiens
  III.3257 (AA884432)
ctattagtttcaaagaacttcttaatttctggcttaattttattatttacccaggagtcattcaggagcaggttgttcaatttccatgtaattgtatggttttcagtgagtttcttaatcttgagttctaatttgattgtgctgtggtctgtgagattgtttgttatgattttagttcttctgcatttgctgaggagtaatttacttccaattgtgtgatcaattttagagtagatgccatgtggaccaataataatgtatattctgttgctttggcatggagacttcagtagatatccatcaggtccacttgatcctgagctgagttcaggtcgtgaatatctttgctaattttctgtcttgatgatctgtctaatattgacagtgggatgttaa

SEQ ID NO: 9630 - DNA, 432 bp, Homo sapiens
  III.3258 (AI125335)
tttttttttttttttaataaaagagaaagaaactcaaaaaagtagtatggttacaaaaaaaggtaacaatgagtacggccagaattctactgcctttggccatggcaggacttgggtgggaaaacagaaggaaagacgcacatgcacaggtgtgtcatatgctcggggtcacctaagctggctaagggtcacccctcaatgaagattcattgagttattgctttacagatgaggacagtggcctcagacaaattaaacagatggcccaaagtcacacaactacgaaagcaaatctgactggttctgaaacccatgttttaaatagaataccacagtttctcctttgcaaagaaaacaagaaatcaagaacttataaataaattacacagattaaaaaaaagctaagtttttccttttttaaaaaggggtttt

SEQ ID NO: 9631 - DNA, 360 bp, Homo sapiens
  III.3259 (AI223011)
agtcagagacaaagagtttattactcatagcaacagaggagcagagtaacatctttgtttgcacaagctgcccaaacctcaattcccacaggatgacaggaggacagccaggggtcacctgcataggtagtgagatgggtttccagccaggagtcccaagatgaggaagtccctgatcttatacaggggcttctgatggcccacactcatcctcccctccagagagacacaatagtttaattactctgcattgaaaatctcttcgggagaaggagaaatctctttactatcctggaatgcaaataaatctgaataaattggctgttaatgcttagacttaaatgtgaaagattcataaag

SEQ ID NO: 9632 - DNA, 302 bp, Homo sapiens
  III.3260 (AA626881)
tttcaaaaagtgtataatttttatgtttatattataggcttctcagaaactaaaaggttagaaagtttttttatgcttagctatttttaattaaaatagaatcccaaatataacaaaggacttttgtgtacagtaatgttctctgggttaaggtttaacaccaaacctgatgtgaccagattctgtttttatcctcctgccagcttcttggaagcctgtaaaatactctttgttttgttgttgttgagagttctaatgccgattgagctttttgacaaatctattgatttttccaacacttt

SEQ ID NO: 9633 - DNA, 402 bp, Homo sapiens
  III.3261 (AA812950)
tttgtacccatcttaaattttttttatttggatctcttgctacagaattattgtgctcctttggagtgtcatagttccttgatttttcatgtttcctgtgtccttacattgatatctgcacatctggtgtaataatcactttttccaatttttaaaatttgcttttgtaggaaagaactttttcctgaagatgtatctgtggtgttgcttgggtagagcacttcggttttgattctcggtgaatgtagtagcctctgtataagattctaaacagcatcagtgatatttgtgattttctcagtggcttagggtgtggttattagtggaggctgtggtgaagtttttctgagaagtgggatgccaggtaggcctgtcttcaggcccaatggtggcagcagtggg

SEQ ID NO: 9634 - DNA, 522 bp, Homo sapiens
  III.3262 (AI333424)
tttttgtaaagaaaaagaaatttatttttcacagttatggggtctaagaagctgtcagttcgaggtgaatctggtgagagtcttattgctggtggagactctctgaagggtcccagggtggcgcaggacatcacatggcgaggggctgagtgtgattgcgtgtgctagctcaggtctctcttcctcttcttataaagtcaccagtttccatgacagcccattaatccaggaatggattaatatattaatgggggcaaaacccttcatagtctaatcacctcccaaaggcaccacgaatcaacactgccacttctgggttatgtttcaacatgagttctggaggggacattgaaatcatagcaaccaggtaccaggaggcatattaatttgccacaataatgaaatgatatcgggtacagaaactgcacttggagtcaccatctggctaaatttacagtactctattgtcattctagaagatccatctatcttctgctcagtccaaataatctagttgaatgg

SEQ ID NO: 9635 - DNA, 421 bp, Homo sapiens
  III.3263 (AA677947)
ttttgctaaatgatatgatgccctcgtccgtttagaaagctcatgagctgtgtcacatagagggcctgagaaaaagcagcctttgtgaattgggagccatttgccccaaagtggagcagaaactgttgggcattttgtgcctcttcaggaattgctttggccggaaggaagttgtgtctggaagaggagggctgaaaccccatgagggccatgttagttcctggccagctttcagagcagctgtaagacattgctttgacctcatctatatttttattcttagcagtcgaaccagctttctctctccagaaagaaatggtattaattctgcaagattttttgctaatcctgtttccagagaagacgaagaaagctacatcgaaatggtaatcttatatttttcacactcttcttatccttc

SEQ ID NO: 9636 - DNA, 436 bp, Homo sapiens
  III.3264 (AA814503)
aagattacatcacagcaagcaactgtttaattgggacaaagaagatacactaaaagccaaatgaattactgtaattaaatttgtacagtttattgacttttttttcctttttatttatttgagatggagttttgctcttgtcacccaggctggagggcaatggagcgatcttggctcactgcaacctccccctcccaggttcaagtgattctcctgccttagcctcccgagtagctgggattacaggcacccactaccacgcctgactaatttttgtgtttttagtggagacaggatttcaccatgttggccaggctggtctcgaactcctgacctcaggtgatccacccgccttggcctcctaaagtgctgggattacaggcgtgaccccctatgcctggctattgacattttttttttaagcaaagaggtgggg

SEQ ID NO: 9637 - DNA, 56 bp, Homo sapiens
  III.3265 (AI926782)
ttttcatgccaactctttatttccataatagaaaatcttttatttccacctttagt

SEQ ID NO: 9638 - DNA, 434 bp, Homo sapiens
  III.3266 (AI263213)
  misc_feature (334)..(334): n is a, c, g, or t
  misc_feature (341)..(341): n is a, c, g, or t
  misc_feature (368)..(368): n is a, c, g, or t
  misc_feature (401)..(401): n is a, c, g, or t
  misc_feature (402)..(402): n is a, c, g, or t
tcttcctccgcgccgccgccggtggccattttacctccttcccagcatcctccactcgctcccgcagccaaagggcgcccatcgcgcgcgcccgcccgccggggctgtgtgggtttggtttttttttttttttgaaatttgacgctaccctcccccgccgcgccctcaaaggtatcacatgcggcgcatattggccagcgccggctctgcgccccctgcgctgagcctctcttccgccagcgctcgctccaacctcacctccgtccgcagcgggatggggcgcccggaggcggccctttccccagcgcgggtttggcagcctttccggcctttnccggggncccttttcttttccgggcccccctttncccgggggttgggggcccccccccccggggggnnaaaaaaaaaaaaaaaaattttttttttttttg

SEQ ID NO: 9639 - DNA, 204 bp, Homo sapiens
  III.3267 (AI793055)
cgagagcgaggccggaggctgccaaacccgcgctggggaaagggccgcctccgggcgccccatcccgctgcggacggaggtgaggttggagcgagcgctggcggaagagaggctcagcgcagggggcgcagagccggcgctggccaatatgcgccgcatgtgatacctttgagggcgcggcgggggagggtagcgtcaaatttc

SEQ ID NO: 9640 - DNA, 304 bp, Homo sapiens
  III.3268 (AI793231)
tcttcctccgcgccgccgccggtggccattttacctccttcccagcatcctccactcgctcccgcagccaaagggcgcccatcgcgcgcgcccgcccgccggggctgtgtgggtttggtttttttttttttttgaaatttgacgctaccctcccccgccgcgccctcaaaggtatcacatgcggcgcatattggccagcgccggctctgcgccccctgcgctgagcctctcttccgccagcgctcgctccaacctcacctccgtccgcagcgggatggggcgcccggaggcggccctttcccca

SEQ ID NO: 9641 - DNA, 401 bp, Homo sapiens
  III.3269 (AA485872)
tgagtgttaactattcctttattaggtggtgaggggagtggggggtggggagatggtttcaggctcaaactgttctacctcagatcatcaggcattagattctcataaggagcccgcaacctaaatccctcatatacacagttcgcaatagggttcgtgctctcgtgagaatctaatgctgccactgatctgacacaaggcagagctcaggtggtaatgctcactcgccctccactcacctcttgctgtgtggccaggttcctaacaggaccacagaccagtaccagtctgcagcccgggtctggggactcctgttgtagggtatagacctttctaggagaaggctccattctttctttttctgtaccaatttatgtgccctaaataaagcgtgtgcttaa

SEQ ID NO: 9642 - DNA, 342 bp, Homo sapiens
  III.3270 (AA487775)
tgggactacaggcgcacaccaccacgcccagctaatttttgtatttttagtagagacggggattcaccatattggccaggctggctcaaactcctgacctcatgatctgcccaccttggcctcccaaagtgctgggattacaggcgtgagtcaccgcgcccagctttttttttttattttttattttgagacacagtctcactctgtggcccaggctggagtgcagtggagtaatctcggcttattgtaaccttcacctcccgggttcaagagattttcctgcctcagcctcccgagtagatgggactacaggcacacgctatcatgcctggctaatttttt

SEQ ID NO: 9643 - DNA, 435 bp, Homo sapiens
  III.3271 (AI734144)
cggcacgagctgggactacaggcgcacaccaccacgcccagctaatttttgtatttttagtagagacggggattcaccatattggccaggctggcctcaaactcctgacctcatgatctgcccaccttggcctcccaaagtgctgggattacaggcgtgagtcaccgcgcccagctttttttttttattttttattttgagacacagtctcactctgtggcccaggctggagtgcagtggagtaatctcggcttattgtaaccttcacctcccgggttcaagagattttcctgcctcagcctcccgagtagatgggactacaggcacacgctatcatgcctggctaattttttttgtattttcagtagagatggggtttcacaacgttggccaggctggtctcaaactcctgacctcaggtgatccgcccacctc

SEQ ID NO: 9644 - DNA, 435 bp, Homo sapiens
  III.3272 (AI720877)
gccaacaagaaataagtttgtttattcctgtaccatacaaatcatgctttggaattcaaagaactcttggaaagcattttctgcatcctgctggttgtggaagcattttccctgcaaaaagttgttaagatgcttgaagaagtggtaattcagttgtcaagaggtcaggtaaacatagtggatgaggcaaaacttcgtggcccaatttgttcaacttttgaagggttggttgtgaaatgtgcggtcaggcattgtcatggagaattgggctctttctgttgaccaatgccagctgcagatgttgcagtttttggtgcatctcatcgatttgctgagcagacttcccagatttaatggtttcaccaggattcagaaagctgtagtggatcagactggcagccgaccaccaaacaatgaccatgacgtttttttggt

SEQ ID NO: 9645 - DNA, 557 bp, Homo sapiens
  III.3273 (AI692769)
tatgtcaatcattctttactttttggtttgtggttttgcttggaaaggctttccccttctgagatgatgaaacatttcttccctagaattgtgcttgtcatctttgatccctctggaatttactctggtctaaatggttttctgcatggctcccagtcatcccagtgctgctggatggagtgatctgtctcctccctcttctgtgaaatactgtcctcatcagacactcagtgtccaccctcgttacatggagttgtttgccttccccctttccagacctaaactgttttatttactagagccctataatatgtttcaacatgtgggtcttactcccttctcttttattatttatctaggaaccaaggcatgtcttcacgtactaagctccttttgtccctttagtgtatattaatcttggagtttggctaccttacagcattttctaatactgacactcctgattctcttgggttttctgggtatataatgatattatctataaatgatcattaacataccttatttaaaaaactacagacagtcttactgtgctt

SEQ ID NO: 9646 - DNA, 185 bp, Homo sapiens
  III.3274 (AI568062)
catccaggcttgaatctctcttctttccttgtcagttctttgtgaatgtctgccagaataatgctgaattctggaggtgcccatagcttgttctgttaagccaagttcttcactggaaactccgtctttaattataaggtcatcaataatgtctgcaatatcagtcaatccagtcatctggagcg

SEQ ID NO: 9647 - DNA, 318 bp, Homo sapiens
  III.3275 (AI682228)
tttgggttttatttatttatttatttatttttgcagctattttacaaggggttgagttcttgacttgattctcagtgtggtcgctgttgatgtatagaaaagccactgatttgtgtatattaattttgtatctggaaactggagtgtttagggttttctaggtaaacaatcataccattagcaaacagtgacagtttgacttcctctttactgatttggatgccctttatttctttcacttgtctgactgttctggctaggacttccaataccatgttgaagaggaatggtgagagtgggcctccttgttttgttcca

SEQ ID NO: 9648 - DNA, 437 bp, Homo sapiens
  III.3276 (AA807363)
  misc_feature (110)..(110): n is a, c, g, or t
  misc_feature (163)..(163): n is a, c, g, or t
  misc_feature (170)..(170): n is a, c, g, or t
  misc_feature (174)..(174): n is a, c, g, or t
  misc_feature (176)..(176): n is a, c, g, or t
  misc_feature (178)..(178): n is a, c, g, or t
  misc_feature (183)..(183): n is a, c, g, or t
  misc_feature (189)..(189): n is a, c, g, or t
  misc_feature (191)..(191): n is a, c, g, or t
  misc_feature (195)..(195): n is a, c, g, or t
  misc_feature (215)..(215): n is a, c, g, or t
  misc_feature (240)..(240): n is a, c, g, or t
  misc_feature (246)..(246): n is a, c, g, or t
  misc_feature (267)..(267): n is a, c, g, or t
  misc_feature (285)..(285): n is a, c, g, or t
  misc_feature (325)..(325): n is a, c, g, or t
  misc_feature (355)..(355): n is a, c, g, or t
ttttttttttttttttttttttttttttttttttttttttttttaagaccctcatcaatagatggagacataacagaaataagtctcaaacccaccacttctcaacaaanataggccagatatacacgggcgcgcgcggctctccgcagagaccacaaagatngtatagntttntngngtatntgtgananaagntcgtgaaaaaataaatattnaaggtttttgggggcgccgcgctantaggcnaaaaagccacaaggaaaattnaaggtgtttggggagggngggaaaaaagaagggtttttttggggggaagggccgcccncccaaaaaattttaaaaaaaattttgggangaaccgcccgggctttgggggaaaaaaaaaggggttttttccccccccggcctggttgggggggggggaaaaaaaaaaaaag

SEQ ID NO: 9649 - DNA, 425 bp, Homo sapiens
  III.3277 (AI419754)
  misc_feature (320)..(320): n is a, c, g, or t
  misc_feature (366)..(366): n is a, c, g, or t
ttttttggagtttatagtacaacttgaaaaagtaagtttatttacagttactaaaatatctggaggtactctctgagtaacaacttgggttcttatagtcagattgctctgaaagtagttctaacaaacttcattttggcttgttacatcattcgacttttgggaaattattcattattgcatcttaggaaaacagtatatacagtcaaatatcaagccagcctgattatgcctaattcatgtgtacaggcaataaatattatagttcccagaagagaagagtaaaaacaggaaatatttttacgttcatgggaatctgngtaactggggtttgtgtgtttcaacttttggtttttggcttcattnttatgtacctacatctacattgagaattgctcttctaaatgattaatctcttacacctg

SEQ ID NO: 9650 - DNA, 170 bp, Homo sapiens
  III.3278 (R10229)
  misc_feature (130)..(130): n is a, c, g, or t
  misc_feature (157)..(157): n is a, c, g, or t
  misc_feature (163)..(163): n is a, c, g, or t
ataaacaaattcataaagatagcttatataaaaatataacagcaaattaatctaaattttatttatttatttacttattttatttttttgtttatacttatgtcataaacatagtttatataaaaatatnaacagcaagttgatgctaagttttatntatttntttattt

SEQ ID NO: 9651 - DNA, 315 bp, Homo sapiens
  III.3279 (R10737)
  misc_feature (256)..(256): n is a, c, g, or t
  misc_feature (282)..(282): n is a, c, g, or t
  misc_feature (300)..(300): n is a, c, g, or t
  misc_feature (310)..(310): n is a, c, g, or t
gacttatactaattgactgttgaatgtcaaaccaaacttaacattcttgtaatagaaaccagcagggtgtgtacacttttgtgtgtgtgtgcaggtttatacacataaacacaataatacttggacttatttatttaaaatttagatttattagagggagcatggccataaaataaaataaaataaaatttaggatttaagtcgagctcagtgggctcacatctattatccccgcactttggggagggcccaggcngggtaggattgtctaggctccggggntttgaggcccacgtgggngaacccgggnctcct

SEQ ID NO: 9652 - DNA, 166 bp, Homo sapiens
  III.3280 (AA724913)
gattaaatttaatagggttaagctcaaagtcctccacttagagctggaaattctgcttaagtaacagaattgtgagacctggtttataactggttcctatgagaaagatttaaggatttttagccacttacaaacacaaaatgagcaaacagtctaacacagatgc

SEQ ID NO: 9653 - DNA, 477 bp, Homo sapiens
  III.3281 (AA827695)
tttttttttaattgtgaatcctcaggaaaagtggtccagagactgctcctcagcacttctctgacattcgctatttcccttccttgctttgttttccttaattgccaatatccaattattttactagctctcagggagggaaggagggcttttagaatgaaaagtcatcattgataaatatgacaaacagatacgacaaatgtgagggtttgccactatggtatataggtgctggtcacagtggaattatcccataggcatcatcccataggcatgatcatcctttaggttggagaaaattctggtgaagcctattctgaaagacatgaaatcttctactttaatatcctggttgcaaaggcaacatagaagtctaatctcccaatgacaaagtacacagggatagctagattcaatagaatcactgcactttgctggatactgcttgaaacacatggactattcctctggaatgtg

SEQ ID NO: 9654 - DNA, 450 bp, Homo sapiens
  III.3282 (AI767307)
tttttggggtttaactttgtgttttattaaaggtaacctttccctatacacgtgacagacctttccaacaaatccctaaatcagtgttcagtagaacttccagagtaaaggctattacatggtgatgccctcagaataggaacaagaatacagtttaggatgctattctgagtatatagggattctcttatgaacatcagtggctgtccctcttctaagggggtactggaagaactgagctcagaattggtgaagcttagacttgaaaaggaaaagccaccaaaactaaaatggaagatgagaactcttcctcatttatgctttatatccagtctcaccttgatgatatctccactggaggcaatcaaatctgttggaatggtcactcgaaatgagcgcccgacgacagccgtgccatcaggaatgccaaccactgtgggaacagcctcg

SEQ ID NO: 9655 - DNA, 256 bp, Homo sapiens
  III.3283 (H78577)
  misc_feature (64)..(64): n is a, c, g, or t
  misc_feature (103)..(103): n is a, c, g, or t
  misc_feature (132)..(132): n is a, c, g, or t
  misc_feature (153)..(153): n is a, c, g, or t
  misc_feature (192)..(192): n is a, c, g, or t
  misc_feature (206)..(206): n is a, c, g, or t
  misc_feature (217)..(217): n is a, c, g, or t
  misc_feature (231)..(231): n is a, c, g, or t
  misc_feature (247)..(247): n is a, c, g, or t
aatggaaaaagaaataaactattttaatgtctgataattatggggtagcccttgcattgcagantgatgatttgattatggacacattatcaacagatttgantttgcatggaactcaagacacgcttaagntcaccacagcataactgcagntttcaggatttacagtcatagagggtacatcaacttgangagtagttcatcanatttttaaaangcggctgggcgcgntggctcatgcctgcantcccagcac

SEQ ID NO: 9656 - DNA, 465 bp, Homo sapiens
  III.3284 (H78628)
  misc_feature (342)..(342): n is a, c, g, or t
  misc_feature (376)..(376): n is a, c, g, or t
  misc_feature (384)..(384): n is a, c, g, or t
  misc_feature (445)..(445): n is a, c, g, or t
gatcatcaggggttgtcaaggcctgaacgtgatgggctgtgatcttgtcgaagtttcaccaccgtatgatctttctgggaacacagccctgctggcggctaacctgctgtttgagatgctatgtgctctccccaaagtgacaaccgtctgagtcttgtgctcttcaagacaaaacagattgcgtcgctgacaagttctcaagaagaacttatgagtaagcagtctgagaactaaagagtttatgccaagaaaactttctgctgaaagtgtcattgctggctgtgaagtcgggataatcagtagaattctcacccaaacagcaacatttcttaagggaacttnggatttaattgggggggaaaaaaaagggagtacntgtaactngctttgatttttttttcctttggatggaaagatgggagggttaaagggtaagtgagggagnatttcttttcaagttatcta

SEQ ID NO: 9657 - DNA, 353 bp, Homo sapiens
  III.3285 (AI915319)
  misc_feature (340)..(340): n is a, c, g, or t
tttaaaattctactttctgtttaatgcaatgttgtgtacagagtcaaatagttaacaaatattgttaaagatcactaaatcctttttttttcacatgcagcttaccccaggagtttttgatatttgggaggtcatcacctcctcatgtctgttaacttctgcttgccgaagaggagttactaattgccatctcaacttcttccctttaattttaagcactccatgctgtttctatttttcattttccatactcaatcccatcagtcctatgtgctctgttgctctgttgtgtttaacagctgccctgccctatcctgctacccctcaaaaaccaaacttnccatactcctttt

SEQ ID NO: 9658 - DNA, 471 bp, Homo sapiens
  III.3286 (AI425105)
ttttggcctcaaacaacaacactttatttagtctatgatttgggtcagctaggcagttcttatctgcatgagctcagctaatctctgtggagctctttcaagcatccttagtctgcttttaggttggctggtggttggataatccaggaagtcttttccatgtgtctagtgtctagttggctgttgatcagggcaacaaagccatctggaccatatgccctttgttatccagcaggcttgcttgggcttcttcacagagttgtagggctccaagagcatcaagaggaagtaagtaatcacaatgtgcaagtgattttcatatgtctgtttcaagtcacttttctatagtcagcatggtttgctgagtattttaagcccactattgggactcgatgcccagaaatgaagattcctctcaaaatattactgcttattggcaatgcacctggtcaccccagaaggtcgatggag

SEQ ID NO: 9659 - DNA, 489 bp, Homo sapiens
  III.3287 (AI804529)
atttttttttttttttttgcacacagatgtttatagcagctttattaataactgcaaaatattggaagcaaccaagatgccatcagtaaataagcagataaataagctatggtacatccagacaatggaatattagcactaaaaggaaatgagctatttagccatgaaaagctatggagaaacctaaaatgcatattactaagcgaaaaaagccaatctgaaaaggcttcctacggtatgattccaactatatgacattctggaaaaggcaaaaccatggagaccgtaacagtagcagtggtttcaagagactgggagaagaaagggatgaatggatggagcacagaggaattttagagcaataaaactcttctacatatttctataattataaatacatgttatgacatttgtcaaaacccatagaatgtacaacacgaagagtgaatgaaccctaatgtaaactatggactttgggtgatagcaatg

SEQ ID NO: 9660 - DNA, 463 bp, Homo sapiens
  III.3288 (AI807954)
tcaagtataatactaactttattgtaaaatgagatggtgtgggtgaagcagcagcaacactagccctgcctgccattatgtggatgaaaacagctagacttctgtctgtcagtgagacagtaacaagcactggatagacattgtaagaaaacggtgaacatggcaaccgctaatgcagagtgaacattacccagcatgaagtcagtgaaaaactgaacatgactctcattgtatggattgaaataagaaaaagaatatggtaattttacccattacactttgtaaaatcagagacatgaatttataagcagtaatttaatttcaaataaatatatttcctttctattcctttatcatgtattttattatgtttctagctggcaaaacccaccagattattgaactcagtaataatccaacccatgatgctccatctgtcttacatctaactcactttacgtac

SEQ ID NO: 9661 - DNA, 465 bp, Homo sapiens
  III.3289 (AI631062)
ttttcatcacagcaccatttattatataatagcaaagtcatggaactaacctaactgtccatcaacagttgattagataaagaaaatgtggtacatatgcaccatggaatactatgcaggcataaaaagaatcaagtcatgtcctttgcagcaacatgattggagctggaggccaattatccttaatgaactaactcagaaacagaaaatcaaacactgcacattctcactcataagtgggagccaaacagtaggtacacacggacataaagatggaaataatagacactggggactccaaaagggggaaaggtgggaaaagaacaaggggtgaagaacaacctactgggtacaacgttcactgtttgggtaatgggtatactagaagcccagtccccaccaatacacaatatacatatataccagacatgcacatataccccctaaatctaaaataaaaaaaat

SEQ ID NO: 9662 - DNA, 510 bp, Homo sapiens
  III.3290 (AA477918)
cggatgcaggaaaacacctcaggatacagccccggaggaaggtatccagctgttcttcgggtgaaaaagatgaagaaacagtcctttgggaacagggtgatggatatagcaacttgaagtcatggaaacagcgctccattgattcttctctcagccctggctcagtttagtaagtggttttccttgggtggccgagccagttttttaatatccccactattcctcattccggtaacttcctcttaatcagctggttcacaggaggagggcattggtggtgtgggggttgagggcagggaagtggagggttaggattagagagatcagagtaggatcaacagtggtaggagcaggaccacactccagtggagcagtgcagggccagccaggctgctgatgtcatgaattggatggaatgtaaagctggtgttcctacaaagcactctggttaagatggcagtttatgtggacagagactggaaagcgccccttccatctactctccctccc

SEQ ID NO: 9663 - DNA, 523 bp, Homo sapiens
  III.3291 (AA478981)
tacaaacaaaagaggtttaattgactcagttctgtgtggctggggaggcctcaagaaacttacaattatggcggaaggcaaaggggaagtaggtaccttcttcacaaggtggcaagagagaacaagcaagcacgcaagtgaagggggaactgttacacttttaaaaccatcagctctcgggagaattcagtatcaggagaacagcataggggaaaaccgtccccatgatgcaagcacttcccaccaggtccctcccttgacacatggggataacaattagagatgagatttgcgtggggacacagagccgaaccgtatcagacctcatgggggcctgcagtaagggaatcagacctactctctcaaacatgagtacaagggaaggagatgtcatcagtccctgaaattcctgccagtgtggtcttcagtgacctcagtcagtgttagatgcttagaaggaaatcttttggatcatctgtcgacagttggcactttcttacatgccaggcatagtgctgcttta

SEQ ID NO: 9664 - DNA, 466 bp, Homo sapiens
  III.3292 (H40873)
  misc_feature (4)..(4): n is a, c, g, or t
  misc_feature (79)..(79): n is a, c, g, or t
  misc_feature (107)..(107): n is a, c, g, or t
  misc_feature (145)..(145): n is a, c, g, or t
  misc_feature (168)..(168): n is a, c, g, or t
  misc_feature (180)..(180): n is a, c, g, or t
  misc_feature (205)..(205): n is a, c, g, or t
  misc_feature (207)..(207): n is a, c, g, or t
  misc_feature (208)..(208): n is a, c, g, or t
  misc_feature (213)..(213): n is a, c, g, or t
  misc_feature (218)..(218): n is a, c, g, or t
  misc_feature (225)..(225): n is a, c, g, or t
  misc_feature (257)..(257): n is a, c, g, or t
  misc_feature (329)..(329): n is a, c, g, or t
  misc_feature (336)..(336): n is a, c, g, or t
  misc_feature (382)..(382): n is a, c, g, or t
  misc_feature (405)..(405): n is a, c, g, or t
  misc_feature (412)..(412): n is a, c, g, or t
  misc_feature (426)..(426): n is a, c, g, or t
  misc_feature (450)..(450): n is a, c, g, or t
  misc_feature (464)..(464): n is a, c, g, or t
attntcaaagcatccaacatactcggataaactataaagtttaataaatatttccagggataaaagaaacacataactnttcaggactccatttcactggcacaaanttacactttgtattaaaagaaaatacatatgtacatanttgatgacattcttcattgaagnccattatcattncattatacatgcacttcccccgggnanntcaanttgantgggganccctttttattcattttgtttatttttgtggnacacaaactgtcatcaagaaatgcagaaagcatctcaccctcctcctttactttatatctaaactaaatttngcccttncatataatttttacatctaaatcgtaagggctgaataattaagtgngacggatggcaaatgcatcaatntggtgcnatacatggcatttnaaaaaatgtccttcctttggggangggaaatgcgggcntt

SEQ ID NO: 9665 - DNA, 307 bp, Homo sapiens
  III.3293 (H45657)
  misc_feature (25)..(25): n is a, c, g, or t
  misc_feature (34)..(34): n is a, c, g, or t
  misc_feature (140)..(140): n is a, c, g, or t
  misc_feature (144)..(144): n is a, c, g, or t
  misc_feature (281)..(281): n is a, c, g, or t
ccaacgcgcacacacacgtcctctnctcccaggnacctcattcaaatatttacccgggacacacaccccccccccacacacacacacagacacactcacacacaagagccaggatggtggagttttgattgggtgggttntttnagggggttttcttttgaatgcacgcattttcactttccccaaaacaaaggtacattttttaaaatgtcatatattgcaacatattgatgcatttgtcatacgtttctacttaaattattaagcacttacgatttagnatgtaataattatatgtaaggggcaa

SEQ ID NO: 9666 - DNA, 197 bp, Homo sapiens
  III.3294 (AI700159)
tttttttttttttttttttttttttttttttttttttttttttttttttttttttttttttttttttttttttcccaataaacctttttaaggggcccaaaaaatccgggacaaaatttggggcaaagggttccccctaaaaaggccccgttttaaaaaacaaaaacctaaaaccccccccccccaaaaaaaaaacc

SEQ ID NO: 9667 - DNA, 201 bp, Homo sapiens
  III.3295 (AI564448)
ttttttttttttttttttttttttttttttttttttttttttttttttttttttttttttcccaaaaaacctttttaagggggcccaaaaatccggggccaaatttggggccagggggtccccataaaaaggcccggttttaaaaaccaaaaacctaaaaccgcccccccccaaaaaaaaaacccaagggggcccccaaaa

SEQ ID NO: 9668 - DNA, 105 bp, Homo sapiens
  III.3296 (AI246073)
gcgagaagacgacagaagggatggctaatgggtacaaaaaatagcaagaatgaataagatatggtatttgatagcaaaaaaaaaaaaaaaaaaaagtcgtatcga

SEQ ID NO: 9669 - DNA, 448 bp, Homo sapiens
  III.3297 (AI798675)
tttaatttttttattctttattactttctgcctcaacttcaaacaattgtttcaaatctcaaacatttcctgaccactaaggtttagaacattgccttcatgcataagtgctgattagctcttcaagggttctgaaggtcttagtaccatttgttgcatgatgctgttggaatctaggtggctgtcaagaaataatgcccccatcttcttctcccagattcaatccagttgagcagttgtctgaaggtagaattcttcacaggtcctggaattatgatggcaggaaagtcccaggataggttgtcagcaaactggagaatcagagaagccaatccatgtttgaaagccttaaaaccaggaaagctgatgacgtaactcaattcaaaacctaaggtctgagaaactgttggccactggtgagaatcctggagttcaagagctgaagact

SEQ ID NO: 9670 - DNA, 467 bp, Homo sapiens
  III.3298 (AI554853)
agtttcaatttatatgtttatttttaaaagactgtaaacatcagttctatgggacaattgagctggtttcattatgctcttgtttttgtcaactgtctatataagaaacaactttataagaaaaactctaatttttgtaaaatttctggcaaagattctgaaaattatatagttcaatatgagttatacaaaaaccctcaaggagacttccttttggtgctcttgaggaactgaaatgcttattcacataagattatgagattaggtaacctacaatgatctcctagaaaccttgactgctagaaagtttttatattttctagtataagtattgtcctatgtcactctgcttatctatttgcccttttcttagagattttaagactcttcaaacaatttcggagataattaagatatgggtaaaacatgtaggtaacaaataccttgatgtttacttacatatactg

SEQ ID NO: 9671 - DNA, 437 bp, Homo sapiens
  III.3299 (AI631526)
tttttttttttttttttgggaggcacgtttattcttgtaaataagatcatacctgccatttaggaacctcagagaacattgtgttcaaatgttcaccaaaagcaggcaacatttctgcaacaccctgggaatggacaccagtgataatgggcataatagacatgtacctggagtttttctgttatgtaatcatcacagtcattctttgtggctcatctgctacccattttacagatgaagaaacaggctcaaagagtaagtgacttctccgaggtcacacagctaacaagcagcagggccaggatttgaccataggttctctgagtctaaaccctatgctgtttccactgcctcacattgtttctccttctctgaatatttttaagtgaaaaggagcttattcttcgtgaagatgcccattgcattacggggggcag

SEQ ID NO: 9672 - DNA, 381 bp, Homo sapiens
  III.3300 (AI799763)
tgtgttgcatttagcatttattatagattactatgcaaaatgaactaaaattttgttaaatgcaaaattgtctataagaacagcataatatgtgcttaatcctacttctctgcgatcacttgataagttagtcaaatgattggcattttagacatgatggtgcagagaggtaagtaatttgccccaggcacatagcaaataaatggcagaatcagaattcaaatccagtctttcatggctccaaagggcctgagttctttccaatacactaatggttctcaaattcagagtgtatcagaattactagagagtgtgttcaaagtaaagctagatgcccaagctttgacactgctgaatgagaatttccaggtcaggacatat

SEQ ID NO: 9673 - DNA, 146 bp, Homo sapiens
  III.3301 (AA400596)
tttggctttattatctatttatttttgctgattagttttttacaactatttaaatgaacagatgtgcctttcttgtgttttaaccattaaataatttgagtgcttaaaagaaccttggcttttcatgcaaattaaaatggggctgg

SEQ ID NO: 9674 - DNA, 438 bp, Homo sapiens
  III.3302 (AA400681)
ataaacgagaatttatagaatgcaaggaatgtagcaacctacataacgttatttccttcaaaactatttcctggtttctaaagtatgtggatttaaattgtaaacagaacctgaaggcagtgtaactggcacacctcactgttacttatccccaattctgtaggatttggataggtggctggatggaccattgccattgaagaatgtacatcagggatcatcgtacctcggctattacatggtgccttaaaacagaactgaagctaaggtttagtaaggtttattttgttcatgtgactaactcttcaatccatttgacaaagtgtgcctgtcattttcagattcctgaagtaaggacaggtgacatgttcttcaaaggaaatttagggaaaacaaaggaaaacaaaaagacaaaaatcagtttccctctttgagtga

SEQ ID NO: 9675 - DNA, 461 bp, Homo sapiens
  III.3303 (T83348)
  misc_feature (318)..(318): n is a, c, g, or t
  misc_feature (352)..(352): n is a, c, g, or t
  misc_feature (359)..(359): n is a, c, g, or t
  misc_feature (400)..(400): n is a, c, g, or t
  misc_feature (428)..(428): n is a, c, g, or t
  misc_feature (444)..(444): n is a, c, g, or t
ttaaacaaccaacatttattttctcacagtcctggagattaaaagtccaagatcaaggtgctggcagggctggttcctggtgaggtctctcctcctggcttgcagatggcagcattcttgttgtgtccttacacagcatttcctctgtgcacatgtggagagacaaacctctggtgtctcttcctcttataaggacactagtctatgggattagggcctcactcttatggcctaacttaaccttagtttcttaaaggccttatgtcccaaatacagtcatgttggggggtttagggaccttcaaccaaggtaaatttngggtgggtgggaagaaggcccaaccattttgggngggttcntggttgggggaccacaaattcaagaaccttgaatttcaccnaattccaattcaccaagtgacctccttnttgaataaaaggtttnaaattttaccccagcct

SEQ ID NO: 9676 - DNA, 300 bp, Homo sapiens
  III.3304 (T83495)
  misc_feature (10)..(10): n is a, c, g, or t
attcggcacngggtttaaagtcatagggttaagatggctcataaccaaatttagagactatttttatgcattgttaaagtggaatgctggttaaattttatactttattcacaagagtcactgtgaattgaattgtgaattcagttctgaattgtgttcccaccagcaccaccaaatgctggcctctaccaccaccaaatttacttgttgaagtcctaaaccccaacatgactgtatttgggacataagggcctttaaggaaactaagggttaagttagggccataaggagtgagggccc

SEQ ID NO: 9677 - DNA, 177 bp, Homo sapiens
  III.3305 (AI569110)
ggcaataaataagatatctttattatgattatgttaatagttaaaatttgcatgttttctagatagtctgttaacaggataaaaaaatacaaaaaggcgagcttcttaatgattcagctgaattaactataaaattaaaatacctgctaattattatcttctaaaataacacaaaat

SEQ ID NO: 9678 - DNA, 469 bp, Homo sapiens
  III.3306 (H66704)
  misc_feature (7)..(7): n is a, c, g, or t
  misc_feature (11)..(11): n is a, c, g, or t
  misc_feature (168)..(168): n is a, c, g, or t
  misc_feature (223)..(223): n is a, c, g, or t
  misc_feature (316)..(316): n is a, c, g, or t
  misc_feature (336)..(336): n is a, c, g, or t
  misc_feature (362)..(362): n is a, c, g, or t
  misc_feature (382)..(382): n is a, c, g, or t
  misc_feature (419)..(419): n is a, c, g, or t
  misc_feature (433)..(433): n is a, c, g, or t
  misc_feature (439)..(439): n is a, c, g, or t
  misc_feature (444)..(444): n is a, c, g, or t
  misc_feature (452)..(452): n is a, c, g, or t
  misc_feature (464)..(464): n is a, c, g, or t
tgtaaangacntgtagtctctgccaacttcaccctccatgaggcttactgcctgcggttcctggtcctgtgtccggagtgtgaggagcctgtccccaaggaaaccatggaggagcactgcaagcttgagcaccagcaggttgggtgtacgatgtgtcagcagagcatncagaagtcctcgctggagtttcataaggccaatgagtgccaggagcgccctgttnggtgtaagttctgcaaactggacatgcagctcagcaagctggagctccacgagtcctactgtggcagccggacagagctctgccaaggctgtngccagtttcatcatgcaccncatgcttcgcccagcacagagatgtnttgtcggagttgaacagggnccagcttcggggaaaagggggaaaggattttcagctnctggaaaagggganatgttnctgtncattattngccaaccaaatngattt

SEQ ID NO: 9679 - DNA, 465 bp, Homo sapiens
  III.3307 (H66705)
  misc_feature (4)..(4): n is a, c, g, or t
  misc_feature (213)..(213): n is a, c, g, or t
  misc_feature (290)..(290): n is a, c, g, or t
  misc_feature (313)..(313): n is a, c, g, or t
  misc_feature (333)..(333): n is a, c, g, or t
  misc_feature (399)..(399): n is a, c, g, or t
  misc_feature (415)..(415): n is a, c, g, or t
  misc_feature (420)..(420): n is a, c, g, or t
  misc_feature (444)..(444): n is a, c, g, or t
tctnattctgtgaagaatgttattggtagtttgataggaatagcattgaatctataaattgctttgggtagtatggccattttaacaatattgattcttcctatccataagtatggaatgtttttccatttgtgtcatctctgatttctttcagcagtgttttgtaatttttgttgtagagatctttcatctccctgggttagctgtattccnaggtattttattctttttgtggcaattgtgaataggattgcattcttgatttggctctcagcttggatgtcgttggngtataaaaatgctaccatatttngtatattgattttgtctccngaaagttagctgaagttgtttatcagatctagggagcttttggggccaagatcatgggggttttcnaggatataggatccanatcgnccgcaaacagaggatacctcgacntcccctccttttgggtgccct

SEQ ID NO: 9680 - DNA, 482 bp, Homo sapiens
  III.3308 (AI651008)
cagttttatcttcagttttatttcctatattatattgcataaatcttttcaaataagcatggcttacttttgtaaaataatgcaaaagaacaacttacaagaggaaggagtggggttcagctacatgggaatgaagagggggctccagtgagaggcataaattaaagatctactgcaaaatatgttatcttacatcagcaagaatgtcccagtacacataaaatcagaaatgtttccctgattctcaatcctgtcttttttctcccaaaatcagttaaagggaatttcccaaacttccttttctctggacttgtagtttaaattggtataaatcttacaccctgagatatctccttgaattgtgagcgtcacctcaaatactttctacaaaacagaagagggcaaaattgtttggatatgtggttcctggtatttcttcttctacctcctcaccctggccaatgaatcactggggaaggaag

SEQ ID NO: 9681 - DNA, 502 bp, Homo sapiens
  III.3309 (AI693341)
  misc_feature (474)..(474): n is a, c, g, or t
ttttttttaaattgacaaatactacaatactaaatccagaaaaataacataacttgtggcaacttcctgacatatttctaataccttggtcccctacatggtctggcttcttactctgaaggcctctacagaggacaaggattttgtgatttttgggggagatattttccatacagagaaaagatacttcagtcttcctcctaacatggttgaaatttgtgttttaattattggtagtttaggaaagttaaacttcctaatctgttgttgacggtgccatacaaatgttctggattgttgtaaaatttgagaaactgtcatcagccttctttcatataggaactatgaaatttggaagaattttccacagacgaggttctggctccacgcatttcaaaccttgttttccttccatggctcacagttttcccagcactgggtgccgtggggcatgtccttaaggcaataggactntgcacttctgtccttacccagcaggatt

SEQ ID NO: 9682 - DNA, 340 bp, Homo sapiens
  III.3310 (AI537870)
  misc_feature (195)..(195): n is a, c, g, or t
  misc_feature (291)..(291): n is a, c, g, or t
ccctgagggcgcgtcggagccgccctggggtcttcgggggctgctgccagcaccttggctctttttccagacggcggcgctggaagccggcggcccgggtgcagcggccaggaaggggcgcaggcgcggggggcttaggccaaagggcgcagggttcaagtagggcaggaacggtccggtgggggcaggggcggnggtcgtgaagggttccagcagcgggaacggcaggcccggcgctgatgcggggtcaacctccggggggcgctccggcgcgggcggctctcggtccanggcccggggtggcggcggggctgggctctgcgcatgctccgcgcaaaca

SEQ ID NO: 9683 - DNA, 410 bp, Homo sapiens
  III.3311 (AI866616)
tcctttgtggtatccacaggcttacttgagattaaatgaggctagacacatttgtaaaaggctgcacaacttgtttgaagattacataagcatatgcatagatccacaaagctttcagggaaagtctgttccctatgtagtcaatattttccttttttctatgaatatggagcttgggaatagatgtattaattttgcacccagttccatgttttattccattgaattcgtgaagcttttgttaggctctaagggaaaccaaactggctaggagggatgacaacagaacaatgatgggtacattattattccatgttatttcctcttgttcccacatcactgttacattcctctgattattgcagtctcaaaaaatgtgctgatcactgtgtgtgttaggcaacactgca

SEQ ID NO: 9684 - DNA, 400 bp, Homo sapiens
  III.3312 (BE047807)
tccagaatcatttcctcaagtttatataattttaaaaggtaatttaatgagctagaaattttctatagttgatatttgaggcagtattaaatattgctttaccttcaagtagaaaccatactaaagagaagtaaagtttgcagtcaaatcagcttacacagaaggcaaactatgtaactgtttagaacaatagacaatgaatttttagaattttgtattatttttagttgagaaactataattgtcaatgaattttaaaataattgaaagtacaagtgtgagtgcttcaaacatattaatcttcaagggaagactaatatttcaaacctaagcatttctaaatagatcatatttattcaaacctaagagtttctaaatagatcatatttacactaagact

SEQ ID NO: 9685 - DNA, 451 bp, Homo sapiens
  III.3313 (AI568441)
ttttttggcatgagaacagtctgttgattgccctaatgcctaaaatagtttctaagtgtcctcacaatagcatgtcacctgtaaacaggtttcaagccaatgcaaattaacaaatggtgaacagatggactaagaactgacttttgtcaagagagagttagcaacaaatactttttggctccagtcttatgggaccattagaaagtcttttacttctcgccaaacatcttgcctcagtagacaatccatgcagggaaaatgacaagttacaaggcccattagactttagagagctgaaagttgagatttgcagaatcaccaaatcgacacatgagaaacaacagatagaataatggcccttaagaagcattctgccaaatagtcaaaactctggcttgcatcactaaaagcagctgtccctgtagtgaccttctttttgaaaaatatggcc

SEQ ID NO: 9686 - DNA, 445 bp, Homo sapiens
  III.3314 (AI810686)
ttgaaaccaacttgagaattttattggaaactaaaaagtaacatctcagccctctacaatgccactaattggctaattgagccagtggagacagtgagttatggcagaaaaagctgtgtcctcagggccgaagaggatggctttcagcttggagaatagcaccaaagtcctgttatttctcaggagtggtgactcaatgcctgtaatcacagctactgagaggctgatgcatgcttgggctcaggagttcgagatcagcctgagcaacacagggagattccatatgaaggatctcattctccactgatacccacgaaaacaaaggggaccattctgcacttggctgaagtgagcattttctcatcaggagaggagtagcccaggggatgtccactggagatagggtgggcgccctccactccatcttcccttcttggaaacttgg

SEQ ID NO: 9687 - DNA, 519 bp, Homo sapiens
  III.3315 (AI912241)
gtgaatgtttcttacaactgttctgaaccagttccagacatctgaatctgtttttcagaatgtggctcatgttagaaaatatagtttccagatggaactatggtcagccttggttaatccgaatctgtttgcaaactccattagaaaacacgcccaccccataccctcatgtgcacgtgtaaacacacacctgtgcatgtacacagtcagttctgcatttgctgtgaactttttgagattgctgccctgtgtgtgcatgcccaagtacacaaacagaggagattaattttgtggctagaaagatgttgccttgaagtgaaaggacaaacttggacttgcaacttcctgctaaaaataatctaaacaactccaaatacattattatgtgatgttttaaaagtttggatcatagccatttaggaaattttgccctcaacaccttttatggtgccaaagtaactgaattacattcagtagctcagtcttacagataacttaatatttgcatttacttgtgaa

SEQ ID NO: 9688 - DNA, 657 bp, Homo sapiens
  III.3316 (AI811492)
  misc_feature (627)..(627): n is a, c, g, or t
  misc_feature (651)..(651): n is a, c, g, or t
ttttttttttccggttgcttgctggtctttattggggcgatgcttggggtccgaataaatatgggaaggggcgcgagctggggcgcgtccggaccctcggggcaggagtccgcgcggcgcaggggtcaccggcagccacactcggtggccaccatgttgggcacgtggtgcgcgctgatgcgctcctccgacaggctgatgagcagcttgcccgcgtaggcggtgggcacgcagcagggtgggcgcgccagggcggccccacgggcctgcatcttcagcagcagcaccacgtggttgccgtagcgcgggttgcggtcggactgaggccagccgcacacgccctggcaattgttggcctggtaggtctcggggatgagtacggagcgctcggcgcggaggtctacgctgagctcgcgcagcgcgcacggcccgtcggcggcggtggcccccgcgctgcgctgtgcccgacccggcccgcgcggatcccgcccgcgccactccacgcgcaggccctgcagcgccttcaggagcagcagcgcttcgcagggatcgccgaggccggcggggccttcttggcagagcgcgagcaggcgcgcaagcagcgggctgtggccggaggcagacccnggaagcttccagctccgcagccgncgcttg

SEQ ID NO: 9689 - DNA, 447 bp, Homo sapiens
  III.3317 (AI741541)
tttttttaattttttaatatttattgtaagtatatatttttattatttagttataataaaataaatatgttaacttcaaaggaaaatttacatttatttgtattatgtttggtagtttatacttgctccatccaagtttatgaagtttgtttcatcttcatgtgggactctgaggcccagctgttatgagatcttctacattatttctaaatgttcacttctcaaagccgacttaataacagctagcaattttgtggcacacaccgtgtcgtaggcactgttccaagggactcgcatagaattcattcatcccttacaatcacctttgtatcgttagttactattgtcattcccattttaacgatcaggagactgagcacagagaagttaacaagcaggtcactccatcagcagtggcttggtaggacctgaacccaagcatttctg

SEQ ID NO: 9690 - DNA, 604 bp, Homo sapiens
  III.3318 (AI890183)
tttttttttttttttttttttttttttttttttttttttttttttttttttttttttttttttttttttttttttttttggaaaaccaaaaaaaaaattaaagggggggtaatggggccccggaaaaagggcctaacccccgggggggggagaaaaacccccccccccgggacccccgcacattaaatccccccggggggggggggagggaaaaaacccctaaacccccccgggggggcccctatttttcccacgggccccccctaagcccaaacccgcaacccggaccttttggggaacccccaccgcccacccccaagcccaaaggagctcccgcccccccccctgagaaaatcctacacaagagaggggggggccaccccccccccctccacggacgacataaccagcaaccaacccgaaagccggccccgcgacaagctcccataaaaaccccccacagcgcctcatgccccttgaccctctcccacgaagccaaccgagacacccgcgcgcccacatcgcccacaaaaacccacaacacatacccccgacaaaacacaccgaccaccacggagcaaaacaccctccacaaacacccccc

SEQ ID NO: 9691 - DNA, 554 bp, Homo sapiens
  III.3319 (AI807055)
  misc_feature (534)..(534): n is a, c, g, or t
  misc_feature (540)..(540): n is a, c, g, or t
tttgtttgtaagtgaagtatttattaaaccaagggaaggtcaatggacctcatcagcaagctataggaaaactttctaggggcttgaatatggaaaaggagagaactgaatcaacccacaacacaaaataatagactgttaactcaaaagaatttgcattgtagcagtccataagaaagaatttagtttcatcaaaacaccaccattcatcttgttaaaaacaatattaatttaaactgtattggtagtttttattgttttagaaaattaaaagcttcaggagcttaaactgaacctaaagtggatttggatatattttagaacattataataaaaataatgtccgcacttgtgaagtgtctttggttttcttttaaaagagattgtgttctaaagtttgagaaactgcttttgcctactttccaccttctagatatctcgtgttactttgggactcctcttactagatctctctctcccaggccaccggtgggaacagcttagagcttctttacaggctctagggatccattntattgntagctttttgttgg

SEQ ID NO: 9692 - DNA, 368 bp, Homo sapiens
  III.3320 (AI738682)
  misc_feature (153)..(153): n is a, c, g, or t
  misc_feature (259)..(259): n is a, c, g, or t
cctttcatcggctctgttctcgcctctctttaatcattgtagcaatcattcatgttttgttttcattctataaaaaaaattattggtagaagattttccttctcaatttcaaaacctttaggcctgtgcaggagttcggctgcaaggccctanattgcagagggaagaggaggtcagagggactagtgctaatgcatggtatcctgagaaatatgcactccagctgcagggtccggcggctctccagattggagctganagggccgcccgtgtacctgaatgagcctggcctggtgctgtgtctgcagactcgacacaggccagaaagaaacaggtgaacacactcctgagagccgaaactggactct

SEQ ID NO: 9693 - DNA, 232 bp, Homo sapiens
  III.3321 (AA888201)
tttttttccagccaatcagcaaatatttattgagcatctgtctatttggggcaagtcagagtacagagggcatggcttagaaaggaatagctcagacggagtttgtgattaattacgggaatgggtgccaagtgagagatacaaagggtggaagagcaggagcgcctccatccaggggcgtggaggaggctctgtggatctcagggccatctcagctggctccagacagaca

SEQ ID NO: 9694 - DNA, 495 bp, Homo sapiens
  III.3322 (AI669996)
  misc_feature (161)..(161): n is a, c, g, or t
ttctgagatagatagggtctcattctgtcacccaggctggagtgctgtggcgtgatttcggctcactgcaacctctgcctcctgggctcaagctgttctcctgcctcagcttcctgagtagctaggactacaggcgtgtgccaccatgcttggctaaattntgcatttttagtggagacggggttttgccatgttggccaggctggtcttgaactcttgactttgagtggtctgcccaccttgatcatgttgatctatataattgatcggcctcccaaagtgctgggattaaaggtgtgagccaccacacctggccccataaataccatttaaaaaatttaaatgtattctcttatcagtcaaaaagcacagttaataaccaactgagtagccaaatactgctactcaattaattcagaagacctcaggcccaagaatacctagaacagacttgagggttaatttatggtattcaatagctcttttcttcaaatg

SEQ ID NO: 9695 - DNA, 422 bp, Homo sapiens
  III.3323 (AA668300)
agatgcttctgtttttatatttaattacagtgtatctgtatctcaaattcattgtccagaatatgtataaaaccctgacatctcctgaaatcaagaggaggggaatatagtttggaggaaacttatcagagcttccaaaatgaagggctcttttcatcttctctaaaattcatttaattttactttaaggcataagtctggcagatttctagaataactgagaggatgaaacagttattaaaaacaggggcttttcaaaagggtggcccagttggaggaagaggttaatgaagaccctcccagctctgccaacagattgtccgtgatgtcccctcaccaggactgcagacctgactcagctcctcatgcaggggatacatgggacacaggcagagatactgctgtagactcactgcaggggt

SEQ ID NO: 9696 - DNA, 831 bp, Homo sapiens
  III.3324 (AI417961)
  misc_feature (532)..(532): n is a, c, g, or t
  misc_feature (646)..(646): n is a, c, g, or t
  misc_feature (743)..(743): n is a, c, g, or t
  misc_feature (780)..(780): n is a, c, g, or t
  misc_feature (781)..(781): n is a, c, g, or t
  misc_feature (810)..(810): n is a, c, g, or t
atatatagatataaatgtataaattttatttatttttaaattcttatttattttttaatttttgctcatttgttttatttttcctgaatcatttgaaagaaagttgctaagttgtagatattaagacattttactccttagtacttcagcatgcatcacttaaaagtaaggatattctgttttataatcaaaatacattattacatctaagataggtaatgataaatgcacactgtgatctaatataaagtccgtatttcagttttctcagttgccttgaaaattctcttagttttaattttctttttaattcaggatccaattaaaatctactcattgtattaggttgttatgtctttttagtttaatctaaagtttccttccaccatttcttcctggctctgctttttttgttctttgtgaacttgacttttttgaagagttcaggtcagtagaatatatatgaaagtctggatttgtctcactgtttccttattaaattcaggttaaaccagtggttctcaaactttanggtatttcagagccatctagagggattgttaaacatagatggcttggccccacccccagagttcctggggtctgtgttggagcccagtcatttgaatttcctacaagttcacangttttacaagtaaagtctgaagttaaatagatatgtttctggtctccttcattcttgtgcagtatccttgagagaaccatctcatcaccagaagccnatgtgagtacctaacagctctgaaagcttctccggtnntgaaaggctcgggattcaaggcttatgtntaaagaacgctcaatgatttc

SEQ ID NO: 9697 - DNA, 420 bp, Homo sapiens
  III.3325 (AI589513)
atccctaataaatcgtgaataacgaatgagggaatcgaccatcctcatgaggcacgggcgtccagtaacgcagtatcgattcgcttccccggcgtcggcctcaccgctactcccggcgtttccaagcctccctcctcgttctctccctcctgccggagccactgcggaccggagccccagcgccaggtggagccggggcgccagtgggagtcgggcccagccgtcttggcgctcgcccgactctcccgcccgcgcgcccagggaggcgcacaggcagcgcgcagcgcagggcgcgagcgaaaaatgcgggaatcagtgccaggcaggagaaaaggcgcgggcccaccttacagcccggcgcctcgtttcctagtccagtgtggccgctcgccttcggccggattattgtgtcccagaccc

SEQ ID NO: 9698 - DNA, 456 bp, Homo sapiens
  III.3326 (AI917387)
ttttattgttcataacattatttttaacagcccaaaagcgaaaataatccaaatatcaactgatgtatgggtaaatacaatggaatattattcagccataaaataaaatgatgtactgatacatgctgtaacatggatgaaccctgaaaacatgctatatcaaagaagccagttccaaaggatcatacattgtatgaacttttatgaaatgtccagaacagggaaacccatagagacagaaagtagactggtgattcccaaagactggaggagagaaatggattgactgctaatgggaggttcttttgggggtgatgaaaaatgctataaaaaattgatttggtgatggttgtacaactttgtggatattctgaaaaccactaaactgtacacttttaaaaggtgaattttatggtatgtgaattatatctcaattttattaaaaaacgggaaaca

SEQ ID NO: 9699 - DNA, 404 bp, Homo sapiens
  III.3327 (AI559108)
ttcgtaagaaattatttaatattagtattttttcttttatagacaaacataacatacacatggtttctaccttctataagacaaagtagaaaactaaccgttactgcatttacctcaaacacagcactgactgtgccacagataacatggtccaaaatatttaattctatagataggccatggtattgaatgcatggttaagttttaggaaaggcatatatttcctgaagtatgtatgttaaatacacaaatatctatatataacaaaaagttaccagcaaatacgtttaggttataacattcccaaacttcctaacattttaagtgttttagatatatgttgtctgaccagttcgtttggttacagttttaaactagcaaaccattaccctgtaagaggagct

SEQ ID NO: 9700 - DNA, 263 bp, Homo sapiens
  III.3328 (H00971)
  misc_feature (4)..(4): n is a, c, g, or t
  misc_feature (5)..(5): n is a, c, g, or t
  misc_feature (6)..(6): n is a, c, g, or t
caannntgttttattgctttagaatatgataaattgtcagtacctctttgagtgtgtcttaagcaccaagtgctcacaaatagtcacgaaaaatacaaaacagaaagtactccaaattttgcatcaccttcttaatcaccttcttgaaacaatatttgctaatcaccttcttaaaacaatgtttaccaatgaatttgaaatatttacaatatgggtctgggtttatggcatccatgctttctcttcggggataaaccggggtc

SEQ ID NO: 9701 - DNA, 318 bp, Homo sapiens
  III.3329 (H01707)
  misc_feature (314)..(314): n is a, c, g, or t
gcaaaaaacgacctggctcaaacatcacgacaggcatctgtggagcctgggaaatgacctttctcatggggagaacacagaacacacaaagctttctcttaaaagtctacaaaattataatctgataacaacagaacgttttggtattttgagtaataggtgtcacatcggaattgatatttgccaaatttggcatgataattgaatgctttttgcttatttatatttcatattttagttgttttctaataaccaaaaacatttgtgtattttttaataatagtaggagggtaaatggaaatttttacggtgtncagg

SEQ ID NO: 9702 - DNA, 389 bp, Homo sapiens
  III.3330 (AI433011)
tttttttttttttttttttttttttttttttttttttttttttttttttttaaaaaatttcccaggggtttatggccacccaaaaccggtttaccccccccaaaaaaagggggggggggggggggggggggggcggccccccttacacccggggaaaccccggcccataaaaaggggggttaccctccccaaaacccccgggggtttaaatacccagggggtataccccagggcccaaacgtgcttaatccaaaccacccatttttgggggaggcaaaaaaaaaaccctaaatacggccctttttccggggggctttttaaacaaggaaaaaccccaccgggtttgccggccaccgggggggtgggcccaaaaaacccctttttaaaaa

SEQ ID NO: 9703 - DNA, 205 bp, Homo sapiens
  III.3331 (AI886106)
gagatggagtctcactctgttgccaggctggagtgcagtggcacaatctcagctcactgcaacctccgcctaaagggttcaagcgattctcctgcctcagcctcccgagtagctgggataacaggacatgtgccaccacgcctggctaatttttctgtatttttagtagagatggggggttcacccatgttgtctatgatggtct

SEQ ID NO: 9704 - DNA, 583 bp, Homo sapiens
  III.3332 (AA669243)
cagtcagggggctccatgggagtgaggaagggctcggcggccctgggggtctggtcctcctccgccatcctcaagtcctcgggctacgtgcctcatctttggcttccagggacacgggccagctggcacttctatgacaagaatgtgggttttctgtgacagggcgtctactatatgaacttcctctggactctgacttcagtgtgtaggaagccaccttacagctcatgtcacccagagaacagtcgttgcagctccagttggaatgactgggggtgtttccgaatcgccatcatacagatctcaaagctgaggacaaaagtgtttctcagtccaagagcagttctgcgaggcggaatcacgtctaacatgctcgcatgcgctgactctttctaccgtcactgatgctggtttttgcaggctctgcttgcacatgaatttttctgcctatcttctttctttttgagacggaatcttgctcgttggcccagctcgagtgcagtggcgcaacatgggctcactgaaactccacctccgggtttaagcgattccccgcccaaccccctgcgtaccgggagtaagg

SEQ ID NO: 9705 - DNA, 500 bp, Homo sapiens
  III.3333 (AI393836)
  misc_feature (479)..(479): n is a, c, g, or t
tgcaaattgtacaactctgcatttaattataattctacaatttcccatttcaaatacaacttttgctaaaacaccccaaataaataacaatcacagcagatgtaacagtaaaaagacaatatagaagaagggctgaagctcggcctctgctattggacagccaaagtttccatctcagcttgaccacttcttaaggcatgatctttgaggagttgctaatctctctgagcctcattttccccgtaggtaaaatggggaaaataaacatgaaataaggtatgaaattacttagtagcatcacatgcataaatcagtgttccagtaatttatttgatgttgttattattattacttccagttttattcctcattacacactgctacaagaacgccacattctctgtttcaattgatctttataataaatgttaatatattttctggatgcagaaactgagaggtgcctggctttccctatntatatagcaagtctatgtaga

SEQ ID NO: 9706 - DNA, 554 bp, Homo sapiens
  III.3334 (AI762891)
tttatattaaacagtttatttcagtaacattgtaaggcaacagttaatttttagtaagtcagcaaaccagtgacaagaaattgacaaacactccttctacagcttgcacagtttaccattgatctcaccaatgccctcactgctggaaccaaaaagccatgagaggtactgctgtgatacaccttacaagctacatagccatcttcaaaatgaaaaccaccttttaagtcctcatgctgccattacgcaggatctgaaccacctacacgtacagtggtctcattccagtataagccacaacctcaagtctcaggaaagccagtctgctggatagtaagttactgagaaaaactaatctattcaactggctggaaaacaaaaagataggcccagtgcatcagtaagattataccatgaaggactaaccttgtataacacaagactcctatgaaacaaagaaaagagaataaatatttataaaattcccaccactcccagccttccttctaccccagaatagcccagatggcagctcagtgctctgaggaaggaag

SEQ ID NO: 9707 - DNA, 521 bp, Homo sapiens
  III.3335 (AI819352)
ttttttgcttagaaaaaaatttgtaatcatctaataaaatttaagatatgaataccctatgaccaaaaaattctactcctaaatatatactctttgtactaggagttacataaaatgatgttcattgtgaaactgtaattgcctgaaactaaaaacatcccaattgtctacagtaaataaattgtggcatattaacagaaaagtaaattacacagacataatgaagaataaagtacagctacaaccaacatgaatcaatcccatcttgaacaaatgcagctacaaaagaatgtatgattttaaataaaactcaaaaacaagcaaactgtattgtttaagtttacacacataggtggtaacactataaaaacaaagagacaattatcatacaaggtaggatagtggtaattaccaaagggtacgtcagggagctggttgtgactgggaaggaaacatgtgtaatttctgaactgctgtcaatatattctactaagctgagtgctagttatatagttgcttta

SEQ ID NO: 9708 - DNA, 290 bp, Homo sapiens
  III.3336 (AI354348)
gggtctctcctgctctcctctttctggcctgcctcctctctctaatcctgcctctcttcctctcccccccttgccttgccccctctcactctaggccctcagctccagcctctggccctgacctcgagctgtgtcctgattctgtctctgccccaggactgcagggctccaggaggtctgggctgcctccagcttcccactcccaggttgcggctggactgggactggttcctttccagttgaatctggcagccaaacctctcctccccgtcacctgacaggtgcagcgg

SEQ ID NO: 9709 - DNA, 445 bp, Homo sapiens
  III.3337 (AI590578)
tttttttttttccaaaatattatttattataattctccataaactcttacaaaaatgataacatattacaaaactttacagggcttccatacaatatgtttaaaaatgtgatgaacagcatgtttaaaactattttaaaaggaggtcaagtctgacctctaggccatgaagcactacattaacagctctgaacactgatggactttttcagcagttcttctacaaagttccaatttgattccacttttctcatttcatctggtactccatggcgatcaaacttgtaaaatgatgctacatgagtaataatccaccaactaaaacctaatggatccctggactggattacaggcatagaggatcttcttcggtcacttgatttttcaagcagtgttttaagtagtttattcaaccagttccaaaatgattccgagacaaaccattt

SEQ ID NO: 9710 - DNA, 221 bp, Homo sapiens
  III.3338 (AI918445)
aaatatttatttatttatttagctggagagtcgtttaatttccaataagctctctctggctacaatatagagaggggcaagcactgaatcagaagaccagttcaggaggctcttgcagtagcccaggaaaaaagttgatcttgaactaaaaggtggcaaaaatgagaagtgtgcagattcaagacgtaatccagtgatagaactgaagggattggcccaaa

SEQ ID NO: 9711 - DNA, 424 bp, Homo sapiens
  III.3339 (AA877080)
ggattacagcagtctttaataggactatactcttgccttccttacatgattctccatttgcagctaacttctaaactgcaaatcaaactatgtcactccttgtccaaaatccttcaactgcatcccactgcacttaagaaactatacaaacaaattagcatgacatacaggtcttcatgacttggatcctattttcctctctggttcttctcttaccacctgtcaattctccattcaagtcaaattaaactacctgcaattttcagaatgggttatattctcacaccttcgggatggtatggcctttacttgggctactcctcctcccacctatttacctggctttctcttactcatagttcaagtcttagcttagattttcttccttcaggaagtgttccttgatcctctaagattgggttag

SEQ ID NO: 9712 - DNA, 414 bp, Homo sapiens
  III.3340 (AI821960)
ggatactgcattctttaataggactatactcttgccttccttacatgattctccatttgcagctaacttctaaactgcaaatcaaactatgtcactccttgtccaaaatccttcaactgcatcccactgcacttaagaaactatacaaacaaattagcatgacatacaggtcttcatgacttggatcctattttcctctctgggtcttctcttaccacctgtcaattctccattcaagtcaaattaaactacctgcaattttcagaatgggttatattctcacaccttcgggatggtatggcctttacttgggctactcctcctcccacctatttacctggctttctcttactcatagttcaagtcttagcttagattttcttccttcaggaagtgttccttgatcctctaaga

SEQ ID NO: 9713 - DNA, 477 bp, Homo sapiens
  III.3341 (AI634044)
  misc_feature (359)..(359): n is a, c, g, or t
gcggccgcgctggagagggaactggagcccgggcaggggcagtgggcagggtcggagcccgcctgtatctcgcgtgcggcgcggcggtacttgtcggccaggtcctgcagtagcgtgttcttccgcaggtgcggctgctgcgcggcgccctggcggcaagtggggcaggcccagcggcgggcgtcgcgggcgccccacagggcctccaggcagtggcggcagaagctgtggccgcagggcagcgtggcgggccagtccagcagcccctggcagatgatgcagccgaggtcgtcctcggccagccacacgggaacggcggagcccaggcccaggcccgccatggccaacaggcggccggngcgccgacgtcggggttgagccgggcgagtctcctcaggctcctccctcgcccttcctcttccccttgccctcctccttttctcggccgccttttctcctccttccttggcgccaccc

SEQ ID NO: 9714 - DNA, 302 bp, Homo sapiens
  III.3342 (AI591401)
tttttggttaatctgaaaataaggggtcattccaataagaacctataggggttattcttcccgtatacaactgttaaatgagtttcaagagatttctcttaagtgaaaaaagcagaagaaaaaattatttaaagaatacaattcagcagtttttcacctccttggggctgaaaatcatcttgataaaccatataaagggagcaatgtcaccttagatgtcaattttggggcaggccttttaatttattttgttccacaatttaaggaatgccctatatggatcatagaaggcatatttctca

SEQ ID NO: 9715 - DNA, 523 bp, Homo sapiens
  III.3343 (AI635175)
tgagatggagtctcactttgtcacccagactggagtgcagtggcacgatctcggctcaccacaacctccacctcctgagttcaagtgattcttctgcctcagcctcctgagtagctgggattataggcgcccaccaccactcccggctaatttttgtatttttagtagagacagggctttgccatgttggccaggctggtctcgaactcctgacctcaggtgatccacctgactcggcctcccaaagtgctgggattataggtgtgagccactatgcctggcctccaggccataatcttaagtgagataccccaaagggaataattccctccccctctgaaaattctcaattaaaaactcaggaaaactctccaatgtaactgactctacacatcccactggcctacataaacaagtagccaacattgtagaactgagtagagttctaagaaaaccacaaattcagtgatactgaatatttttactccggaaacagcagatgacatatgagaaaaacaaactg

SEQ ID NO: 9716 - DNA, 504 bp, Homo sapiens
  III.3344 (AI859463)
ttttttttttttttttttttttttaagagatgggatcttgctgtcacccaggccagagtgtagttgggtaatcataactcactgtttctcccactgaactcccaggctcaagtgatcctcccagctcagccttcaattgtagctgggaatataggggcgtgacaccatgccagctaatgttttaatttactttactttctatagggatagggtctacgttgcccaggccggtcttgaactcctcgcctcaggtgatcctcgcgccttggcctcccaaagtgttgagattacaggaatgagccattgtgcctagacctaaattagctaacttaatattggaaaattggagccttcagataagagatttgttaggggttcagtccttcctcacaaatatgcatttgggatgaaattaaaatggaagaggcctggttcctaccgctaagcattatgttaacatcccctccccaggaaggcattccttctacaaaaaacatatttact

SEQ ID NO: 9717 - DNA, 382 bp, Homo sapiens
  III.3345 (AI891156)
ctgagaggcggagggcgggcccggagaaaacagggaatggggatattgagcccgatctgctagcagaggactcaccgctgccttgctttcccaccctgacccaccaacccctcacccggaacccgggcttgccttctttacgggacgaccgggccgcacaggccggaattaaccggagaagaggctgggccgccgcagagccgggaggggtggtgggaagccagagctgacgaagttggaaaggacgtgtaggcgactaggcctgcgcctcttggggacacctgaggacgcccgctgggcagctggctgaggaggggccgccgggagggcgctcgatagcaggcgtgtcattgggacacttaaggctgctctagctgtggcc

SEQ ID NO: 9718 - DNA, 461 bp, Homo sapiens
  III.3346 (AI675267)
aatctggctccacgaagcaggagactctccggccccagaggtcttacaatttcttccatttgttgggttatgatcattcgtcccatgaatctgtataagtctgcttctggttgctggcattctattacagctactagagtgtccaaattggcaactgtttgtaataatgctgtttctggaactgccacatgtgtcttcaggttagtttctccgtccaaactagcagttgtaacgtgacaggaaccatccagtcgatctgaggacagaagcaccaagtctgcaggaaaaatttcatctttggctattcgaacaatatcacccacccgaatgttttttgatctagtttttacaaggccaccacttcgaacaacataaacaggagctccatttacttcattatctgagttatgccgtaaccaatcttcatatccctgctttatggcagttactgttatcacaaa

SEQ ID NO: 9719 - DNA, 471 bp, Homo sapiens
  III.3347 (AI935069)
ttttatcagacctgatcttgaattttatatgctttatttcatttaatcccaaatcaattttgtaaggtaggaattattattatgaccaatttatagctcaggaaactagatcgtgaaaagatgaaatacttggccaaggtcacagaactgattcaatgcagaattaggactaaaaacatcgtctgctgaggttagactcagctcctcttcttaattttttttttttttgacaatggcacttcaaagttaatggcattttgtccattttcctgagaagaaaacaaggtttagatagcataagtgactttccccttactgacaactgggaaaagccaaagttttgatccaactatgtatctgggttcatactgagtcacagaaaactacttgctatttttctagctatggagtatcaatatggtgtgttggatttcccttcaagggagtacactcaatgaactgcattcaact

SEQ ID NO: 9720 - DNA, 534 bp, Homo sapiens
  III.3348 (AI927625)
  misc_feature (486)..(486): n is a, c, g, or t
tttctagcatggggcttctcgagctttaatgtatacatgatcacctgcagatcttgtaaaaatgcagattctgattcaggaagtctgcaatggaggaattctgtggttctaatgaaatcccaggggatgccaaatggagctggtctctagaaccttcaggatctaaaaccttcaggagctcctggatggttttatgatttgacagatgctcccctccgccttcccgcacctcctctctttctcttccctttctccttccttcctccatcaccacatttctatctggtcttacctaaccagggttgagaacattcaagggaagagatacatatcgaagtcctactgtgtgccgagccctggcatggtacgctctgcttacatcctctcctctgtttggagagagacatgtaaacgcggtgagccaagtccaggcttggagaaggctgtgggcaccaactgtggccagatgtgtgggagggagctcangatgttcgtcaccacatggaaagagcccgtcagctcagaacacaggag

SEQ ID NO: 9721 - DNA, 402 bp, Homo sapiens
  III.3349 (AI625201)
actcatcttccttttattatttttaaaagacacgcaagttttacgaaacatgccaacttcagttaaaagcttcttacataagaaatagccacatgtgaggaatctagcctggcatttgttgaaaataactatatattctgaagaacacgccccatgacatttattgataaaaattcctcactaataaaccaatttctgaaatctaattacataccttcatgtcacaatttaagaggtctgttagagaatcactttttttaaaaagcacaaagttaacagtatcaagaaaagtactctatcataagtaaccaaaacattaagaaatatttctcttactgcagatatggctcagtctcatctgaattatttttttaaaagtgttggtttgaattattaaatgaa

SEQ ID NO: 9722 - DNA, 152 bp, Homo sapiens
  III.3350 (AI590528)
ccactagagagtcggcccacagtgcagacaaaacgcagatcttcctctagagagaacagaaggctggagaggagacgcggagccggtccgtggagtccgccagcctgggaaacagctggtcgctggggaagctgcagcctccctgctcccct

SEQ ID NO: 9723 - DNA, 677 bp, Homo sapiens
  III.3351 (AA814828)
tttttttttaaaattctggtttttgtttcatttatttaaataaatataaatataaattttatataaacctattcacatacaaagggacttccagcgacttagattttaaattctccccaggcgaaatttcagaaagcaagacctacaaggtctaattttctaaattattttcaacttgggtgtttttgtttgaaaacgacaacagaaaataatcaataaatcctgtgttcttatcgagttctgaaagagagtagggatggggaactgacatgtgctttcaaaaaccccatacagtgttaaacttaaaccaatcctgtttttcctctgttatacgacaagaatgagttgaattataggttatttacattttttaaaaaaatctgtaacttcaagttggagtcctagataaacaggtcaagaaggagacgcgaagggtcaggtcccggcttgtccattccagaacttccaggttcgtttcttctccagatgggaccactgcaatgagcaaggattctggcccctgggtgacccacgccttggtctgccctggtctgccaggagcgggggatgtgagggaggaggccctcctcataagggggaaattctcttgtcatcgttggctgaggcggcgacagggagtcctcatcctcggagcgcgcgtagtgaccctgggctcc

SEQ ID NO: 9724 - DNA, 302 bp, Homo sapiens
  III.3352 (AI269988)
ttttttttttttttttttttttttttttttttttttttttttttttttttttttttttttttttttttttggcaaaaattcccttttttttttctttcccccccaccattaccaaaataaaacccaagggggggggggggggggggggtaaaaaaaaacccgggggcccccaaaggggggggccccctgggaaaaagggtcaagcccaaggggggggggggggtcaggctggaactggggggcaggggggggcccttttcccttaccctcccccctggggaagctttttgggacgggcgagc

SEQ ID NO: 9725 - DNA, 464 bp, Homo sapiens
  III.3353 (AI863353)
agcggccgccctttttttttttttttttactaacagctctatttattgagtacctactgtgtgcagtaaccacgttaggcattgtatgtacatatgacgtattagcctcacaatagctttgcaaaggaaggcattattagtcccattttgttgacaaggaaacaggctctaatcagtgatggagttgggggtatacatactggactccagggcatacgtctggacctctccatcctgggcgtcctcagtggagttctcccccatgcttgagaccagaccctggtcttcctgacttctgtctgtccatctctgtcctgcactggtcccacacaatagcgttgggggtgaccaggcagtctcagccccttggttatgagcttcatgtgagcaggttctcggttctcactcattcatcttcaaaccccagtgcctcagggcacagtgccaggcattgatggggtctt

SEQ ID NO: 9726 - DNA, 519 bp, Homo sapiens
  III.3354 (BE048204)
gtacagccggacaacaggccaatgcccccgactcttctccctgcacaatgctcctgctcctgtccctctatttctacctaactcccctgcccaatggcgggaggccccagacactgcaggcatggtgggggccaggaacctcgttggctggagcatgtttcctggtgatcctgaggcagcggggccaacaccccagacatctggagccttggtggtccagaccaagacggatgcttccctcagctacccacccaggctctctcttctggagctcatttccggtctgagaaagaaggctcttaattcaactcctgatacccgaatgacctcagccttcaagtgacctggcacaaccctccatgaacagtttattcaggcgctctttccagactcatttgctgaaccccccctcccaaatccccaagaccccatcaatgcctggcactgtgccctgaggcactggggtttgaagatgaatgagtgagaaccgagaacctgctcacatgaagctcataacca

SEQ ID NO: 9727 - DNA, 198 bp, Homo sapiens
  III.3355 (AA768169)
tttttttttgattttggattagggaatgatttatttgatatgacacttaagcattagcaaccaaagaaaaaaatagataaagtgtacttcataatgaaaaacttctgtgtgtcatagacactatcacaaaagtgaatagactagataatgtgagaaaatatttgcaaaccatttacatgataagggtataatatccag

SEQ ID NO: 9728 - DNA, 453 bp, Homo sapiens
  III.3356 (AI801987)
ttcctttcatgtctagtcctgcagagataacttttattttctaagtgaaataatttttccctctcaagctctaagtctgtttgattcagtcaattgaatccagacattttcagtcaacggccagcaaggttccggctggttcgttcattcattcattcattcattcattgattcattcattcattgcacggataactcactaagcacccgccacaggtcaggcactgctccagacaccaagaatacggcagtgaacgcacaggcaaatgtccctgctctcctggatccgcaagagggcacgacccagggaacaggtttcagagccaaattaccccagcttccaaaaggttgagaaatgctgtgtagctaatgcccccctgaaacgcctgcacctgtatacagggtgcagtgaacatgcctggtacacccgctccagcgcacacacacttacat

SEQ ID NO: 9729 - DNA, 411 bp, Homo sapiens
  III.3357 (R86720)
  misc_feature (301)..(301): n is a, c, g, or t
  misc_feature (376)..(376): n is a, c, g, or t
  misc_feature (393)..(393): n is a, c, g, or t
  misc_feature (407)..(407): n is a, c, g, or t
gacccatgcagacctactgcttaattctgcaagccagcattctccagacagcttgaagaattctttaaagatgctttcagaaaaaacagagctttttgtacatgccttcaaggatcaacttgtcaggagtgctcttttagcactctacactgcaaggccaggaggcattcttaagaagccaccctctcctaagagcagcccagaggagagcagtccccaagaccaacccccagtgatgagagggcaggactccataccacatcattcagactatgatgaggaagagtggggacagggtgtngggccaatgtgggggaagagcctgaacttgcattattgctatgggtgggacaaactgatttgaaagagatgggtnggcagtgaagggcagtnggccggcaacaatngatg

SEQ ID NO: 9730 - DNA, 302 bp, Homo sapiens
  III.3358 (R86721)
  misc_feature (183)..(183): n is a, c, g, or t
  misc_feature (277)..(277): n is a, c, g, or t
  misc_feature (290)..(290): n is a, c, g, or t
acatgttgggtaaacttaggtgtcagcttttccataagtcccctctggaggtctgtagtacttgggggaaagccatcagctgtagcatgttgaaagcatactttctgcatttgatattcttcagtacattctctatgcggcacccttctcttctcatgcaatccagcgctcggataaaggagncccttgtgtacctggggctcatctctcaggattgagcattgttcaagtgtcactgacatcgatggcccgtctttgggcacctttacaacagggngaaacggataccnttcaggttgcgg

SEQ ID NO: 9731 - DNA, 590 bp, Homo sapiens
  III.3359 (AI660657)
  misc_feature (532)..(532): n is a, c, g, or t
  misc_feature (554)..(554): n is a, c, g, or t
taaacaataaaaggaaagagacttctcttaagcagaacaaagtccgactcctctgtaaagtggctgacagcaagtggaaaatggaagaagaacaattacctgcaaaatgactcattcccttgtaacaactacactactagggaattccttctcttaccggctgtggctagcgtcagactcatgacaaagacctcatcctggggctagaactaggtttagggttttctcattcattcctctgtttctcagctgcattttcatttttaatctgtgcaatgattacagaggcctatgtttggttttcatttctagtttccccaggaagagacaactactatcttgatattgattaacacttgaaacttctgttaatcacaatttcagtatttcagggaatcagagaaatcatttggaagagccttgaaggtcatccagggtgagagaaaagcaaagcacaagcaacagaccaatgtttagacacagtgaagtgaagacctacaggagaccctctcaacttcaataagagtctttnttatggctgtcttcatattctntcaaagaaatcataataaaggagttagtgagagtgt

SEQ ID NO: 9732 - DNA, 677 bp, Homo sapiens
  III.3360 (AI742131)
ttgaattttttatttaatattaacacatttaaaatgttacagaaatagatggagtggaataaatcttacaataaggaagtagttgacttttgatgcattttaatgttaccaataggtcagtttttcctattaaattggttccgttacctgtcacagagctgtctagattgtccatgctggatccaggagtctggtccagtgctctcaggggcctggggatttctaaagcttcctcttcgtcgtcggcatcatcatctgcaacatccgtttccaaatcagaaatcaaggctccagacacataacctaacggtggaactggaggctgtggaggttgattattgctttgaatgtgccatgtttgttttgctatatcaaactgataggctcttgtcaactcatccagtactcatggtctttttaattcttagtgtgtaatcgtctttgatgtcataccttcctcttggcaagtctgcatcatcctttttccacctcacagttggttgagatctccttggacttgacaacgaaattctacagcttcttcctccagtaccacctggttaattggccttctgagaaatgtgggcgttcaaagacagtcagctcttgctgggtcactgtccttttcttccacaatattgtaccaacacagtatacatccctgcatcacttttcct

SEQ ID NO: 9733 - DNA, 453 bp, Homo sapiens
  III.3361 (AI831004)
ttttgtaaatgaagctttattggaacacaagcaatttatttgcacagtaccacagctactcttgtgctacagtaggaaagttgagtagttgcaaaagacactgcaaaacctaaaatatttactatctgacttttacagaaaaacttttctaatctgtgagaatattgtagtttcataagacagcattttgaaatattttgattcacttctgaaagacaaaaatagttatatatctcaaaatgagattatgtgtacacaaacttcttgatccataaagaaatgtaactgtttttctccatcgtccatattgtgtattttatttttctttcttttcttctgtgcaattttatggattttttttctttggttgctcttttttttcccctttttggacattgttcttaaagtgtggtttcttgaccacctcaaagtcacccgatactcgtcaaaaat

SEQ ID NO: 9734 - DNA, 353 bp, Homo sapiens
  III.3362 (AA723872)
tttataaaaaacagaaatttatttctcacagttctgaaatctaggaagtccacgatcacggcactggcagattcaatgtctggtgagagcctgcttcccagttcatagatggtgcttctcactgtgtcctcacatggtggaaggggcaagacaggtctctgggacctcttttttaaaggcactaatcccaaccatgaaggctccaccctcatgaccaaatcacttcccaaaggccccaccttttaatatgatcacattagtggttaggtttcgacatagaaacttgcgggggacacgaacactcagaccatagcaatgggtaagactatggtagtcacgtttcaccagtagat

SEQ ID NO: 9735 - DNA, 421 bp, Homo sapiens
  III.3363 (AI655017)
  misc_feature (364)..(364): n is a, c, g, or t
cttgaggtccaggtagtacttgcggttctcacgcaccaagaattcgctcttgagcgcgcgccgcggcccgccgccctcctcggcgcccgccgccagctgctcggggctgctagggcccagctgcgcgtagtgttctatgaagtcgcccagcgagtcgcggaactcggcggccaccgccatggacagcgtgaggcggctcttggaaccgcccgcgcccacctcggcgatcttgaggaagcggcccttggcgttctgcttcacatctaagtagaagcgcttgttctggatgtccagccgcttcgaggccagctcctgcgtctcttgctcgccgccgccgcgggacgcgggctggaacccgcacggnccaccgccgccgccgcgctcgctgccgctgtcgccgtccgccatcttctaggccgcc

SEQ ID NO: 9736 - DNA, 841 bp, Homo sapiens
  III.3364 (AI354573)
  misc_feature (483)..(483): n is a, c, g, or t
  misc_feature (582)..(582): n is a, c, g, or t
  misc_feature (647)..(647): n is a, c, g, or t
  misc_feature (691)..(691): n is a, c, g, or t
tgatcatcagtaagttttattcaaccattagactcacgctgcgttgaaagacaatccccctccactcatttccactgtaacttcactttggggttctgctgttgggcctctacttgcctctttccttcttctccctccccttgatcctgtcatctctgaagtccctctctctctcccagtcattgtcgggccacaccctgatcggctctctttcttgccatctcttctcccggcccctgtcatggtctcgatcccttgtcctcgagtcccagtgtctttctcgggatcgagatcgctcccgcctttcccgttttccctctctatagaggtcgtttttaacaactggcaagttaataggttttcgaaaaggccggtcccgtcccccaaatctcagttgcccagactccttttttcccccaagaccgcctccaagtcgccgagggatccaccctttgagagtcctttccagctcgtagtccacanatatctcatgctggtcaataaccaggccatcagcatctcggtaagctttgatcacggcacgctccctcttgtattcgatgaaggcgtagccctttgaanaacctgtgaccaagtccctgaccagccgaagcccgccgatgtcaccattagcgggaaaagacttncctttattttgtcctcctggtcctgcaagttagtctggccacanccagggtgaggggacgatctcttatacaccctttgttgggaccatatgtgccaccattggccttccaaaacggccggtccggtggtctttcatcgggcccataatgcttggccgttttagtggtacatactccttgggatggggctccca

SEQ ID NO: 9737 - DNA, 436 bp, Homo sapiens
  III.3365 (AI628506)
ttcatttttaaaggtattttatttggtatgttgaagacatgtctatgactgcttctaaaagccctggggaggagcctcatatagcatgctgcagtatattttgtcccaacattgtcatgtgcaatcagtgaatttcagttacaccaaaataataatctaacctgtctgaacatgcaacttctctttttattctctgcaaaactaaattcccttctttataaaatgattagatttgaggatcaagttaaaatccactatattccaagttaaactctgagggttctgcactatagcatgattttaaattcatattggcattcacttttctgaattttcctatgcgtatactaaataaatttcctggaccatatttagtgagaaattaaaagagatttacattgcactgtgaagttctaataaattctcaattgatcgg

SEQ ID NO: 9738 - DNA, 546 bp, Homo sapiens
  III.3366 (AI497807)
  misc_feature (334)..(334): n is a, c, g, or t
atttttttaagtagcccagacaaatgcatgccactcagttcaaatatttctcagctcctgtaatagccacgtgctggtccattatggatgtgaaggaagcagagaccctgctccacaaagcctcgggttccaagtctaccagatacctagaaaccaattctttgtgttcaataatacagaaaatcgtactttcatatttaaaacaaattgtatattcatccagagtctaaaatcaacaaaatatggaactgcgcctagtgctaataaactgaaattccattatagtttaattattaacccaaatatacacattataatatccacttatacactntcatttaaaaaaaaatgaaagcaattaagttctaacatatttccacattctgtttaacaataggtacataacaactagattgattttgctcttatagtgactagtattcaaagtttttcctaagtaaattttattaatagctagtgcaaaagatttcctataaaggacaaagaccactcagagctgttcccttttggaaacaatatgagatg

SEQ ID NO: 9739 - DNA, 395 bp, Homo sapiens
  III.3367 (AI612150)
  misc_feature (258)..(258): n is a, c, g, or t
  misc_feature (260)..(260): n is a, c, g, or t
  misc_feature (355)..(355): n is a, c, g, or t
gagaagacgacagaagggcccgccaaaccagaagccgccctgttcggtccggctgcttgcctgattggacgtttccagcccagcgtccctgattggataattcttaaggtcccgccccctcaggacctgagtgacagaagatgtgatcacatgctgggctgagtgaagaagagtaacagcctaagctgcagccttttcagccagggcttcctctctgagctgagccacgtccaccccagagcatgggaacattctctntnttactctctctttttgaatgtattgaaaaggtgaacagaagtatttcgttgtcatattaataataccgttggaagtaaagtgtttggtgtcgcanagtcaaaaaaaagaaaaaaaaaaaaaaaaagtcgtatcga

SEQ ID NO: 9740 - DNA, 363 bp, Homo sapiens
  III.3368 (AI697239)
  misc_feature (346)..(346): n is a, c, g, or t
ttttgagacagagttttgctcttgtcacccaggctggagtgcaatggcacaatctcggctcactgcaacctccacctccccggttcaagtgattctcctgcctcagcctcgtgagtagctggaattacaggcgcctgccactatgcccggctaatttttgtatttttagtagagatggggtttcaccatgttggccaggctaatctcgaactcctgacctcaggcgatctgcctgcctcagcctcccaaagtgctgagattagaggcatgagccaccacgcctggctacgtgaaattttgcaccagagttttagatacttgctgttgactttcttctatttacagngactctgagaatgtatt

SEQ ID NO: 9741 - DNA, 389 bp, Homo sapiens
  III.3369 (AI683099)
ttttttttttttttttttttttttttttttttttttttttttttttttttttttttttttttttttttttttttttttttttttttttttttccccaaaaaaccttttaaggggggccaaaaattcggggcaaaatttgggggcaggggggcccccaaaaaaaggccgggtttaaaaaacaaaaaccttaaaccccccccccccaaaaaaaaaaaccaaggggggcccaaaaaccttcccccttcccttggggggggtacccgggggggggtttaaaaacccccctttttcccccaaaaataaaggggcccaagaaaaaaaaccggttgggcccccccctcccccccccgaaaaaaaggggggggggggggtttggggaaaaaatttat

SEQ ID NO: 9742 - DNA, 462 bp, Homo sapiens
  III.3370 (AI672195)
ttttttttcatttcttccttgtagaaattaacatgtttattgtaaaaagaaaataagcattatataaaagtacaaagtttaaaaatcattcaaaagttcatcagccagaaagaagtactatctggtgaacttcattcattccaaccatctctcttaatcatacaggcacatatatacaaatagttttacaaaagtgggctcatatgctatatttaacaaatatagcaaattaacaaaaggaaaacaagtgtgaaactgaaaaaatgctcaatttaaatactttttccccacaagagaatctagtcttgtaagatttctcctaaaattaaggacaattacggaaaacaataaagaggctatttttttttctagcttcatgtatgttttaattagagactgtacgtgattcctgctatgaaagatgaaaccagcacactctacttgttatttctatatagacag

SEQ ID NO: 9743 - DNA, 277 bp, Homo sapiens
  III.3371 (AA640795)
gacccagcacgttgggaggccgaggcgggtaagatcacctgaggtcaggagttcaagaccagcctgaccaacatggagaaaccccatctctactaaaaatacaaaattagccaggtatggtggcgcatgctgtaatcccagctactccggagctgaggcaggagaaatgcttgaacccaggaggcggaggttgcggtgactgagatcgcatcattgcactccagcctgggcaacaatagagaaactccatctcaaaaaaaaaaaaaaaaagtcgacg

SEQ ID NO: 9744 - DNA, 261 bp, Homo sapiens
  III.3372 (AI708519)
atagccttggtgcctagttcaggagtgggcataatacatactcagtaactgtggtaagctgatctcttcaccctttcactcagtaagtagtatcaagcaatggcgagacaatggctgaataataatggtatctactgatgaaaaaaaagaaatgaggtttctcagagtttagaaccccatttccccgcacagccttagctgggtttctgggtcttgcttacacttctaagttgtccatttctttcctgagaaaaaaatttt

SEQ ID NO: 9745 - DNA, 306 bp, Homo sapiens
  III.3373 (AI572393)
gagatggagtttggctctgtcccccaggctggagtatagtggcacgttcttggctcattgcaacctctgcctcacatgttcaagcaattctcctgcctcagcctcctaagtaactgggattataggtgcactccactacgttcagctaattttgtatttttagtagagacagggtttcaccatgttggcccacgtcggtctcaaactcctgacctcaaggtgatccaccctccttggcctcccaaagtgctgggattacaagggtgtgagccaccatgcctggcccagacctcttgatatatatca

SEQ ID NO: 9746 - DNA, 127 bp, Homo sapiens
  III.3374 (AI829817)
ggatgtgtatatgcagaaagagatttattttaaggaattggctcacattattctgggagctggcaagtctgaaatctgcagggcagacaaacagcctggagacccagggagatttgacgctgcagtc

SEQ ID NO: 9747 - DNA, 474 bp, Homo sapiens
  III.3375 (AI417828)
agttaaaccatgaacaacaacaaaacagtagaaagtgcatataagaaaaaaagctttttaaaaaataaagccctagagatgcaataattatgaaataaactgggtgggtcatattttgggcttctgactatgaggcttaactaatcacagtaaatcttgcaacgttcccaggagaactgcaatgagttagatctcagctgtccaacactgggctgtacgcctcatgagtctcacatgcaccattcatatgtaaaattgcgaaaactctaaattcagccaaattcttctactctccaaaaggacttgggtgcagttcagtccatattttcagtgacttttcatttatcttaacagcttctctcagttctggttaattccttcctcaggcttgccagagtcaagtacttccgagagtctggcaagtcccatctgtgatgagtcacctgcagcggagagtctgcaggaagatcagac

SEQ ID NO: 9748 - DNA, 210 bp, Homo sapiens
  III.3376 (AA937568)
  misc_feature (43)..(43): n is a, c, g, or t
  misc_feature (45)..(45): n is a, c, g, or t
  misc_feature (46)..(46): n is a, c, g, or t
ttttttttttttttttttttttttttttttttttttttttttntnntttttttttttaatttttttttccccgacaaaacttttaaagggggcccaaaaacgggggaaaaattttggggggaggtttccccaaaaaaaaggccgggttttaaaaacaaagaaactaaaacgccccccggcgaaaaaaaaaaacaaggggggcccaaaaaa

SEQ ID NO: 9749 - DNA, 768 bp, Homo sapiens
  III.3377 (AI890917)
  misc_feature (433)..(433): n is a, c, g, or t
  misc_feature (535)..(535): n is a, c, g, or t
  misc_feature (575)..(575): n is a, c, g, or t
  misc_feature (677)..(677): n is a, c, g, or t
aacgaagaagtgagtattttattattttgctgtacagctgttgcttcactatataaaaacagcaccagcaaatgcagtgtattgcaaaattaagatagtgttgttcttcatctgacactgtacaagcaacaaaaacttcttcactcccagttatttccaatggaaagatcattaagtatttcatcccaaatccaggtatggacatacacaagttacaatattatataaggcttaagaataacaacattatctttgaattatgtaatttttgtaactaatttttaccatggataatttcatggataatttcatgaatactagagcctagtctaaaaatcataggatgttgtgaaaaagacacatattatgtttatctacaatcattagaaagttaaaaggcatcttctttcattagcagtgttaacagtagttnttttttcccatgggtaatgctaaaagttgctattctaagtcttctatccaccactaatttaggacaactctgctggggtgcgttatttcatactagcttatntagtggttccattttcactcctcaatagaatttatgtatntctcatatgcttcttcactcataagttcatctagttatgaagggttactcagtgtcatcttgatcagccaaccatcttcattacgagaattggttacaagtncctgattttctgcaagagcttcatgaatttcggtacttctcctgataaaagagaattgattcactagcagcttttcaactgtcaaaagcac

SEQ ID NO: 9750 - DNA, 735 bp, Homo sapiens
  III.3378 (AI926616)
atcgttaaacatttttagttttatttgttttaactgactaataacaattatacatattcatggagttcataatgatgtttcaatacatataaagtgagtgatcagatcagggtaatcagcatttccatcatctcaaacatttatcatttctttgtgttggggacatttcataggcaccaataccttaaattttaaatttagaatttatatatttttgacaattattagcactgtaggttttcaagaaaagatcccccttcttgcagacttgggactgtgcagggagcgctccggaggccaggacaaagggtatcagcgatgggctggtgttgatgtctcttccctggagatctgagagaatgaggaactaatctgttgaactaacttagaatgaatcatgagttttgggttcacactttgtttttttttttcctttcaccagcagcatagggtattttgcaaactagattagctagtagaaaaggaatggcatggaaatacagactcacttcattattatttgactttgcaatatgggcaaaaatattctcagaagcttactttttgaaatgaagaaaaagaaactgatatgcctggctgcgtgggccttgcttaaaacttatagggaaccttcatttcatccatttaagcctttttattcacaagggagtaaataccgcccaaagcccctgaaggggttggccaaggcaaaccagcaggaaatagttttcccag

SEQ ID NO: 9751 - DNA, 278 bp, Homo sapiens
  III.3379 (AI468097)
aaatgattccaatgttttagtaaataatgtgaaaatatatactcctgaagaactgtgaaatatcatactcaactactttacatgccaaacagatattaaactgaaagtacccattaccctccccagttatatcctagctcctggaaagttatatccttagtgaaagggagagaaatgttgatgccaacaagcatttccatgaacccagctgtcagggaatacagttagatataaatactatatctagacttttgatgattgctcatatcttattttaa

SEQ ID NO: 9752 - DNA, 532 bp, Homo sapiens
  III.3380 (AI939597)
tttttttttttaaatttgctctatgtcttagtaaataatgtgaaggtgtatacttttgaagaactgtgaaatatcatactcaactactttacatgccaaacagatattaaactgaaagtacccattaccctccccagttatatcctagctcctggaaagttatatccttagtgaaagggagagaaatgttgatgccaacaagcatttccatgaacccagctgtcagggaatacagttagatataaatactatatctagacttttgatgattgctcatatcttattttaaatcatctttgtgtttatagcatgagaaaaaataattcttaagggtaataagaaaataaacagaaaattatttttacataccagtataaataattagccagtgttgagtttttgcaggctctcgatatcaagaaggtacagagatcttgttccagattttcgccatctggaacttcttttgtttttgatgcaggaggaggtgaagagactgaacgaagggggctggttataatttgcgagctga

SEQ ID NO: 9753 - DNA, 429 bp, Homo sapiens
  III.3381 (AI262051)
atgactagaagagaaaagtggactctgggctcgatgaaaattaattttttcttttgacaatcattgttgccattcttatgtaaaaatgtcggtatgaagtcagtctactggaacaaaaaccttttccctcacgtcccggaaactttccagatgtcttgtcatagttcattattcactcatttgtttatttatcaaaaaattttttaggagttgctgtgtgcaaaggcgctcattgctatgggttagtcttagttatatacttagctaacctagagatcactgcttgtaggtgtgcagtgaagacaaactataaagctgtaaaggaatgtaaaagagcaagagttgataagagttgaagaagagcctaagctaaagataaatgatgctgtgggtcacagaattttaacaggagatcttttttgttttttg

SEQ ID NO: 9754 - DNA, 491 bp, Homo sapiens
  III.3382 (AI819806)
  misc_feature (186)..(186): n is a, c, g, or t
  misc_feature (194)..(194): n is a, c, g, or t
  misc_feature (197)..(197): n is a, c, g, or t
  misc_feature (208)..(208): n is a, c, g, or t
tttttttttgatgggtagttttttaaaccaacaaaacaatccaccgctcaagagaatgctcttaagacaatttgagagttgggtgtcctcgtgtctgccgattctaattgccgggtgtcttgctaaatggtaatcttcctaaaggcaccctcatcctcctgctgagggaggagggggaggtggcangtgaccancanggaggaaggcnggagccaaaccaagagcccatcagttttcagcttttacatccatgaataatggggaacagcatttgcacattaaaacgcttctctctgttcctatgctgaaaagcaaacccacaatgccgcttgcataataacaacaaaccagctccttctgccaggggccaactcggggggtacgggggcgggggtacacacaggcatggcgttgttgagggtgttgttgtaaacccaggcccgcagtgagtaatcaagcctgcattatttcaaacactgcagggcttctgt

SEQ ID NO: 9755 - DNA, 595 bp, Homo sapiens
  III.3383 (AI926669)
  misc_feature (548)..(548): n is a, c, g, or t
tttttttttttttttttttttttttttttttttttttttttttttttttttttttttttttttccaataaaactttttaaagggggccaaaaattcggggaaaaatttgggggaaaggggttcccaaaaaaaaggccgggtttaaaaaacaaaaaactaaaaacggccccccccaaaaaaaaaaaccaaggggggcccaaaaaatttcccctttcctttggaggggttaacaaggcgtgggtaaaaaaaccccgctttttcccacaaaactaaaggggccaatgaaaaaaaaaggtttggaaaccgtcttcccccccctgaaaaaaaggggggggggggggataggggaaaaaattcattaacccctttggcctttgggggcaaactggggaaccttcccacccccaaaacccttttgggccaggggttgaagaaaccccccccaaatgggggtggttttttccaaaacagaaaagccccccaagggggggtgtggggaaaacctcccaacacccggggggtgggcggaaaccaaataaacaagggcnggatccccaaacctaaagaattgggggcgcttttcccgttttaccaa

SEQ ID NO: 9756 - DNA, 478 bp, Homo sapiens
  III.3384 (AI655648)
  misc_feature (289)..(289): n is a, c, g, or t
ttaacatttaccttggctgatgtttattaatcgggtctattaatagactttttgtttggcctttcctaaggaataacttctagaagaagcattcctacccaattatgccctgccttgcacaatgctttgggtttgtaaattgctcttccatccttatctcttgatccattcatttacttatccatagcacacaattattgagcagggaacaagacagactcaacccctgtccttgtggagcatatatcttttatgagagacaagtgtggaggcccctggtggctcattntcttcctgcctgtggtagtttagcagagctggctctgctggaccaggccagtctgcagggaatagctgacatcagcttcggcggatagcagtgttcttgtgtgcagaggattcttcgagactcttcctgagtccttggcatgcagcccttggccttggcgtattagtcaggatctctcagcaggagtac

SEQ ID NO: 9757 - DNA, 571 bp, Homo sapiens
  III.3385 (AI926548)
  misc_feature (185)..(185): n is a, c, g, or t
ttttgtttatagcagctttattcataataaccaaaacgtggaagcaatcaagatgtctttcaatagatgaagggataaatcaactgtggtgcatccatacaatggagtattactcagcaataaaaagaaataaaccaccaacccaaaaagacacattaaatgcatactgaatgaagaaaccttanatgcatactgataaaagtgaaaaaagccagtgtgacaggactacatactgtatgattccaactatatgacattctgaaaaaggtaaaactatagagaaacagtacaaagaccagtggctactaggtgttgagtgaggagtgaagagggagggatgaataggtgaggtacagggatttttagggcagtaaaactatttgtacaactgatggtagacacatgtcattatacacttgtcaaaccccagagacctgtacagcacagagtgaaccctattgtaaatcaccgacttcggttagtaatgcaccaatacaggttcatcagtcacaacaaatgcaccacatcaatgcaagatgttgataacaggggaaactgggctgtgggggaa

SEQ ID NO: 9758 - DNA, 382 bp, Homo sapiens
  III.3386 (AI924400)
tatttattagagtagcatattaagttttgtagaaatcatatgtggatttacctatgacttatctattaattaaattcaagcaaaatatttgttataaaaaggagtcactgagtctcagagaattgagaatcattaggatcactggacagtgcctggaagaaaggacttcttatgcctccttcctcagcacccttagtgagtggactgagggcagcagatggatgagctaagagaggccaaaacagcaatggtggggggtgcggggcgtggggtggggagggcaaggaatactgacagcaggatggtcaggtcccaaggtgctctcccggatgctaagggcatcattcagcaggtgggcaggctccttatacttattctggtc

SEQ ID NO: 9759 - DNA, 519 bp, Homo sapiens
  III.3387 (AI569839)
tttttttttttattaaagagaacatctagtttacacaatatctagctgacaacattctaagctcagcatttttctgttccatgcttggggttgaactgtcttttttgttgttcagggatgtaagagctaacaccatagcaacacttctaatttataatcttgtatttcctcactgatttactgattaaacaatttttcccctttagggcaattcctggcaattttggttaacacattaacaatagatctccctgttgtgtgtttcatttaatcatttaaagttatgggttgggcacatattaggatgtactggctttacccttagtttggatccatgatggtaaactgaatggaagtaaggacttttttttgttttttacagtaactttccatgaagtctcacctcaacacattgtgctaatgaaaaattccatataacacaagctaaatctcaaaataaaactgttactttaataccttaataagtctcagaactttagataggatgttggcttagtg

SEQ ID NO: 9760 - DNA, 299 bp, Homo sapiens
  III.3388 (AI435999)
tttttttttttttttttttttttttttttttttttttttttttttttttttttttttttttttttttttttgggcctttggcaaaaagttttaaaaaaaaaaaaaatgggttaaaatttttaggcccccaaccccaggggtaaaaaacccaggggaaggggcccacccccccccaggaaggggggggggggacttaaaatggccggggggggggcccaaaaaaaggcccccaggaggggggaaaggaacaccccccccccttcccccacccccggcccaaagggggaaaagggggggag

SEQ ID NO: 9761 - DNA, 414 bp, Homo sapiens
  III.3389 (AI355237)
ttttttttttttttttttttttttttttttttttttttttttttttccaaattaaattttttaaaggggcctaaaaatttggggacaaattttggggcaagtggttcccattaaaagggcctggttttaaaaattaaaaacttaaaacggccccccccaaaaaaaaaacccaagggggcccaaaaaaaattttcttttcttttggagggtttaacgaggcatggttataataaaccagttttttactactaaacttaaagggccaatggaaacaaacagtttggaaaccgtttttccaccactgattaaaagggggggggcaggtattagggaaaatattcatttacccttcggagctttctgggcaaactgggggaccttgccagctccaaaagccttttttgccactgcttt

SEQ ID NO: 9762 - DNA, 344 bp, Homo sapiens
  III.3390 (AI671638)
tttttttttttttttttttttttttttttttttttttttttttggggaagcagcctcactggcccccaggcgggagggcaggggcccaatctcggctcactgcaagctccaactccggggttcatgccattctcctgcctaagcctcccgagcaggggggactacaggcccccgccaccacccccgggtgattttttttgtattttcagaaagagacagggtttcactgttagccaggagggtctcgatctcctgacctcgggatctgcctgcctcggcctcccaaagggctgggattacaggcatgagccaccgggcccagctccttttttttttttaaagac

SEQ ID NO: 9763 - DNA, 484 bp, Homo sapiens
  III.3391 (AI804194)
cttactctatttatcctcctaatttttttagaaagttaaaagctctatgtatattctttaaacattaagcttagtttattaactaggaatattcaacaaagtctaaagttaatatctgagaattacagaaatcttagatcactttttggccatcacatccctctcgctttacacagtgtttttgcctggtcttagagttttatgctgatgctacctcaagttagacattggctctatttctatggagttaacgtttgtccatattcactctcacatatgtcagcatccttcttggattccacgttctttcttaaaagtcagactttccatctgctcgtggcatatcttttagaaatttcttctcaactgtggttccctgagagcgtgaagatgtaatgccccaagacatccacagtatgtaatgagttaacgtctctaatatgcatccagatgatataatgagaaactagtcactgaagacact

SEQ ID NO: 9764 - DNA, 110 bp, Homo sapiens
  III.3392 (AI250476)
gagaagacgacagaagggggagagggtgagcacaatgtcttctgaaaggaaaaaaggaaggaaggaaccgagggaaaaaaaataaaaaaaaaaaaaaaaagtcgtatcga

SEQ ID NO: 9765 - DNA, 453 bp, Homo sapiens
  III.3393 (AI633744)
tttttgagtcaaaacagttaaatattgtccttttattccacctaatataacaatgcagtgatattgttgggactattgaaatacaagatcaatctcacattcgtatagcattttcagtttataaaacatttcaagttcattagttcattttaaccttacttaagttcccaagacagataaggcaggcatatcatacccattttataaattagaaccctgaggcctattgggtaactttctcaaagtcctactgctcactagttgcaatatggaagtacactctaggtctccagatccctacctcccctcccctgctcttcccactatgctatttttcactcagtattgatctggttatcaaacatgaactatgtgtatctaaaattaatattaaattgtgaagaattgttctaatgagtaaagtacatcagctttgttacattattttgactt

SEQ ID NO: 9766 - DNA, 380 bp, Homo sapiens
  III.3394 (R86764)
  misc_feature (21)..(21): n is a, c, g, or t
  misc_feature (22)..(22): n is a, c, g, or t
  misc_feature (54)..(54): n is a, c, g, or t
  misc_feature (118)..(118): n is a, c, g, or t
  misc_feature (126)..(126): n is a, c, g, or t
  misc_feature (234)..(234): n is a, c, g, or t
  misc_feature (371)..(371): n is a, c, g, or t
ggctggagtgcaatggccgannctcggctcaccgcaacctccgcctcccgagtncttctgcctcagcctcctgagtagctgggattacaggcatgcaccaccacgcctggttaatttnctgttttnagtagagacggaatttcatcatgttagccaggctggtctcgaactcctgacctcaggtgatctgcccaccttggcctcccaaagtgctgggactacaggcgtgacacncgtgcctggcagagatactagtcttttttcacaaattgtagagaatcaaggggtcagaaattatttgttttcaactcaataccagcatttgattggggtgaccagcaatgtgggcccaaagaaaggaaagtcgggcngggtgaaca

SEQ ID NO: 9767 - DNA, 400 bp, Homo sapiens
  III.3395 (R86920)
  misc_feature (115)..(115): n is a, c, g, or t
aagcattggatggcacatttaaaaagatttgttttctgtttataaatattttccataagaagaaagcaaggaataatcttctgacactgtattgtaaaaaaatctttgtctcttntccttttatcttccctaggcatagagattttatgagaatgttttggcatcaaggtttttcttggaatttttgtggggtgatgtgtcctcagccaccctttagtttttttcctggtcctgggttccagtactgtctgtgaataaaccaagatatcagtcatggctatgtctgcaagactgtctaatgaatattaattcctggggtcattttctcccataggacaacctgtggtatgggagtgtagcctctgaagggtagcaggtgtattccctgggggctgagagg

SEQ ID NO: 9768 - DNA, 445 bp, Homo sapiens
  III.3396 (AI800457)
tttttttttttttttgagatggagtcttgcactggggcccaggctgggtacagcagtgcgatctcggctcactgcaacctccgtccccgggttcaagcaattctcccgcctcagcctcccaaggagctgggactacaggcctctgccaccacacccagctaacttttgtatttttagtagagacggggtttcgccatgttggcgaggctggtctcgaactcccgacctcaggtgatccaccccacctcagcctcccaaagtgctaggactacaggcatgagccaccgcaaccggcctaaacaggccttgcccaggcaatgagcatccagttagacaggttcttcaaggcctagtaatagttctctggttacaacggtgctcagcttgtctgctaggaatgggactcccatctggacatgtctaggtcagtgttccaaaatatggc

SEQ ID NO: 9769 - DNA, 407 bp, Homo sapiens
  III.3397 (AI923902)
tctctaatcttcttgttttatttcattaagctgatcttcaatgtctgatatcctttcttctgcttggtcgatttggctactgatagttgtatatgcttcacgaggttcttgtgctgtgtgtttcagctccatcaggtcatttatgttgttctttaggctggttattctagttagcaattcatctacccttttttaaaggttcttagcttccttgcattgggttagaacaagttcctttggtttggagcagtttgttattacccaccttctgaagcctacttctgtcagttcgtcaaactaattctctgtccagttttgttcccttgctggcaaggagttgtgatcctttggaggagaagaggccttctggtttttggaattttcagcctctttgcactagtttctac

SEQ ID NO: 9770 - DNA, 476 bp, Homo sapiens
  III.3398 (AI808258)
tattattcaaaattggtatttttattattagtatgattgttattttttataattagttattatagaaagccattcacatttagaagtaaaccctggccaggaataatggtgaatttacaaatgttcagtgcgtggtgttggtaaacgaaacaatgagagatttcatcctgcttccttttggaccctagaggtatggtaccacactcatttgttgaattgctccatatcacatgggtaagaagaatggttgtggcagtggaagtttccatttcttttccaaacacatatatttaacccatcttatagagatctgagacactaatctggtccgagtccactacttcaaagtccttccgaggcaccaggtccaggcccaaatgttcattaccccagtccaggcgcacggtgatgtgccgcttaacctcccgcacctgatcctgagtcaggtgaccagacagtagctgcccttccaggtc

SEQ ID NO: 9771 - DNA, 539 bp, Homo sapiens
  III.3399 (AI476420)
  misc_feature (11)..(11): n is a, c, g, or t
  misc_feature (334)..(334): n is a, c, g, or t
  misc_feature (343)..(343): n is a, c, g, or t
  misc_feature (469)..(469): n is a, c, g, or t
ttttttgtcgntcagctgagctttatcaccagtttcctgttgctccatagcagcttcactggcgatggggcaaggcctggcggaacttggggcacagatgagggaggcagttcccagacacccaggggatcaactggagcccagacgtggaccccgggagtgaccaccccagaccagcctcccagcgtaccaggctctctgagacaagaagctgtgttcccaagtcactgggccaccccacccagagcaccctgagttatacagactcggcagccagcctcggcctcgcctctatttctggttctgtgggctcgccccgggcgctgagcacctncagggcctncaggttgccgggttcctctgcaacaacaggcaagggctcagagtccccttcagcctcagcgtcctcagtgtcactggctccgccctcagtgccttggcctgacggggcagctttagcacaacgcangcagcaggtgtggcgacagccatgaagacccagccagggcccacttagagccggccaggtagaagatgat

SEQ ID NO: 9772 - DNA, 474 bp, Homo sapiens
  III.3400 (AI580400)
  misc_feature (337)..(337): n is a, c, g, or t
ttttgtctccagaatcctgtatttcttttatttttagcttcatttctgataaaagattaatgtgacagttcaataggcattcttgactttaaaaaaaaattcttccaagagtttatgaatcggccataactgaaaaacttgacagctaacttttttacgcttcgagggattatgtattcaattctagtggcaagtgttagcccacttgtgcaaacaacatactggtatttcaaaccatccttccccaaattctggaaatgtttacattcttgttgtaccatcttgaggcttttctcagttgtctcattgaatttgtcttccgcgtaacggtaacaancctggagggttttctgtgttgcagcaatttctcaggagatctttgtatatttgaacaattcttaaaagctctggtatagacaggttctgatgtctccctgagtattcaaaagtaaacttcgcaaaagaggtgtctgg

SEQ ID NO: 9773 - DNA, 354 bp, Homo sapiens
  III.3401 (AI610643)
  misc_feature (224)..(224): n is a, c, g, or t
ttttgctgggaggagctgtttaatcgttcagggaggctgatagctgctgggactcactgggctcatgcgggaagggatggggtcacaattcatatttacagtgaccaaagggcattttcctaaagtacccacaaatagaagtatatatatatatttatatatatatttatatatatatatagagtacttcattaaatgttctgttgaaggaatgcagaaacttncagtctcctccccagcagctctgttccatccaatcacagaacccttagagcgcaacagcccggagccgtggccttgcctgtggctggaggagttggcaaagcgtggggcccgcggatgccagcacaggct

SEQ ID NO: 9774 - DNA, 346 bp, Homo sapiens
  III.3402 (AI392736)
tcaggaaaaaggaaggctttaatgcaaagtcttacaacagctttggggaattgttaccgattgaggtctcagccttttcctgactcattttccaaaggttttcaacttccccagctgtgaagtttgacttgctaaacaaagaagatactacagcttttccccagtgtggctcctgtggaagctcccccaacacacacaacatcacaggtgtgggtgggcagagatagaaaaaatttttttttctaaatgtttttctcttaaggagctagggatgacctcatgaaagtttagggaatctgttcttcccctcactccttcctcattcccatccaactcagacatgctt

SEQ ID NO: 9775 - DNA, 314 bp, Homo sapiens
  III.3403 (AI569312)
ttttatggtttgctttataaaagttactataatacaatggtacatagtattgaattcacaaaaatatgaacaaatatttacatcaagacacacaacggaaacacttctcttcaaaacaagttacatatggatgatggagtctacccgcacaaacatccctaaaactcattggttctcatctttgcagggggagggagagaaagcaaaaaatagcagaaacccccaactcttgaaaagcagagatttgttcaatgaaaaatgagggagttgaaagaaaaatgactcgacacatatcttgattattgcaaaccact

SEQ ID NO: 9776 - DNA, 453 bp, Homo sapiens
  III.3404 (AI498708)
gaaacatgcatatttttattttccaaattaatgtattcaggcaaaaattatttgcccttaatagcatattattttacatttctgttcaccattcatccaaacaataatgacaatagaagtccacaggcagcaccacaacacattatgaatttactctgactttcaattttgcatattttcagtttgtttttttaacttgactcttgataattgcgaatatgaagtcagagaggtttggaaagacgatgctttccattgtgttttattctattttgaggagtctttgatatctaagaatgggcatcctctttgactacatagctgctttctagccattaattgggtatcatgttcttagtggaatgagaaaaacctggaagaaccctcgcccagatttaaataggagtgaatgcttgcattgtttgaacacattcacatatttgaacatctttg

SEQ ID NO: 9777 - DNA, 511 bp, Homo sapiens
  III.3405 (AI681064)
tttgaaaattgaatgtcagttttattatggtggattttctcccgtgtcttcacgactcacagcgctgagtgtgctaaccaatggtgggcttaattggggtactaggctcaggaaatagctgccattcttgctaccaagtggcctcacataattatcttaaggcatctcttgagctgaaacaggtggggctggtaattggcagcctcaagtaaaataggaggagagataggctcagagtgggttgcagaggaactggtgaataaattcttgagccttcttcttctctgtcatatcaagcttttggtgaccagctgggtttcgaagcaataagctgccaaatatgctagctagaatattctcatccaaatgattttttgctgaatttttcacagttctcgcaaaaacgcccatcagtagtggaagacctttttgtggatttggggagagtagaatgacctgtttgtttggtgtgtagtgccagaacactcccaagcagtttaggtaggtgctg

SEQ ID NO: 9778 - DNA, 558 bp, Homo sapiens
  III.3406 (AI652256)
ttttatataatcaacttttactgaggtaagagaaactggcatttctgctttaaaaataatcacaaaagatagtttatcctggcgatatcatttcacactaggatagttacttttgactgaaaccagggttaaaaataagattgtttcccacttcaaaagaaaacatttaccaacatgaaaaaggaactatgtataactgttttagcatcatttcataatcttattttcatattgtgaagtaaccttcttgaataaaagcagaaaattaagactttcagaaaacaagctgtaccagttaaagctactagagacaggataaaggttaggaattctttggatagtttctcctagctcaagcttgtccaacccagagcccacaacagctttgaatgtggcccaacacacatttgtaagttttcttaaaacattatgagctgttttgttttgagctcatcagctatccttagcgtattttgtgtcacccaagacaattcttccagtgtggcccagggaagccaaaagatgggacacccctgtcttagttgattaacacaggag

SEQ ID NO: 9779 - DNA, 358 bp, Homo sapiens
  III.3407 (AI498066)
attttatgacaagtttgttgagaatttatttgcataaaaatgccagtatttttctgctgtgtctctagagatataccaccccccagctaagagtgggtggtaggcaaatgtgctacgggctcctgggaaatggatcatgaagaatgtggtgtgctcagtggccagaggggcagtggggcctgagtctgtgtctctgagtttgtgtgtttcgagaacaagagcagagggcattcagatgtagaattcctccatgtcgttatccccggggccagccgaccctgggggtggtggcatgtctccatcagtctgcttgactttgggggtatcgcatgggagcctgtgggaggagtctgtgagg

SEQ ID NO: 9780 - DNA, 344 bp, Homo sapiens
  III.3408 (R01707)
caaagaagtgaccactcacatcacagaactctctgaggcatgctgggctaattgactctattgagatatcctttgttatgataaaaatcttctattcccctatacagatggtaccagccaagaggaaagtcactcgtgcctgtggtcaagcttcaggcaatcccagtgaccttgtgctgccttaactcacccctgtctcctggggaagaggtgcagaaggggaaagtgcttggggccttcctctcagtgacaccactcccctctttgtgtcactgccttgcttttggggctcagcgtcattaaagcactgctgcaccttagtgaacacactcctttctaggggc

SEQ ID NO: 9781 - DNA, 383 bp, Homo sapiens
  III.3409 (R02650)
  misc_feature (100)..(100): n is a, c, g, or t
  misc_feature (295)..(295): n is a, c, g, or t
  misc_feature (309)..(309): n is a, c, g, or t
  misc_feature (374)..(374): n is a, c, g, or t
agccttggaagatcctggagtcaatctccttttatttcagatgaaaactgatgacagggaaagagcccaggaagaaagtttttattcttggtgccttggnaacgtgtgtatcctccctcaaaagaaggcttggagcaaaatgaacacttacaggaaactgaggctcgtatgtattatgcagtgaatcaccggcataattgggaattctaacctcgaaattttatttccaaatttgactgggctccacttccttatacatcaaattgatcaaaggcaggaaattacaggtttcaanttaggggtaaaggntaaggaaaaaggaaagcaggaacggtggagttcaggaagggtaaggagggccacgttaacccccntattttttt

SEQ ID NO: 9782 - DNA, 452 bp, Homo sapiens
  III.3410 (AI797165)
tgaaacagcaaaagcaggggtttattaaagcaagaaagcactccacgggatgggtgtgagccccagcaagcagctcaaggacccggttacaaagttatctgggttttaagtactccttttgaggtccctatcagctaccccttatctggatgaaagatttggtccgtggctaatcaaaggctgaggtgaattggtaccccatgcagatgaaggcatggcctgtgcttggcccacggccactccaagtcactctccttttctatcagagaactggtgcaaaggagagggttgtagcaacagtcacctttgatcctttgctactcaggtgtagatgaggttttccttttggtttagatgtaggaagttcacgttaattggccttaggttccctgctcccagaccttggtgtttcttctttaggaattcagcacgaattggccttaagttccctg

SEQ ID NO: 9783 - DNA, 315 bp, Homo sapiens
  III.3411 (AI635911)
  misc_feature (270)..(270): n is a, c, g, or t
ttttttttttttttttttagtagagatggagtttcaccatattggtcaggctggtcttgaactcctgacctcaggtgatccacccacctcggcctcccaaagtgctgggattgcaggcgtgataaacaaatattcttaatagggctactttgaattaatctgcctttatgtttgggagaagaaagctgagacattgcatgaaagatgatgagagataaatgttgatcttttggccccatttgttaattgtattcagtatttgaacgtcgncctgtttattgttagttttcttcatcatttattgtatagacaatt

SEQ ID NO: 9784 - DNA, 226 bp, Homo sapiens
  III.3412 (AI374633)
ttttttttttttaaaatttccaaaatcttgcactatgtgtttattacagcactattcacaatagtaaagatatggaatcaacctaagtgtccatcagcagatgactgaataaagaaaatgtggtatatatacaacgaatgattactcagccattaaaacaaaatgaaatcatgtcatttgcagcaaaatggatggatagcccttaccttaagtgtaacaagtcaga

SEQ ID NO: 9785 - DNA, 186 bp, Homo sapiens
  III.3413 (AI540759)
ttttttttttttttttttttttttttttttttttttttttttttttttttttttttttttttttttccataaacctttttaagggggcccaaaatttgggggccaattttggggccagggggtccccttaaaaaggcccggttttaaaaacctaaaacctaaaaccggccccccccaaaaaaaaaa

SEQ ID NO: 9786 - DNA, 431 bp, Homo sapiens
  III.3414 (AI801604)
ttttttcaatctatatagactttaatttgtgcatttgtgataatttatgactgcaaaaaacacttgttttcttagaatgacatagtgaaaggcacatttcatttgaatgcatagtgtaccattctaaaatatcctaatttctttacaaagtgcttgagcagtcacatacacatacagtaatagcaaaatatatttacactctataaagcttaaaattttaaatctgactaaaatatatatatattttaaactacaaaaaattagtgctttcttcagcttaattgtgtaaatagaccctgccttctaatttttttagtgattgacttcaattaaaaaaaaaattctgtacactgtgtagttacaaaatgctgtcagtttttaatgctaagagcctattttagacattactttctttgctatttgagaaccaa

SEQ ID NO: 9787 - DNA, 341 bp, Homo sapiens
  III.3415 (AI584051)
tttttgagacagagtctcattctgttgcccaggctggagggcagtggcgagatctcggctcactgcaacctccacctcccaagttcaagcgattcttctgcctcagcgtcctgagtagctgggactacaggcgcacgctaccacacctggctaattttttttgtatttttagtagagacagggtttcaccatattggccaggctggtctcgaactcatgactttgtgatccacccgccttggcctcccaaagtgctggggattacaagcgtgagccaccaggcccagcctctactttaattttttgcaaccatttaaaaatataaaagctatccttagctc

SEQ ID NO: 9788 - DNA, 411 bp, Homo sapiens
  III.3416 (AI565514)
gtttttttttttttttttttacatttctatcaggttttttaaatttattattacacaagtaaaacatgttcattataagtaaattaagaaacattacctaaaaattgaattacttctaatttcaccatctaaaatgttaacattctaaagtcagtttttttactcaaaccagtacaaaggtaaatatacatttttaatatatttttaagtaattttaaacttacaaaggagttgtaaaaatacagagttccggatacccttcatccagctttctctaatcttagtatattacataaccagggtacatttatcaaaaataaaagtacattggtataataccattaactgaattatacattttatttccccagtttttttacttacataatccagtttgggtaccatatcgca

SEQ ID NO: 9789 - DNA, 350 bp, Homo sapiens
  III.3417 (AI886149)
tatatttaaaattgttatttatggtaacaacgaaaagtaacatacaaatttcaaacatcaagaataaaataaattaaaggtatgatcaatacacatcagtacaaagaggggaacacaatgaaacaaacaaaaaaaattagatgctagaaattaatccaaattattactaattaaatgtcaggcactaaatgtgcaacataaaaggattgttaattggtattattcaagtattttttcttttttttttttttttgtgacagagtttcactcttgttgcccaggctgcagtgcaatggcgttgatctcggctcactgcaacctctgcctcccgggttcaaatgattctcctg

SEQ ID NO: 9790 - DNA, 395 bp, Homo sapiens
  III.3418 (AI610701)
tgtaatcaaacaaaaagtttatttaaaaaagaaattgttccttaccctgaggtcataaaaatattcttctatattttcttctaaatgtgttaaaattttgttattcacatgtaagtcctgaatccacctggagttgtgtgtgtggtgttaggtggggatctaattttactttcccatatggatcaccacttgtcccaacgccatttataaaagagtctatcttttccccactggttggtgatgcttctctgtcatacggcaaattctcatttatgcaaggttctgtctccgggactcctgttctgtccttttttttccctttatttttcatttttaaatgggctctcactctgtcacccaggccggagtgcagtggcatgatctcagctcaccgc

SEQ ID NO: 9791 - DNA, 316 bp, Homo sapiens
  III.3419 (AI890206)
  misc_feature (193)..(193): n is a, c, g, or t
tttttttttttttttttttttttttttttttttggaaggcttcgtttctagctattctgggcccattcccccctgaaagaaaaaataatcctatctatagcggaaattcatattagggaatagtaatttattctatttcgggaacttttaaaaaggcataattccatcaaggcccatggaagttaagggagtnaattgtgtttcaaagaaggcggccacaggtcgactttaaataagttgggggggaacactacatctgttctcaagggattcccccaaatacttttgggggcttcctttaaaacggcccccaaac

SEQ ID NO: 9792 - DNA, 486 bp, Homo sapiens
  III.3420 (AI650873)
tttaactgggcacttaaaaattagaaaatttaattattttaataattctgatacacgcacgtatttctgttttatagaggagaacactgaaatttgaatgggtattttgcccaaggttacatagctgttaaagaggacaccaggctccaacccagttcttcctgactaaacaggccaggtctttgcctcatgctgcacaggccacctccgcgaagtgacaagatcccagaacatgcttttcacagctcagcaccaagcctgtgcggcaaacagcctgtgcagcagcagtttttggtgaggctgctgctctcttcccagccttgggtgccttttgcctttcagttctcggggaggagacaggctggtccttcattgctggccccggccaacttctccgtctcactggaggtgggctgctacctgcccaccagggcttggtcctggaagcttccctcccttgctttctctgcttgagacggcagttgg

SEQ ID NO: 9793 - DNA, 324 bp, Homo sapiens
  III.3421 (AI863090)
  misc_feature (314)..(314): n is a, c, g, or t
attatttatcatcactttcagaaacatcattatttttcttcttggaccttggaacttcacatttttcatatttgttagatgctttacagctccatgcgaggcccccttgtttagacagtcaagttcttcattgggttctgtatgtaagttcccacccacggccacattgattcagcctctttttgaggattgaggagatgaccacaatcccagacccatagatccaaggccaagaaaaggaggtgcatttatgccatccgcgggtcactctactgattgcagccatttaaatgtctgcattgagagctcaaganatgaaggcat

SEQ ID NO: 9794 - DNA, 437 bp, Homo sapiens
  III.3422 (BE047838)
tctcagcagttgccctgaggcaagtggaaaggcaggcagtgctctggggtcaccgagaaagtctaaaaacaggaggctgaaggtactgtgatggctttaaaaatggccaccttattaaatagggattgtatcaatattgaaatgaagacaatctttccaactttgggtgtttcacttgctgttttaattgtttgtttttaacactttgtaggtttgtgttttcataatctttaatttgaaactcatgtgtcctcatggatcgtggatgccttcatttcttgagctctcaatgcagacatttaaatggctgcaatcagtagagtgacccgcggatggcataaatgcacctccttttcttggccttggatctatgggtctgggattgtggtcatctcctcaatcctcaaaaagaggctgaatcaatgtggccgtgggtg

SEQ ID NO: 9795 - DNA, 449 bp, Homo sapiens
  III.3423 (AI911330)
tttgcattttaagattttatttgtgacagcattagtttcctaaataagggaaatgtgaagatgtgtttccacgctgatggttaataagtgtgaagactgataaccaataataattggtaaccataaaatatttcaatacaatgaattaatccatatgaaatgaaaaagagctatatgacataaagcaagtgttgagcaagcagagctcttcaaacaagtacaaatttacttagcaataaaattcagtagtaaatgaaatgcaattatggcactggagaaaaacctcacagagtttgggatgaatcaggtttggaaggacaatgtactcacactctttcatacaccctctcattgcacgcacatacacataaccacgtgaatttgtgagcaaaaacattccctgacctttctacccacaacacatatgtgcagtacccaggttagagctg

SEQ ID NO: 9796 - DNA, 505 bp, Homo sapiens
  III.3424 (AI738623)
gggctgggagaaagcccctgaccagaattcggaggcgacagtgtcatcatccccaatatccttagtttttcccatcctatttgaggcgggcaggctatcactcaccttcaactttgacaaaatactcccttttctaatttagcctgttctttcccagcaacaggttcatcttggaagcaggcaggatacagagtaatagagggggtttcgccagagcccttgggggctgcaaatatcagtgctgctgccgccgcccttgccaatgttgttagcccggtgacagcgagacgtgtctaagggccagtgccctggcctctacttcagaacgcagtgccctgtccgtgttcctcttagtacagggtgtttagagaatctttctatggctttttgtgttagatttcaaagacccgtgcactttgacaggatgggattttgtcagttctgtgacttcacgtccgtgtgaaagaggtctttaaggcagttcggttttgtagatcccatgcga

SEQ ID NO: 9797 - DNA, 436 bp, Homo sapiens
  III.3425 (AI811914)
  misc_feature (213)..(213): n is a, c, g, or t
tatttatgatttctaattttattataaaataaaagcagaaatatttcccgaagaacattcacatgagggcattacggggagacggcaagtcggcggctcggggggcgcgctcagccgggagcgctgtagtcacagtcccgggaggaagagcgcggtgtggcggggcctcgccaagagagaaggaggaggggcgtatgacgaggcggcgtttanggggcttctgtggcgctgccctttctctctcacttaagttactagacgaaaagctgacacctgcagctcccactgacccacatgggcgagggaaaaggcctcaggagatggcctaggttcaaagtccctgtcttttctctcctcttccctctcccaccccctactccggtaaagcgagggccagaggtaggggcagatagaccaccagtcaggaggagaaaga

SEQ ID NO: 9798 - DNA, 483 bp, Homo sapiens
  III.3426 (AI928506)
ttttttttttttttattttgaataaaaatttattgtttataagtggtactaaaaatattgagtttatcttttctaaaagtgatatgtgctctttatgaaccttcacattcatttcttatgtttgggttgtgagtaaagagaggaaagggtgtgaggtttggttcattttcaggggatgaaagaaggaaaagaaaatttattaaataactactatggcctaagtgacttcatctacaggatcttacctgtgagattttacattatttcatagaaagtaagggtcagagagtttaagccgccattaaggttatgaacgtcaaccacaaagaaaattcctagccccctaagtaattgaatgggcccccttctcagacaacgggattccaaagaaacctaaaaaactagtccaggctatatggaaagtaggggtcagacgtgcttcattctactcgctcccttttggagtttagatgcaacaaacca

SEQ ID NO: 9799 - DNA, 492 bp, Homo sapiens
  III.3427 (AI694034)
atcatctatggacataattcaacatgatgccctctttcttctggaggggtgtgataactgcttgataataagcactttttcaggcctattgagaatgtggttaatgattctaaacttgatttttcataacttgtaaaatagagctgacagtattatagttctgaaaacagttttgcgttatttgggtatcaaaataaagtttgaaacaattaggatggatttgcaaataacctttcacaaaacatgttgactcagattttgtcatgatccttctgttaggtgcatctcttattccagccctaacagattgggtgacaatatcagggtgctggtggatgtacgcctctttctttccagtgtgctgctatgatggtggctggttacctgtggtgtcttattttctttcactggctatgaatggcttgctcatgacatattttgtatttgatgagaataccatagtgtttgataaatattcagaaatgtatcgct

SEQ ID NO: 9800 - DNA, 486 bp, Homo sapiens
  III.3428 (AI475927)
gcgcggcctgctggtgaccccgcgccgcgtcgtgtccgggttgtgtcctgcaggccgaagcggcagccgaagccgtcctcggatgagggttactgggactgtagcgtctgcaccttccggaacagcgccgaggccttcaagtgcatgatgtgcgatgtgcggaagggcacctccacccggtgagtcccgggcctgcccctcgcgccgccggccggcggggtggcgaccagaggacgcccttgcggctgccgccccctcccatgacactggcggacccggcgggaggaggcagacggaggtggctgtggcgataggaactgggtcacattgatcgcaacccaggcgatggtttgcggtgaggggtaattgaagaggctgtaacgttttttgctgccaatagagaataaattatttaagggaggcattagctactgcgatttaattcgtatcgctgggtgtaatgcccctctccccattctgggtata

SEQ ID NO: 9801 - DNA, 444 bp, Homo sapiens
  III.3429 (AI655311)
ttttttctactgaaagtgcataaatttttaatttgatattcagaggacactggcatcttttagtggcaagagtcacagttgtgtataactattgtcaaaaaatcagcaaagagtacaaagtctttgtcttattcacacatgaagtcttggaatggaagggggatttttctcctgttctcaattgaagtcatggttttgtgttcacagtggtatcatgcaccttctttggaaactgagatttaagctgaagtttgagagatgattaaggactataagattagtaatctctgatgaggagacacctaatgtggatctctgtatcacatcctcttgctctccatgagcactgccagtttcttggtttgggtgctcttcatctctcatttggacttttttttcaaagtcttctaagcaatttatttgcctccagtgatgttcagtctc

SEQ ID NO: 9802 - DNA, 263 bp, Homo sapiens
  III.3430 (AI763384)
tttttttttttaaaatataatgatggggttttgctatgttccccaggtgggttttgaactcctggcttcaagtgatcctcccgcctaagcctctcaaagtgttgagattacaggcatgagtctccatacccggctggtttttacattaaaaaaaaaagaaagaagactattttgtgagacacaaaaattacaagaaattcaaatctcagtgtcaatgaataaagttttatggcacacagccatacccattcatttacatatca

SEQ ID NO: 9803 - DNA, 321 bp, Homo sapiens
  III.3431 (AI623497)
  misc_feature (206)..(206): n is a, c, g, or t
tttttttttacggatagaacctttattgctgaacataaaacacctgcctgggaggcctggccagtggcctcttcactgggccgaaaacctgggtggggagggctgggggctgcagggccactgttgccaatggcagtcggggacaggcctggaggccagccctgcctggcaccctggaaggtggtggggtggggacaggggcctgncttgggggaggaagaccaggccctgcgcacacccttggcatgggaaggttgagggcccagcagggcaagcagtgtccctgtggcccccaggtgaggcttggtggcgggcggccct

SEQ ID NO: 9804 - DNA, 420 bp, Homo sapiens
  III.3432 (AA724463)
ttttttaactttaacacataacattttatttctctttcattcaaagtttactatggatctgacagatcttccaaggaggatcctttccaggtgggcgcttaggaatttaggctaattccctcttgtggctcttctgtctcaaacgtggtcaatattattgttgctagcacgatgtttaatcaaaagacaccaggaactttcaacttcacagtaatgttttaaaaggttggagatttcaaatgcacacagtctttgactctggctagcaggctgctgcagagaaagtagagggagcaaactccaggggagagggttctgatgggatatggattccttcatagcaattaccacaagcaccagagctttcaatttaattaaaccaattcttcagttttgggatccatctctgggcttagttgc

SEQ ID NO: 9805 - DNA, 472 bp, Homo sapiens
  III.3433 (AI690233)
ttttttttttaaatggtgaaggggttttaattacaccatgaagttttacaattttttaggtttttagttctggttttagaaaacagagtagaaggattacagagaaaaacttcaccattagacaagaagtcaaaatgattctaagggccgcgcaaacaggcttttccaagaattaatcatgaggtggtgcttggagaattcctttactccagtgactttgaaacccccttctcactctccactagtctttcaaaggattcatggtgaattgggtctaacgagtataacacggccggccgaaggcatgaagctcacgctaccctttcagggcggaaagttcccaggaggaagaatggagaaaaagatcgagttaggcagtcctcccaacctcaccaaggctccacctctctccaaagccgcaaggctctgccacctgcgccgggagaggctgcaatcactgtctcctcctctt

SEQ ID NO: 9806 - DNA, 722 bp, Homo sapiens
  III.3434 (AI564560)
  misc_feature (379)..(379): n is a, c, g, or t
  misc_feature (400)..(400): n is a, c, g, or t
  misc_feature (465)..(465): n is a, c, g, or t
  misc_feature (509)..(509): n is a, c, g, or t
  misc_feature (531)..(531): n is a, c, g, or t
  misc_feature (532)..(532): n is a, c, g, or t
  misc_feature (579)..(579): n is a, c, g, or t
  misc_feature (580)..(580): n is a, c, g, or t
  misc_feature (678)..(678): n is a, c, g, or t
  misc_feature (688)..(688): n is a, c, g, or t
ctgtttttccaaagcagcctttcctacttcttttgtgcatgatgtgagtgtttcattcaagcactgtaagcttgccagttcaagccgatcacaaagtttttccacttcttccatcattttaacccgctctgcctcattatcagaaaaatgattccaggtcttgcatgagtttcgaagtttttgcctttccttcttaatggctttttctggatatctttttccttctttgccagcaatgcttgctgtctgacttcctcctcttctttctccttagctaaccgagcagcttctaattcagcttgtctttgtttttctttagcttcttgctccttccgtttagcttctgcttttgctttcttttctgcttctttcttggctntttcttcttccttgaactttnttatccttggatcacagctgtatgcattgtcaactaatgttcttattctgttcatttcttctttntttctttgtgctcttgttgctctgttctgcttttcatccatctnctctcatcacgacattctgctnnttctttttcttcttcatctaaataagaaaaatctctcccagaatcannattatacccagaaagaataaaatatatctacatctttcaatgatgaattcatatcaccaagtttaggaacaatttttttatttgaccatctggaattncctttcaacnactggggaaaccactcgaagaaaatatcctttgc

SEQ ID NO: 9807 - DNA, 407 bp, Homo sapiens
  III.3435 (AI382926)
  misc_feature (386)..(386): n is a, c, g, or t
cacttctttaaactttttattatggaaaatttcagatacacaagtaaagagactgtatgatgagcacatatgctcgcatcacgcagcttcaacgatgaaaaacgttctgccagcttgttttattcctctcccccagttttcataggcgtattttacagtcctgacaccagatcactctgtcaacacatcagtaggtcatccaatattctcggggccactttcaatcggtgaggggcagacggacttagaggaaggactgcagggctggaggggcgcgaaaaagcgaggggcgacgctgctcgtggcctcgggtgtccggcgcctcgcggtccccgccatcgtcacctacgccgggccaggaccgaccaggccaggtcgagggcggntcttgaccacgcgccccctgc

SEQ ID NO: 9808 - DNA, 479 bp, Homo sapiens
  III.3436 (R54041)
  misc_feature (421)..(421): n is a, c, g, or t
  misc_feature (452)..(452): n is a, c, g, or t
  misc_feature (469)..(469): n is a, c, g, or t
  misc_feature (475)..(475): n is a, c, g, or t
tcctgccatccaaagggaaccagtcttacccaaaggcttaaggggtcaccttagcccagtctcaggacactcttctccaatcagatcgctgcttctagttgcactgctcctggattctgttcttggggaacagaaggtggcaggacaggccccacaatctgcaattccagctccctccagaggggacagtcccagcgtttgcaagagagcagcttgtggcctcccttaggcaagtttaaaagccagatgtcctttttcccagaatgcggagtggtgtgtactattcatcagcttgggctgccacagcaccatgccagactggatggcttaaacatcagggaatttattttcttgccagttctgggagggtgggaaagtccagattcaaggtgtttaaggacttgggttttgggtgagggcntttttccttgggttgcaggttggcacctttntcactatgttcctcacntgggcntttt

SEQ ID NO: 9809 - DNA, 550 bp, Homo sapiens
  III.3437 (R54042)
  misc_feature (35)..(35): n is a, c, g, or t
  misc_feature (446)..(446): n is a, c, g, or t
  misc_feature (476)..(476): n is a, c, g, or t
  misc_feature (542)..(542): n is a, c, g, or t
  misc_feature (549)..(549): n is a, c, g, or t
tttttttttttaaaggagcaatgacatttcctagnaagttactctaagaatttccctagagggtcgggtatcatctcagccagatctttctcatccttcaaggccctgtttggtacagcttgctaggaagctgttccagactgcagcagccctctctggggtctctctaccacttcccaggcactcagaacttgtgcctcagtagactgttttgtggcactgtcccattctctgattctccatgtgagctggttttatcccatccagcatggctgtgaaatcctaaaggttcaaaccccagccactcttcacctatatttcccccaaatgggctagcacgggaaagggcccaaagtaggtgctcagtgctgatgagagagtaggaatttaaataccccgggaagcattgtgagttactacggaggccatgaaattgttgccacctncccaaggtggttaaagagtgatattagggnaattaggtaggggaagggttaatcaggaattgctttggttcaggaggtgttgagttttaaagtccngagggcna

SEQ ID NO: 9810 - DNA, 454 bp, Homo sapiens
  III.3438 (AI379865)
tttagtaaaaatagtttaatgtatttataaacatattttatacacacagacacaaaagcatatacacaaaaggggtttaaagaagaaagtgtatgctatttttcttgattttctttgacaaatcaacaaagaccctagaaaaatcacataaaaaccttataattcactgatacttctctaaatatttgcttgtgttctttttattattctcctccctctgtatcaacttatcaagctgttacctagaataaaatatgaatgctcttttcttaacattttttcccttctaccagtctatttcatgccttttcagatttcattcccaaatctgtatcagcagaacaagtgttgttcctgatctctagatgcccctaaacagcatcactacgtaagacgcccctggaagctaccaaaccaaaatctcagagatcttgtaatacagttaatagtttag

SEQ ID NO: 9811 - DNA, 609 bp, Homo sapiens
  III.3439 (AI674652)
  misc_feature (557)..(557): n is a, c, g, or t
tttgcctggcttttgtttctgtttatttaatattaaaaatagccctttaatctgttctggctcataagatttctacagagaagtctggtgttagtctgatggcttttccattataagtgattagacacttctctcttgctgcttttagaattttttttcttcatgttgactttggatagtctgatataactataggtcttgaacaggttcatcttgcagtgcatcttccagatgttctttcaacttcttgtatctggatgtctaattacctgagaatgggtaatttatgaagaaaagtggtttaattgcctcatggttctgcaggctatacaggaagcagagcagcttttgcttggcttctggggaggcctcagggaactcataatcatggcagaagataaaaggagagcttacactttacatgaattttggatgacactatttttcctcctgaagggtgactgcaatgtatgctgcgtatgatcctttactttgactctaggcgattccaggaagccaagactctcatgccatgagtttcctgttcaaccctgttngagtggacaaagatgagcagaactggacaccaagcttgtccttacctcgtgc

SEQ ID NO: 9812 - DNA, 325 bp, Homo sapiens
  III.3440 (AI624513)
cctttattaatttcagggcccctgagttttctcacttgctgtttttaatttttatcattctcacctggagagttttgggagcaatagcactcttctctttcctgagatggcttaactgtagtcctgcctagaggcaaagggacaaaaagatgacacttctactcttgtcatttaaatctttgctaactgcattatttcagtcaaaggtagcaggaagaattttttctcatctccacaggcaagagattgtaatagccggatctttttttttgccatcagaaacaacctaaaattaatatatttccagagtctcagccctagaaac

SEQ ID NO: 9813 - DNA, 437 bp, Homo sapiens
  III.3441 (AI799290)
cccattttaaaaattatctttattaatcctgattacaaaaattaaaacacaactaagaaaaacagtcaaacatcacagaaaaataaaaagttctgtttaatcccaacatccagagacaagtattaaaagttccatatatagcactcaactttttctcatgtatatatcaaaatacatacctcttttaacaaaaattgagtcatactgtacacactgtactgacttgctttttcccttaacaatgtaacttaaagattattccatgtcaaaacatatagatatgcctaatgtcttctgatgttctacagtatagatatatcctagtttactaatccatttccccattggtagcctttaggctatatgaataaaaggtaagaaactatatgaataaatgtttctctctttgaatgagaactgaactttttctagccttg

SEQ ID NO: 9814 - DNA, 451 bp, Homo sapiens
  III.3442 (N67041)
aacatttcatggaaaactttttattggttttctggatagaaacaggaatttatttgccaggaagaatgatcccatcatacttcagctagaaccagtgatgaggatgattcagtcttaaaaaagaaggaaatccagtcataagctacagcatgtatgaatgttaagtgaaatacgccagtcacaaaagacaaatactgtgtaggtatccaaagtaatcaaactcatagaaacagaaagtagaatacttgctgccaggggttgcaaggaccaggaaatggagagctgttattcaatgggtatagtttcagtcaagtaaaataaaagaagttgtacaacaatgtatatatggttaacaatactgtattgtacagttaaaaattaagataaacttggatacttatttttaatggacaatttttaaaaataggtgtgggtaacaatttccaatggg

SEQ ID NO: 9815 - DNA, 183 bp, Homo sapiens
  III.3443 (W00856)
  misc_feature (178)..(178): n is a, c, g, or t
attctcctgcctcagccttcctagtagctgggattacaggcatgtgcaccacgcctggctaattttgtgtttttagtagagacggggtttctccatgttggtcaggctggtctcaaactcctgacctcaggtaatccacccacgtcggcctcccaaagtgctgggattataggcgtgncactt

SEQ ID NO: 9816 - DNA, 389 bp, Homo sapiens
  III.3444 (AI564669)
tgtttttagcaagtttttaatttattttaatttggagaagcttccttctgctgaagcagcagcaactggaattaccaacaaaattctcaaagcagtacttagatttagaaatgaatactgatttttacattatcacactcaaatactatatggatttgtggggaaacgaaagagatcaggctgttactgtgtctatgtagaaagaagtagacataagagactctattttgttctgtactaagaaaaattcttctgccttgagatgctgttaatttgtaaccctaccccaaccctgtgtcgcagagacgtgctgtgttgactcaaggtttaatggatttagggctatgcaggctgtgctttgttaaaaaagcgcccgaaggcagtatgct

SEQ ID NO: 9817 - DNA, 613 bp, Homo sapiens
  III.3445 (AI808046)
  misc_feature (472)..(472): n is a, c, g, or t
gacaggataatggaagtatgtaatctttgaacagaggataatgtgaaaatataatacattaggtttcttgcatttttttttttccccaatcagccaacacagaaggattacaaagttttcagacttgcactgggccaaaaaaaggctttgcatctaattcagaatctttttatgctttgagcaaacagtggctaaagcttttccctaagaaagctggtcttctaaggacaattgccattacctggcagaagtaaagctcacaaggaaagagtgtagcatttgttgggttttggactctaaatatgaaattgtcacctgatcaggaggaggacagtatacacatttatctagtcgaccaggcctaagcagggcagggtcaatcaagtcagggcgactagtagcagccaatacataaacacctagaggaaaaaagaacatttttttaccaaaatctgatgacatgatgacattntgttataacattctatttctgtatttataattattaccctgtaagccttctactccatccaactgagtcagcaactggttaactactcggtctgtaactcctgtattatcatgacccccgccgaggagcaatggattcaaa

SEQ ID NO: 9818 - DNA, 344 bp, Homo sapiens
  III.3446 (AI824745)
ctgctgggcgcgggcgagagcggcaagtccacgttcctcaagcagatgcgcatcatccacggccgcgagttcgaccagaaggcgctgctggagttccgcgacaccatcttcgacaacatcctcaagggctcaagggttcttgttgatgcacgagataagcttggcattccttggcagtattctgaaaatgagaagcatgggatgttcctgatggccttcgagaacaaggcggggctgcctgtggagccggccaccttccagctgtacgttccggccctgagcgcactctggaggggattcttgcatcagggagggctttcagccggagaagcgagtttcagctg

SEQ ID NO: 9819 - DNA, 504 bp, Homo sapiens
  III.3447 (AA836272)
tttttttttcagaacattagtccccatttattagtattgatcttgaacaacaaataaacacatttcatgggaacacatacatttcaataactttcctattccctatctaggcattacaatcaagaaagtagcagggaagttgtgccagttcatcaatttgttgcttatcatctccaaattcaccattattgactgctctgtgaaaatggatctgatccatttaagtatttttccttttgtcagctggcaatgaagcttttccagtagaggaaactggaaagatgttgcagagagaaaaggttttgctccctccttctggccggcttactgggtagggtgttcctgcagcttgtgcagctctctccagtggctggcttctgtgttgcagtttcaatagcaccaggccgcttcccctggcaccctccctcttgtggtttttgtagtagagttcctctgctgaaacatttccctatgaacatccttctcaggcactctagcaggcca

SEQ ID NO: 9820 - DNA, 424 bp, Homo sapiens
  III.3448 (AI887648)
agggtctcgatacattgcccaggctggactcaaactcctgggctcaagcgatcctcccacttcagcctcccgaatagctggaaatacaggagggtgccaccatgccatgctactataacatagacttacacaatattataattaaaataaacttcaataataaattaataacaataataatgaaacaaataataaatcacaatacagatcgaatagtgtataaacgagaaggctcagaagcaacctactgatgaactgttaatatacagctatgtatcatgtaaagtatgatcaatcattctccatatccacatcagagagaacagtagtcatatctaatttttgcccctcaacgaaagatgtctggtcagatggaagcatttcctgagacagcactgtcaagccctgttgtgggttaccgacg

SEQ ID NO: 9821 - DNA, 250 bp, Homo sapiens
  III.3449 (AI425118)
tttgcaaaacataataaatctgattttttccgtaggagggggttcaggaaaacggtcccatttggcacctcaagtctaggtccctcaagtctctacaacagtatgcaaagaaaatgttcatcttcattcttcttatagttttctggtaacttactgaaccaagcgcacacacactctccaaggacaaacatttttcagtgctgggacaatgcaaattcaggtaagggaagacaaacatttccctaagtgc

SEQ ID NO: 9822 - DNA, 478 bp, Homo sapiens
  III.3450 (AI499858)
gcggccgcagggagccagggccacctcctcggcgtggggagtgagggcgcggaggcgcctgcacctggctgcggtgcccacggcgcccccccgcgaggctcctggtggagggttggtctgcagtcggcgcaggggagaggccttggtccgagccaggatccaccgcgctcctgccgctctcggggctggacagtcaatggggtccccgccgctgctgcagtcgctcggctgccacacgctgttagtcagatcccgcacgctgttggccccacagccagcccggggtcacttaggaccgcattcctcagtcatccagttgttagatcagtaagcatccgccagaaaagtccattccttcttactcgatttattctgcacccattacttctcagcagggtgatgattcctcctcccagcgctcgctctgtaaggcacgatgtacaaaaaatccctgtcgctgtgctcaaagatcaactca

SEQ ID NO: 9823 - DNA, 421 bp, Homo sapiens
  III.3451 (AI590152)
  misc_feature (291)..(291): n is a, c, g, or t
tttttttttttttttttttttttttttttttccatttcttataaatttattacataataatattataataattattatcaataataataatataaaaaacataaatctctggggggcgtatcacaacgtcagggtcaggaggcctcaggactggagcagggggggaaaccccctggatggaactccatacaaaaggaggggaagcggaactgcccctgtaaagttaaaaacccaaattgaacggaaccaaaccccacagggggagtgtaagaccgagtgtgtatgtggcantctgttacagggactgctgctgtgtgacctgaactgttggcggaaggatgagtgggtgtgactttgtccccagggagtggggccggtgggccagggcggggcggccaggcacaaaccggcgtgccaggcc

SEQ ID NO: 9824 - DNA, 340 bp, Homo sapiens
  III.3452 (AI610719)
tttttttttttttgccatgaaattattttaatatgtttttctccatgactgaatatacaaatataatggaagtaatgtattcttctgctgtaaagatgggtggaatatatcaaaatccactcgctgaattttctttagaaagtcctctagagaaaccgtctgaagaaaagcaggaaatgctttcacaggaacagttttgtgaaaggacctagcatgctttaggtgcaagtgtgcttgactggcaatgtcatatattacatctctcacatttttatcttggttcctccgtagaaagtcctcttgtgaaacaccatgcagcatacaaatatccatgggaagg

SEQ ID NO: 9825 - DNA, 418 bp, Homo sapiens
  III.3453 (AI611745)
  misc_feature (83)..(83): n is a, c, g, or t
  misc_feature (87)..(87): n is a, c, g, or t
  misc_feature (213)..(213): n is a, c, g, or t
  misc_feature (224)..(224): n is a, c, g, or t
  misc_feature (228)..(228): n is a, c, g, or t
  misc_feature (233)..(233): n is a, c, g, or t
  misc_feature (234)..(234): n is a, c, g, or t
  misc_feature (277)..(277): n is a, c, g, or t
  misc_feature (294)..(294): n is a, c, g, or t
  misc_feature (298)..(298): n is a, c, g, or t
  misc_feature (364)..(364): n is a, c, g, or t
  misc_feature (376)..(376): n is a, c, g, or t
  misc_feature (388)..(388): n is a, c, g, or t
  misc_feature (395)..(395): n is a, c, g, or t
  misc_feature (405)..(405): n is a, c, g, or t
  misc_feature (409)..(409): n is a, c, g, or t
  misc_feature (410)..(410): n is a, c, g, or t
  misc_feature (413)..(413): n is a, c, g, or t
ataagattattagtataaaaggggagataggtaggagtagcgtggtaagggcgatgagtgtggggaggaatggggttgggttntggntgttcaaactgtcattttatttctaccgcgctagatatggggagtagtgcgattgaggtcgagtacattaggcgttgctagaagcacacgttacggacgccgcacggccctctcacccccgccccncccccgccccngccnccccnnccccctccccccccccccccccccccccccccccccccccccnccccccccccctccccncccncccccccccccccccccccccccccccccccccccccccccccccccccccccccccccccccccncccccccccccncccccccccccnccccccncccccccccncccnnccnccccc

SEQ ID NO: 9826 - DNA, 585 bp, Homo sapiens
  III.3454 (AI924895)
tttttttttttgtaagaaggaaaatattttaaaatatatgtattatgccacaaaatactcctcatcaccaggcaaagctctagtcaccagggaattaagtttcctggacacagacagcccccaccccaccccaccccacctctctaccccaccaaaagcacacagtgtccaaatctccatcgtgcctgcaactcaggaacagctatctggccgcacagctctagggaaactcaaagcaggaacagctctgggtcctggagacgcccctgagaagagggcccagtatccctggggcctcagtccatcagccgctgctgcaccaggcgggaatagaggtcctgtccctcctagagctgggcaagcttctgcagcttgccctcctggagcaccaggatctggtgggcgcgctgaactgtctgcagcctgtgagcaatcaccagcactgtgcgatccccacgggaattccagtcctgcagggcctgctcgcactgcacatctagggcactagtagcctcatccaggatgaggtacccgcggtctcgtacaagggccccggcaatggccagacttgttctgtcccgcagc

SEQ ID NO: 9827 - DNA, 211 bp, Homo sapiens
  III.3455 (AI811785)
ttttttttttttttttttttttttttttttttttttttttttttttttttttttttttttttttttttttttttttttttttttttttcccccaaaaaacctttaaagggggcccaaaaaacgggggaaaaatttgggggaagggggtcccccaaaaaaaggccgggtttaaaaaaaaaaaaattaaaaccccccccccccaaaaaaaaaa

SEQ ID NO: 9828 - DNA, 421 bp, Homo sapiens
  III.3456 (AI625645)
ttttttgtcaaaatgtgaatcagttcagctacaagtgacagacatacagtgcagttttataccttcaaaatggattattctctgtgatcagcctattaggaaagccttaaaaattcagaatcaactgtggtcagaatttttgttacatcttcaaattaaacttttccattaaatcttaagatagctttactgctaaacatttatcatatcatacacaattaaggtgatagctgaacaacagtgatttccatggtaaattttaatattacaacaaaactctgatatttaagttatttaagagtagtccttaaagtgtttctaagaattggtatatattctttaattttaaaataagcttaaagtataaatctgtgtttttaagaattggtagattctttaatatcccagataaatttcaaaa

SEQ ID NO: 9829 - DNA, 429 bp, Homo sapiens
  III.3457 (AI926889)
gttgttgttttttaaacagcatagtttggcatcaacattattgtaaacatagttatgcgaaaacaataagcccttgtgattatgtcagcaagatattatttcattctgtgtaacaggtcagattctgccaatattgcgtgtctctcagttgcatgattgagaaaataactttcaccttctttttttcaatttactttctaaattactatatttgcttaaaattgattctgttttgccatcaataatttaaatagtatagccttgaaaaataaaaattgtgaaatttcagatttcaaacacatcaactgcaaattttgaggaacattgccctgggtttttcacagtttttagtttaattgcctttgtaagaaaatggcttctaaatatcttctcaaaacaatgctcatttttattctacatatttcaatt

SEQ ID NO: 9830 - DNA, 493 bp, Homo sapiens
  III.3458 (AI362733)
gcggccgcgtgcatgagcgcgcgcagcacagcgtggttgagcgccggcggccccccggaccccgacagcgcgacgggcagcgcgcactgaccctggcagtagttggccaggaagccgcgcggcgcgatgacccagcggtgccagcccacctcgcggaagctcacgtacagccgccgcgcgcgacaagcgccagcgccaggcggaggctgcgcggccatgaggcgttgcgagcccaagcggcgcccagcagctccgcgcgcactggcggccccagggcgggcaccaactggcggagcagcaccggcccggggtccgcgcccgcgccctggcccgcttgcgccacgctcagctcccagccgccctccggggctgccgccgccgccgccgcgaaacgcagctccaggcgggcccggctcgggcgctcagcgggttccacagccgacaggtcgaagacgactgtccactcagggcaatgccccgcggccgatgcagg

SEQ ID NO: 9831 - DNA, 697 bp, Homo sapiens
  III.3459 (AI939570)
  misc_feature (641)..(641): n is a, c, g, or t
  misc_feature (650)..(650): n is a, c, g, or t
gcacagcgtggttgattgtcggcggccccccggaccccgacagggcgacgggcagcgcgcactgaccctggcagtagttggccaggaagccgcgcggcgcgatgacccagcggtgccagcccacctcgcggaagctcacgtacagccgccgcgcgcgacaagcgccagcgccaggcggaggctgcgcggccatgaggcgttgcgagcccaagcggcgcccagcagctccgcgcgcactggcggccccagggcgggcaccaactggcggagcagcaccggcccggggtccgcgcccgcgccctggcccgcttgcgccacgctcagctcccagccgccctccggggctgccgccgccgccgccgcgaaacgcagctccaggcgggcccggctcgggcgctcagcggcttccacagccgacaggtcgaagacgactgtccactcatggcaatgcctcgtggtcgaggcaggctccgaggcccgggtgggcgcaccgcggtccgtgatgtggcgcacgatgtttccggcgaccgcgagctcctccacgtggcacggtttgagggagacctcttgggacgtccgccgcgagccagagctggtctgcttggtgtcctctgcgtcgacacagtcgcacatgaccggangtaaccggnccgagcctggtggcaccctgcggatcattacgcatgtctagagcctg

SEQ ID NO: 9832 - DNA, 342 bp, Homo sapiens
  III.3460 (AI806999)
tttatagatataataataatgaaaagttcaaaatattgagaaaattaccaaaatgtgactcagagacatgaagtgaatccatgttgttgggaaaatggcaccgatagacttgctccacaaagagttgcccaaaccgtccatttgcaaaaaacacagcatctcgctgaagcacggcgtgaaggaagggagaggcgagagacagggcttggaaggcaggctgaagccagttgtaagggacctctgaatcatgtgcagaagtatctgggatttctccatgaggaatcatcgaagccttcttcaagtaagggagtaactgagatcaaacctcaataaaactggaag

SEQ ID NO: 9833 - DNA, 505 bp, Homo sapiens
  III.3461 (AI635096)
gaagataaccattccttttttttttttttaaagcaaactttctttatgcctttggactagactgtctaaggccacaagattagaagttaccataatacatgttacactgttaactttaagcaaacttcacttttgttgaaaaccttgtaagtttgggatttcaattatcctttgctattaagaccttgtttagtctaaattaacttagaattggtatagatggcctttttttctctctactggtctttccttgcctctgccagccgcttatgctgctgttctcttaactacgttggcggggcaagggggtataaaagcagctgtaactttctatgtatggaaactggtctgggtgccttggcttacgggttaccttgtgtcatacctttgaaacaagggacctgtccaggcttccttctgatggccaacccacctctaatgctggccagtctatttcacacaaagttctaagttttcctggtgtcacagtaacactgtaatctcc

SEQ ID NO: 9834 - DNA, 217 bp, Homo sapiens
  III.3462 (AI933478)
tcagtagagccggggttttgtcatgttggccaggttggtcttgaactcctgacctcaagtgatccgcctgcctcggcctcccaaagtgctgggattacaggcgtgagcaaccacgcctggccgatttcacatattttaaatgaagtcttcagtttctaatcattcactaatttgttttcagaattggaaagcaattacattaaaaaggcaacaaata

SEQ ID NO: 9835 - DNA, 354 bp, Homo sapiens
  III.3463 (H46019)
  misc_feature (88)..(88): n is a, c, g, or t
  misc_feature (92)..(92): n is a, c, g, or t
  misc_feature (95)..(95): n is a, c, g, or t
  misc_feature (117)..(117): n is a, c, g, or t
  misc_feature (154)..(154): n is a, c, g, or t
  misc_feature (158)..(158): n is a, c, g, or t
  misc_feature (162)..(162): n is a, c, g, or t
  misc_feature (163)..(163): n is a, c, g, or t
  misc_feature (166)..(166): n is a, c, g, or t
  misc_feature (167)..(167): n is a, c, g, or t
  misc_feature (186)..(186): n is a, c, g, or t
  misc_feature (229)..(229): n is a, c, g, or t
  misc_feature (242)..(242): n is a, c, g, or t
  misc_feature (264)..(264): n is a, c, g, or t
  misc_feature (266)..(266): n is a, c, g, or t
  misc_feature (330)..(330): n is a, c, g, or t
tattgtagacaattttgttacacaattatacacattatgatacacgtttgaaacattaacacacgtggagactgctaaatcatttaanattnctntggcaaaaggataattcctttnggctgtgatacctgcaataaccaatctgtcctcattngggncagnnctnnctccctctgtcctgggganctcacagttcactttgctgaagcaatctatccacttccctatngaccttgcttatngcagttcaggtatagactattngngccttatatactaaactgttaagccagtgcgtgccctatgccctgctgagaatagattccttcngtacttgcagccctcagatgctga

SEQ ID NO: 9836 - DNA, 363 bp, Homo sapiens
  III.3464 (H46090)
  misc_feature (348)..(348): n is a, c, g, or t
ggctggtcccaatgttagtttattagtgattgatctgtaattattgggattatttattcaactctaaaattccaagatgaaaataatttatctctttcttttcaagggaaaaaaacccaaatgaatgcattttcagtttctccaggcctttgaactgcagcagaaaattcaaggatacagcctaggcctggggcaaatgcagccctggggtctttgggccagtttctgacaataatagttgagttttggggaatcacataagggtgaaaccaggaaacgatcctaagggaaaggctttgacctttgttaaacacctttagttttccaaagtcacagcagctgggggtncctcttttttttttt

SEQ ID NO: 9837 - DNA, 429 bp, Homo sapiens
  III.3465 (AI635115)
gctgaattgcaatatgtaattgcaatgtgttcctatgtcatatgtttctgtaaagtttgcaaaggtgagacatcagttagtcacaccaagccagcttggtggcacagcacatgcttgtagtcccagctactcaggaggctgaggtgggaggatggcttgagccctggagttcaaggctgtgatgagcaaagattgcaccactgtactccagacctgtctctaaaaaaagaatcaaacctgggcaacgtagtgatagactctgtctctaaatatacacatatgtctatgaataaggcttttaaaaataataaaaataactcagctaagtctctttccactctgattccccgccttccctgctcccatccagttggatggtgttggactggctgtgggtattttgggagaagttgatatggaaatagttca

SEQ ID NO: 9838 - DNA, 556 bp, Homo sapiens
  III.3466 (AI890623)
  misc_feature (328)..(328): n is a, c, g, or t
  misc_feature (460)..(460): n is a, c, g, or t
ttttttcagcgatgagagtaatagatagggctcaggcgtttgtgtatgatatgtttgcggtttcgatgatgtggtctttggagtagaaacctgtgaggaaaggtattcctgctaatgctaggctgccaatggtgagggaggttgaagtgagaggtatggttttgagtagtcctcctatttttcgaatatcttgttcattggttaaaggttgtggatgattggacccggagcacataaatagtatggctttgaagaaggcgtgggtacagatgtgcaggaatgctaggtgtggttggttgatgccgattgtaactattatgagtcctanttgacttgaagtggagaaggctacgatttttttgatgtcattttgtgtaagggcgcagactgctgcgaacagagtggtgatagcgcctaagcatagtgttagagtttggattagtgggctattttctgctanggggtggaagcggatgagtaagaagattcctgctacaactatagtgctttgattgagttaggctgaaactggggtggggccttcttatgctgaggg

SEQ ID NO: 9839 - DNA, 135 bp, Homo sapiens
  III.3467 (AI784229)
cagaaggatttgttgagtagcttcagcacttcttcctttgtcatttttttctgtctgataagtcatgccatggacgttacccatttttatcccagaggcctcttacgttgacttgaaaagacggactatgtcttt

SEQ ID NO: 9840 - DNA, 321 bp, Homo sapiens
  III.3468 (AA669007)
tagagggtgggaggaggatgaacgtctataagctacctattgggtactgtgctcactacgtgggtgatgaaatcatttgtgcactaaacctcagcaacatgcaatttacccatgtaacaaacctgtatatgtacccccaaacctacaataaaagttaaaaaattaaagatagatagaaataaaaattagaaaagacaaaaagaaaaaagaaattgccagtgagatgattaacatcatgtgcttatagaagaaacaccttgagaaggagataacatcattatatggtgatgcgtacgctgaatctaatcatgaggaaccatc

SEQ ID NO: 9841 - DNA, 435 bp, Homo sapiens
  III.3469 (AI418431)
tttgccaactagagaggagataggcgtacctccactggttttctttctagttgcaatgcaatattaatgcaggataaggtgctgtcgtgtccatttaaaagttaatttgaaaaacaatccacgttttaaatattacgtctggctctaaagctggaagaattaacgctttctcccccgctccctcccccacgcctccccgcatctgataccacacgatttagatggacgttcgcctgttcatctttgacgtaaaaataccacccactcttttatatgtgacaaatcgttgtgggaacccctgtaaatcgagccattcttcagaaacgtatagcgtaatgtatatctctaagaagaaatacgtgggacgcgttacccgccataatgtatcagtcaagcaacaagtgtttgttgagcgtgtctgatgttcttgaactg

SEQ ID NO: 9842 - DNA, 412 bp, Homo sapiens
  III.3470 (AI620644)
ttttttttttttttttttttttttttgaaattctacacagggagcatttatttatttgtatttccagtacatcaatttttagagaaagcattagatatacacttttaatgaaatgaggaaaaattaattgacagtttgactagatgaattttcataagtaaaaagaaaacacccaactaataagcctgtgatttaaaggtgagatgctacttggtacaaattaggattgaatgtgtagatatggacataaagagtggaataaccgacactggagactccaaaaagtgggaggctgagaaaaggtttagggatgaaaaattacctactgggcacaatgtatgcttctctgggtgttaggtacactaaaagcccacattttaccactatgcaatatacccatgtaacaaaactg

SEQ ID NO: 9843 - DNA, 515 bp, Homo sapiens
  III.3471 (AA813475)
tttggagtgtcagattgatttattggcttaaacaataaagaagagttttctcaattaacaagaagttctcaggtaggacatggagaggctctagtaaggtggcatgccaagtcattctctctcctcctagtgatcttttctgtactgtagaggcaggaaaacaaaacactacatctctcaggttctcaggcagtcatgatttggaaaaaaaaatgtagcttaaacaaactatatctagcaaattagatgtagtcacatggaatttggaggctagaaatgaggctacatttctgcagttttaactgttgtttggttctcctgtatagtgttgttagcagagtctccagtgacccataatggatttttaagacttgagaggcaggccataagtcatctgttttactggtgttgatgcaggtgctgcatggttctggagctggcagcaggcaggagctttctgatggtggtggttttcttggttgtggcagtgatgctgtagtgctgtggtagtgaca

SEQ ID NO: 9844 - DNA, 478 bp, Homo sapiens
  III.3472 (AI400166)
accttcaagtgttttattttgacactggtagaacacacagagctatttttctgtaaaaatttggcaaaacagtaaggttttacattgttaaagggattcttaacctcagcattcatagtaaaataatggaaacataatttccaatacacctgagggtttaattgaggtatagactcagtttgttcagattaatctcacgaaatgacgaagttttaaagcctaaagccaacaatttataaaaaccatggattgtttcttatggaagtaactcggtttattcagaaatcagtatttcacatatacagaggttatagatatgtatagagccctaattgtttcctgtggtgcaatgaagagccacaaaggacaggggttgaagtaggtcatgcagaaaacttgcctttagaaatctgttccttttatgattttaaagagattaagaagcccctttaaaaatttttgatctagcacagaactg

SEQ ID NO: 9845 - DNA, 201 bp, Homo sapiens
  III.3473 (AI915711)
gagatgagtctcactctattacccaggttggagtgcagtggcacaatctcggcccactgcaacctctgcctgccgggttaaagtgattctcctgcctcagcctccagagcagctggggctagaggcatgcgccaccacacctggctaatgtttatatttttagtagagacggggtttcaccatgttggccaggctggtctc

SEQ ID NO: 9846 - DNA, 251 bp, Homo sapiens
  III.3474 (AI919099)
atattcacaatagccttgtagttttagcgcttagaggcatttaaacagcctctctcctccagactacttcactgtagtttattatccctgaccctccacaatgtgattaccaaccgctaggatgagttgcatcttattataaagtagcaaattacaagattgtaacattagactttttaagaaaatccagtcagcttttatactaatccatcttaatttctaggttactcagaattccaggtattctgatt

SEQ ID NO: 9847 - DNA, 254 bp, Homo sapiens
  III.3475 (AI699106)
ttccaattgactgtacattttaatatcatggaaacaatccattagacaagctaaatttacaaggtaaccatttccaggtaaatttggaacctttcacctaagcgtgtccctttaaacaaagggaaataaatcttggaaattatagtgaagtgggggggggggaaaacagctgctcagggagcagctactgcatcttacctggacaaatcataattaacacaaatgtaaatgcccccaaatccaaaacatgcgct

SEQ ID NO: 9848 - DNA, 403 bp, Homo sapiens
  III.3476 (AI688474)
tttctatttatgctatgtttattcttatacatgcatacctatgttaaggtttatatatatatatatatatatatatatatatacacacacacacacatattttttttttcaagacagcagattgaagtcattgttagcatacctctcccacttggaaagacaaaatagtaagaagagattcacattgtgaacttttttccaagaagcaacacaggaacttaacaggaaaactgaaagaaatcacacgtttgaaagaagcagtgggctgcagcctacaccgtgagccagtcaaaaaactaggagtcctgagagtatgacaggggaataaactgcctctgggatatacattcccatcagagaacctggcagtccaggccatggggaggccttaaccctgcccagc

SEQ ID NO: 9849 - DNA, 398 bp, Homo sapiens
  III.3477 (R14639)
  misc_feature (361)..(361): n is a, c, g, or t
  misc_feature (370)..(370): n is a, c, g, or t
tgaggttagccaaggcccttgtagatgactactgctgtttggtgccgggatccattcagacgctgaagcagatattcagtgccagcccgagattctgctgccagttcatcacctccgttaccgcgctctatgacctgtcatcagatgacctcattccacctatggacttgcttgaaatgattgtcacctggatttttgaggacccaaggttgattctcatcacttttttaaatactccgattgcggccaatctgccaatagggattcttagagctcaccccgctcgttgggattgatccgctgggtgcgtgaagggcacccctgggcttataaaaagggaaaaagaaggcccccctttatnccaatgggnccatgttcaggcaacaagggtcacaaag

SEQ ID NO: 9850 - DNA, 366 bp, Homo sapiens
  III.3478 (R45621)
  misc_feature (331)..(331): n is a, c, g, or t
  misc_feature (347)..(347): n is a, c, g, or t
  misc_feature (353)..(353): n is a, c, g, or t
tttttttttactgtttagaaaaatttatttgaacatatgaaaggaaatttagacacccccaataaaactgagaagttcctttccgaggtgaggggaattcctgacagcctccctgagcagtgctgcacataagcttgtggtcactacgcagcctgggctcagctcacggggctgcagaaggagcccactttttctgggcggggacacatcgtcttcacgagggaaagagggccagacacacgggctttgcacccgtgggctcctgccgttcacactcctcgccacacaggctgttttcttgaaattcgcagagaacagaggcttcccgggntccggcattttttttnaaaatngcacggcaggcaa

SEQ ID NO: 9851 - DNA, 702 bp, Homo sapiens
  III.3479 (AI633729)
ttggtttaatatgttgatttattctgttttaagagtgaccactgacatagagaataagagggaggtgatttggtaatgaggggctctcagggaagggaagacagtgagagatctgaggatcctcgggggaggaaaggggtgcctggccatgctcactggattgaagccaaccaggactggcaagaagacagctgtgttgttcatgcagcagtccatctggcctgccacaaagggagcagagagtcccacagaaatgccaatgacaatcactctcttcttcccggcagccaccttcttcagttcctcaatcccgtgcaaggcactatcttctgtcccctccctagaggccaccacagacctgtcaccacctgcaatgaggtaggtgtaaagaggtttctgtcccagacctttcatcagctgattaaaggacaccgacatgaggaatgccatccggccagaggtgccccctccactcagcacaaccagccccccatctggctccttcagcacttcctgaactttcccagccacctgtaccatggtggtcagaatggattcgctgtagagtctctggtatgtggacagggcttgcccctcctcctggaagatctcagcatcacattgccctagcagtcgaacaatgttctcagcatctgctttgtctagatcctgcgtcagtgggtttgacttctccgtgattgg

SEQ ID NO: 9852 - DNA, 421 bp, Homo sapiens
  III.3480 (AA280752)
gtgacattaagttacaggcctttgactcctgggtctaacaaggacaccaaggtctgctaaatcttaagcactgacagcaattaaaacctcatcttcaggcctggtagaagatgccaatcaaaataaactgcattcctgagacataaggccagaagtaaaagctattcaactcctcaaggctcaggaactaccacagaagaggtaggcatgtgagattgtaagggctgattttgagagacaaaataagttcagtttctctgcaagttaataattgatgtcaaaggcacattgatgcaataccagcatacgggcccctgcatcagattaaaaaggttttcttgaagtgttaaccgaccccttaataaaggttataaaggttaaaaaaggcttatggaagctgtatcttatggtcaagattaaa

SEQ ID NO: 9853 - DNA, 378 bp, Homo sapiens
  III.3481 (AA281433)
gttaccactgtggcacacgataattttatataacaattataattattagtgatattgtacaccatgtcatatcagaattataggagtttcccataattttggtgcacataccaataacatttttatacaaatacagcccaaagaaaaccaaacaccattttatatttgacaatgcttcctgtataatttttataccaaataagtcatttatttcatttttggactttagggaaactaatatcttagaggattaattaggtcagaaaaatacacaacttgtaatttgattctggaaactttgccaaatatcaaaagtttaaaatacttgataggtcatcataaaataagtcaatttttcaaacattaagcccaaataaa

SEQ ID NO: 9854 - DNA, 530 bp, Homo sapiens
  III.3482 (AI683742)
tgtatttgtagtagagacagggtttcaccatgttgcccaggccactctagaactcctgagcttaggcaatctgcccgcctcggcctcccaaagtgctgggattacaggcatgagccactgcgcccagcctcagctgacagttcttaagaacctgcgtgtgccaagtactttataacagtcatgtgaggtgataattgttatcttcatttcacatttgaaaaaactgcagggtgaaaagggatttgccaatggtcacacatagctggtgggactagaagatgcctagtaatgtttgtgctctttctcttcttctattgcttgttctgttcctttgggctgtatttgactatcacatacacgcacacatgtgtgcacacacacgtaaacatgaacagggatgaacaaggcaggtcccctcagacacagaaagagctggaagcagagcctgctactaaggggtgcagggggaaggccgacaggtgtaaaagacaggaaatagaccatggagaccaaggagtatgggccatgaa

SEQ ID NO: 9855 - DNA, 454 bp, Homo sapiens
  III.3483 (AI378325)
aacattttaaaatatatatatagagagagaaagaagacagaatcaggagttctgtgaggcagaggagaggggagtggcaatatcaacaatggtttctatgcgtgaaaggcccttcctaaacctcctaccatagcaaagctcccccggtctatcagatgaacagaattctagatttgttttctctttctctcaaaggccactgacaagaaagcagctatggtatattttccttgactgagggctggagactcaaaaacaaaagctatctgcccagccagagccctctagaaggttgctgggcttggggctattttacactggataagcccttcctgagtttggaagcatcaattagaagactgcggcaatttgtcctttacgctttatatcctacccattgccccgcactccctcacccctaggatgtacatagaaagtcgacactaggggcact

SEQ ID NO: 9856 - DNA, 413 bp, Homo sapiens
  III.3484 (AI681782)
gcggccgccggccccttccgcgtccactgagccggcgctggttcggcgctgggatcctgcaccgggcctctctgcttggtgctgcgcgtctgcctgagagtaggaggttgctcccagctgtgccggccccagcagaaggctgctggtggtggtgctgggagcggccgcctgagagtaggaggttgctcccagctgtgccggccccagcagaaggctgctggtggtggtgctggggcaggtcggccttgaatccatgcgacaggaagggacgttaccagaagagattcatcgctttctcttggtctgggcagcccgggccttttgaggggtgggaccgctgctacccccacccccaggttctttgcctgcctgttgactgccggtgtttcatgttttttttctctgtttcacta

SEQ ID NO: 9857 - DNA, 415 bp, Homo sapiens
  III.3485 (T77784)
  misc_feature (2)..(2): n is a, c, g, or t
  misc_feature (255)..(255): n is a, c, g, or t
  misc_feature (288)..(288): n is a, c, g, or t
  misc_feature (367)..(367): n is a, c, g, or t
angttactcaggagactgatgtgggaggatcatttgggcccagaaggttgaggctgcaatgagccaagatcgagccactgcactccagcccaggcaatggagagagcctgtctcatggaaaaacaaaaaatcattgcagagttaaatattctgaatgacatagcatataaacacttcctagagactttcaaagaagggggaagtcatttattgacagcaaactgtgtgaaagaggtaaggttgatacagaatctnacaaagagatcatataacagatgatagaaattngtaagaacctgattaaggaagaacaagggatagtaaggttatttcgtaattgaggttttgaaattctgtttatgggtcnttgtgggaaatatatatgtatttaaagggctattttgttgtttattta

SEQ ID NO: 9858 - DNA, 385 bp, Homo sapiens
  III.3486 (T77785)
  misc_feature (314)..(314): n is a, c, g, or t
  misc_feature (351)..(351): n is a, c, g, or t
  misc_feature (375)..(375): n is a, c, g, or t
gctaaagtttaatttcctcacacttaatatggtcacagatatggttggattaactttaatatttgctatttgttatcacatttcaataacttccatatattttattattattttggtcttatattcttctctctttatagtgctaaatagcttcaaattacttaattgagataaggtaattagctcactgaaaacaggcaaacacttttaaaagattttataattcatgtattttcctaaaaactatgccttgttcaaattatttctccttctccctctccttctaattgtttagcacaacttgcagggctgtncaccaaatttaatacttacttttatggctgctttggnattaaaccctgtggggttcaaggnataattggtt

SEQ ID NO: 9859 - DNA, 396 bp, Homo sapiens
  III.3487 (R23389)
  misc_feature (111)..(111): n is a, c, g, or t
  misc_feature (370)..(370): n is a, c, g, or t
  misc_feature (386)..(386): n is a, c, g, or t
ctgcacaccccacgacttcctgcacttcctcctcgaccgcattaacagcacgctgaccagggcccaccaggaccccacctcgaccttcaccaagatctacaggcggctctngcgtcctgcaggcctgggtggaggactgctacgctgtggacttccctcggaacagcgggctgctggggaagctagaggacttcatctcctccaagatcctacccctgggacggctctgcaagcacctgctgggcctcctgggaggtgggcatggaccggcgggccgagggcaaccctcgcggcacagacctgggagaaccccaggggaggccgaggaggattgccagacctttcaaacgccttttttaagaggtttttnagaggacggcattttncagggaagag

SEQ ID NO: 9860 - DNA, 290 bp, Homo sapiens
  III.3488 (R44173)
  misc_feature (31)..(31): n is a, c, g, or t
  misc_feature (167)..(167): n is a, c, g, or t
  misc_feature (222)..(222): n is a, c, g, or t
  misc_feature (247)..(247): n is a, c, g, or t
  misc_feature (262)..(262): n is a, c, g, or t
  misc_feature (267)..(267): n is a, c, g, or t
  misc_feature (287)..(287): n is a, c, g, or t
ttttttttttttttttttttttttcattttnaaatttaactttttaattctagcagaaacacgcaaacctccaagactcttgtgcccgtcctggctccgtctgctgggaggagaccagctctgcctgtccccatggggccccctgagcctccacctcctggtccagntccccagggttcgggggcggaggggccttgataacggccgggcctgagacgcggntcccacctcccagcccgccccccanagtcggattcggatntgganttccacaccagggcccgagntcg

SEQ ID NO: 9861 - DNA, 528 bp, Homo sapiens; identical to SEQ ID NO: 6226
  III.3489 (T66282)
  misc_feature (30)..(30): n is a, c, g, or t
  misc_feature (163)..(163): n is a, c, g, or t
  misc_feature (216)..(216): n is a, c, g, or t
  misc_feature (322)..(322): n is a, c, g, or t
  misc_feature (338)..(338): n is a, c, g, or t
  misc_feature (362)..(362): n is a, c, g, or t
  misc_feature (384)..(384): n is a, c, g, or t
  misc_feature (434)..(434): n is a, c, g, or t
  misc_feature (439)..(439): n is a, c, g, or t
  misc_feature (446)..(446): n is a, c, g, or t
  misc_feature (457)..(457): n is a, c, g, or t
  misc_feature (495)..(495): n is a, c, g, or t
  misc_feature (519)..(519): n is a, c, g, or t

SEQ ID NO: 9862 - DNA, 393 bp, Homo sapiens; identical to SEQ ID NO: 6224
  III.3490 (T66332)
  misc_feature (144)..(144): n is a, c, g, or t
  misc_feature (159)..(159): n is a, c, g, or t
  misc_feature (161)..(161): n is a, c, g, or t
  misc_feature (188)..(188): n is a, c, g, or t

SEQ ID NO: 9863 - DNA, 274 bp, Homo sapiens
  III.3491 (AI857364)
agaacatgaagaaaaacgtttattataaaacttaagaagcaaccaatcaaccaaattatgaaaaaaaattttgtcactgaccaaacctcataacctgaaaagaaccaagaaaagaaattcccattatacttgtacttctaaaagggcttagaggtctaaactagactttgttgcaatccagaaagttaaaggactaaaaaactggagaatagagttaagaattagatttatcagacagcatagtctatgctgagatagcaaaatagacatggct

SEQ ID NO: 9864 - DNA, 453 bp, Homo sapiens
  III.3492 (AI890631)
ttttttttttttttttttttttttaggggccaaaaaaactttattagcttagtctccacccttttaaatgtactctagggacaaaataaacattatacacatataagatcaggctttccaactttagaatgtgtaaataagaatgacattttaaaataaaatagtttagtcacagtcacacaaaactaccttcttaggaaaacttgtccggtgaagccgttaaatttgtgctttcagctatgaagaattaaacttaaaatgcattcattcttcttttaatgaaaaataacctacccttggaaacagcataagcattgttatggtagtctagctcctaaatgaaaatgtggactgagttacagtttactgtagtaacctacctaagaagcctttgaaaattagcaatcgatcaaagtatttacataaattcaagcctttttcttaggacaaaag

SEQ ID NO: 9865 - DNA, 440 bp, Homo sapiens
  III.3493 (AI889859)
tttaagattttcctctttactctcgtccttacatgtccacagacttcatgtagagaggctgagcctttcgaccacaaagtgtgttctgtgttgaagatgttataatgatgggagagggcagttgcagcagcttctaaccaagtgtctacaacacatgtactactgtttcctacctgtgtcacctctgcaaaaaatggagctctgagcccagttctgtgagcatggtgtcagagccctccaaagtcctgagaaatcaataccagggatccaaatctcagacaccagtttgaagcaatacctggataccaagactcagagtgaggatatggattttgggagctgacagttttgctgatcctgccacactggcaggggctgaagtccagaaatggtgtgtagctctagtcattcttattcaccacagctcttatttcacagtt

SEQ ID NO: 9866 - DNA, 465 bp, Homo sapiens
  III.3494 (AI590460)
  misc_feature (277)..(277): n is a, c, g, or t
  misc_feature (312)..(312): n is a, c, g, or t
gcggccggctactactactatacggctgcgagaagacgacagaagggcaaaaagattaccagatcgatttcggggtatttgacctaggcatcaagtcttccatgagattttaatttgctattagtctttcttaatatgtctttgtacaggtgtgcatattttttccttcaaacttcctacaattaacaagtccactccttttattatttgaaaggcaatatacacccatacaaagatattctcttaaatgaagaatgagtaatagaggacaccaaanagagccactggcatttttctaactatctgtgactntatttttcttttgttgtctgacaggcgagaaaacaggagcctcgttaccttctttgactaagctgtcggtgaagagactggtgaggatggtggcgggcagggtgccattgcccagcagaatccccgacagcatcgccaactttgtctgctctg

SEQ ID NO: 9867 - DNA, 343 bp, Homo sapiens
  III.3495 (AI680593)
tttttttttttaaaaggccccacctcatctttaatgccataaaacgtgttcaccggttataaaacacagcaattaggacaaatccttcattcatcaatttcgctgcttccatataatctaattttctttcacactcaattcttccctatgcactaccttctggaactcttccatacaagccagcctttctttccagttactgctgtcaagaagctgtatacaggtagggggaagaacagctgaagctttttcttcacatacttctatctgtaagatacaaaaacatattagaattaggaattgcttaagggaacagatgacaagaacgtaaacatactccagc

SEQ ID NO: 9868 - DNA, 239 bp, Homo sapiens
  III.3496 (AI364438)
tttggtagagatggagtttctctatgttgaccaggctgatctgcaactcctggcctcaaataatcctcccattttggtctcccaaggcactgggattaaaggtgtatgtcaccatgcccaggacacccaacttctgtggacttcttgtatcagccctccaatcctcattggcaactgcctatttattttttaacttaggagacataaataagaagtctctaagggctgggcatgttagc

SEQ ID NO: 9869 - DNA, 141 bp, Homo sapiens
  III.3497 (AI783953)
ccatggtgaactttatttcagcgaatagaggacaaagatcagcgacagctcctgtgggattcgggagatttgtcagccacgtaggcatagaagatgggaaaatgggatccacttttttcccctttggggccaacctggcat

SEQ ID NO: 9870 - DNA, 262 bp, Homo sapiens
  III.3498 (AI380488)
tgagatgtgtgcacagacccaggccatgcagatactggtgcctctaacttcgtcagcccagaacacctcacctctggcccccagcacaggaaagcagcgtggtcaggaggggttaaacttcggctgaagcacaggcgcagtgagcctgcaggccgacctcactcgtggcacacaactaaatctggggagaagcaacccgatgccagcatgatgcagatatctcagggtatgatcggccctccttggcaccaaagctaccatt

SEQ ID NO: 9871 - DNA, 366 bp, Homo sapiens
  III.3499 (AI682201)
ttttttggctgttttgagtattgctatttatttattgccctcattagactctaatatactcacaggacaaagtttcttcagactgtagtaaacacacaatctctatttgtcaccaggttgatgttatgcttctcttcttgtgtattgcaaatggactctgctctataccatgtgacaggagccaaccagctcaacatttcatctggggctagaggatccacttccatgatgtttcactctcatatgcgtaatgagttcatgctggctgtcgacaggaggcctcagtttctcactacatggacttttccacatggacttctccactggctgcttacatgacctcatgacatggcaactgacttccct

SEQ ID NO: 9872 - DNA, 446 bp, Homo sapiens
  III.3500 (AI369362)
ttttttttaaacaagtacaaatttattcttttcaaagcagaattcaagggaaagggggaaagcaccacattgagtggcaatcaaagttaaccaatttgttcccaaccctgttcctttgtcccctagacttccatgccacccttgtcacctcccccaaatcctttccccaattttcatcctgtgaccagttcttgtagccagcaagcagcataccagacttcggtcaggcctcaatactgccataggggacagcaagggcattcagcatgccccctctcaaatgtggcaactgtgggagaagattgactctgcgagctgagccctggccttgagcctttccttctcccacagccattggtgttaaaagagtaagaagtagctaaagtgttccttgttcctacggtaaccacccagctgaagaattaagtctccacagcctcaggaca

SEQ ID NO: 9873 - DNA, 251 bp, Homo sapiens
  III.3501 (AI394117)
ctggaaagctcatttatctctttttctttttagaaaaaattcaactgtgttcaaatactccccacttcccttcaccatatcacttctccccccatggatccagaaggctttaaaaactctggcttggatgttacacagaccaacaaccccataacagcccaaccctggatccattcttaggcccaattcagcctcatggggaagagtcttcctccttccttgctccctgagtttcttttcaaagcaacttt

SEQ ID NO: 9874 - DNA, 505 bp, Homo sapiens
  III.3502 (AI554884)
ttttatgtttaatatctttaataacttgtttcaaatatatttgaataggtatttttaggtacagaaatacttcacacagttcaaggttagacttctcagcctcaccagggtctttgagaactttgacccagagccattcagtagctgaaagaacagttgtgaaactcattcattaaaactcaattacattattttcgaagacacgtactcatgtcatgttgactcttactttaaatacagttctagtaatcagggttatctgatttcttagatgacagcaaatgtgccgtatagttagagactgctcattagacggaagaggattgttgtacccaagcataaatactggccagacagtactattgtgggtggtaaatcattaagctaggatctaattatattccatagagtctacttaaggaacatggaaaatatgaaatatatttctaaatgaattttttattttaaatgagtaaaataaacatttgacctggagaggtcaact

SEQ ID NO: 9875 - DNA, 492 bp, Homo sapiens
  III.3503 (AI803085)
catttttaaaggaaaactctgcgtcaaacacctattctcaaaaccagactattcccaatgtctactaagaaaaattgctctggttcttagggtcagacagcctgaagaagttgtgtatgaaaaagtgacatgctcagatatataccagtcttactaggtcaaagaatgagacattgaaacaacacagaccccaataattaccctgaaacattttttaaagactaattatggcccaagagaaatcaaaaatttatgaaggatactgaaattatctgggagaaacttgaaaaagctgaaagagtccagaaataattccaaaaatataatgtgaacatattttcttcaaaatgctcagcatgccttgcatactttccattattatttcaccctcttcttgctcatttttgacttagaaaactttctttggtattggaaagattgatgtatgtgattaaagatggaatcatcataatacttataattctatattac

SEQ ID NO: 9876 - DNA, 157 bp, Homo sapiens
  III.3504 (AI589994)
tttttttttttttttttttttttttaaaatgccaactttattttattttaaatccagggggtacatgtgcaggtttgttacataaatataataggcgatgctggggtttgggcttctagtgaacctatcacccaaatagtgaacattgtacccaata

SEQ ID NO: 9877 - DNA, 360 bp, Homo sapiens
  III.3505 (AI919134)
aatcagtttcattcctgctcctcccagaaacactcctcctggagccctcctccttcagctctattctagatgggctcttctccttgggccagagctgcaatagggaacttcccttctcaagtccttctggggctcccctttacctcctgcagactttcccacccctactcccatcctaaagcctctgcttcacctatgcctctggggaactggggaactctcatttctgagccttcctggcattctgtgagcaaatcaatcgcttccggtcctctccctgtgagccctgcaggcattttattcttgacttcacttcttctctctgcaaatgcatttgccatcacttcatctgctttctat

SEQ ID NO: 9878 - DNA, 645 bp, Homo sapiens
  III.3506 (AI674297)
  misc_feature (605)..(605): n is a, c, g, or t
tttttttctttcttttgcaatttcttctagtccttcaccactctccatgccttctacaaaaatccccccacattggggaagaatccagtaccggcgtctgtaacgatcttggccaaacatcactgaacgcaatgagtgagacgcatcaaagagcttccttctgtactgactctgttgtttactcagtttttcaatctgtttttccagctcttcaacacttgctgcttggtcaccttcatcctcatcttcacagatatcagtcttttttccttttttgtcttctttatcttcttcatcctcatcatcttcatccccttggtcatcactgtcatcgtcatcatcatcgtcataatcactgtctcctcccttccttcttcgcttgcgtcctggagtgggtgtgcccaagggatgctgctcttctcccagatcaatgccacctgaagtgtctcttttgcctgttttcttagcatgaatgattctgagcttgcggagtttaccttctaccacccatttatctctcctcaagtttgacatataatcaatgttcttgtcgatttcactgaccacactcttgctgcatgccagttcattgatcaggaaagccnagactgaagcttttctgggctgagtgtgagcctgaaaagc

SEQ ID NO: 9879 - DNA, 99 bp, Homo sapiens
  III.3507 (AI538636)
ttttttttttttttttttttttttttttggacggttcctatataacgtttatttttggaagttaaagtagatccagcaatatcccaaaaaaaaaaaaaa

SEQ ID NO: 9880 - DNA, 508 bp, Homo sapiens
  III.3508 (AI810816)
ttttttttttggggttaagagcattttttattaatgaacactcgttaaaaatcagctttaataataaacatcatctggttaagcataaggtcagtccagaaatggatctgagtaatcatgaaaatatttcagtaatcataaatcttaataatagaatttccacctccatacctattatgattcggtgactcttttactgaaagtcattcatatctccacaaaaacaccaattcatggatttgctaaaagacttgaaaattattctttataattttaagtcatgactatacctagaacaatttttgtgtctctcaagattcttcacctgacccccaagccttagcctcttcctgaatggacatccgtgggcctgctgtctcagcctcctgcggaagaagctggggctttgggaagatcacatctcacctgttgcaacaggaacctcagtggctacagacatgggtctcacctgatgggactctgtacctcataccttaatggctgctct

SEQ ID NO: 9881 - DNA, 415 bp, Homo sapiens
  III.3509 (AI633997)
tcagtcaacttgtattcaacttttattaattcctgaagcaggaaccaatctgttagggagagattcaatgttaaaactaggtataggtctgcaagttggcccaaagggtgttctaacttccttaaatttgcttaccacagcagatgagaagtccattcatctcgatgtctggccaagggaaggaaactgaggaaagctacgaattcctccaatacatatcaggttaaggactccaggggaggtagtgagaagaaagcaataccctatccctttagaagaagggtagggttaaagcctgtaattgagagtcttattaaagatggactacttgaaccttgtatgtcctcatacaacactccaattttaccagtcaaaaaatcagatgggtcataccaactagtgcaggaccttacag

SEQ ID NO: 9882 - DNA, 419 bp, Homo sapiens
  III.3510 (AI890583)
gggtttatcccaggatattcattgatagaaaattaaaagagtaatttataaaatcactacatgaacaagtaaaaacacacacagcaaaatttacatcaaaattattacgtggtacagaatccaaaagtcataaaaagcaaaagctatctttttttcactctggcacccatctgttcttccctggagtcaaacactattaccaatttttaggtatacttccaaagatacttactgcatttacaagcacagacttatattgattctaaaagaataagagacattttcagcatgttgctttgttcaacaccacagtatatcttaaagatggtcccccatcaatacatatagagatctctcttttttatggcttcatagtattatcatgtgctgatatgccaaaaactaatccattagaccct

SEQ ID NO: 9883 - DNA, 456 bp, Homo sapiens
  III.3511 (AA644695)
gaaagttgaaaaaagttttgaattttattttaaaacaagtcaaagatatatacttatttttggtgtttccgcataggcataaggaacacttttggattttaaaaataacaacttattggatgatagtgaagttacagagattatagtaggtatacctggagataccagcaggaacatagtagaaataataagccaaaaacacttttatttatactgtaaccaatctccttggaaaactttagaaaacacaaaaatatacaagcatacattccatttattcagcctgatgacgtcatcacacatacagcctctggaaaaccccactctacactcaagagagaatgaaaagtgaaaaagacaaaggacattttagtattatgaaaatgcttttgacctcaaaagcccctgaatcaaagggaaaggtgaaaaggaaatcgccattggcaatggtagagg

SEQ ID NO: 9884 - DNA, 496 bp, Homo sapiens
  III.3512 (AI791172)
  misc_feature (471)..(471): n is a, c, g, or t
tttttgttgaaaaaagttttgaattttattttaaaacaagtcaaagatatatacttatttttggtgtttccgcataggcataaggaacacttttggattttaaaaataacaacttattggatgatagtgaagttacagagattatagtaggtatacctggagataccagcaggaacatagtagaaataataagccaaaaacacttttatttatactgtaaccaatctccttggaaaactttagaaaacacaaaaatatacaagcatacattccatttattcagcctgatgacgtcatcacacatacagcctctggaaaaccccactctacactcaagagagaatgaaaagtgaaaaagacaaaggacattttagtattatgaaaatgcttttgacctcaaaagcccctgaatcaaagggaaaggtgaaaaggaaatcgccattggcaatggtagaggctatggaagattgngtcttgcaaaatttattagaagacg

SEQ ID NO: 9885 - DNA, 490 bp, Homo sapiens
  III.3513 (AI339225)
tttagctcattttaaattttattaggagaaacataattgattatataatcaaatgtaaaacgtacattatcaagatatctcagcacttcgcagaccatttaatcaagatatctggggctgtgccaagaggaattaacttacattaagcctcaagtatgtattactctgctgtatttgtttccacgtttaagatgggtcttgctccctgagaatgggagcaaatccttcaaggactgtgccgtacacaagctctgggtctgaaggtcttccgtgctacttctcgatttctccaaatgaggagaaaacccaaaaggccgctctacctcgaaccctatctgcagatgtgacatcttcacacagcccccgatttctcttgtctttaaggatgtctttgggggtctgcccaagtgccccagcaatacacagccggcccaaagaagaaaaggggttttcgcttccatttgctcttcgtaaatcgctactctccctc

SEQ ID NO: 9886 - DNA, 483 bp, Homo sapiens
  III.3514 (AI419817)
tttagttacagtttacttttattattgagatgaaatttacgtaacataaaattatccatttttcagtgggagatttgtggcattcggcaccatcacggcatagcacaggcatcgcctctgtgtagttccaagacatttccacggccccaaaaggaaaccccatacgtattcaacagttgctccttgctccccactcccccggcccctgggttctgtctctgtggcctcgcctcttcgggacatttcacctggacctttgtctggcttctgtcactcagcatgaggtcttctgggctcctccacactgtggcatgcaacaggccccgttcctgagaggggtgaatagtgttccatcacccgttcatctggggacggacatgtgggtgccttccaccctttggcgattacgaaaagtgctgtcagggacattcccgttacaaatatctgagtctctgctctcagttctcttgggtacgtaactag

SEQ ID NO: 9887 - DNA, 450 bp, Homo sapiens
  III.3515 (AI655928)
tttttttcacgcccaacagatatattgtttatgagtccatgggttccgtgtagacgccgccatattttacagtccaaaggaatcaattaattagcgcctcccagtccccccaccgaccgctgctcggctgagcgggcgcggctgagatagaggtgcttggccagctctctggtcttgttaacaagcctcatcataaagatggagatgataagaagagcaaggaaggcccggtggccgcgaggggcggggcttggtgggcccggtgtggggcagtggctgacccgagccgggtgctgccccggcacccgctcaggtttttccagcgttctctgggcgttcatgtggcgagctaggacccggattattctctctgtactcccgttccctagattttcccttttcctcatggaacaccaaatcagattttaaaaaataaaaatacataaacct

SEQ ID NO: 9888 - DNA, 505 bp, Homo sapiens
  III.3516 (AI703000)
caaggaattcaattgttttgaaaacagcatgccaaacatatcacattggcagacttgttgccagttagcaaccttggttttggtgaattaatttatgtctaaattaacttatatttctacttagtctctgtcaagactaagtaacttttcaaaggaagcataccaatatacttacctccaaacaacaagaatgtgtttcttgaaggaagagatttgacagataaatggaatgctagccaatctaaaattgttttgttatttttgtaacttattgtcagtcttcagctgattaccaatgtggtatcaaaaagcctttcaagacaaatgtttgaaccattagtgtcgaattatatttcagattttttggaatcttcctttaatctcatttatttctggtatacaacacagattcatcaatattgcaatatagaaaatacaagaagaaaaacatgcaaccattttatattaatcacctcattctgatttggaaaactactcaagagta

SEQ ID NO: 9889 - DNA, 483 bp, Homo sapiens
  III.3517 (AI625577)
ttttaaaaactaacccaaatatatattttgctcagatacacctgtaaaatgtctagattctccattctttccttatttaaaatagagtagtttgtttaagaagtggattcagttagagatactttcacagaaagatgaccaaaatctgccttatctggaaacacaagttaaagtactgtctatatcccttatgaatcaacaggcagagatttttaaacatctgataaaatactttctgacatacattttcttagaattacaaacacagttctgcatctgttacatgtgcaaacagagacagccaggctttgaatgctctaggtaagagattgtattaacatatattttgtctttcagccattcaaattcaacttaatttcagtgaacagagaagaatatgggttgaaatgtacacttcaggatacagatttgcagaataaaataaaatagtgcaataccaatctcaggataaacactcttctg

SEQ ID NO: 9890 - DNA, 415 bp, Homo sapiens
  III.3518 (AI635979)
ttttttttttttttttttttgagacagagtctcactgttgcccaggtgtgaccttggctcactgcaacctttgtctcccaggttcatccaattctcccgcctcagcctcctgagtagctgggactacaggtgtgtggcaccatgcccggctacttttttttgtattttttggtagagatggggtttcaccatgttggcccggctagtctcgaactcctgaccttgagagagccacccaccttggcctcccaaagtgctgggattacaggaatgagccaccacgcccggccaatccctactgatttttaaagatcccattataaattaagaaaattggtctttacatatcaatatctcccccttcttcatgttaactttttattttgactctcattataatttttgcaggggacga

SEQ ID NO: 9891 - DNA, 450 bp, Homo sapiens
  III.3519 (AI684521)
tttaatttttgaccgtttttaatgctggcccatgcccttctgggagagaggatccccaaaagaaagccaccatttcagtgggggatctgacgcccctatgggaaggggagacacagggcactgggggcaaacatctttgctcattggttcagagaagagtacaaggcatcaacgaagcgctccgtaaaaatctgctgaagactgccgctcctccctgcaaagcctcaagcatcaaggagggacaactggatgtgattttttggatctgcagttcaggataattcatgagtcgtttcctgtgcacaaggccattgctccttctgtggtctcagaaccccttcaagaaccactgactctgcagtccctactccaaggcgcgcatgcgtgtccgtgagagcacatgggtgtgcaccgcgcaggggctgaggctgggagccgtagtcaggggca

SEQ ID NO: 9892 - DNA, 308 bp, Homo sapiens
  III.3520 (AI624244)
gcatttatggatttttaatgaagtttttgcaattttttcatactgcacaggcatatttcttttcttttttttttttccccaagatggagtcttgctctgttgcccaggctggagtacagtggtgcgatcttggctcaccgcaacctccgcctcccaggttcaagcaattctcctgcctcagcttcccgagtagctgggattataggtgtgtgccaccacgcccggcaaatttttgtatttctagtagagacggggtttcatcatgttggccaggctgatctcgaactcttgacctcgtgatctgcctg

SEQ ID NO: 9893 - DNA, 372 bp, Homo sapiens
  III.3521 (AI653751)
ttttttttttagagttttacaacaaatatttaatatctatgacatgtaaaaaggttttccaaatcaagaaaattcaaacaattcaatacaaatatcatcaataataacacatgaagaggtggccaaccttattaataaccagagaaatataaattaaaacaatccatcaacttgtaaaaaagatgaaattacccagagttggtgtaggtgatggaaaattgtcatgtttgtatactgttcatagaagttaaattgacataactttttggtcaggcaatttggaagtatatatctaaattaatagagaagttttctaataacctgggaatctcttaatctaagaatctttactgtagatttttctagaacaaa

SEQ ID NO: 9894 - DNA, 411 bp, Homo sapiens
  III.3522 (AI889468)
aaaaagttatttatttattctttttttttttttttttttttttgccatggctctcaaaccaaagacagtagctaaagttgacctcctctcaacttaaggcaaaaggctggcatacagcacagaagcagaccaccagcttctttactccacatttccaccactggatggcagatattcccccctctagaaatgcattaattttatttactaaacagggcagcagttcacaggtctcaagaccggtcactttgtgatgttttgcagccacacaacaggaggctaataattattttaatagccatactgagactcttcagtttattaagaaaaatgtatttcctcaggcattttaaaatgtatatatatttaatatttttggagctgtatttgcattggatcataatagattat

SEQ ID NO: 9895 - DNA, 439 bp, Homo sapiens
  III.3523 (AI922075)
ttttttttttttttttttttttttttttttttttttttttttttttttttttttttttttttttttttttttttttttttttttttttttttccccccaaaaaccctttaagggggggccaaaaaacggggaaaaaaatgggggggaggggggcccccaaaaaaaaccggggttaaaaaaaaaaaaatttaaaacccgcccccccccaaaaaaaaaacccaggggggccccaaaaaacccccccccccccggggggggggtcccaagccgggggtaaaaaacccccccttttcccccaaaaaaaaaagggggcaaaaaaaaaaaaacgtttggacccccccccccccccccaaaaaaaaaggggggggggggggtggggggaaaaaattttttccccccctcaaattttggggggaaaaggggggcccccccccccccc

SEQ ID NO: 9896 - DNA, 449 bp, Homo sapiens
  III.3524 (AA205399)
  misc_feature (219)..(219): n is a, c, g, or t
  misc_feature (253)..(253): n is a, c, g, or t
tttggcttacaattattaaagcatttattttcaggtaccaaaagccatatcccattccactttttaagtttcttttgatcactgacaggcattaacagatgtagcaacgtggtctcctatagagaaaattacacttatctaaaaatctgattccattaattgatcaagtataaaaatctacgaaaacaatatgttctgcacatcacatctgtacttttntttttttaaatatattttttgagacggagccacntctgttgcccaggctggagtgcagtggcatgatcttggctcactgcaacctccgcctcccgggctcaagggactctcctgcctcagcctcagctggtaattataggcacttgctaccatgcttggccaatttttgtatttccagcggagacgaggtttcaccatgttggccaggctgggtccttggaaactccctg

SEQ ID NO: 9897 - DNA, 352 bp, Homo sapiens
  III.3525 (AA206993)
tttctcacagactgaactgctcccgagaggcacgtggctccagcggtgtggacctgggcctctgctgcccacgtctgcccctgtcctcctgcagcattatcctctgtatcggagaagtgatgctaactgttctggggaagacgctgctcctgcagaggaaagggacatcccatttaaggagaactatgacgtgctttcacgggaggcatcacaaaagctgctgtggtggctccagccgcgcctggttctcagtggccacacgcacaggcctgcgaggtgcaccacgggggccgaagtcccgagctcagcgtcccatctttcagttggaggaacagaaacaaccccagtttca

SEQ ID NO: 9898 - DNA, 485 bp, Homo sapiens
  III.3526 (AI360167)
ctgacgtagaaacagcaggtctaagcaaaaggtgcatgagcaagagcaagtaacatccctattattatgacgcagatttttttttaagttgaaattcaatttttgggctgctactaaaaaggacatgtgcgaatatctattatttacgcttcaaactaaagtcagccgtttttctttttcaagatatgtggcatctggctcaaaatcaattgcaagaaaagcccaactctatttgacccagaaagagctctttccaataccctctcctcccacttacatcacagatggcgactgaagcttaaggtttaatgcccgaccctaaagccactcatcctaaaagacagggctccagatggatgctgtatggcagaggataaggcgctatgagaagctgccaagcctcagatgtgcagctgggctgaataccgacgccagcgcctagcgcccattactttgcacccacacttaggaaacaacccacgcct

SEQ ID NO: 9899 - DNA, 451 bp, Homo sapiens
  III.3527 (AI804733)
ttagctttaaaaataactttattacagttcctatctctgtcattttaggactgctctcatacttgctgtatgttgtggatcagcaagtatagtcagccttctacttgagcaaaatattgatgtatcttctcaagatctatctggacagacggccagagagtatgctgtttctagtcatcatcatgtgtaagtgtttacattaaaaggctagttaatgctgaattgaggtttaaaataattataacagttgcatctcacatatcaggtgagatgtcatagtttggttcaggtagttttcgcgtggcagtgagttttagtcccctgcatcagccagaaatcagacaaaaagcaagacaagttagaagtaccaatgggtgcgggattctttatctcaggacttttaagatctttatccttagagatcccagcattgttcatttgatccaagtgt

SEQ ID NO: 9900 - DNA, 399 bp, Homo sapiens
  III.3528 (AI689358)
ttttttctccaataatcttattattttttcacactttgttgattaaaatctgaatccaaataacattctgtgatggttaattttatgtgtcaacttgactgggttaagggatagccagatagctggtaaaacatttctgggtgggtctgtgagagaattttcagaagagactagcatttgaagcagtaaactgagtacagaagaaccaccctcatcaatatggacaggcatcatccaatctgttaagggttccaatagaataaaaagagaagggcaaattctctccctcttggggctgggacatccatcttctcatgacttcattgagctttcagactccaagattacaccaatggccccagtttctctggccttcggactcagactgaattacaacat

SEQ ID NO: 9901 - DNA, 420 bp, Homo sapiens
  III.3529 (AI866933)
gctgttcaaggtttatttggttttcttctcagccaagggaggggacccgcagggcaggcgccggccccgtcagttccactcggttgtcaaaagacaaaccgggtctgtgttctcctggttggttagtgggttttgccagctccttggttggtgggtccgtggtgaaggaattgaaccgaattttctggaaactgttgatgtctgcaagtgagtgccgatcccctcctccattctcgatcttttcaagcgaagtctacctctgggcttagataagagcgatgaggcgctattttctttcatgcccgactccaggcgcccaggcccgcctgtagtggctccatctccagacaagcaacctgacccggcgacggcgcatcgagatcgcccacgcactctgcctgtccgagcgccagatcaaga

SEQ ID NO: 9902 - DNA, 405 bp, Homo sapiens
  III.3530 (AI394671)
aagcttttcttttctttttaattaattcaatgtcacgacaacattagtgtaacaatattttgtgggttttttttttctctttttcttaaaaagggactcaacccaggcagaggtgagggagatgaggggaaacaaactatcacagaacaacaggtgtaccgacagaaagaaaacagattgggtgacagagccaggagccctgcggagtagagggtgaactttacaagaaatctgtacatttatcaaataagttaaaattctgctaaattgattgtccttcacttaaagcgctccagtatgcctaacttactcctttgagcatcactacctaagcttgtttctttcttcccccctttcccctgcctacttttttctttctaaatgaatgaccatgattatacagtg

SEQ ID NO: 9903 - DNA, 508 bp, Homo sapiens
  III.3531 (N91461)
  misc_feature (283)..(283): n is a, c, g, or t
  misc_feature (291)..(291): n is a, c, g, or t
  misc_feature (314)..(314): n is a, c, g, or t
  misc_feature (315)..(315): n is a, c, g, or t
  misc_feature (442)..(442): n is a, c, g, or t
  misc_feature (490)..(490): n is a, c, g, or t
ctttacattgtctaatagacttgtttattattttaagctggtaaaaagagacttatgattcatgttgaagaaagagttatttgtgcttgatacattgaagacactgttcaaaagcagtttgtccttataaaaggatgacccctgtagtatttcttaggcaaggagggacaaattcaaccaacgaaaagcacatctcgccccgagttccccatgatttctccacatatagcaaaaaaatacacatcagtaatttatttgaacatgcacatcagtgagtaggcancagttctncggcggctactcaagacaacaanngggagaatatcagcattacctaaataaaaaagagaggtgaatcacaccattttaattgtcttaaaaacacggataagaagagcaattaaaatatagtcctaaacagtactagctaatgtagattacntaagtataccatatgattccactaatagtgctctgacaagcataaccnccagttctagttaaccag

SEQ ID NO: 9904 - DNA, 617 bp, Homo sapiens
  III.3532 (W20065)
  misc_feature (18)..(18): n is a, c, g, or t
  misc_feature (41)..(41): n is a, c, g, or t
  misc_feature (316)..(316): n is a, c, g, or t
  misc_feature (402)..(402): n is a, c, g, or t
  misc_feature (481)..(481): n is a, c, g, or t
  misc_feature (519)..(519): n is a, c, g, or t
  misc_feature (529)..(529): n is a, c, g, or t
  misc_feature (570)..(570): n is a, c, g, or t
  misc_feature (588)..(588): n is a, c, g, or t
  misc_feature (607)..(607): n is a, c, g, or t
  misc_feature (615)..(615): n is a, c, g, or t
cggcacgagggtcacctnagacacttccatttgtaatcttngtaatagactgtaaatatatttttggaactataacacaatgtgcttgagggttatttttcagtgtctgcagtgtgtacaagtgtttatactaagtccagcactttacaattctaatcagtagcattggcctttgtgagaatgagtgaaagagtttgagtgagtgttcttaattccttttggattctagactcactaataatgaagttcttttcttgttcatagcttaaggtgcttattttttctattaaaattaaattaacaaaagccattccangaaatagaagacatagtatggtacatgcaaacggtgtctttcctgcttttttctaagcactagatttatagttgagtagtctttcntgagtagaagggcagaataaaagtttttttgagtttttttccaaaataacttttttccctcagcaatattacctcatcnggcctaaaattttttttacagctccttacagggaaccngggggagaangggatggggaaagacacacagcaccaataggaagtgtatgnataccatcactatctcgnttggtaagttcctttcccnaatcaacntt

SEQ ID NO: 9905 - DNA, 508 bp, Homo sapiens; identical to SEQ ID NO: 9903
  III.3533 (N91461)
  misc_feature (283)..(283): n is a, c, g, or t
  misc_feature (291)..(291): n is a, c, g, or t
  misc_feature (314)..(314): n is a, c, g, or t
  misc_feature (315)..(315): n is a, c, g, or t
  misc_feature (442)..(442): n is a, c, g, or t
  misc_feature (490)..(490): n is a, c, g, or t

SEQ ID NO: 9906 - DNA, 617 bp, Homo sapiens; identical to SEQ ID NO: 9904
  III.3534 (W20065)
  misc_feature (18)..(18): n is a, c, g, or t
  misc_feature (41)..(41): n is a, c, g, or t
  misc_feature (316)..(316): n is a, c, g, or t
  misc_feature (402)..(402): n is a, c, g, or t
  misc_feature (481)..(481): n is a, c, g, or t
  misc_feature (519)..(519): n is a, c, g, or t
  misc_feature (529)..(529): n is a, c, g, or t
  misc_feature (570)..(570): n is a, c, g, or t
  misc_feature (588)..(588): n is a, c, g, or t
  misc_feature (607)..(607): n is a, c, g, or t
  misc_feature (615)..(615): n is a, c, g, or t

SEQ ID NO: 9907 - DNA, 414 bp, Homo sapiens
  III.3535 (AI866905)
taaattatgcaatttaatttttaataacaaagatactgtattttaacatggtgaaatatacttggctaagtccagattaaaaaaaaaaagtatctagcccaacagtacaattatacagctttgtacagaacattccatagatcaacagaaaatacatttgagcacaaaaataaaaaatatttaaggagaatctctaagcagcattttatttctgcaaaagacatatcttgtactgattaaatatctacaagtgcttttcctttacaaaaatacatatattcttaatagactaagtcattaacaatgacctggtaattctttcacttcaatttgaatgatttataagctaaatcttacaaccacaaaaaggtttttatttgtattaagatgttaccacttttgacaaaaagctta

SEQ ID NO: 9908 - DNA, 482 bp, Homo sapiens
  III.3536 (AI693599)
aggataattatttcagctttattgagggcagattagttgaagtctgggcgctgcgtttcaatacgcgttgtacacgggccgacaatgtggtcattgttggctactgtgtgtgaatccattcaacatatacactttttaacaccaaaccgagtcctgtctaaatatacacagtgctcagggaaagacgtctctgaccccgacaaatctgcgtaaatcacacttccatagttacagaagcctcacaaagggaggcccggctcaagatgctgattacatcttcttaaaagcaacatacctaagaataaatacccatgcctggcctaggggctgtggtggccagaggcagagagggccctctgtgttctatgggccttttggcgtctgttttaggctttcgatgttactttccctagagaaattagacagtttaaaaataataatggtaattattattattttacaatacgagcaaacaagcaatt

SEQ ID NO: 9909 - DNA, 494 bp, Homo sapiens
  III.3537 (AI671233)
ttttttttcctttttctctgccatttttccctttattcaaaatcagacttttaaaagccccaaggcagctccctctctccccctctgctagggctgggtggacaacagagcatgagatctatctagacttggccaccccaccagcaagtcactcaggacccattttcctctctttaccccatcacacggcaggagcgggaagggggtggcagagagtgcagagtgggccctgcactcatcagacaaaattcctccgacacccaggaggcacacgcgccgcgtcccacagcaccagggagcacagagatgtcacgtgaatggtggccctggcgttgtggaatgaggcggctctgctgatacctctccagctctgcctggaaacaaggcccaccacaccggccagaaggtggccatgacccttgaccagagaggatactgcagctctctgatatagcgctgcacagcttccaggcgctcagggacagtgtagacgg

SEQ ID NO: 9910 - DNA, 736 bp, Homo sapiens
  III.3538 (AI937230)
agcactcataattatttattattatcatcatcatcatgatggattattacataagaaaacaagttgtaatgcatcaccaaggttttgaaacaaatgtacccaaaatatgcttttaatcttgatgaagttcacaaatggcacaatattgacattttcttaaacaaattatacaatcatgttcttagataacaaggcacagcatcaccattaccatgtgtcctcggagaccacaacaggcagtgatttcacgtccccctaaggtttggtggagctgcatgatcaacaggatggctccgaaagaaccagtttgctaccagataagtcaatgagagatgccatcacttttactggacatagaattaaatataaaaatgatgcacagcaaatatggaattagcttattttgcattcagtttcattcctttcaagtgacaaaggtgcccttttttcagtatcttaggatgcaaacatgtgtatcttccacggggcattctcaccaagttcttaccaacagaaattaatagaaatggtgagttcagtttcatgataaccttcttcctggagtcattcatctgctcaggcttgaaggtccctgcggcgcctgccacaggctttggaacccacattggtgggcacgaagttgctcttcaccatgctccctgatctgctcagcaagcctgccagccgatgagtcacacaggtggcagtggtgcacgctcttttttgggcagcggag

SEQ ID NO: 9911 - DNA, 442 bp, Homo sapiens
  III.3539 (H04791)
tttttttttgtatttccaatggttcctttattttcaaaattcttaaaagtacttgtaatcactgattcattcaacaatcatttattaacacctaataggtgctaggaacttttctaggtgctagggatccaacagggaaaaattccctacattacattccagccaattatgttctgctcttaacagcaaggtgactggttaaaaattgaacgaacaaacactgattaataacctctaaagatcgagagccttccatctggttcactgctatttttcaatttgctaatctctgccccctaagaggctgatacctctccctttccagaatggggaatagactgggtgtaatgggtgaaggtctgggaaccgcgggtcagggagacgggagctgtgttcacaaaaagtaggcttcttggggaaaatttacttgatccagggtatt

SEQ ID NO: 9912 - DNA, 432 bp, Homo sapiens
  III.3540 (H04894)
  misc_feature (345)..(345): n is a, c, g, or t
  misc_feature (421)..(421): n is a, c, g, or t
aaagataaatctaaaaggtgttcaagtacattgaatcaagatgagtaatccaacttctatgttatgtaggatggatggagcacacaaattcttgcaaacattgtagaggtttttttaaacttcatccactaaggatttttttataataattacttttgaaaataaaatctcaactattttccaagttatgagtgtgctgctcttaaccctgtgagatgaaatcttcccatttggattacatatttgtagttctatatcgacatcagcagatggcaatagtatacaaatagtatacagcatgagccttccattgcttttatttctttgtttataaggtatactatnaatccttcatctggaaacccttaggggtttttaggaatttcaggaatttttccccccttttcaggagaggaatatnatattaatgtt

SEQ ID NO: 9913 - DNA, 137 bp, Homo sapiens
  III.3541 (AI609641)
tgcagggtaggaggctttattacactgtggcaggaagtgagcctagacagtgtggggcaagcagggcaggaggggctgtccccaaacctgttgaggagaaactgaggctggccccagtggagacctagcccagcagg

SEQ ID NO: 9914 - DNA, 285 bp, Homo sapiens
  III.3542 (AI758538)
  misc_feature (182)..(182): n is a, c, g, or t
tttttttttttttttttttttttttttttttttttttttttttttcaaattttacagatttttttttaaaaaacaaaacaagggttaaaaaagtcctttttttccaaccctgcctggggggggggggggggaataaaataacctcaaaagggggcctccctccttcctgcaaaggacacggnaggtaaaaggcaggccctcgccttttttgccctgcctcctcctaaggtagctaaaattgctgctggaaatattatcgcaaaaaagtggggggggggggggccc

SEQ ID NO: 9915 - DNA, 470 bp, Homo sapiens
  III.3543 (AI497811)
  misc_feature (458)..(458): n is a, c, g, or t
cagctggcaccagccctcccggccccggccgcccacccgccgcggggaagatgccggaacagagtaacgattaccgcgtggtggtgttcggggcgggcggcgtgggcaagagctcgctggtgctgcgcttcgtgaagggcacgttccgcgacacctacatccccaccatcgaggacacctaccggcaggtgatcagctgcgacaagagcgtgtgcacgctgcagatcacagacaccaccggcagccaccagttcccggccatgcagcgcctgtccatcttcaagggccacgccttcatcctggtgttctccgtcaccagcaagcagtcgctggaggagctggggcccatctacaagctcatcgtgcagatcaagggcagcgtggaggacatccccgtgatgctcgtgggcaacaagtgcgatgagacgcagcgggaggtggacacgcgcgaggcgcangcggtggcccag

SEQ ID NO: 9916 - DNA, 523 bp, Homo sapiens
  III.3544 (AI809762)
attcactccatcactagagaacactggcttagagctgatgggcctattcacaggtgcactcatggagcacagaagcgagttggacaaagtccgggcctttgtagtgtgacgtggccattagggcccacagatccttccctgcagttgctgtctccctttcttcaggttccgaggaagccttccctggccgccttcataactctgacctcctccctccctccaacctaccagcatcaaatgcaccagctatgctcctcttttcccttgccgtctgttgccctgcactttggcccatctcaaactttctaataactatcatctgagcctaaaatgctaattctgtcttttttgtctaaaataaatggaaggcccattacagtcactcagaaaaaaaaaatagaattcttatcagaaaaaaaatgacataaaactgcatttctcatcatctgtcagagattttgcttcagataagaaaaccctcactactgccccttctatgggaaacgtagctcatcccataagc

SEQ ID NO: 9917 - DNA, 219 bp, Homo sapiens
  III.3545 (H08850)
  misc_feature (127)..(127): n is a, c, g, or t
  misc_feature (168)..(168): n is a, c, g, or t
  misc_feature (181)..(181): n is a, c, g, or t
  misc_feature (188)..(188): n is a, c, g, or t
  misc_feature (203)..(203): n is a, c, g, or t
  misc_feature (217)..(217): n is a, c, g, or t
ttttttttttttttttttcttggtccacaggtaacaagagaagattatggttttttaatataaatttttaaataattgcttttgacccttgtaaacagcttggctttgttttgtattgaaaaggagntcaagccatcacagtgctatttctaaaggatatagggacancccctgattgccntttaaangtcctattttgggcncccggttcccgggnta

SEQ ID NO: 9918 - DNA, 458 bp, Homo sapiens
  III.3546 (H08934)
  misc_feature (273)..(273): n is a, c, g, or t
  misc_feature (425)..(425): n is a, c, g, or t
attatgacagaaaagaactagaaagaagacgggaagcaagccaacatgaaataaaagacgtgttggtgtggagcaatgaccgagttattcgctggatacaagcaattggacttcgagaatatgcaaataatatacttgagagcggtgtgcatggctcacttatagccctggatgaaaactttgactacagcagcttagctttattattacagattccaacacagaacacccagggcaaggcagattcttgaaagagaatacaataacctcttngccctggggaactgaaaggcgactgggatgaaagtgatgacaaggaacttcagacgtgggatcaacctgggagaagggcagtttcctcctcgtgaagtacatgggaattcagcctgatgcctggggtcctcaggaaacattaccagcttggntttagggtttaaccacaacctctggggcagtcc

SEQ ID NO: 9919 - DNA, 407 bp, Homo sapiens
  III.3547 (AI634336)
  misc_feature (385)..(385): n is a, c, g, or t
  misc_feature (397)..(397): n is a, c, g, or t
  misc_feature (405)..(405): n is a, c, g, or t
tgtgggtaagctatatttattgatttagaaacatgtccatgctgtattaaagaaccttgaaatttataaaataacatctatcgtaataatcacacatttgtaaatgaattccacataaacttatgtaagctgagaaaagttactgacaactacactacaaacactacttatcaaacctaggaagtaggtatggaaggtagtagataaatgaccacagcttgcttcatatcactgagtgactcactcattcttgttggctctgtttcaatgaactagttgccaagcctaagtgaaaaggagatataaaagaataaaaacacataaccctcaacctggctttaagagccaagaattcaaaggcttaaagcagattctgccccatgtnttagtttaactncttacgtntg

SEQ ID NO: 9920 - DNA, 227 bp, Homo sapiens
  III.3548 (AA985125)
taacttttgctttaattaagaagattagtattgtgcctcaggactgatgactctattgacatggagttaagccacatattcattatattctttgaatttttacggttttgtaaatatcaaaaagataactctgaattaaaaatcaattagaattctacacataatttttcatggagataaaaatacctataaagtgtacatatatatatatatatatatatatatat

SEQ ID NO: 9921 - DNA, 547 bp, Homo sapiens
  III.3549 (AI685917)
tttttttttttttagtttggataacaatttattccatttttcttttgtattttttaaacaaactatatacaatggaaatgatttacttgtatagtcagacagtaaaaacaaatgttaactttttaaaaatcacctgttcctaatggcaaacagaaagtctattctgtgaggcttccaaagcagcaacagccaatggaccttacctttgggatccacttccctcctaggaagttaccacaggtagggcacttaggtggcttgtgcctggtgacatatgtaaaggagcaccctgggctggtgcatgtcccatggccccggcgggtatatgtagtggtctgtaaataaagagcacatcagaatcaatagaacaacctctctcagactgatgaccactataatcacagcaacaccaggaggtcacaagcttgtggaaagataaccaattcataatcatatcataaaaggtcagtgttggaaaggtcctacaatacaacaaattcactctttagaaatggagaaactaagttcaaatggggaaagacaattg

SEQ ID NO: 9922 - DNA, 438 bp, Homo sapiens
  III.3550 (AI809182)
tttttttttttcacattattttacttccttttgtttgcctctgaacaggttttcctcctcctcttaagtaatccagagctcagttcctttattgtctctttcattcctgatctgctcatttcctactgaaagctgttctggggtcagcgcactgggtttggaatctgtctgctattagattcttgatgaattttttggcccaattcttatttggggaacacatttgatcactccacagatgctggatgtggtgctggaaatgtttttgaaatgaaccatggagtcaaatatacaggaaggagctggggcagagcaccctttctcttgaaaagctatccttttggggactctttttgacataagaataaaaatagcacttctcaaactgagtgccatgccaaccactacccatattagcccactgaagcctcaccacgc

SEQ ID NO: 9923 - DNA, 488 bp, Homo sapiens
  III.3551 (AI890356)
tttttttttccagtatctctcacgtaaaaaataaaatttatttctttttacacaagcagcaaggcatgccctatcctgacataatttcattccaaatggaaatcagatcaaggccctaaagacacagtgtgaaggtgagagggttgccttggccagcctggcctggaggggatgctgaccgggccgccttcctcctgcagctctgacctggtcattcccttccaggagtgacgccagctcccggaggtgctccagctgctggagacgattgttcgaggtgaggaccagcctgtgcacctcctcatccactcggtcgtacaggcttgtggcggcctccagggtgtcccggctgtcttctgtgccaagctcttctctcctcagccgcgccaggacggtgcccccctccagcctgagagacacaagcagtgggtcttccaggacaagcttcatcatcgtctcatgctggtcaattaactcggcgacttcct

SEQ ID NO: 9924 - DNA, 461 bp, Homo sapiens
  III.3552 (AI760033)
ttttagttggtttgggttactctcttcttttccatttaacggtatgttgccaaatttttacacacatcttagaatgttttcttaagataaaaatccaagtagtgaaattacctgatcaaggaattggatatattttccccaggttgcgcttcagaaaggctgtggacgaagtgttaggagcattcctgtttcaccgcagccccccagaactgggtctgcatcaaatttgtgtgctttgccgagttagtaggtgaatagtggaattgcgcgtgtctttatgagcacagagcgctcattggccggaggtgcatcttcatgagtacgttgctcatgggcccgtccttgcctggataggaggaacccgggacttgattggtcttgccacagcctggtggtctagttgctttgtggggtgtgcagtcctggggctgcgggaggggagtaacccttagtaacctgtg

SEQ ID NO: 9925 - DNA, 456 bp, Homo sapiens
  III.3553 (AI380291)
ttttttttttaaaaatcatggcaagggtttattgtgtccttaatcaagtcataataagggaaaatgcgctggaacattcccccgacaggcaaaatagagacagctccggtgtcatcgccagggagcccacagcttggggacacaagggtccaattgtttgtcatcgtctccagcgtggaccaccactaagggctccatttctaggagactggctctcgatcctttttggaaatggaggtttcggagctctggggtttgcttccttcccaggtgttttaggctccacaggtacacaggggtagtgtgaagagactagggcagcacgttctccacccaccacgtgctgagaacctccacccaattgatgctcttgtctgctgcgcgccggggcgcctgctgcttcctcctcggcatgatgcttctccggcgactgccagggctgcaggtgccaggaga

SEQ ID NO: 9926 - DNA, 399 bp, Homo sapiens
  III.3554 (AI911214)
  misc_feature (332)..(332): n is a, c, g, or t
tttactaagattaatggtcatttgcatatgtttattctttaaaaattgaaactcagatctggaacatttgcgttcactgtaggcctgaatgctgataaagctaaccattttggggtggttgtttgcttgacattgattgtatttccctgaaggcaacaattctcagctcttagcctttctccattttgtgtttcaaggctgcttaattccacatggctttatagtgtcaatgaacaacacacttgcagtgataaatattgtaactcagtgatgaagtttcacagatattcttggctatttacgtcttgtcggattctcaggaggccatgcanagggttaatacttccttcacttctttgctctgcaaacaaaccttccccacctggcccaggtaacacc

SEQ ID NO: 9927 - DNA, 328 bp, Homo sapiens
  III.3555 (AI935571)
tgaattgtttttttagcatttattactgtgtgaccttagacaaattgttttgcttctctgtgccttagtttactaatctgtaaataagaaccatcctagtgcctacctcatgtgtttatcagaaaggtgaaataaattgatgtttaaagtgcttgaagaagtacctggaacaggataagagctatggaagtcttagctcttgttatcactcaatctattcaaacattcatctttcagccatcgagtgcccatgatataatacactattatacaaactagcgactcagggtgaacaggatagatgccagccttgaacttacggtgtttc

SEQ ID NO: 9928 - DNA, 355 bp, Homo sapiens
  III.3556 (R36060)
gatcttttaaatgtaaggagtaagattgatctataataatgtgctggggaaaacatttatagatatgtacatcatggttactttttgtcctttcaaatggactttttatttctatttatggagagactgtaactactgcttttaatgtctttttaaagcaagctatttaccagcttgaaaatatcatgcatttaaaatagaaactatctggggagtctaattactattgttcctatttgagccagttgtctttcagtaaagctataggaatctctcaaagaaggtaaataggaaatactacttctttaaatgtcatagggaaggcatatcccactttgtttctattaggtacttt

SEQ ID NO: 9929 - DNA, 119 bp, Homo sapiens
  III.3557 (R49142)
tttttttttttttttttttttttttttttttaatgtttataaacttgtttttatttactaaatgccaactgatgcaccacttagtcctgaaagctctgaagacagaagcagttttttac

SEQ ID NO: 9930 - DNA, 453 bp, Homo sapiens
  III.3558 (AI569994)
cttttaaagcagaaatgtctttattgtttgaagcatgacaaaataaaattgataggacatttcatttcttacttagtcttctcaatggggttataaaaatacaatgccacttagtttttgtaagctcttgaaaatgtccagaagctcacacttagtatgatattaaaaggcacttataacacacaataagatacttagaaacccatctcatagatacaattgaaatttctttgagaaaaatttctaaatatagaaataaataggacggcactatttcttcttttccaaaacacagaatagcattttccccatgttacctatacacaccataaatgtggacacctcctcccatttttgttcttgatacaggttgataatcaagctgaaattaatttgcttgcttttcttcaatttaatctcaatttggtttaaaataaagcaaaattcttaatt

SEQ ID NO: 9931 - DNA, 457 bp, Homo sapiens
  III.3559 (AI587040)
tttttttttttttttgtatttttagtagagatggggtttcaccatgtaggccaagcctcccaaagtagtgggaccacagtcgtgtgacaccgcgccctgcccacactacttcttaagtaaaattttacccaggttctgcaaatacctaaatagcctcagagtccttatttcttcattttttgggaaaaaaaagaaagaaagaaagcatactgattttagcaacctaaatgtacttctcatttagcattttcacttcccctgatgaaaagcaagttaagctagcatgtaattttagaaactgatctattttttaaagttgtgttggaaataaagaaagtgagggttgggagaacagatatttaatagccattctgctatttttaaaaagtaatgctatgcattttaaaatttcatatctttgaataatgaatctaggcttaaatactatgtgtcttgc

SEQ ID NO: 9932 - DNA, 377 bp, Homo sapiens
  III.3560 (AA767740)
ttttttttttttacagttaatttaatgaaaatcagcaccattgtaaatgatagtaattgtaacaacatagttactgggtgaaggagtaggggagacactcagtaaccatctatttacctagacacttatgcaggggtacatgctaggtggctttattcagattcgggtacattggaatcacatcatgactttgagtctgatggctgtgtagataaagatttaagcaagtgccttgtgtttgctggaaaatattacaactcatttgggtgaaagcttcccagatgatgataattaatagcacttctgcctttttcctggagtaacttttagattgagtcacatatgatagtataaaagtccaaaattttctgggttta

SEQ ID NO: 9933 - DNA, 317 bp, Homo sapiens
  III.3561 (AI419141)
  misc_feature (257)..(257): n is a, c, g, or t
gtaataaagtaatttaatactgtaaaatggtttcctatcacagatacaacagataattccaagaacttgttcttgatagctattttaaatcaccatgactgattttactatgattcacttaaaacgaataaaaactatatatactgaaatattcctaaattcaaactgtaaatctatagaatacatttttcctattcaaacctgtgcaattctttattgatactaaaatatacaaacctgagtagtcacttccacanaatgtgaattcgtgccagaaagctggtgtgtgatgccttctagatcacagtcctgacagg

SEQ ID NO: 9934 - DNA, 390 bp, Homo sapiens
  III.3562 (AI479993)
tccaggtttcttcagtttattaggtgccagtaatctgcaagcccagtggaggtgcctccagcctctacagtcccctgctgtgtgctaatcaaaaacaaacagcccagtcagcatgttggggcctcaccaggtgggtccgggcacctcggagctgtgcaaacccctgcaggatctcctctgttggctccctgggtgcaggaacagccctataaaaccctcaacctcagttcattaaggccaaggcacagaaggcagtgatggagcaggggctgtggctgctggtgacactggtgatgctgtgggatgacagcagggtcaggggctccctggggctgcatgaggtgcatgcccattccccaagccatggccctatgccacgacattggctac

SEQ ID NO: 9935 - DNA, 540 bp, Homo sapiens
  III.3563 (N63447)
  misc_feature (423)..(423): n is a, c, g, or t
  misc_feature (507)..(507): n is a, c, g, or t
  misc_feature (516)..(516): n is a, c, g, or t
gcaattccccatttttaatatccatatgttatatacacaatatgtatacacttaaaatataagagttacatatcctggtctcttacatgcaaacagtagatcacaaatagttttgagctacacatgtatcttgcacaggtattggaaaaaaatctgtgaaatttttttacagttttaacaaatatacataaatataagaacataaattacagtaaaatattgacagcatttgagaaaatgttgataacccagatgcactgatgcctaaaggcttataataatagaaaagtacagctcagggacatctcattcctattcttttttttaaaataagtaaatacatcatatgagacattagttctttctctaaacaactcaattagagaaatgtatatatttttatctctacttcccatggaaganaaccaactacgcatctcatttatggataccatactggtcttcccccgctaggtttacacatttggtcacaacactgggaatatnacaggggcncataatccatcaaggcctttcccg

SEQ ID NO: 9936 - DNA, 445 bp, Homo sapiens
  III.3564 (N94708)
  misc_feature (75)..(75): n is a, c, g, or t
  misc_feature (79)..(79): n is a, c, g, or t
gaaacagtttagccacatacccgctaaaactttatctgccagtgttgatgcaattaccattcatagccatttatngagnaccaaaagaccagtaacacccaaaaaacttttacccactaaggcatagaagttgggaaatacttgcttcagaacattcatggtaaatttgcacttcatctttcctgcctatagaaaatctttctaattgccaacaagacttttattaattaaaactggacattaagctctgttgtcatgaacaactggaatgtaaaccacagtattttggagtgcagaacattctcaacttaagtgataagtccaaatgatgaaggaaatgttttaattcacaaatggagatttgtatgtgttatcaggttcacctgcttgatattagatacattaaagcactgaattttcatggatattagttggatttatcatt

SEQ ID NO: 9937 - DNA, 507 bp, Homo sapiens
  III.3565 (AA741010)
tttttttttttcttaagaattagatttttattaaagaagaaaagcatctcagtattttaaacattctgattctctaacacatgaaaaagttgaatccctaggcattctttgtttgtagcaaaaggaaggttggacatacttccagtgatacaatccaattcatagctagtttctatttctgtaactctactgactcctctattaagcttttaagctcttaaaaggcaggggacaagttatctatcattttgcgtctacaaacaagtgaacaaggactcaagtaggtgcctgataatttggcaacagtgactcggcctgctaagactgcataaatacccatcatgcatgctgaaattcatgaggattatttatatttgaaacagtaattcacttctggttgtgaagtatccgtggcaaaataaagttgaagctaagaagaaatgctgccttttttgtacaaggcaggaggagatgaaagatggcagaggaagtggagtagtatgtggt

SEQ ID NO: 9938 - DNA, 272 bp, Homo sapiens
  III.3566 (AI241795)
tttttttttttttttttttttttttttttttttttttgcaattttatcttaccatctatccctgaaaaacgaaacactgctttttccgacccaaactggttccgaccctcctgacctaaaaaatcatcacctcggaggggaaaagaaacgctacggggaagggaaacgaacccaaccccaaagctccttttcctgacaggtttttttagacgggacagcgctgccctgtctgggcccggggaagggtctgaacaaaaaaaaagacctgccaa

SEQ ID NO: 9939 - DNA, 285 bp, Homo sapiens
  III.3567 (AI620139)
cactgcataatacaccatcctttaatatttgcccagaatttccaatactagaaaccccactgcaaagcagaaagactatctggtagcttcaaggaaccatttcaggagattgttgtgtgggcctcagtattcaaggctgccttagaagatcgtgcgatcctctcactcttcttgccccaagtaccagagttaataagccactgaaccaaccagaggggaattatttttggtcccggtttaaagaaaacaaaacaagctgttgattctgccatgacctcttgggta

SEQ ID NO: 9940 - DNA, 472 bp, Homo sapiens
  III.3568 (AI807937)
ttttagcgagaaagttagcaaattgcctttattcagaagaagcagtgttacatggaactggacatgaggctgccctcctccttgcacctccagctgtgcctaatgacaccgaaatgccgctgtgtgtggcacgccacaggccatggagtagctccagctaacgcagatggacatcccaggtgccccagggagatcaggcccacggagtgggatgaagccctgaggcggggaggccagcatggagacacctgtccggccgtccagtcgcccgccgggccgccttgaggctcctgggctgcagccctgatgcctggaaactttgggactggcctctagcctcgctgggcttccaaccctgccgaccccaacttgcccggacgtttccgtcccgcccgctccgctcgggggcgcgggaccgccggccagtccgtctgtcggtctgtcccggcgttcgaggccacccaccggcccc

SEQ ID NO: 9941 - DNA, 228 bp, Homo sapiens
  III.3569 (AI700118)
cactgtaaatatatacaatttttatttaaagctagaaaaattcttttaaaataaactaaaaaggcagtccataagcttctgttgaatggatgaaaatctctaccataaataaaaacataatatgcaaaggtattaataagatttggaagaaaacctaagagagtattaacagtagtgactactggggatcaccgagatacagggtattagggatggaaggtttacttt

SEQ ID NO: 9942 - DNA, 440 bp, Homo sapiens
  III.3570 (AI569943)
  misc_feature (391)..(391): n is a, c, g, or t
tttttttttttttttttttttttttttttttttttttttttttaaaggggggcaagggaaattatttaaataaaaaaacaatgtatattatttttatccaacaacaataccaatgatttctgtctggtaaaaaaggttatcccccacaggttaaggttcattgccttgcaaaatattaaccaattttcaatctattcactaattcatttcagcattcctttgactgaccaaccataaatctcccttctttgaaattcctttggaactacccctaacggcttactggttctttaattactaaaggggaataaaatcttttacacatattccctttatatttggggaaaaatcatacttttaactctgttaaaattatatatactttaacagnccccatttcaggaccttacttgggggacaggaggtctaacaaaatgggt

SEQ ID NO: 9943 - DNA, 504 bp, Homo sapiens
  III.3571 (AI651341)
tttttttttttgttgaaaaggctcattttatttccagaagtcttgttcagtggaccaagggaggcctaaacgtgtccatcaaaattcttcatgtgctattcatctatcctttaatcctagtccagctgggctgctcagaatactgaccctctgagccctaaacgggccttttcagagaaaatcccaacacttgtttcaggtcaaggaactagagaaacctgacaggaaagggaaataccattccccaccctcaccatttacccaaaccttcacttgccatcaatagaccatatcatccagagggttgtggcttagtgatccactcactttggagagattaaaatagctggatgcatgcttcagaaaacatctacagacgacgatgatgtgttttcacaacagttggcttttaagagtccaactcctctgacttttccaacagagcttaccagtatcagagggacacaattgaagtgtttccttcagagccagtgtttctctttg

SEQ ID NO: 9944 - DNA, 412 bp, Homo sapiens
  III.3572 (AI887682)
ggcatctcctttatttgtggcatgagagaaatgttcctaatgtgaggctcagctgggtgttacagaacagcctactgggtgtggggagttggtagaataaaaaaattaaacacaagaatgaaacgacacccacaactccaaatgctgaacacgtgtggtttcttccatagaaggaggctggcaagaagcatgaatgtgactgaactcgcagtgcaggtcagtaaaccgaaaaagcaatcgggcaggggagccattctaaaacccgcttcagggcttggacacactttgacccagacattgccatcttggtgtttttgtggcctttttcatgtataggcaatgaggtctgaactttgggatctttgtggctggaaaatgcagtaaggaaagctcagcttgtggaaatttccca

SEQ ID NO: 9945 - DNA, 555 bp, Homo sapiens
  III.3573 (AI369947)
  misc_feature (289)..(289): n is a, c, g, or t
  misc_feature (339)..(339): n is a, c, g, or t
  misc_feature (340)..(340): n is a, c, g, or t
  misc_feature (405)..(405): n is a, c, g, or t
  misc_feature (414)..(414): n is a, c, g, or t
  misc_feature (420)..(420): n is a, c, g, or t
  misc_feature (428)..(428): n is a, c, g, or t
  misc_feature (435)..(435): n is a, c, g, or t
  misc_feature (484)..(484): n is a, c, g, or t
  misc_feature (487)..(487): n is a, c, g, or t
  misc_feature (497)..(497): n is a, c, g, or t
  misc_feature (536)..(536): n is a, c, g, or t
  misc_feature (545)..(545): n is a, c, g, or t
  misc_feature (547)..(547): n is a, c, g, or t
tttttttataaatgggtcaaaaagaattagatttttttatttatacttcagaaatgtaatcaagtgaatgaaatggtttcatatacatttttacatccaacagcagtgacacactgttcatacattaattctatagtaaaatgtacatccttcttttttgctaagtaagatatgccaagtgttcatggacaaaaaaacctttcgttgcaacctgaactagtgaaataaccagggtaagccatgttcctttcaatagctttatagacttaataaagctattgtcaaatgntgtgtaatctggcatgtgtaagatggaagtctcaaaattctaaaaatgtnnaatgtccaacttgaaaactttcaaatatcatattgggattttgcgactgaatctgccagggcatntaagtcagnatggtntatgtganagtgacntttctgtagctctattcctagctgactattctttcgattccctatacanaanatgcatctantttgaagtaagccagctgtgaacagatggctgatgacanttctcatancnctgagttc

SEQ ID NO: 9946 - DNA, 576 bp, Homo sapiens
  III.3574 (AI671003)
aaggtttttgacaatggcatttattcaatagtcatgtagtcaagaaaatatatgaatatttgaacgcttaaggcatacaatgaatcaaaatttagtcacataaccaacataaagattttcagatagagtcaatgtgacttatgataaaaagaattggagatgaaagtaagcaggcttacataaacaaatgtattttcaggaaacaggtttgtgaaatctagaggatagcgcttggattttcggacactttgtctaatggatgtacacatgtccatttgttagcagtagttttcaagtcagatggttttatacgtgaacaatttctttttcctgtgcatgtattcacggtatcaaacgtctaatattgtggagaacatctgaacagtctgtgacatgttctagctacagtaacatgttcatactgatcattcctttggcagggtgagtttttcacccagtaatgatgaaagagccctgaaagaggggaggttagatcgattagtctgtttgcaggataatgtactgtacatgactcagctgaccaaactgaggttgaacagtgacagatgggtaaag

SEQ ID NO: 9947 - DNA, 416 bp, Homo sapiens
  III.3575 (AI699467)
  misc_feature (388)..(388): n is a, c, g, or t
ttttggcagagaacaggatttattcattacaagtagccttgacctcttgtatcattcccagtagaagccgagactcccaaacccaggcatatttaggaccttcttcaaacaattgccagtaccatggtgctggggaaaaacaaaacaaaacaaacaaacaaaacaaaacctttcagacaccttaaactaaagctgctctgtcatcttgcagacccaccctggagtccaacaggacaattttcaaagccacccatcctggcaaagtgcttgacaagctgcaggagaacagcattcaggattgcaattagagttggaagagaggaggaggagacaggggtcactgggccaatcaatactcagctaccctctccccccaccccctcaccgncggtgttcagagaaatgccaaagcttgc

SEQ ID NO: 9948 - DNA, 265 bp, Homo sapiens
  III.3576 (AI473216)
tttaggattttacaagtatgtatttaatctttttttaaaaaaagcgtttacatagggttcagaataatgacaataaatcaacatttctattgtccatttgtgtgttttcatagtaaataatgctcatttatccttaaccagtaatacatacttatgggcttaaattagcaaaagcctctcaaaaagtagctccactcatttatccaccagtgtccagatgccatccagcacatgaggagctcccagaaaggagcagggaacaaac

SEQ ID NO: 9949 - DNA, 483 bp, Homo sapiens
  III.3577 (AI768229)
aaaaataataattttgtttattttccttgacacatatatgcatacacttacacacataaaagggtgaacacaaacagtactgcctcagggacagggattggaattgaaggaaatgtcaagagagactatcctatttgaaattttttatgttgaacaaatatattctgtgcaacttagattaattttcaatgaaaaaagagcatatatttgtggtcttgtcattaaaatgttctagactaaataaatgttaagtgtggccactggttccctgtgacttatcccactggaatgcagtggagggcaattggggggaataataatcacttgaatagtgagttatacatctagccttttacattcattcaaggctccagcatatttataaaatcattggcattgctcaagatgcatctggcttgcccagggggcatgtcagcatctcagaatacttgtgagcagaaggcttaactcttccctgttctg

SEQ ID NO: 9950 - DNA, 346 bp, Homo sapiens
  III.3578 (AI690310)
ttctatctactttaatgtaaaagatttcatttgatggttacatattagctagtagaatgaataacaagaatttttaaagtaattataatcaatttaacaattattctataattccataattaaatcattttgtttttccagatgcaagtctagcctatgaagcacaaaatgaatttttaattcaacagcttctcacccatattcttcctggtcacttccacctacccctccaggaagattacataaggtgaaccctttagactgaaatagggatcaataaatgcagatttcctctcaccacccactccaacttaatatgaaattaatgctggccgggcacaatggc

SEQ ID NO: 9951 - DNA, 409 bp, Homo sapiens
  III.3579 (AA705911)
ttttacttaaccattacaaagtatgatcgttatgtaccaattgcaataagcccttagactgaaaagtcagtaagtgagcccaggaggtatacagcactaccctctgtagcagcaagcgtgcatagccacaggctctctctggaacgacacaggagaaagtggtggcattctggcctgcaggctcacgctctccccttagggagtgttatctgtggccacatccagtctgcctgccagaccatgctcttcccgagggtctacggagcctggtgccagtagtcttagttcagtctccaagtgaatgattcgcaatagtctgtagcttacaaattgccatccctctgactgcgggcagggccagattcaggggtttggcgacgaccacagactgtctgtccatctggaagat

SEQ ID NO: 9952 - DNA, 530 bp, Homo sapiens
  III.3580 (AI336660)
  misc_feature (522)..(522): n is a, c, g, or t
gagaagacgacagaagggtgttttaggggaagaaattcaaactactggagatctggaggtgagaaaaattggggtgtatgtgaggccaggggccatgcatggagacaaggagaagagcttggcgggcacagagcacaggcctgtgggaacgagcctaaggatacctttaggaaggatttttcctcacagccggtctccaagggtagctttgtgacttaaaagcactgatagtttcggccgggcgcggtggctcacgcctggaatcccagcactttgggaggccgaggcgggcggatcacgaggtcaggagatcgacaccatcctggctaacaaggtgaagccccatctccactaaaaaaaatacaaaaaaattagccgggcgtggtggagggcaccggtagtcccagctactcgggaggctgaggcaggagaatggtgggaacctgggaggtggagcttgcagtgagccgagaccgcgccactgcactccagcctgggcgacagagccagactctgtcacanaaaaaaaa

SEQ ID NO: 9953 - DNA, 263 bp, Homo sapiens
  III.3581 (AI553695)
tatttttaagttgcactacattattttaactatttaattaaaaaatttaactaccagatcagtgcactgttgcttgcttaaacacacagtaaatagataaaaaatatttttaaaataagccagaagtaaaaaggaaaaggcctgaacagcttgacaaacagcaacagaataatttccaatcagtgactattaatgggaatactcattttatacaggcgagtattgacaaccatttagcaattctttaatcaggcacttgatat

SEQ ID NO: 9954 - DNA, 507 bp, Homo sapiens
  III.3582 (AI597757)
ttttaacaggaaatattttttgcctagtgtcatggcagtgaaagtagtatacggtttcaccccacatatgcatattccacattataggggctttctagtttccggtcatcaatttcccaacgaatgcccttccctatacctatccatcccaagccaatttctacattgtgctgcaatgcttagtaacgtcagtgaaatagtattcaaagtaaaaatcacgactcctcccatctccctgcccaatctaaaaataggtgcatgacagtgaattgctgaccaggcatttttttttctgagtaaaacaccttctgggcctgctgtcatccttactccgaatggtgctgcaagccagagtcaaaacatgtgaaataatacatgaataggtctataatactttttaacagctctttacaatatacggtcacttataaaaccagcgttaatatagagacctttggtgtgataatattctaattgcagcaataatagcatgcacaccagagttca

SEQ ID NO: 9955 - DNA, 504 bp, Homo sapiens
  III.3583 (AI400466)
gataaaaaattttggcttccacattataaaaacccactcttttgcaatgctcaatcacacaattttattttagtactttttttttaaagcttggaataaataatagatgaatttcagtgacaggaagagagaaccattcttagattacatatcagcaatattgaaaatatacttttttgttatactaagcggcctccaaatttgagattaattcaggagtttctctaatctgaaaggaacatcatttcccatatcaatttatttttatctttgctcagagtcacaaggttctcctgaagtccactagggtgttcaaaattcttggatcaatatttaagcttctccataagatggaaccatttcatcctaccaaacgtttgtttacttctttcactagaattgttttctttagctaaactggatactcattgatcctgaacttgtgaagtacattcccagggctactgccttagatccttttgttctttcaaaccaggatgctct

SEQ ID NO: 9956 - DNA, 334 bp, Homo sapiens
  III.3584 (AI611034)
tttttttttttttttttggggtcaactggccccagcctcctcacacctttattaaaactctgagtttaggaaggctgctaacgctgcttttcaataggtacgaactggctggggaaggcgaggacgacaaaggaaggcaggggattctcttttgcccagtgttcggtgtcccaaactcggcgtcccggtgcaaggccgaggcctcaaaccctgctaggcttcttggggtcctggctcctggccggcatgaaggcgtagagctcctcgatgagcatttccatgcgcgcggtgacctcggtcacggtgtcaatgaccagcttctgctgcagcttca

SEQ ID NO: 9957 - DNA, 478 bp, Homo sapiens
  III.3585 (AI675773)
ttttttttttttttttggggaaaggctttcaactcttccctattcggtatgttgttagctgggggtaagtcatatatggcatttattatgttgagtttttctatgcctactgggctgaaagtttttattatgaagagattttgaattttatcaaatgctcttcctgtgtctattgacaaataaaagattgattctttgaaaagataaataaagctgaaagaccactagctagattaaccaagaacaaaatataagattcaaatacgtgtaatcagaaatggaaaaggagacgttacaactgataccacagaaatacaaaatatcatcggagactactatgagcacttctatgcatacaaactagaaaacctagaggaaatatataaatttctggaaatgtacaacctcccaagattgaatgaggaaaaaaaacagaaatacagaacccaccaacaatgagttccaaaattgaatcagt

SEQ ID NO: 9958 - DNA, 416 bp, Homo sapiens
  III.3586 (AI680082)
ttttttttttttttttttttataggagaacacccaagtttaattccattgttttgatttttcaaggagacacaagttggcatcatcatgaacaaggtttcagagaaatcccattggaaagagaggctaaataactggttttctaaaggcgatggcctgacccaacccctatccagagctgtgatcccagtcagaagcttaggacatcaactttaagatctgcccaatccccaggaggaatagatgtcagctgctgtatacgacagagagataaccagggactctagtttcctggtttaatattaagggaaattccactgaagctcagtgtttccacccatagtggtcacaaccaaccaatttcatgggtgttcataaaattgatttgccttttcacgcctctgagtttattggaaa

SEQ ID NO: 9959 - DNA, 315 bp, Homo sapiens
  III.3587 (AI610866)
gaatttttaaaaataaattttattgtgtttaaaagtatacctgttatgggatacacataaatagaaggttactagagtgaagcaaattaatgtatccatcactcacatttgaattaaaaatgcattttagggacactttgtatgttttttgtaaattgctcattttcctccatttttctatcaggagtttggtgctttgtccttcaatgtttaagaattggcctcataattttgtaaaactaattaatactaatatatagactggcacttagtttttggccaggcatggtggctcacacctgtaaccccagcact

SEQ ID NO: 9960 - DNA, 153 bp, Homo sapiens
  III.3588 (AI560517)
tcacttttctcattaaacatttattttttcattttaaagacaagagtctcactctgttgtcctggctggagtacagtggtacaatcatggctcactgcagccttgaactcggctgaaacaatactctttcctcagccacctgagtagctggga

SEQ ID NO: 9961 - DNA, 323 bp, Homo sapiens
  III.3589 (AA705793)
tttacataagatagatgctttattattaaaaatgtccaaatactacttcaacacagtatgccctagttacatctattttaaaaatgaagaaaacctctctcattaaaaatgaccaggacacaaggcagtcaataaacactaataataaaactattaccatagctgttgatttgcatagcactgagctggctgcccagctgggtgacagatgaagtggatataggacctggataagaagattgtgcagagggtttgtatggtgcatgtgaggatgccacattgttgacagggggagggcctggaaatctttggggaggggtgac

SEQ ID NO: 9962 - DNA, 382 bp, Homo sapiens
  III.3590 (AA400326)
attttgtaagacaccaaaggagtcacactggacagaaaccctacatatgtaatgaatgtggcaagtcctttagtaaaagttcccaccttgcagttcatcagagaattcataccggtgaaaaaccttacaaatgtaatctgtgtgggaaatcctttagtcagcgtgtccatcttagacttcatcagacagttcatacccgagagagacccttcaaatgtaatgagtgtggcaaaacctttaaacggagctcaaacctcactgtacatcaggtaatccatgcaggaaagaaaccatataaatgtgatgtatgtggcaaggcattcagacatagatcaaatcttgtatgtcaccggagaattcacagtggagagaaacaatacaa

SEQ ID NO: 9963 - DNA, 168 bp, Homo sapiens
  III.3591 (AA400327)
ctttaaagaaaagagtttaattggctcatatttctgaaggcttaaatgaaaacatggtgctggcatctgatcaccctctaggagagccctcaggaaggttaaaatcatggtggaaggcaaagcgggtgtcggtatttcacatggtgagaatgagggcaagcgacaggg

SEQ ID NO: 9964 - DNA, 399 bp, Homo sapiens
  III.3592 (AA778998)
tttaggtatttaatattcaataatattttatttgtgatgggaaaattgaattgctatattatgcaattattctcaaatttaatatttcaaaacagctcattttatataaagctaacatggcagaatgaattatatattaatagcatttatcatattaagtattagcaaagtaagtattgagccacagatggcaaatgaccaagacattaccatagatattaattcatctttgttctggagactagtgcagtacaattcttttttttttttttttagtgcagtacaattcttaaaagacagtccctgaaatacaatcctataacctcccatcataaaccatgatcgtaaaggagaacatatgtttcccattagaacaatggaataattggaagttctgtt

SEQ ID NO: 9965 - DNA, 529 bp, Homo sapiens
  III.3593 (AI381503)
  misc_feature (503)..(503): n is a, c, g, or t
gctatccctgctgttgtttttatttcagatacggtgtggggcaggaaagctggatgttatctcctttatcttgagaaccccacataaataggttggctccactcactccagagccctgcctctctgcacatggagctcactgctgctctcacttgaacatcgtacttagaaagatcatcaattattgagatgaatgcattggtcatcaatttttctatctgcaaatatccattccttgtattgtgtatttttacttcataatcaaagcaatggattggaaaagcagacactggtttctcccattggatagagagacgagttccttcaatctctgctgtgacattcagtggaggatttatttgatcaatggcgtgaagggcaaacagctgatcaaagggcctgatagcagagtgcttgctggagccgttaacaagcaccgcaagccagtcacgccctttgctgaggataaaagtcctgggaaaccagcatgcgatatttctccncagtgtgtctttgctgtattcttggc

SEQ ID NO: 9966 - DNA, 834 bp, Homo sapiens
  III.3594 (AI684469)
  misc_feature (535)..(535): n is a, c, g, or t
  misc_feature (591)..(591): n is a, c, g, or t
  misc_feature (745)..(745): n is a, c, g, or t
  misc_feature (759)..(759): n is a, c, g, or t
gtttatttttatttatttatttatatatttattgagacagggtctctgttgcccaagctggagtgcagtagcatgatcacagttcactgcagcctttatttcccaggctgaagcaatcctcccacttcagccccctgagtggctgatactacacgtgtgcaccaccacgcctttctaattttcatattttttgtatagactaggtttcacctttttgctcaggctggtctcaaactcctgagctcaaacaatcctcctgccttggcctcccccaaagttttaaacatatgtaaatatattattttaaacattttattcactaatagggtaaatactataagtagcatcttaatatttcctcaatatccatcaaaatatgtgaaagcaagttagacaaaacttagggagagctttcattgggaaaatgggggacagatttatatttagaggctccctttaattgggcaaatgcaaaaaataaattatgctagagaaacacagtgacttctatgtgtccagttgaaaaagatggaantttatgcagttctgtttctcttttgagtttaactgaactcagaggaataaaccctncgagagctgttcacactggtatttagagcaaaattaaaaactgaattctcacctttatcagtcatcgaatacagtaagaaattaagatgatcatcccaacccacacaagcatcacctcaaaaatacacgagcccatcgccaccaattaatgagntgtatcccatttgnctgtgatgagatgtaactctttgtgactgaagaagaaggtgaatgtgcaatggcacaccaatggtacttgatgct

SEQ ID NO: 9967 - DNA, 417 bp, Homo sapiens
  III.3595 (AI573168)
  misc_feature (367)..(367): n is a, c, g, or t
  misc_feature (412)..(412): n is a, c, g, or t
tttttttttgacatggaacactttttaatgtcaagtcagagacaaccccaccctcccggatcccccaatccccctttccctcatcacatccaggacccctccccgaggactctcaggttcccagactttcaggggaggggaaaaaaaaaaaagattacctaaaaattgcattttcttctctttcatacacactcacacaaaggtgggaaataaaataaaccaagaggattaaactctccagtggtcacaaaggcatcagagattcccataatgggctaaagcaagtgggtactgacggtactgcttgttcagctgcttgctgtctgttaacgccacagggcagaatggagaaagcggggccacctgnggtggcctagcgcagagccacacctggaaagatgctgcgcccggnattag

SEQ ID NO: 9968 - DNA, 375 bp, Homo sapiens
  III.3596 (AA632622)
aagtgctatactaagcagccatgcaattgacgtgttttagtcctgtgaggtttacctgttgtctttcccaaatttcccagaattttatcctggaagctctggctgatcctgaattcatatttgggtgtaccttgagtctttgttctggaacccagctgggaagggctcagtctgcctagcccaggcaaggctggaagcagacctcagggagggccaaactacccctggatggccaggagaacctgggctgtatggggccatgctgtgagggtgtactgctttactgggagagagcagaccaggacagaccttcagagtccaggcattcaaccacgtagaagggaattagagaaaaaaaaaaaaaaagtcgacgcg

SEQ ID NO: 9969 - DNA, 449 bp, Homo sapiens
  III.3597 (AI688390)
aatgttgaactaggatatttaaacaatcccagtgctttctatcagaatgtgagctctctgacgggtgagccatagtcctacgttgtgctccttttctgcaagagcagaggtccaagaacagggctaaagacctcagtgggaatgactgttcttcatcacattctggattcacagccaaacagggtagctgtgctgtcaacacacttaacaaggcaactggtcttaacttccggaactatatccaggagccaggccattgataaaacagttctttaaaaattcttgcctttggttcaaagtagggagaaaaggataacttcaggaagttttttatagcttaaaatattgagtctcagaaagttatatatattcatctcagcagtctgaacgcttagatgatcaatctgcaagtaattggaaatgtacaaagaagaaaaattgctgggaag

SEQ ID NO: 9970 - DNA, 450 bp, Homo sapiens
  III.3598 (AI889858)
cccaagctgagcctgcagctgataaccacagacaccctggcagggaaatctgtgatcggaacaacaaaatgccaaggaaaacaaaacccatttgcatttggtatgaatttcctgtttaaataggttttattagcgggcaagaaaggaaaagtggtgacttcaaggtgtcattgggctggcaagggctcgggcccctggaggggtacagtgggggctgggccacactccctgctgcccgtttcctcctgggggcagctgcagcaacctcttggcttgtctgcttcctgtctcttacctaacagtcaaggctcactagaggagtcccgggccccctaggctggctccggggaaaaggaatcaggcagaaccggctagtattatcccaaggagtgtggctgggcggagcttccccacagatctctgagtgtggggaggactggagaggcctca

SEQ ID NO: 9971 - DNA, 358 bp, Homo sapiens
  III.3599 (AA631482)
gaggccgcctactactactaaattagcagccgcgttcgagttgaatctaacccaatatggtagtagttttgtgtccttttattgatattgagaattttagagagaaaaagggcattagaatcatggtgtctggctggacacagtggctcacgcctgtaatcccaacactttgggaggccgaggcaggtggatcacttgagcccaggagttcaagaccagcctgggcaacatggcaaagcctgtctctacgaaaaatgcggaatttagctggacatggcggcacacacctatagcccccactacttgggaggctgtggtgggaggatcacttgagcctgggaggttgaggctgcattga

SEQ ID NO: 9972 - DNA, 392 bp, Homo sapiens
  III.3600 (AI356650)
ttgtcatttgaatattttatttctagacttccttaagtgttgaaccatcaatattttagtgaaaggagactacatagacttgttttgatgatacctttgttctttttctacatgtgtttcaaaaaagtaaacttattttcacatacactttaaatagaattttttttgcatatacaaggaaatgtgattacaaataccttttgaagaggattagtgataatctgtaccttttgtaagcaaaatgaatgagagtactattagaaacttgtggattgaagctttcattcatcaaagtaaatctgcagctctgtgcgcttccgctcaacccaattccttaggtcctctgaataaatcagtgacctgggagttcttgcacccgctccttactcctg

SEQ ID NO: 9973 - DNA, 515 bp, Homo sapiens
  III.3601 (AI939502)
catttgtatattttatttctagacttccttaagtgttgaaccatcaatattttagtgaaaggagactacatagactagtttgatgatacctttgttctttttctacatgtgtttcaaaaaagtaaacttaatttcacatacactttaaatagaattttttttgcatatacaaggaaatgtgattacaaataccttttgaagaggattagtgataatctgtaccttttgtaagcaaaatgaatgagagtactattagaaacctgtggattgaagctttcattcatcaaagaaaatctgcagctctgtgcgcttccgctcaacccaattccttaggtcctctgaataaagcagtgacctgggagttcttgcacccgctcctcactcctgagaagggtcctgccaactctgtattgtcctgttggatttgcagtcagaagtctgaggctggcaggcactgggcaggcaatgagttctttccctgaagttgggcacaaaaagatcggcatgggagcagc

SEQ ID NO: 9974 - DNA, 305 bp, Homo sapiens
  III.3602 (AI537785)
tttttttttttttaatgcccaaaacataatttatttattagagatggggtcttgctatgttgcccaggctggattcaaaatcctgagcccaagcaatccctcctgcctcagcctctcaagtagatgggacaataggcgcacaccaccatacctgactgtaagccacatactttaaatggacctaatttccaagcctggctgcctgatagaatgtgctttggtcagctagaattgataccatgttagagggtcagctgcacacaaaaaatggtgttgctgagagaaatggcacattatacctggta

SEQ ID NO: 9975 - DNA, 374 bp, Homo sapiens
  III.3603 (AI678456)
  misc_feature (314)..(314): n is a, c, g, or t
taaagagcaatagttccttatgttttattttggtttttttaccattataatatccagcagctaggtgttggtggggcctggtaggcatccaggccaggctaaggcactgaccacactcagaggggtctgtagcttgcatagaccccacctgcagagttgccacacattgtaccttatatatggcaggcttcactgcatctgggggttgctgagccagcagggcctcccgatggggtagactgaatagcagtactttcccgtctgagcaggccagagccaagagacccaaccggggcaggagaggagccttcccnagggtgcccttgagtcccatgctcactgggggcaaaatttgagtcccaaatgccaccgtg

SEQ ID NO: 9976 - DNA, 439 bp, Homo sapiens
  III.3604 (AI921270)
agcggccgcggtgggcgccgcccgtctcgggccccggacccagtccgcatccgtcgtccggcccgctgctgccgccgcgcttctacccgcgctacgtgctaccgctcgccttcggcaagtacttcgcgtccgtgtcagcgcacgtcagcatctggaaggtgcccgtgtcctatgcacacaccgtcaaggccaccatgcccatctgggtggtcctcctgtcccggatcattatgaaggagaagcagagcaccaaggtatacttgtcactcatccccatcatcagcggtgtcctgctggccaccgtcaccgagttgtcttttgacatgtggggactcgtcagcgccctcgccgccacgctgtgcttctcgcttcagaacattttctccaaaaaggtcttgcgagattcacggatccaccatctccggctgctcaacatcct

SEQ ID NO: 9977 - DNA, 424 bp, Homo sapiens
  III.3605 (AI569220)
  misc_feature (60)..(60): n is a, c, g, or t
  misc_feature (209)..(209): n is a, c, g, or t
tgactgaaaaaaacgattatttattcagagctttgtatttagtttatgctataataaatncagttgttataaaaatcagtctctctctctgcggtggagtctttcattctgtctaatggtgtggtttactccagtaatgttgaatcaaacaacatctttacaaagttccaggcattttctaacaccacagatgctattattctctgctntatacacagggcattagagtttacaaaatactttcatccttgttctctcatttaagcctcgttaacaaccttaggaggaaagaaaggcaaggattactgtctctcttcttttgatgaggtacaaggctctccagatgtctcagcaaccaggacacatggcccatggatggaggagctggattcagatgcaggtcctttatcagcgagatccctgc

SEQ ID NO: 9978 - DNA, 434 bp, Homo sapiens
  III.3606 (N59646)
  misc_feature (423)..(423): n is a, c, g, or t
gcatttcaatttttatttgttgccattgggtcacttttttggaccataagtcattcccagagctttctctgaatccatgaatgaaggacaaaagtatacatcccatcgctggtatacaacaataactttgaccacatgataggagaagtgagaaatgtagccaattttttcctgtagtttccatgtaaacatatggcagtttacacagaaactacagaaagtacagaaacctaaaatgaaaactaaaatttgttcccaggttgaaaagaggaaagagtttcagtgatagccactaaagccacagaagactttattctctgggaagatgtttttgctaattataaggctgaaatttactgggcacagactttttttgcaattggctgatataatataataaaacaatggtgtcgagcggaaccnctgtgaaagtt

SEQ ID NO: 9979 - DNA, 261 bp, Homo sapiens
  III.3607 (N78199)
  misc_feature (30)..(30): n is a, c, g, or t
  misc_feature (190)..(190): n is a, c, g, or t
gtttgaaggtgtgaaaaggacattgatgantgtgcctctgatccgtgtgtcaatggaggtctgtgccaggacttactcaacaaattccagtgcctctgtgatgttgcctttgctggcgagcgctgcgaggtggacttggcagatgacttgatctccgacattttcaccactattggctcagtgactgtcngccttgttactgatcctcttgctggccattgttgcttctgttgtcacctccaacaaaaagggggaactccg

SEQ ID NO: 9980 - DNA, 499 bp, Homo sapiens
  III.3608 (AI888259)
tttttttcttattaatatgtttattgagattataaaatataataagttatatatatacagaattagacaaaaataatattgacaattaagacttcactgtctaagggccacagacctaccctggggtgttttctaaatgttttaaagtattgcagaattatgaatatctccacacaaaaatggcaggatggagtcccagctttggtcagtgagaattattatgatctcattgttctgaatcccataacataggctaaagcttgtcagagtaaatcccatgtttccaaataagtaaatgacaagggaatttgtaactatataaggaatagctccctaaaaatggcaggtggagagccaatggaacatgagctgacactggctggccttacagccccagaattctaatagtgtgaaatgaggccaaagcaccaggagcagagaacagccaccccactctttcgctgaaaacattctgaggagggtgcaagctgttatcctg

SEQ ID NO: 9981 - DNA, 520 bp, Homo sapiens
  III.3609 (AI480296)
gaatactccatttaggaaagtgcttaatcaaagaaaattagccaataaataaagaagaaatgctaggaaaactattattttgcaactctaatgaaatagtgtatctagccaatgattattaatcactgttaaaatgatttggtgaaacttgatggagaagtttatgatgaaggaatcaggcataacacctgaactcactaattaattttagcatcattaaagtggggaactaaacatataattatatgcctatcattgtgacaaaataggaagtacacagtaccacccaaaaaatatttttgcctaaaatactgaatcaaaatctaatcgagtctctatatctagcgaattacttacaggaaacatgagagacagagaaactccaaatttcacgtgttttttcataggtcttttcaaacgtattgttcgtaagtaaccactgatcttattggtctaagtgagttaggattctgatagacccttgggggcaatttttaccagcttggtcctccagtttcat

SEQ ID NO: 9982 - DNA, 479 bp, Homo sapiens
  III.3610 (R86880)
  misc_feature (316)..(316): n is a, c, g, or t
  misc_feature (348)..(348): n is a, c, g, or t
  misc_feature (396)..(396): n is a, c, g, or t
  misc_feature (404)..(404): n is a, c, g, or t
  misc_feature (413)..(413): n is a, c, g, or t
  misc_feature (424)..(424): n is a, c, g, or t
  misc_feature (443)..(443): n is a, c, g, or t
  misc_feature (448)..(448): n is a, c, g, or t
  misc_feature (460)..(460): n is a, c, g, or t
  misc_feature (466)..(466): n is a, c, g, or t
agagtttgctttgtatatttatatattaagagtaaaaccagctgcatttttttttcttttttaccatttggctcatgactaacatttgcttttatagcagagaaaacataattttattttgaccaacatacttgttgcagagttattgtttatcttgctgcccaatattcatatatacttgcttctgataatagtaccctgattccccactctatccatatgttttggatgggagttgccctgcttctggctccaggaatagggcagtactcagccatgggccaaagtcatgggtgaatgggctcagggactaccntagggcatgtgggggcaattcaggggggtccngaggatggcataggggcagcttgcaggaaaccacaggggacacagggnttgaaccnaaggggganttttaaggccngggggcttgctaggggganggagnaggatccccaantccttntaggtttttagaa

SEQ ID NO: 9983 - DNA, 429 bp, Homo sapiens
  III.3611 (R86963)
  misc_feature (311)..(311): n is a, c, g, or t
  misc_feature (365)..(365): n is a, c, g, or t
  misc_feature (377)..(377): n is a, c, g, or t
  misc_feature (417)..(417): n is a, c, g, or t
tgaaaatttacctggcctatctgctgaagattttgtcaccctttgtatcatacatagatatcttgattttaaaatacaggccacgcacaagcaaagagagctggctaataaatcatgggaagatttcttggctagaacatcaaacgctaaaacgttaaagaaagcaaaaaggcttcaagaaaaagctatagaagcctccagataccataaacgaccacaaaatgcaatatttcaccaaacacatattaaaggccttaacacaacggtgccctctggtggagtagtaacagtgggaaagcactcctgcccgnttagtagggggacctctggttgatacgggtattggctcttaaaaaactggcccnttcgagggaggnggctttgcagaggggtgaaagcagtttaaattgtgggtgnaccaaaaaaggg

SEQ ID NO: 9984 - DNA, 482 bp, Homo sapiens
  III.3612 (AI632247)
tttttttttttttttttttttttttttaaggttttaggctttaattttttaatatcaaatctgtctctgaccttgtttcattatacataaggagactttgctgtcatgagcgtttctcacgtacaaatgcaggcaacagtgagaggaagttgtcttgtttttgaacaggccttgtttttcttggatgcttttgcttaaaatccaacagccaaatgaggaaacttccagaaaacttggtcatcaaaatatttagccacatgaggtgctttccatattttgagatttaggagcaaacctgtcaggagaccagacgtgagagctatcacgatggccaagctgagttccccaatgctgaggaggacctggaagccaatcgttgaagatattactgatgaccatcctcagggtgcctaaagctgtcacctccaccagcaccatcaccaccaactgcgccaagttgaccttccccaagacagcacccg

SEQ ID NO: 9985 - DNA, 103 bp, Homo sapiens
  III.3613 (AI687863)
tttttttttttttttcaggtttccctttatatagcgttttcttctcatgttattctcaatccctattagcctcctataagaaaggacttcctgaagttcactg

SEQ ID NO: 9986 - DNA, 442 bp, Homo sapiens
  III.3614 (AI587553)
caatctgtttaataatttatttaggaattcagttgccatgttttgtcttaagagatagccatcttccccttcaagaccaaatatatgaaataatatcatttatttaagtgtaatgtagtgatgtgatgaatagaaactataatttaataacaaagcattgcccaatacaacacagacaaatttatggtttagttataccaaatattaaaaccttatgatcagatactctatgaccaattcttcctcatagtttacgattactttccctttggtctatatattttctctaggactaatcttttttacttttacttagatattattagatagagttctatctttggcaatagctggctaggttattttggagtaatcctggcactgataagaatcacacaaaatggacaaaatataaaataaacatctgttcaaagacatcaga

SEQ ID NO: 9987 - DNA, 592 bp, Homo sapiens
  III.3615 (AI798184)
  misc_feature (538)..(538): n is a, c, g, or t
tatttatcacattaaaaagtcatgcaaactttattcatcatagaattagaatgtggttccatccataagccagatagaatgaaatgtaaacgtaatgctatgcaacttaaactctgctggtcaagggagtgtcttccaaccatctcacagcaattccattttattttctttctaatgttatacatttctcctggtcatattcaactgtaactaatttttacataagtgtatcctgtattgtcctctttcttggattcttcctttatctcgctagaatattgttgcaggggtgggaggcaattctccatgtgttatccaagactctcttttcaaggacatttgtacagcaagattagtgtcttcctctgaggcagagagcaagtttgattcctgaccaggataataaagatagcttcttcctccataggaaaagttggctgggttactggcagacttcttaagattggggtttccctaacttcaggatcctttgctgtgaatgcagacccactgtaaacacagcaccagccccggcagncctgcgtctcccctatggaaggcacaaggtaccaatgcaaacaagaagctcatg

SEQ ID NO: 9988 - DNA, 536 bp, Homo sapiens
  III.3616 (AI378916)
tttttcaagtgcagaaaaactaaaatttattcagctaaaagcccattatgttggccattaattgaagctgaaaagcaaaaatatactatgatctacgatggttagcaaaagcgtaacttctaattatttaagttaattattcttatggtagaaaattacatgttcattaatcttatgctgtgtatatagcagagtggcaaaggggaaaaatgacttatctagtcaaaacctaagttacattgtgtctgaagaacctacccattttggaatttagaaatgaccataataggcccaaaggattcctctttggcgaggtacatgtagtcttccacatctgtgaacacggtcggctccatgaaaaagcctggcctttggacttgtcttcccccgtacaccaaagtggccccttctttcactccagtttcacagtattgcagcagcttttccagatgagccttatgattttggggcccatgatcagtggatctgtcaagtggatcaccaattttcatctttttaatttcttctaccactct

SEQ ID NO: 9989 - DNA, 349 bp, Homo sapiens
  III.3617 (AI380576)
ttgcataaactgccctgacttgggtttctgccacttgcaaccaagagtccgacctaccctcccatcagtatcactgacctttgcctcagaggccagaaggccaagcttccaaggaccagaagaaactgggggctctaggagtcacatgtttacattgcagagaaggaaatgaagaactcggagaaggcaggcagaagcaaagccaggcagagatcctcagattcagctcccaattctccgtaagaaacgagactcccttccaagcgcggtagctgctcttctgtgtcctgcgggtcttccctgcagcccctgcgaacctcgccccttcctctactcccctggcccggaa

SEQ ID NO: 9990 - DNA, 537 bp, Homo sapiens
  III.3618 (AI674757)
  misc_feature (237)..(237): n is a, c, g, or t
gttttttttttttttaacaaactggggagaatacctacacccagatcaagcagtgctgggaagtcctggatacagacatctggagtcctagttggaacaggtccccggcagtgtgtccactccatgggtgagacttcagagagcaattggagggtcccagcttatattaccagagcgaaccacaaggtctgaaggacagccacgggggctttaccttcagggagttctggggatggntaatggaacatggtgtccctaggagcaatagtcaacaagggtgttgctcaccctagctaaaattaacagctaacgtgcaaatgtgcagctctgaaagtttaatcaataatgcttaaggttttactttgtgtgtctcaggatgttctgaaacctagagaactggccagattctcgaggtttgagaagttccacagcatactccctttcttatctgaagtttctcaggactagtgggtgtttgttctccatgtaggctcatagcccacatggggtcatttgttggtcacaggcctaccattg

SEQ ID NO: 9991 - DNA, 508 bp, Homo sapiens
  III.3619 (AI810114)
tttttttttgttttcctcacttttattataaaatgaggaggcacatagctctcacagaaatatcagaaattaaagtccatgccctcataaaacaaatgatgttataagaaataatgcaacttagtttccaaatgaaataatggccattttttatatttacaaaaattcagccataaaaaaattatatcttatgttgatacaataaaaacacaagtcaattaagtcattagctatagaaatctctgcctctttgtatgacagtctgtaatttttaaagtagtattatgcacatacctttttcagggtgtagtcttttataagaatctgtttttgatagactggggtctgttataactcttgatcccaatttaacagtcagatctattgagcggtaaccctgaggaagttttcggtcatataggagagttaaaagctgggcaagtgtcatttcagctggcaatggctggcctaaaatgatataactaagttaaatctggaaaccgagaaa

SEQ ID NO: 9992 - DNA, 318 bp, Homo sapiens
  III.3620 (AI933610)
cagtacaaataattatctgcaagtatttattccataatttgttactgagagcctactaaaatagtaatatagagcacaatatagcaattattatcctataaaataatagctatatctatacaataacaatagtgatgatatttgtacaatccactctgtctagcactgttctaagcactttacctgtattagctcatttaattatcccaataaccttttataagcaaatattattaaaataaggacactgatatacagagagtttaagaatctgccaaagtcactcaggtggtagatagaaaagataagattgagcat

SEQ ID NO: 9993 - DNA, 420 bp, Homo sapiens
  III.3621 (AI914925)
ttttttggtagagactcagtctcaccatgttgcccaggatggtctcgaactcctgggctcaagttgtcctcctacctcggcctcccaaagtgctgcgattataggcatgagccatggcacccagcctccaggtgactttcataagtgttgtcttccttcaagtcaacttatctcctccttgccccccacccacagactttgttcctttttcatatttgttcttgcctaaaatgcttttttctctgggtggcgttatccatccctttcttgtgtctgtcagacaggctctccctaaccccacccctagtccaatgactgctttcactctgaatccccacggtacatatataagcatctgaggctctttcctattggctttgattctacctccttcacttgaggagcagctctctgctggca

SEQ ID NO: 9994 - DNA, 571 bp, Homo sapiens
  III.3622 (AI674070)
  misc_feature (510)..(510): n is a, c, g, or t
catatattataaaatatttccaaatattgtaaaatctctcttcaaggctgattgccagaaaaaaaaagtaaacaaagcagagagcctgtgtgagaagatgtcatggagggaggggatgtaaagtgaatgtgcacaggggagaagagaactgaacagatacgagtccttcctctcctttctcatctccctgggaggtcccacactaagaggcaggcagaagcagcaaaggagagcgccttggcctagacaaactttccgaggctgcagtggcacctggcaggctggggacaatgtgacaggcctgctttgccttcttctccatgacctctgggagaggagttcactctctttgctccattgagttccagggctctttgcccaggctcctacaagaatgccaggctgtgccaggtgcggaggtggtatttaccatgcagatacctctgtacctggatggaaataaattgagaatcttctgggtcactttgagtccagcagcataaaacattntgataggttactgattcaaactgaaatctgatgaactcaagtggtggtatttggggggaca

SEQ ID NO: 9995 - DNA, 728 bp, Homo sapiens
  III.3623 (AI811832)
  misc_feature (597)..(597): n is a, c, g, or t
  misc_feature (728)..(728): n is a, c, g, or t
ttttttttcaatgttccattttgcttttaaaagcttcacaagaacatttcatttattaaaatagtttctgtaaactctttcagaataacaaaattcacttgccttgcttaaacagcatttcaagtagaagtatttttatttcaaggcaccataaaatgatgatctctctaagaaatacctctccttccgtgtgtgaaaatccttgggggaaaaaaaatcccacacggtgttcttggccatcaggatcatgaaaacaaactttggtgaatgtgagcaactgcgccagacaggacacaggttacagggcctgacgtcactaacggtaactgacaatcttggaatggaccctactgctgatgtttcaaaaggacacagaggtgaactggtcacttctaattaagaagagccagtggggtgggggaagctgaaaaccaaaaatccacgtagacatacgtgggcagtgtgaacgtctgtcctccccttccttctcctcacttcctctcctcctcctcactcaggctgtattctcctggggtgcgatgcagcttgccctgcagaagggctgccagtttttagatgcttttgagaacgagctgnccgatgggcactggtcacgtcaggtcaggccttcctggtgggggccggagccgcattctttgcaacgtagagtgtcccgcggtgctataggcaactgtgtgcaccccccatgattttttcagtggactcan

SEQ ID NO: 9996 - DNA, 336 bp, Homo sapiens
  III.3624 (AI917445)
gtggctgcggggatctggggccaggctccagccggcaaacggcgggacgccgccgggactctcgcgggctttcccccacccctcgcgggctctttgccccgcgaggatcggtcccactgctgcgccgatggaggagacgcggcgctcaacgtccagtcctgcttgggcccccgctgcctcaccaccttgagaacatgtcccctctgtagctgcagggcgcagatcctggggagagcgcagcagtttcgcgctcccggtccagccgctgcgtccacctccaatcactgcgagttctgatggcctcgaggccgggacccaggccgggatagttcgccg

SEQ ID NO: 9997 - DNA, 394 bp, Homo sapiens
  III.3625 (AI357930)
  misc_feature (270)..(270): n is a, c, g, or t
tgaaatttctgaatcaaatttaatttcttttatcatcaaaagttaagacatatttccctcagtcttaggaatttttattgttaatacaaaataaattatacatgctgtataaatttttatttatagctaaatatttcttcagtcatcactgtcacttcctgattcactcagctgcaaatcatttcttaaagtattcatcagaaggccactgttgtctcgaaatctattatgactggcatctatatcaggaatcctgtactgtgtcatggntagatgtcctgagacacaattccctgtatcagaagtagaggatttgcaatcttcatcttctgagtcactagaactatcctcactacttgaagatgatgaacttttggaatctgatgaactatca

SEQ ID NO: 9998 - DNA, 415 bp, Homo sapiens
  III.3626 (AI583524)
ttttatggacagggtagtcaaatttatttcaaaacaaaagctttgttgggctgcatcaaatgcaggagaaaaggaatacttaggggcatggttaaattaccagtgtgcgtaacagtgaggtatgcctcaaataagcctttaaaactttataaactgaactagaacatacccatgcagtaatattttttcagtgctactaatgaaaaaaaaaaattaaagcctgcactggaaatttacaatatggcagaatttgttacttttaccttttgaccctaatgtacagattttatgacagggtctgtgttaaaaatctaaacattttcacaagattttaaacatcactggaaagctgaatttagaggaaacaatatcagataaaagtacaatgcccgtgacagccaacattatgtaactg

SEQ ID NO: 9999 - DNA, 495 bp, Homo sapiens
  III.3627 (AI697090)
tttttttttaattatttctgctttattattggtcatgaataaagacttcttttaaaaaataattacaaagaatttatgactaaaatatactccgtaaccaacttgctctgaaattaataatttgaaaatggcaaagaaaaaaaaaaacagcccacaacatattaacttcactcttcaattaggggaaataaacaaggtcaaaattagtttaaacaacatactgagtaataaaaaagttgtgcagaagtcccaatgcctccaaaaaactgatagaatgtgcttaatatatatatccccacatggtaacataaaaaatccaagttttccagtaaaaatgttctgttcatgttccaatacctaaatctgggaaaacaaattcaggcagatgagataagaacgtcaccacaataaaataaagtcatcaaaacttagtgaactaaaatttaaaaggtagaggaattatttttcctaatttgacctaatttgaccacacag

SEQ ID NO: 10000 - DNA, 430 bp, Homo sapiens
  III.3628 (AI493300)
gaaattggagaaactttaatggggaagttttaaaaactctaactaaattacatcacttgcttttagataaaaatgagcccaatctcgagttgctggcttgaaaacattttgttcattcattcatgaccaatggtgagcaggtacttggcatcccagtggtttcatatttgaacttcatcttctgctttaagttcatggcatgtaccactgatgtgtgttcctaataattctccttctctcaacagtggagacaaggcaggaggctgcatcgtcaatagggaaagagatggagaaaaattgggagtcatgccttctggcagagaaccaagatggtaggggatgggagagcccgtgtgtttcggaggcacctgccccaggtttactgccggcattcttggtgggactgctttaatcccaggctgggctactg

SEQ ID NO: 10001 - DNA, 586 bp, Homo sapiens
  III.3629 (AI457943)
ttttttttttttttttttcaggataaacattcaactttaattgcaaaggaaagggtgactatttttaatacaatacttacaatgcaatactatttacaattctgtgtaaatagaattcagaaaatttaatttcaaatcccagttaaattgaagagaggaaaaatactaagacaggacctgcagttccaaattattcttttcaggtggtaaataaaattagctttttgtttcactaaagatagagtttcaaataagtaagtatatcagaaaaacaaagtacctgtgagtttgattttggatagtcgagccaaaattcctggcaaatcatacacttgcagcttcatctctttccaccgcttttcctcttttgtctctttccctacatctattgagtcttcaattactgagtctggctctagttctatcaattccttttcattgggctttctggacaaagataggctgcgcggtgagagaggctcatctcatatatttctgctttggcttgacctgaagatgttttttcaaggaaaggagatgctactggttctggcttggtcttacttgctggtgtggctctgttcag

SEQ ID NO: 10002 - DNA, 542 bp, Homo sapiens
  III.3630 (AI678083)
  misc_feature (507)..(507): n is a, c, g, or t
gcggccgcggcggccttggggcacccgcagcacctcgtacctgtctgcaccgccaccacctacaacgtggcggacccgcggagattccactgcctcaccatgggtagggcggggtcttggggcacctgcgctccgcgcctttcgcgctcctggagcaaactttccacctccagtggaggaagtgggagcccggggacagggtgaagagagaggacgggcttttagtgtaactgtagagtcagccacagaagttccacgaaagtggaagttagtttgccagcttctccactcagcctggtgcgttttactcctagtagtaggtgctcgagtattgccttattaatactggggccttagggacctcgaacgtcacggcggagaaaccagaggttaactgcttgggatttggggtgggtgtgtttgaacctgtgtggcatccccgcgtcggggcggctaaagcgtcttgacgtttttggctaagcctgcgcgcttctccgcttggctcanagggaggcgatcagatagtgcaagcccccatccct

SEQ ID NO: 10003 - DNA, 515 bp, Homo sapiens
  III.3631 (AI748859)
gcttgtgtttttctttttttttttttaagaggtacgatcttgctctgtggcccaggctggagtgcaggggtgctatcacagctcgctgtaacctcaaactcctgggttcaagcaattctcccacctccacctcctgcatagctagggctacaggctaattttttttaaattttttgtagacacagggtcttgctatgttgcccaggctggtttcaaactcccagcctcaagtgatcctccacctcccaaaatgcttgaattattaggcctgagccaccatgccagacctgcttgtgcttttgatatcatatttaagaaaccactgcatatcccattgtcacgtttactaagtttccaagaattttatagttttaactcttacatttaggcctttgatccatcttgagttaattttcttatatggtgtatgaggtagtggatggtataactttatttactcatttttctcagggcagggtatagccccagtggatcgaggtcagagctgtgggaag

SEQ ID NO: 10004 - DNA, 387 bp, Homo sapiens
  III.3632 (AI697177)
  misc_feature (222)..(222): n is a, c, g, or t
tttttttttttttttttttttttttttttttttttttttttttttttttttttttttttgggagggaaaccggtttttttaaaaaccaaaggggccccggtccccttgggaaaaaaaaaaacggggttccccctttaaaaaaaaaacccaattcccaatttaaagagggctggctttcccaaaacccccaatggggggggggggttccggtccccccccccngggttggtttaaaccaaccaaccaaaaaaaaattttcagggggtcctttcaaaaggcccgttaaaggctggggggggttttggcaaataagggttggttttcaaggggcaggatttaaacaaagggccgggcctctttcccccaagggggggggggggttttttg

SEQ ID NO: 10005 - DNA, 531 bp, Homo sapiens
  III.3633 (AI889292)
accaaaacaaaagccatttaatgtagagaacattgaccactaaaatgtacttagtacatcagaaagtcatgcaaaaatgtagtcaaagatctatttcctaacacaaaccattttctattcccttaattatgtgatttaaatgccaagaattatcttagcatgcctaatttcctaaagcagttttctaaaaatctaattttgacttataaaggtattactcatttgctctaaatgtggtattgagttatagagtgagtaacaggtaagtatttgattttagtacaaaagcttccactacttgtatctcttcctccttactagtagattataccttgaccagattagattagaaattccctgacgctgggaacgccaccttgtcactgagactgaataatacaaaatttaaaataactatcttatactactaagggaaaacagccaagtacaaagtactgggtatattatggctccatctatgtaataagggaggaagagatttcatatatatatatatataattcatatttg

SEQ ID NO: 10006 - DNA, 354 bp, Homo sapiens
  III.3634 (AA810126)
ttttttttaatcagttaagattcttgttgacacaaattgttttacatcaactgttgttatagaacacatgaaaggaatacatggggaagaaataaagtagaacccaagagttcttttaagttttcttttatagagacatgaataacagatacactgaagtataaacaaaaattggcctgaagcgtccggtggctggcttcgttgggaactatggctaaacgtcatcccgatttgatcttttgctgcaagagatctggtattgctatcggaagactgtgtgaaaaatgtgatggcaagtgtgtgatttgtgattcctatgtgcatccccggactctgatgcacatatgtgatgag

SEQ ID NO: 10007 - DNA, 449 bp, Homo sapiens
  III.3635 (AI457431)
tccatcttcatgcatacaattttatttttctcttttgggttaatttttaggctagtcctcgccaagtcagcctaaaaccaccagaaacaaacccagttgttgacttattccaatgagggaaaccacccagcagaggaactatagtgatctggctgaacaaagggaaaggttattaaagaattgaagggaagggtggagttaggtgaagtgtaaagcaagcagtgttttgaggcaagcaggctccaagtatcacagggctgtgtatgaagggtccgcttcaggtctggacggcaaagtggacctagagtcttgtttccttggaaacagaggctgacgataacgaaggctatcctccatggccacctcctccaggctgccttcgtgaccactgcagctgcagctcccgttccactccttgtcctgggctaggtgggcactaccaggggctc

SEQ ID NO: 10008 - DNA, 489 bp, Homo sapiens
  III.3636 (AI681180)
tgcaatcacttaaaaattttaaattcactcagcctgaagcccctaagtaggctagaaagccagatttggcccaagggcgggaaagttcaccaatccctggtttaaaaataagcctttgctaaaatttttctaagtgactatgtgctaaattaatgttgctcaataaactaaacaatgatctcttatcaaattggtaaagggaatttccacagatgttattaggatacagggaacagagagaaacctaccacacagaatttagtggtctgattaataattaaagttgtatgaaactggcaagaataaaaccacactttgaaacccattctaaatctatcgctggttaatgacagaggtgggcagaaaaagagacaaaggctcgaccatttatggaaacaatctcacagaaagatgagccttaccggtaacccaaaatgtactgccttcttcacagaatgctccagcagaacatagctatcggatctcttc

SEQ ID NO: 10009 - DNA, 542 bp, Homo sapiens
  III.3637 (AI828012)
ttttttttttgttaaaaatcgatttctttttctaaaccgacaatgtatacaattattaaagggggaaaaacacttctgaaatgcaaaacatggaatcactcttgcagagataccagagatctctgaaagctggaagcgtgtctcttctctgaactcctagtgcctaacaagcagtaggcagccctcattactgcctcttggcaaaaagggcagaacaaacagcttttggtaggtctcgatcaaaatggtaacaaatcacagttttaataaaatggcaaatattctaactgccaactcttggatgtttgcattataaaatgaagcaatacaaagataaaggcaattttctgtcttcattaaaaaaaaaaaagcaaccttaatacccagtggcaaccctaagttatgaataaagcagcagcacagaaaatgctgcttgggttccctttcccaagctgtccagcctcggcggctccgttcttgagctccaagagtctgggcacaaaaagccgcgtggccctggatcctgcaaattgggaaacggg

SEQ ID NO: 10010 - DNA, 472 bp, Homo sapiens
  III.3638 (AI369356)
tttttttttgagacagagtctcaaaaataaataagcaaatacacacagacacacacacagtcagatgtacctattgaacaaaaacggggtcacacttgcttttttcactaatgaaactttcctttttctactttgcatacttatgtattgtctaagttcttaataatgagcgtttggtactttttaaataaaaaagaaaaaccaataaaataaaaacccaaatctctaaccctatcagaactaaagcctgtcaaaaatcacgtgttctaggccaatgagaaccactgggccttgtgggggggtgccacacagttcctggctggttgccatccccactctgtccccagtgtcctgggtgagacagtgccaaagggacctgagacagggcagccctggcctggcgctcaccctgtccaggctctctggggtttggacaagcagtgccaaagcccagctccaagtctgttcctgc

SEQ ID NO: 10011 - DNA, 488 bp, Homo sapiens
  III.3639 (AI524196)
tgttcccaggctggccttgttggggaaggtggactttccctggtggtcaacatcgcacctaccaatcaaatcgtaatttcgtcgttcgaggcccgtccctcttccggacgcaattaccaatgagaaatgcccttccccgacgtctttttacctgattggtgcgctcatcagttcccggaatacctttcctacaacagattggccatcgcggtggttggcctcgccccacaaagcgaggcgctggagaagacttgaagatcattggtggaagtggatgtccctcaaaggtctgcgctaactgcctcttgattggttggaagcggcacttactacgtggcggattctgactgtgaagaggactgtcccaagtgaagagtgggaggcaagtgccttgtgaccgggaggaggtcgaccttaaaggagctggtattgtagctcttctaaagcctagtctacttaggaaggcaaaagcgaagcagcaagaagtg

SEQ ID NO: 10012 - DNA, 431 bp, Homo sapiens
  III.3640 (AI493466)
catgttataacatttttattaaatcaatttttatccaatattaacataacattacatttttaatgaaaaataactatttgccaaaacaaaaaagaatggcatcattctacatttttgcaaatatgtatagcggggctcattaggcaattgcctggactctcatcccagtccacttctatttattagctggttagcattgcagcaatcatcctcattctaatgtatccattgtccattgctgagagaaaggaatgtatgaactctacctaatgttggtgagcagtgtgccttatatggtttggctctgtgtccccacccagatctcaccttgaattgtaataatccccacatgtaaagggcaagaccaggtggaagtaatcggatcatgggggcagtttcccccatgctgttctcgtgatgagtgactctca

SEQ ID NO: 10013 - DNA, 412 bp, Homo sapiens
  III.3641 (AI932375)
tttttgaagatttactcacaatttaatagtaatcacatgtctgggaaaatggaagggttagaaatattttccacatcttttttggtagtcacctgcattctgataaatgctacaacctattcatcactgagtgttttgtttgctgttgctgcctgtaggatgatatattcttgagctgttgacatctagctgtattatctgctttggccaatgaaatgagagctcaagtcacctgtgccacctaggaggaaaagctttaagcgccattttatggcttcaccattctcatgtttccttctgccatgaaaacagtaacgtctcagaggccaggtgctctacagcgtgggtctcaccatgaagaagtggagcatagcccacagccaaccctcaatggatgtgttgttgaaagcca

SEQ ID NO: 10014 - DNA, 483 bp, Homo sapiens
  III.3642 (AI811226)
taaaaggaggaaaattttctatttattaaatagcataaagataccaaaattgatgaatgtatgatttgaaaagaaacctcaaacttaagattatgcaagcatcaatattgagaagttattaacagagagaagctggcagtgcattgctaaaatatactataagcaaatggattctattctagaaacacaaagttgatcagaaaatctactaatattaccatcgcagtaagttaaggggaaaattaaaatcacttcaattacatgaaaaaattaattttaaaatatattttagattttataaaaatagcaaatttgtttgctaccttaacatgataaaaaaagaaaaccataggattttaaccgtaaagccagtgtgcttcttaatggtagaatattaggaggagttaggaacaagatatggatactgacttacatcaggatttttaaaaattggactaatattagaaatgcagaaactgcaga

SEQ ID NO: 10015 - DNA, 238 bp, Homo sapiens
  III.3643 (AA705852)
tttttcatatacatctattttattgtgtactagattctgtatagattctggggaacaacaatgtaaatgacaagatccgtgctctcagagctcacagtacagtagcaaaggcataccagtaaagaaagaatagcttttatctatgaaaagacagtacaccaatagactgaatgctatgctctagagaagtaaaaggtgttctgaaaatggcagtttgtagagaaatgatcttaaggag

SEQ ID NO: 10016 - DNA, 460 bp, Homo sapiens
  III.3644 (AI360224)
gaagtagtccatgatacagtttattgtgctggcaatcgatggagtgttccctctactctcctcctttcctcttgccctctcccaaccttacctttcctcctgtctcccactcttcttcctcatgtattccaagctgcagaggaccaaaaaaagaagaaagaaaaaaggcacgtttgtgaaggcaaagaaaaagatgggttggcatgtgggaagaggattgctgctttgtctcgcccacagagcgggggtgccttccttgtatgtttctgtgcctggtatgtgggtacaatttgctgaaccccagacatatgacatgaccctcctttccctccatacccccctccccaccccagacaattaaggaatggaacagaagcctgaggaggggacaacagagggagggaggactgaggtcagactggtggaggaagcaagcaagctgaatccccaggggccagag

SEQ ID NO: 10017 - DNA, 454 bp, Homo sapiens
  III.3645 (AI939579)
  misc_feature (5)..(5): n is a, c, g, or t
  misc_feature (20)..(20): n is a, c, g, or t
gaagnagttcatgatacagnttattgcgctggcaatcgatggagtgttccctctactctcctcctttcctcttgccctctcccaaccttacctttcctcctgtctcccactcttcttcctcatgtattccaagctgcagaggaccaaaaaaagaagaaagaaaaaaggcacgtttgtgaaggcaaagaaaaagatgggttggcatgtgggaagaggattgctgctttgtctcgcccacagagcgggggtgccttccttgtatgtttctgtgcctggtatgtgggtacaatttgctgaaccccagacatatgacatgaccctcctttccctccatacccccctccccaccccagacaattaaggaatggaacagaagcctgaggaggggacaacagagggagggaggactgaggtcagactggtggaggaagcaagcaagctgaatccccagggg

SEQ ID NO: 10018 - DNA, 443 bp, Homo sapiens
  III.3646 (AI610250)
taaatcagttatattaggcagcaagcattctttttttttttttttttgaaagagtatttggccactgcggacactaaaaatctttctattaagtatcgaatttaatatattacaataaaataatttgaaatcaaagagaagacttcctatatggcttagttgcaatctatcaacgatcatgtgcttcacagctgatgtacatttaatattctactatcctgtttagagactaaaaaaaaaattaaccccttttagcaccatagcttgcacataattgcagtcacaccttcaaaagtcattgaaaacttgagatttgaaggtgactttttagatcaaaaggtaaggtgaaagtcttgaagcagtcaatttggaaacccccaggagcagaatttggcatatcaggacaggttttttcttcttcagcaaacattatcttgggacat

SEQ ID NO: 10019 - DNA, 465 bp, Homo sapiens
  III.3647 (AI925185)
ttttttttttaaatttagtaggttttatttttatcactaggtcagtgattctttatagaaaataacatgttgaaatttaaccttaaaaaaagacaagatgaaaataatatttacatggaagatatacttaaacataaatctcctgaaagtgaataacactgggcaacatcaaaaagaggatgtgatttggaaaagtagtaaatgcgtaagaatcaaattatagatatctatttaacccatgttctagaaatatgtttaaataaggaaagcataaaaattattttaccaataacttataatccagtacagtagagaatgcgaaatatttcttatatctcatctatggcttaactaactgatggcaccaccaaagtcagttccactgactggctgcaaatgtccgcacaagaatactgcatgtctggaagccagcacatatctatgctacttcgtgggtcaaaatgc

SEQ ID NO: 10020 - DNA, 211 bp, Homo sapiens
  III.3648 (AI804866)
atagttgtatttcaagatgattggtttcctttgtcatcctatgtattttaggtatttaaaaatattctgagaaggagcccataggtttcgcagattgtcaagggatccatgacatcaataaggttaaaaacccttgtcctaggacttctcttccagaagagagggagctgggagcttgctgaaggctgccaaaagagggtatgtagggcct

SEQ ID NO: 10021 - DNA, 457 bp, Homo sapiens
  III.3649 (AA813513)
  misc_feature (287)..(287): n is a, c, g, or t
tttcctatgtaccaggcactgtgctaaccacaggcttcatttaatcctcacaatacctgtgtaaggtattattaccaccactttgcatgtgaacaggctgaaattcagaggagtaaggtcacacaactagtaagtaggagagcctggattcaacacctggtatctattcccttgcgctgaacaactccgtgccctcactttcttcatctgtagatctgttactgctgctacttcctcgtttgacaccttcctgggtcagtgagcgatggctctccccggatggagtncactggtcaggccgaagcatgagctccggtcgctgcctgggagggacgcgggtgggtgcgggggcagagaccgtggcgttggagctggagctggctgggtggctgtgtctggtttctcggcgccaattcaccgtcttgggcctaggttccgtctctaaggaagagaagga

SEQ ID NO: 10022 - DNA, 547 bp, Homo sapiens
  III.3650 (AI597864)
catatgtgctccagcgggctgactgtgcagtcggcttcctgatggcacaatctgccattcatcctgtatccccagagctgagctcagggcctggtgtatagcatatgctcaggaagtgtttgttgcagaaatgaatgaatgatagtgagtgagtgagtggcaagtaatgtttctaggcccataggtccagggctgatagcttgcacaggtaagccgttctatacacttgcacttggcaactgggccacctttccctggggacagcagaccccaatgaactctggcacattactcactcttggaggggaggcaggaagggaaggagtttggagatagagctctctgagcagccacttggtcaccaggccagggcttgggtcattatcaccaaacttctcaggctgttgaattgggccatttatgtctgcttttgttttattttagtttggacggaagcccaagcatcactgagcaaagtcagtatcctcctataccttgctacttattctaagtgtgtttcatggaccagcaaaatggacctcatcta

SEQ ID NO: 10023 - DNA, 473 bp, Homo sapiens
  III.3651 (AI652774)
ttttttagtggtttatctatttattggtagcgttacataaaaataaaattatgttactaacacaatagtatagcaaacatacaaggtatttatcagccataaacactaatgaaatagcaaaatgtctgtttgttgggaattttgcttcaaccacatcaagaactcacagtgcatgccatcattcctttagtcttcattattcaaacagtgttcacgacaaccattatcagtggaagaaaaaacaaggcttataactctatactggtaagattcactttataattattgactggcttttgttgcttatttttctcttgtgttactcactgggagtgaaataagaaagaaatttcaccagaaggcttagaatagaaatgtggttaccagtgctgaaagtggggtggggagtgaaataagatgatgttggtcagagtacaaacctgcagatgaagtaagttctggagacttactgt

SEQ ID NO: 10024 - DNA, 331 bp, Homo sapiens
  III.3652 (R63837)
  misc_feature (8)..(8): n is a, c, g, or t
  misc_feature (12)..(12): n is a, c, g, or t
  misc_feature (58)..(58): n is a, c, g, or t
  misc_feature (290)..(290): n is a, c, g, or t
  misc_feature (301)..(301): n is a, c, g, or t
caagagtntgantctgctttattgtaaggcttttatataccaactcttagcccgaggntcctgggtgtgtgtttggtctgtgtgatggagggaggaagggacagatgtttttctgggatgcactggggaaggtagataaggatggggccgctgaaagagacagagaatgggactgaggaggcagcaaggaaggcaagggctctgaggacaagaaacagtcatggacgagcctgggaaaagagaattgagaacccttggggagtgggaaagggagaggacagttggggatngaattagggangatgagggaaaagttattgggttaagaaga

SEQ ID NO: 10025 - DNA, 434 bp, Homo sapiens
  III.3653 (R64449)
  misc_feature (230)..(230): n is a, c, g, or t
  misc_feature (277)..(277): n is a, c, g, or t
  misc_feature (289)..(289): n is a, c, g, or t
  misc_feature (379)..(379): n is a, c, g, or t
  misc_feature (384)..(384): n is a, c, g, or t
  misc_feature (393)..(393): n is a, c, g, or t
  misc_feature (400)..(400): n is a, c, g, or t
  misc_feature (430)..(430): n is a, c, g, or t
aaacaaacatggatgtgagctctgggcttcattccctggggcatccttccctatctctcccctcctcaggtgagttctgtctgagttagcagtgtccctcctcacctttcagagtgatctcacctctttacacactgtgctcctttccctctcattctcctccttcacctttcatgatccctccttcctctcaccccatcacttttccctcatcctcctaactccatccncactgtcctctccctttccactccccaagggttctcaattctctttncccaggctcgtncatgactgtttcttgtcctcagagcccttgccttccttgctgcctcctcagtcccattcttctgtctcttttcagcgggccccatccttnatctnacctttgcncagtggnatcccaggaaaaacatgtgtccctttgctncctg

SEQ ID NO: 10026 - DNA, 415 bp, Homo sapiens
  III.3654 (AI654990)
cctccttgaaaggtgcaacagaagaagatgaatcacttctttttttcccctggatctgtcatacaagaatcaaggacttgtcaatgactccaaacagcagggccttgacaactagtcaaagacaaagttgttttgtccagcatctctcctttctctggaagcattttcctcccaattaatataagttatgaggctgcactgaagagctcaataaactgacactgaaggacataagttgcttttttacactgaaaaccatggtaaactgatatatacagcttgtgtccatgaaggtggaggtgccagaacttctggtaacctctggctgcatcactgctgctgcactggggcagtcttgcattttctgatattctctcccttccctgggatgttccataaccctcagcctcgtgcc

SEQ ID NO: 10027 - DNA, 295 bp, Homo sapiens
  III.3655 (AI702158)
cctggattaattgccatttcagagtttgcatgaaaccatataacactattgagaagtttttggggaaggctatcggtcatttgaggattttgcctaccataagcatgcatcttttctaccgggaatcacgaggactctactggactgagttcagtggctgagacaaaattacaatagccaataacagtaacagcagcagcagccacaggttatcaagctgcttctatgtgccaaaaatgatgcagagagcttcacatggcagtatctcatctaatccttgcaaagcactgaatta

SEQ ID NO: 10028 - DNA, 450 bp, Homo sapiens
  III.3656 (AI355470)
tttttttttttttttcacagcagggagctctttatttaaggctgggtgggggcagcatgtgacagtcaagagggctgaccctggggctgcacggacctagataagatgcccagggccccggaatgttcacagcccacagccaaggggagcaaggggcagggaatgtcctgggctcaaagcccgagaccctgcaggggtgtccctgcccatcagcaaacagaataccctgacaccagctgctccccaggccccagccggcccttgttcctgacccaaacaagaaactagttcatggggctacaactccccttctacgggtcaaaggggagaagaactggactgccgttctccactggtggccggcttaaggccacctttccctgatgctccactggagctgccccaaccagaatgttactgatgtgcctgccccccccgaaacccaaagct

SEQ ID NO: 10029 - DNA, 187 bp, Homo sapiens
  III.3657 (AI610252)
agatatatatgcatatgaagtatggatgtatatattttaaaaatacacagacaccttttacaagaatatatgaatgcacattaattttttgcacacataattctgaaaaatcactttgattattcatgaaggtgtgtattttttaaaccatcatttactttttctttacttttttttgcaaagatag

SEQ ID NO: 10030 - DNA, 308 bp, Homo sapiens
  III.3658 (AI890712)
tttcatggccacactctgtttccatgtggtgcatgagagagagaggtttctttctctcttttacagaagaagttcaatattcctgtgaacggcaaaaccactgcatcccttcttctgggccaaataattattaacagttaacagttaaaacatagctcgttggagcgtgtaactccaaaggccaatcatacgcgaaacgaatggggtgtttcgccatagagaaaatgctgatttctataaaatgataaacaactattatttttaaagggcttttggacttcacttaaaaatgaaactccccccccgca

SEQ ID NO: 10031 - DNA, 515 bp, Homo sapiens
  III.3659 (AI690217)
tttacatgattttttatagcagctttatttttaatagctcaaaatggtaatcaaccaaaatgttctacaagaggtggatggttaaataaacggtgatacagcctcagcaataaaaagaaacagccattaatacatgcaacaacttggatggatttaaagggcattaggctgagcgaagaaaattcaatatcaaaaggcagcatattgtatgatttcccttacgtaatgttctgacaaaagttaagagagaacatattagtggttgccaggagttagagatggtggagggaggggctaggtgtgagtataaaaagcaccagggagatttttgtggtgatagaagagtttgtatcctgacggttacgggaatctacacttgagataaaaacatgcaaacactgtacctgtgtcaaattcctggttttgtattgttccgtagttaaataagatgtaatgaatgaaagaaactgcgtgaagggtgggtacgcaggatctttctgtattatctttgccat

SEQ ID NO: 10032 - DNA, 358 bp, Homo sapiens
  III.3660 (AA825303)
ttttttttttgaaggtcatcaagaatttaatggcatgcaaatatagaaaaacaggttcacacaacagtgaggacaacttgctgagggatcaaagtatagatgtagcataaagatattggaaatgccttgatttcttataatgcaaagttgttacattgtaacaaacatgctaaagaaaaatctacttaggatacaggtagaaaatatcacatgcagaaacattacaaacctatctgtaagcaaaaagactaagaaattactacttgagaggcattcttgtcatcgtcattacataaaatgaacagaataattacacattagaatcactatgttgcatttcataaatggtacagataac

SEQ ID NO: 10033 - DNA, 456 bp, Homo sapiens
  III.3661 (AI803162)
tttttttaaaaaattgggtaatttattaagcatgcagttttcgtcagtctctaaacaatataacaactatttacatagcacttacattgtaataggtattagaagtaatctagagattatttaaaatatacggcctcccatatatgtgcaggtcatatgcaaatactacactgtcttatatcgaggacttgagaatccaagaattttgcaatctgtggaaccaatcccctacagatacctagggatgacagtatacggtatcttcaccctgctctactacctcttcagcaattttttcctagaggtcacctcctaagtatacaaaatataagaaacaagggtaaattagcccaataatttgtagattttatttattcatagtacattctctttgggggaaattatcaaaatatttttataacctgttacaataaaattcttactttatctctactg

SEQ ID NO: 10034 - DNA, 381 bp, Homo sapiens
  III.3662 (AI650620)
ttctaggccatgtgtgtttattttcaccaaaggtctcatcactctactactcactactcatggagggtcttttctgcaatacctgttctttgcttggaagctactgcccagctctccgttatgaatttgaatcctttctacccctgcattcacctgctcttggtgcagcctctgaacctcttccagctcccgctggctcccctcttccaaattcttccggacaacctcagccccagccaaagcagcacgcaggccctcagcctcagctcggccggccttctccgcccgtgccagagcctctagctccatggcctgggcctctagcctcatcttctgctgcagcgaggtctcccgcaggagccggacctcctcctccagccg

SEQ ID NO: 10035 - DNA, 230 bp, Homo sapiens
  III.3663 (AI886705)
tttttttttttttttggctgggactgtgcctctgtgggggcggcgtgtctcagtgggaagatactctggggagccaggacgatgtcgtacgtgggtagctgtgtggacaagtggttgggggtgtgtggacatcggtggtcacaggctgggagagtggtgtagccaagagagggagcatgagttggggccatagacagcgacagtctctgggtggcatgaccccggagggg

SEQ ID NO: 10036 - DNA, 319 bp, Homo sapiens
  III.3664 (AI718330)
gtacataatacttttatttccaaataataaagttatgctactccaattatttataacttcctcatcatttatctaagtcaacattttatgttaaacacaagtgtactattacaaaaaatatttttaaaaataaagctaccccagccagccaagatgctgacatttgggcacagggattacagatggggaccatggacagcaatgttcttgctgattcggcagtgattcaaggctgctattctgcgtggacctgccctttgagtctttatgcacatttgctttgagaaagaaacctttctagatttttgctttgtctaaa

SEQ ID NO: 10037 - DNA, 501 bp, Homo sapiens
  III.3665 (AI342141)
tttttttaacaaagaaactatattgatgataaagtacatctacacaaattaacatgcagatagaaaccgccttcaacttgcttctttctcaccatcttcacagtgtcgacctttaaacccaaggggacagaggcaaatgtaggagtcggctttgattgctgtgcaggtgccaccatggatgcacgaggcctcatcacagattccactgctgcattcccccacatcagccccactgagtgcttttcccaggggccagggcctcatgtcaattctcctcccattcacagcgagcgactgcacacagccttgaaagcctcggtttgtccctgttgctctaaccaacaagtaagcgctgggagcgccaccaagatagagaggtgtccggaaagtaattttactgtattggccctgagactggcctgtcactggggtgccattgttcagctgcagcagcccgttcagcccatctctgtagagcataaccgtgtgccaaccccctag

SEQ ID NO: 10038 - DNA, 460 bp, Homo sapiens
  III.3666 (AI369353)
ggggttaaacagagcccgtcttcaaggaaaggcagtttattgatttagttgttgatttagttattgatttagttatgaagctgtggattataaaaaggctggtttgaaagaaggaagccacattctgtgggggcctatgactgacacccctggggagagttgggccaaggctagctggcctgtgagcctcatcagcactgcagggggcctgggagggtgtgcaggggggtcccaggtgcgccaggagtcagggtatgcagggggctccagggtgtgcaggggttaggagagctgagcaactttctggaacttatcccgggaactcatttccagagaccccataggctcactgcagaaccatgcttggtatatatggggcgtgtagagggcgcttggggaacagaatcctgcgtttcccccgagggagggaagacatgcaggggaacagggaggaaacgct

SEQ ID NO: 10039 - DNA, 420 bp, Homo sapiens
  III.3667 (AI478650)
tttagtttaaaaatgtttatttcgatcacttacaaacaccaattagagaggaatcctttttccaaagtcagttgtacatctttcaataccacacttttaatttctttccagtttttaatgcatgctttgacgctggtagtttatcttctgcaaactattctgagctaatttatgtttaacatcatttggatgtttttacaacttctttgtctttcttacagtcattggcaagtagatcaatttacttaggtcccttggtctcttgagatgtaggatgaaaaaatgtacaattacccagtccaggaggcagtcctggcagctgccctccacccaactccgcgctttttcacacacgctcgtggaaggagaaaaccgctcaaacaactggactcggcccgttttctttcggtaacctcccca

SEQ ID NO: 10040 - DNA, 446 bp, Homo sapiens
  III.3668 (AI708999)
ggtttcatttatttgggggatctaaaaatcaaaacaattgaacctatggagatagggagtagaaagatggttaccaatgactgggaaaggtagtgaaggggagttggggagggataatgggtacaaaaaatagttagaatgaatgaataaggcctagtgtctgatagcacaacaaggtgactataatcaataaaacgtaattgtacattttaaaataacagagtataattggattgtttgttacacaaaggatatgtgcttgaggggatggttactccattttccataagtttattattttacattgcatgcctgtatcaaaacatctcatacaccccataaatatgtacacctactatgtacccacaaaaattagaaattaaaaaataaaaaaaaatttactgcagaagcctagaacttaggcaagtcacctctttgttggatcc

SEQ ID NO: 10041 - DNA, 444 bp, Homo sapiens
  III.3669 (AI656723)
aaattaagaaaaaatttaatttataattggcccataataactgtatatatgtatagagtacaatgtgatgtttcaatgcatgaatacatagtataatgatcaaatcagagttaatgccatatcatgttaaacatttatcatttctttgtggtgacaatacttaacattttctcttctagcaatcttgaaatatgctctacattgttatttgctatacttactctactgtgtaacagaacaccaaaacttattttcctgtctaactgtaacttcgtatcattaaatttcgatgaagtctaatatcaagttttttcttttatggatcacgttttctgcatccagtctaagaaatctttatttagccccaggctgcaaagacttctagaggtttagcttttacacttacgttgcaggagttattattgtaggcagatagagaggaaa

SEQ ID NO: 10042 - DNA, 315 bp, Homo sapiens
  III.3670 (AI674665)
tttatgatttcacagggggattttattacttgcaccaagtaaggaggacactagggatagtcccaaaggcagtgcctccccaaacaaaggtgaacacccgggctagttagctgagtcattgtattagaggtggaataaaggcagtgcaggcacatttatcatgcttttacatacatcagatgtatagaaaatggcacataaactacttcctgggtggggattttagtatggtagtgaggagagtttgccagaagttcatctccagtttagtcatctctggacccaaccactgggctgagcttctttctggaactt

SEQ ID NO: 10043 - DNA, 283 bp, Homo sapiens
  III.3671 (AI609143)
tttttttttttttttttttttactctttatacatctatttatttaaaaacataaacaataggtacattttcaatggtttacaagcactctatgccccaggtactaatcaattttatactatatatatatatatatatattaatctatttaattcagggaataatcatacacagattaagaaactgaggtacagagaagctaaacagcttgcctcaggtcacacaatgcagtctggcagggtgaggagttgagcctggtctcctaaacctgcattcttaaacag

SEQ ID NO: 10044 - DNA, 464 bp, Homo sapiens
  III.3672 (AI356280)
gtgtggcgtgcgcagccagccattcaactgggcggtttcattcgcttccccactccaccgcgcttgtaactcgcgctctgattggcctccctgctcttgccccgcccgggtctgtccccccacttgttccctaggaatagaatcattggtctctgaaggtggagaaatgttcttgtgttgagctttttattttttgttttgtcagcagcgtcataaaaatcttgcagctgtatgaatatgccactgtagtgcttgtgctcctttctactgtacaatatttgttgaacgcagtagttgattgatgagtttcacactgatcttgtagataacacaataaagtgctttaaataggcacttttcttttgagctcggttaatcttgcattacagtctcatttcttttgtgaacttggttaatgtttctatataacttgcttttatctatagttacaggcagtgcaggga

SEQ ID NO: 10045 - DNA, 449 bp, Homo sapiens
  III.3673 (AI564593)
ttttttttttttttagatagaagtattcattttgttttatttttgtttttaccactatacaaatgagcaggaagcattcattttaaaatctgtatgtgttcatattcatttctaaaaaaaaaaactcttactaattacatagtgaaaacacaaatttcttcttgcaattaaacatttctcaagagtttgatgggtaaaaaaaattaagtttaaagattcatagaaaagaaatatttcttcgtaaaattttagaacagatatttttctgaaagcttccagcacaggaaaaaaaaaaattttgtttgcagtaaaaggattgacaagcagaaaggcatggaacttctcgacagcacattaggaaccagtagaaatgtagcagtgcctctacaatttagaattaaaatgacttccaacctataattctacacctagctaaactatcaaataag

SEQ ID NO: 10046 - DNA, 511 bp, Homo sapiens
  III.3674 (AI692774)
tgatattatttatttcttttataaatttttaatcaaaacaataaaacaacatgcttaattattaggtggtagttacacaggggctattgtttctgtgtattatttgtatttagtaaaggtttaaaggcataaaatagaagaaaatttggaaaaatatttggggtgaatgagacaattcaggaacaaatacagaaaactatattatcatatagcaaaaagctatttaaaatagagataagcaaactatagctcacaggccaaatgtggccttctgattattttttgtaaataaagttttattggaacacaacaatgtccatttgcttataggtagaatttctcaacctcagaactactgacattctggatgagactttttttggggggtgggggcagttgtactatgcattgtaggacgcttagcaggatccctggcttctgctcaccagacgccagcagcacccacccttcatactgaaaaccaaaaatgactctggacattgccaaatgc

SEQ ID NO: 10047 - DNA, 391 bp, Homo sapiens
  III.3675 (AI833184)
gccagtgggaaggtctttattccattttctggtaaacattccaatccggtagcatatggttatcaccaaagaaaaacaagatgtttttgatcccttctggtaatttgttctgggcaaacaaacttgtttttcctgagtccagtccttttgcaatcatgctgatttcatcctgtgctgtttattattctctctggttcttgaggcctggcctggcaagacagtcctattttaggagacaacactctcccatagcaatctttgctttatcttcggatacgtttattacctgagacactaggtagccaatggggcatatgagaaataccctaagctctatggagaaagaaagcgggagctccccacaggaaccagtaggaaaccacagagacca

SEQ ID NO: 10048 - DNA, 630 bp, Homo sapiens
  III.3676 (AI921858)
  misc_feature (604)..(604): n is a, c, g, or t
ttttttttattttcaattcatttatcaattgaaataggggcgataagttttttttaaaaaagaagatcactctggtcataatgtggagatgagattgcagggtgtgaggcagaagtccaatttcaaggttcctgctgtaggtgaggtaagagatgatgggtcatccaaaaactagaagaggagggcatacttcctagttcattccatgaggctagctgtatcctgataccaaagcttgttggtatcagcgacactgtttggtcgagcatcaaagatgataagcttgtgtgactgtgcgttagcatccattattgtttgcaagtgtttttcatcctctttgcagcgcttatcattgggacccacaagtggctggctgcaacgggtaatcgttgcttgactttccggatgaatccatgacaacacagggactctgccttttgctcgaaaagctgccacttttgaaaggtcatcatcttttacactagttggcacaacaatgatggcagggtaggtgtcacagaactcataattactgtttattttagatattttccaactctcatttggcaagccctgtctcttatattcagatactggatcatanactttccagccattaattgcaaattt

SEQ ID NO: 10049 - DNA, 429 bp, Homo sapiens
  III.3677 (AA938326)
  misc_feature (418)..(418): n is a, c, g, or t
tttttttttatcactttaaaaaatctttattttcccacttatagaacattaaatacattttctgcaaaacaaacaaacaaactaaaaacttggaaaatataaaagcacctttaatcacaccactcaaaggaatactgttaacctccaatggatgtctccattgcttcttcagtagaatccccccaaaaatgtttttatgggttgaaagcattaaaaagagtctctatttgggtagactcatttctaggtagtgagattgtatcttactcttcatggtatcaaccccaagagctgacacatactatgtgctaataaaaatgtttaggggatagttcatcagtcttattagaaatcagacaaaatcaaaatatattaccaaatgaactcaattccccatagtacctgctgtgaagcggancatttagaatg

SEQ ID NO: 10050 - DNA, 557 bp, Homo sapiens
  III.3678 (AI570497)
ttcttctttctttcttctttttttttttttgacattctgttgagggtttttgttttgttttgttttgttttgagatggagtctcaaaaaaaaaaaaaaaagaaatatgatttttaacagaatatgaggtaattaaaaagcaatccaactaaggtgacagtgcatccaccttgggcctggcactagctggaaatcactgctccacttgcattaagcttacccgtggagaagccctggtcccaggattttaagggtgctatgcgctcagtctccacagcacctcctctggaggcgacctctgctgacactctcttcataccaacgaggtgaatttgcccgggttacttcctggtaaactacgaagccacagtgtaagcctaggcctggggacaggctagaatgtaagcctaggtctcccacaagcccgcgctcttagtgcctggggacacagcccctgacctcaaagatctgcagaacgtgaaggactagattttgaaatttcacctcataaaataaaataggttccaataagtcattaggtctcaaagactcatttag

SEQ ID NO: 10051 - DNA, 454 bp, Homo sapiens
  III.3679 (N33202)
gctttttaaaagttttattggaacatagccatgctcatttgtttacatattatctatggctgctctcacactggaatggcagagttcagaaattgtaatctgtatacctaatgtcatggaccacaaaggctaaaatatttactcgactctttacagaaatgatttgccaacctgtctagattttttaaaaatagaaaactgacattaaaaataaaagatgccccaagataattgaaaacatatctacacaaaaatctgtacatcaatgttcatagcagcactaatcacaatagtcaaaaagtagaaacaacccaaacatccctcaacagatgaataaacaaaatgtgatatacccacacgttactcagctagaaaaaggaacaaagtactgataaatgctacagcacaaatgaaccttgaaaacatgctaagtgaaagaagccagaaacaaaag

SEQ ID NO: 10052 - DNA, 414 bp, Homo sapiens
  III.3680 (N44737)
  misc_feature (50)..(50): n is a, c, g, or t
  misc_feature (337)..(337): n is a, c, g, or t
  misc_feature (352)..(352): n is a, c, g, or t
  misc_feature (361)..(361): n is a, c, g, or t
  misc_feature (372)..(372): n is a, c, g, or t
  misc_feature (378)..(378): n is a, c, g, or t
  misc_feature (408)..(408): n is a, c, g, or t
gtcacatggatgttcgcaacaattgggatgcagaacttgatctgactccnaggccaggtttgattttgatttgcagtggcagagaggactaattttttactaggttctgagccctgtactgaactctggattgccctgtacttggtggtggtatacagttcagcagtttttagcatatacacgaatttgtgcagccataaccactatctaattctagaacatttttatcacccccaaaagaaatcatgtacccatttgcagtcacttgccattccctcttctccccagccctggggaaaccactgacctaccttatatccctaaggaatttggcctnatctgggcaatttcnatataaatngcaattggtanaatggngggccttttggttcccggggttcctttccnccttag

SEQ ID NO: 10053 - DNA, 474 bp, Homo sapiens
  III.3681 (AI674915)
  misc_feature (410)..(410): n is a, c, g, or t
aaggttatatgtagcattatttataatagtgaatgattggagacaaatttgcatcaataggtgaatcattaaattgtgatacaaccataccatgaaatgttatgcagtcattttttaaatgaggtaaatttccatgtattaatgcaagaggaggtccagaatacaatgcaaagtgaaaaaagttgcaaaacagtacatataatatcccatttcatttaaaaaaaacctatatacaaatgtgtgggtattcatatatgtatatatgtgtatattaatatataaacacaaacagaacaacatctgggaagacacacaccaaattaagttattcttggagaatgggagtggtgagagggactaaggaaaaatctttcactttttactttacacatttatgttttgcttgaatnttgttggctaacattaataatttttgaatttttatcacaataaaacattttaacaaaataggca

SEQ ID NO: 10054 - DNA, 462 bp, Homo sapiens
  III.3682 (AA830780)
ttttttttttctagtataatcagcaggtagactttaattaggcaagcaaatcatatccaatacagagtacaaaaagttagattttaacaaaaattattcacttgtggtaaaaattttaataaaaagttgaaaatataaaactgtacaatactgtatttctctaggttatttattaatgctcattctagccagatatcaacttctactggggaaggggtggatggggttggatattgtcattgtttttatttttatatgcttcctcaaaagataatcttaatattggagctgaaatttttttgactgaatcattttcatcttcaaataatggaaataaaagacacactaattaaagatttgaaagccttttcatgtattgaacacaaggaaacatccaccaactctgtcttaagggccacaaattatttgacataaacattcaaatggtgctaattattgata

SEQ ID NO: 10055 - DNA, 482 bp, Homo sapiens
  III.3683 (AI476676)
ttttgaccctgccttgagagagtttaatatttagtagctaaaacagttattatctgttaatttgcctggatgaatcagagaaggctctcaaatgaagcagcctctggaagacgagggcattccagggaggaagggcggcatatgcaccagcatggaggcgggaggagacagcacgatgtacttggcattcttgctaagtcctgtgggggctccatccttgactcttttcattccacgctgatgtcttctgggctctgcgcctcaggggagaacttgcaatgctgggatcaccttgacgtggcagggatgttccttgcaaagccttatcctgctcaatcttcacctaattacgttggttttaggcttgaagcaggggccttgctggctgacctctcaaagcctccctttcccttgttcccatgtgtagcattctgttttgggagcacagaatgtactctggtctagaggaagctaagccactg

SEQ ID NO: 10056 - DNA, 458 bp, Homo sapiens
  III.3684 (AI688822)
tttttaaaaaggtttatttttcactcaggcaaaatgtgtatattgggttggcaagggggttctgctcttcagcatcactcagggaccctgatgaccaaagctccatatgacacatgcctctagaattgccttaggtcaagagacatggtgagctgtgcatagcatgcaaagcgaccactggaaatgacacgtcacttgattacgttcaattggctaatgcaagtccatgtttgtatctgctttgtaaaccagaatatttgtgaataaccctaatgagtcatagaggcagcctttgccattttgtgctaccagatcctatggttattctgttattttcccctgtttttataaaactttcctatattttcgatttatttttcacaaatgctctttctacctctcttctataagtgagcctggctttcttattaatgatgttacctcccatgaaattcttg

SEQ ID NO: 10057 - DNA, 226 bp, Homo sapiens
  III.3685 (AI468342)
tgcagaagccaagaatacatttttattaaagtttttcattaaaaacatttccttgtcaagtaaaatgcagatagttgctctaacttctggtctataccacagtgtaggcagcagaatcactgagggctgggggccctggcaaggattacatattatctatctttcgttgcttgaaaggacagcgatttaagtatctatataagaacccaagttaaggctccatcca

SEQ ID NO: 10058 - DNA, 259 bp, Homo sapiens
  III.3686 (AI287827)
ttttttttttttttttttttttttttttttttttttttttttttttttaacaaaaaaagggttttgttttgttgctaaagctaaagggtagggaaataaaaatagttaattgcagcctaaaacttttgggctaaagggaacctcccaccttaatttcctgagtagttaggaccaaaggtttgcaccaccatgcctggcaaatttttaaattttttataaaaaggggggctaactatgttgcccaggctggttttggggg

SEQ ID NO: 10059 - DNA, 404 bp, Homo sapiens
  III.3687 (AI206953)
aaatgaaaacatatttaattaccagatatttgacaaaaatacaaaaatcatcagaatttcaagattgtctacttacagggatattatccctactaaaaatgatggcattaaatttaagtcaactatttacatcaactgattagggattctgtaataagaatggcaagtgaacagttagatttaaaagacccaagcataaattctgcaagaaattgacaatggagaggataggaattgtagactttggtaattattagaactgcaaggggctatatggtcatttcatcaaattctgcaattttattgataagaaccaagtaagaaatattctctaattcaaaggttacatacaagatcattttaatgtcaaggtgctgcttccttctcctgtcatatgatgatac

SEQ ID NO: 10060 - DNA, 185 bp, Homo sapiens
  III.3688 (R96206)
  misc_feature (32)..(32): n is a, c, g, or t
tccaccagcccagaatattattttggcatggncataaaaacaaacaaaattaacctactatgctaaatgtttgcttttgtgcaaaattaattacatacaatacaatgctagccatacaacactctaccaatgcaacaaaataaggaaagaagtgagagagagcaaaagcaaaagccaaagaggaa

SEQ ID NO: 10061 - DNA, 390 bp, Homo sapiens
  III.3689 (R96257)
  misc_feature (10)..(10): n is a, c, g, or t
  misc_feature (358)..(358): n is a, c, g, or t
  misc_feature (372)..(372): n is a, c, g, or t
ataattcttntttttcaccttccttccccgaagaacttttccgtccttttcacctccttctcctgtgtacatagtgattttatgtccccagaacgcctggaagcatttctgaaaccaagatattattaaaaacctattattgtttttaatcatgagtatgtatctggctgcagggctgtgtattgggatataggtatatagtcttacacttaaacaggtatgcccctgaggttcactgtgacctcaagtcttttgccagaatttttcccctaattcagttcacaagtggtagggtctgcatcagtggcattttccccctgaattccattcagcagcaaggtttcaacagtggtgactnccagggcagggagnagtcctgcggccaaacct

SEQ ID NO: 10062 - DNA, 519 bp, Homo sapiens
  III.3690 (AI520744)
ttttttttttaagttgaaaaataccttgtttaagacctccctgggacccacaggggcacgtgtggccgtaagcctgtggcagcccaatcgttagcctttttcttctttgagcctctctaagtacatctgcagggacttctggatggagtctttggagatgaagctgacgaagttctgcacgtccgcatcgcgctgcgtgaccaggcggctggccgtggcctttcgcatcatggccttggtcagctgtcgagcatggtctggaatggccatccactgggctatcgctgacagcgcagtgctctgcacctgctcctccgggaccacctggtccactatgcccacctgcagggcctccgccggcgggaagagcagccccagctgcagggcacgctccgccgcccggtgcccgatggtgttctccagggtgtctttcaaccagaaaggggcgatgatgcccagcttggtctcattgagtcctatgcagtacctggggttgttcgccaagatgcggtagttaca

SEQ ID NO: 10063 - DNA, 545 bp, Homo sapiens
  III.3691 (AI683765)
  misc_feature (539)..(539): n is a, c, g, or t
tttttttttttttttttttttcctactaaagggctttatttgaattatcccatttaatactcacaacaaccctttgaggtaggtattaccatcaaactcattttatctatgaggaaactgaagttacattcctttccagggtcacagaggagggaattggcagagccaggatatattgagaccatctgactctagcatccatgctcttaacccctacattcaacttccttggtgaggcatgaatatggcactagcaaatcactgctttcactggttaaggtccccgaccccactaagaggggcagacagagctcaaaacctgggggttctgataccatgtcccagccccactggaggtcctgagggaccctgggtgcagggtagggtggccaaacctgtgagctgcaggatctggtcatcaaggtgcgtcacagcctcgtcatgcatgacctggcctccgatgaacaaattccagcgtccttcctccaggagctggcggacctgtatttctgctgtccgagggacccatcccaccaagncggaaa

SEQ ID NO: 10064 - DNA, 377 bp, Homo sapiens
  III.3692 (AI367243)
tttttttttcactgcaaaatcatcttttattaatttgatgaaaatacaatgtgggtatggatggggtataattattaaaaaataaggtgatcaggcttcccaagttattgtggccacccattcattatttttctgattgagagatggcagaaatgcagcacatggttcacaatcccctctgcccccagcaacacacatatgcacgtatatacacatgtgaacaattgatcatagggctttttcctatgaatgttgatattgcctcaaaatctatctcaatgcagcactccaggaaatgcattccactatcagtgtgggcacgtgcaattatttctactaaggatataataatccttagagttgatggaggggctttt

SEQ ID NO: 10065 - DNA, 291 bp, Homo sapiens
  III.3693 (AI468343)
  misc_feature (190)..(190): n is a, c, g, or t
  misc_feature (225)..(225): n is a, c, g, or t
  misc_feature (264)..(264): n is a, c, g, or t
tttttattatcagttcattttaataacaaaacactgaaaacccacatgttccattgtaaaaactgtatgaaaatacatcgataaattttcatacagtttttacaatggaacattacccagaagctacacacagaatgaatttggaaacttaacattgaattatgcgagtcccagatgacttatacacacnatggtgccatttatatgaagctcaaaaaaaaattntaagtacattgcttacagatcatgcatatgtaattattnttttttaaaataacagggcttacaatt

SEQ ID NO: 10066 - DNA, 475 bp, Homo sapiens
  III.3694 (AI803012)
  misc_feature (87)..(87): n is a, c, g, or t
tttttcggggagcacgtttattcggagaaataaatatagctcgtggaaaggggttggaaggcagggggaggtacacctgcgtcgcantcgagcgactgggtcagggttccggcgtttccagcatgtctgccagggcctgataaagggacgaggagaaatagtcaactgaatcccttctaccggacccctttttcgttctgggtgattccgttctccagtagccccgccccttcgattcctacttgagttggcctcgcccattaggctctaagcccgcatctcaaatctccactcatttctgtcccttggctccagcaactccacctggtgttcctcgagccaggccccggcccacgtgctcagagccttggccacgcctcccctcttagccccgccccaccagccttccgggccaggctccgcccccaccaggattcaccacgctgggcccggcaccttcctcaggtttttccag

SEQ ID NO: 10067 - DNA, 411 bp, Homo sapiens
  III.3695 (R20401)
  misc_feature (8)..(8): n is a, c, g, or t
  misc_feature (326)..(326): n is a, c, g, or t
  misc_feature (405)..(405): n is a, c, g, or t
cgggggtnattagtttcaatgcagtgatgaacacaaactatattttgagttctctgcagcaagtggaatgtggtatgaaaatatctgatatttacaaagatgatactgctaagtcagagtcacgtttattgctaatatgatggtggagtgttgtcttcattcataatgaaaggaaatgttatttttaatagaggttagtgaaaataaaaataaaactattttctaatcaaagtttatgggtcctcctctccccaggcactctacaattacctccaaagttgaggaactctcaccttaggacacacaacttttattaacggataccnttattttcccaaccccaaatctatggttcttaatcttcattttggctcccaaattttaggttggcttccggaattttanttgggg

SEQ ID NO: 10068 - DNA, 464 bp, Homo sapiens
  III.3696 (R43521)
  misc_feature (195)..(195): n is a, c, g, or t
  misc_feature (325)..(325): n is a, c, g, or t
  misc_feature (341)..(341): n is a, c, g, or t
  misc_feature (352)..(352): n is a, c, g, or t
  misc_feature (361)..(361): n is a, c, g, or t
  misc_feature (422)..(422): n is a, c, g, or t
  misc_feature (438)..(438): n is a, c, g, or t
  misc_feature (446)..(446): n is a, c, g, or t
  misc_feature (453)..(453): n is a, c, g, or t
  misc_feature (460)..(460): n is a, c, g, or t
tttttttttttgttttgtaagtattcatgatttttattcattaaagtataaatgtaaattttcctggtttagactcacttatcttcagagttataaacaatattaaattataaaacttacaaccaaagttataatgcttccataaagactaacttcaaatattcatttattcaacaaatatttgttttactgagnctccaaaggagtaacagggcagtctctgtctttatgaggagtaatatttatggggggcaaacagataataaaaatacaaggtaaaataactggcatcattatggggggcaattaggggaactattaaatnaatactggtaataggnaactatccatngggccaggncccctggtttgggattaatccgggggagggggcttccttgtggtttatattttagggcttngggcctggagggttgnggaggggnttccggncttaggncctt

SEQ ID NO: 10069 - DNA, 370 bp, Homo sapiens
  III.3697 (AI566662)
tttttttttttttttttttttttttttaggcaagtttcaaaaactttaataaagaaaaaaaagaagacccttccaaaaataaatgccacacaaatgaaagttgtttttttttttgtttaaagggaagatattcaagaaacaaaaccctttactatcaaaatatactaaatatttaaatctagggatgttgagtgttcaaattcagggcaaatgtagcttataataatatagctaagtagaatttttcatgatatggctggtttaagacatcattttatagatttactttttaagcctatattttcttaaacatccatttcacaattcatttaattattttacattcatttataaaaacacatattttcta

SEQ ID NO: 10070 - DNA, 535 bp, Homo sapiens
  III.3698 (AI811111)
  misc_feature (503)..(503): n is a, c, g, or t
ttttttttttttttttatagccaatattaatttaattgtacattttaaaataactaagagtatcattggattgtaacacaaaggataaatgctgcagggaataaataccccattttacataatgtgattattacacattgcatatctgtatcaaaacatctcatgtaccccataaatatatacccctactatgtacccataaaaactaaaaaataagaacaaaaatccatgaaattgaaatgaaaacaacatacaaaatatgaatgaaataaaaatgtgagtttttaaaaatgtaaacaaatttcacaaacatttatccagactaagaaaaaaagagagaagattcaaataaataaaattagaaacgaagaaagagacattacaactgatactgcagaaatccaagggtcattactggctgctatgagcaattatatgccaaaacattggaaaaactaggataaatggacaaatttctacctacatacaacctaccaagattntatcagaaagaaacccaaaaaaccgaacagac

SEQ ID NO: 10071 - DNA, 484 bp, Homo sapiens
  III.3699 (AI920890)
tttttttttaagggcttagttctctttattagaattgtttctatttgccaaagtaactcaagcacttggaacaaattaaacaatacagggatagataaagagaaatgtagcatcagtctcctcccaggcctactcctcccccaagccaggtacccagggctgcccagtgcaggggcgttggcagaggcagttggtacacagtaccctagttagtcctgaaagctacgcattcgaggctcagagagatgaggcaatttgcccaaggacccacagatggagacaggctgggggtggggcagggtttcagtcacctctccaagctctccttggagtccagagatgcagctcagcctggccctcctctcctctcctggtggcacctgctggccacgcgtcctccttccgcagtggcctgagactccggggcaagtctgcccagcccaggcctgtacaagccactgtgcccacaccccacactccatcc

SEQ ID NO: 10072 - DNA, 487 bp, Homo sapiens
  III.3700 (AA743674)
tttttttttactgctggtggcattccattgtacagatataccagtttgtttaactgttcacctgctgaaggacattttggttgtttccagtatcttactattataaactgcatatgtatagtgtgtgtgtacatacataaacactaatagtataaacagtatatacataataatagtatatataaatagtatgtataataaggatgctaggaacttccatatacaggtttttgtgggcatgtaagttttcatttatctaggataaatgctcaagagtgtgactgctgggtatcatggtaagtacatgtttagttatgtaaaaaactgccaaactcttttccagagtagctgtaccattttacatgctcataataccttactttcaaagaactatgtgtgatggcttttttttcctagcctaatctgtgattaacctattgcttttgtccaaaacttttactctttaaaaatgaaataatttattggt

SEQ ID NO: 10073 - DNA, 310 bp, Homo sapiens
  III.3701 (AI583645)
tactactatacggctgcgagaagacgacagaagggctcaaaaaaaaaaaaatttttttttgttagcgtgggtaacagggagacctcattgctataaaaaaattaaaaagtcagccaggcatggtgacatacacgtgtagtcccagctactcaggcagctgaggtgggaggactgcttgaacctggcaggttgggactgctgtgagctgtatttgtgccactgcattccagcctgggtgacagaatgaggcattgtctcaaaaagagaaaagcaaaaaaaaaaaaaaaaaaaaaaaaaaaagtcgtatcga

SEQ ID NO: 10074 - DNA, 255 bp, Homo sapiens
  III.3702 (AI567610)
  misc_feature (218)..(218): n is a, c, g, or t
ttatgtttttatttttttttaagacaaggtcttactctgttgcccaggttggagtgcagtgatgcaattacagctcactgcagctttgaattgggctcaagtgatcctcccacctcagcttcctgagcacctgggaccacagatgtgtgccacttcgcctggctaattttgaaaaactctttttttgtagagcccggagtctccctatattgcacagncttgggtcttgaactcctgggcttcaggcaattctcc

SEQ ID NO: 10075 - DNA, 432 bp, Homo sapiens
  III.3703 (AI760203)
atggaaataaactttttaactttatatagttttcagtataagcagctgaaaatgtgcacttagcaggatgtcttatttatcacatgatcttgacgcctactgcaaagacgcaactgaagccagcagtgtggtctttcagctcctcggctcccacttcgtttgcagcagttcatcgtccctcacctcctgtgagaggcagaattcgaaacctgtgctcccaagagcccatctggttattccttcaggcactgatctagatactgtgagaagggacttcacggatttcattaaggttaccaatcagctgaccttaaaagagggcaattatccaggtggttccaatgcagtcacacaagcccacaggggctcacagataaaggtgaaagatacagcaggagactcaagagatggcggccttggcaaggtgcgggc

SEQ ID NO: 10076 - DNA, 403 bp, Homo sapiens
  III.3704 (AI911462)
aaagctcaacttactacttctaggaagttttttattgctactgttatcaattcataccatcttacccttgtttttgcaaccctttgttaataacatatttatttaactatagttattagcagtctgagatcattttacttggttacataaggagcacatatatctacccagcatcattgtaaggcatgtgagacctttgtttgattgctgtcctaacctagtaccgagtcctaaaaactcattagtagaagatgaagtgtccttgccttttgctgaacatatatatacacactgaatatttagtggcaattcatagttgcatttggccattttttgtttataatttcccctttctcattaaaaaaactttgttttctagactttaggatttagagaagctcat

SEQ ID NO: 10077 - DNA, 392 bp, Homo sapiens
  III.3705 (AI886313)
tttttttggttataatagctatttattaccataatgagaaatgaacaaaagttttacagtgagatgacaaagttcaaatattatctgtagtatacaagaactagataaaaaaaaaaaacacatggtgcaaaaagggtgcctactatttaaataccctatacctgagttacaaatcacctaagcacaattacaaataattcagcctagcacccatgcaggacactggctagtacatgggtagccagcagagcctcttagcagaggcaaaatcaattgcatttcaaggaaatagtctcccagcatcagaatgcagagatggatgctttcctcccctcacttggtccctaattgttctctttacacactagcagatgttggggctcagaaaccca

SEQ ID NO: 10078 - DNA, 467 bp, Homo sapiens
  III.3706 (AI631924)
cctagaaatttttaatattctggctaccagataacatctcccagaattcccacaccccgaaggggcataaaactcctgccagaccacacgttctgattttggtttggcatatatggtcaatggctgtaaggctggtactccgggacactttgcccatttctggataaagggcaagggcagtgaatggagtagggaggaacgtggctgaaatagggaagggtcaaggccaatatggacatgtgctttctttggttccacagtgttggaggctgtagcctttgaccaggcgtgggaccaggaggtgaggccggctctcaggcatcaaccaaaggatccactgaatctcccttctccccctgccaacaaaggtacaagtagatgttgacaccccctcagacatggaaggagacccatttttttctttttctagttctggataaatggccttaaacaaaatatgcaaacag

SEQ ID NO: 10079 - DNA, 422 bp, Homo sapiens
  III.3707 (AA769398)
ttttttttttttttttttgcagcacttacattgtattaggtattataagtaatctagagatgatttaaagtatatggaaggatgtgtgcatgttatatgcaaatatgacactattttatatcagagacttgagcatccacagattttggtatcctgtggggaagagtgctgtcctgggaccaatgccccttggatactgaagaacagcagagtcctcacaagctaaagacatttaaaatgatcaaataactctttggagagaggaaaaaaatattatgtgcatcctagcccccaacaaacacacacatgtttaccacctcaccctatgattcttcacttatttattcaacaaacacttctgaggaccccttatgggccaggcactatattaggtgttggggacagcagtgaaagggcagggt

SEQ ID NO: 10080 - DNA, 295 bp, Homo sapiens
  III.3708 (AI341388)
ttccatttactttggattatatgtcattataaatattaacaaataagacttaaaaaggacaccttcgggtaggtcagaccaaaatacaaaacttgtctgtgggactgcagtttgaggacagtgtctgcagccgtcacatggcagcaaaacggggttaagcagtgcacgagagtctgcgtcgacgacagccagagtccatgcatcgggaggttcactcggtttgcgaaggaacaacgggctcggcatgcacggcccgggctcggcgggcggacgggcccttagagccaatccttat

SEQ ID NO: 10081 - DNA, 364 bp, Homo sapiens
  III.3709 (AI684661)
tttagtctttattttatttagtctttttattggatgtagtagacaatataataagcctaccacccaattggaaactacatcattaccagtcacttatctatttatttctattctccttccccagagggaacattcccttgactattgcatttgtcattctctggctcatattttttttcagttttctcacaggtatgtacatctaaaagatatagtgtttggttttacttggttttgaactctgcgttagacatgatgcatttccccaagcagtggacactgaaaagaaggtcattatcaatttggggacttgagaaatgattcctgaagctcgaggggctccctagcagcctctacatccacc

SEQ ID NO: 10082 - DNA, 492 bp, Homo sapiens
  III.3710 (AI377225)
ttttttttatgtctaagcttagactcatatctttaaacaaaagaacaagagttgaagatctatgaaatagacagtaggaatcagtaacattcatccggaggtggtggatcttcagagagaaattggtgttgtataatgtagccttctccacatggcaattatgctgcttattagaagttctgaggctcattgttacttcaacacgcacaaagaaaatgctgcatcaatgtttgttgacctgcttctgaaagacctctattgttcctttcgcctctccttgttcttccatttgtctcatggaatctcttttcacacagaaccctctctggataccagcgtcgcctggaatttttagcaaggtcatccatcaggaaagtcaggaaaacacccttaaattcttttattttccttttttgtgcacaacccaattcaatcaatcaatgaatttacttttgtagatctttaattatttgcttataagttatccaccat

SEQ ID NO: 10083 - DNA, 308 bp, Homo sapiens
  III.3711 (AI432398)
tgcggctgaggactcgacccagcggctcgctctggtcgcgctgcatgttcttgtggctaccatcagccaaagcgaatgacaggctcagcttgggttccgaaggtacgcagcgcactacagcgcgctccatcgctcccgccgctgtctggctccccgcttcagcccggctcagcttctccaccgccgtccggatcacccgaagcgcggcgcgggcgcctgggagcctccacatgaacctggtggcctagcggtcgacaagacccgcggccgatcagcggcctactgtcaggtggagctgaggagccgag

SEQ ID NO: 10084 - DNA, 476 bp, Homo sapiens
  III.3712 (AI693253)
taacaatatgaagaggtgggacctttaagaggtaattagattatgagtctacacatccggtcacccacagcctgccacactctttcttgactggctgtggtgttctgtgctgggggaagatgagagggaggacaaggactttcccaggactccagagatcaccattagtgccctgcactctggagaacacagagtgttggctgtgtgttggtggacacccttcaagcctgggcacctgagcaatgtcggctcactctcgtgagctttgagcagagacactgtgctttggagcatgtcacccgcagaatccagtaatctggccactgccagaggttcacttaatttattgtagaagtgggttagttattgcggaagttgccttctgataaaaaagttgaagttcagctcctgtgttctctctgtccctcatgcttgcttgcccttccacattctgccatgggatgacagattaagaa

SEQ ID NO: 10085 - DNA, 383 bp, Homo sapiens
  III.3713 (AI566717)
agatacagtctcactcctgtcgcccaggctggagtgcagtggatgatcatggctcactgcagcctcaacttctgggctcaagtggttctcccaccccagcctctcaagtagccgggaccacaggcgggtggtgccaccatgccaggttaactttttgtgtttttagtagagacaggggtcttgtcatgttgcccaggctggtttcaaattcctgagctcaagcaatctgcctgcctcagtctcctaaagtgctgagattacaggtgtgaaccaccgcacccagcaggggttaaataattttaatgaaatagatattgaatctttctgttgatctagctaaagagttctatttgtaaaaataaaatgttggctagaatactata

SEQ ID NO: 10086 - DNA, 254 bp, Homo sapiens
  III.3714 (AI918392)
tttcttttgaaagcaaccaaatcaggatttattaattaaagctttggaaaagtcacaaaaccctggccccaattttttatgagaatgagttgaaatacattttttttccaaaaagatctcccacgtacacatgaaaatgagatgttctctgttgccatagtgtaaactccctgattttgcccccaattgattgtaacctctaagctaaccatgactgtgctaataagaatgttgaaggattggaaagaggatct

SEQ ID NO: 10087 - DNA, 565 bp, Homo sapiens
  III.3715 (AI829780)
ttaattttaaatatttacaatttaatattagatttaaaatttcaatagttacaacagcatagctgatcatgcagaagaaagaactgacaagctcaaatagcagtcagatgaaaattagccaattagaggaacaacaacaacaaatgattgggaaaaaaaaaaagaggaaaaggttaaaagtgatctgtggcaccacatccatgcataaatataacaattatgagtgtacccaaaagaggagagaaagaagaccaggaagcttatttaaatatgtactgtacaaacacttcccgaattctaggcgggatatgaactcaagaaattcaaaatgccacaattaggatcaatttaaaagagaatactccaagacacattaatcaaattgtaaatatcaaagatgaaaagaatcttgaaagcagcaagaggataaactcaaaggggtcttctaggtaaggctatcaggaaacttcttaacaaaatacttgcaagtgagtagaaagtgggatgacatgttgaaagtgctaaaataaaatttaaaaaagcttattaaaaatactctaaactg

SEQ ID NO: 10088 - DNA, 210 bp, Homo sapiens
  III.3716 (AI383284)
atgccacgagaagtaaagtaaactaggttataaaaacacattttattgcattttgagatttttctcatgaacaaaccatgccttttgtttttcgttttatgtgaggttgctgtaaagaacttgagaagctgcacaaatgctcagcagggcttcattctgcccatgctcttggctgaacgactttatatgcaggttgctctatagttcgac

SEQ ID NO: 10089 - DNA, 532 bp, Homo sapiens
  III.3717 (AI795919)
agcttttttaaatttaattttaagtgggtttcctgtgcaccaaaatggtttatgttttaaataacacatttgtaaagttaaacggatctacagtgatgaagagtgaaatactttccaattcagcaagattctggacaattgccctgtaaacatcaatcttgtatttcaggcatgaaatgattcacattctgtactaggttcagtaacaggtttttctaagaaataccaaaggtcaatgtacatttaactttaaggcaaactaacaacaacaacaacaacaacaaaatgcctctcaaggttttttagaacctatcctaaaatttacttaactacattaagccaagtcaggttgaaaagtacattattttacattattttagctgattggaaggtctggctcactttacaatcctctgttcttaaagactaagatttctttctttaattgtttaggttaactttagtaatttgtagtggtgaataaacttctacaagtgggtagaatcccattacaatgggattatatttggtg

SEQ ID NO: 10090 - DNA, 363 bp, Homo sapiens
  III.3718 (R14908)
  misc_feature (282)..(282): n is a, c, g, or t
aaacttcctctaagtacagggggtaaaagaagaaggaaattaagaaaagcagcccatttggaagtacatagggaaggagatggttctagtaccacagataacacacaagagggagcagttcagaaccacggtacaagcacctctcacagcgttggcactgtcttcagagatctctggcatgctgctttctttttatcaggatcaaagaaagcaaagaattcaattgataaatcaactgaaactgacaatgggctatgtatcccttgatggggaagaagactnttaaaagcggtgaagatgggattacaaaaccatgaacctcagtgttgaaactatttcggacccggaaggagacagcctggg

SEQ ID NO: 10091 - DNA, 428 bp, Homo sapiens
  III.3719 (R41227)
  misc_feature (324)..(324): n is a, c, g, or t
  misc_feature (353)..(353): n is a, c, g, or t
  misc_feature (369)..(369): n is a, c, g, or t
  misc_feature (401)..(401): n is a, c, g, or t
  misc_feature (410)..(410): n is a, c, g, or t
ttttttttttttttttctttttaattatttttttatttttaaagttcttgtaacaacaatctctagtccaaagaaaagtctttattaacacctgtatatatctaacaagctcctgaatttcaaaagaaagaaaaagataaaagagaaaaattatagaccgtatcatctattcttggtcagataagtgaaaacactaggaagatgagagtggtttgggtgacaaatcactgtttaaattacagacagaaacaaatacacacatgtaacttttttttcacgggtgaaggaaatgagggtcaggaaggttactaatataatattccnggtaattatcttatatatagttactaagncttacccttggaactncaggttaaaattttaaaaactcactctgttcnttatccttncccctggttttcaggtac

SEQ ID NO: 10092 - DNA, 323 bp, Homo sapiens
  III.3720 (AI675542)
ggatttgtaagtggcatttattgagttgaacatgagcttgagcacgcggtcacacattctttcagcaaacactggttaggcaccagctgctacgtgcaagcactgccctacatgctgggacgcagctgtagtaggaatgaaataacgccagcattcctgcatgcgggcagtgcgggccctgtacagaaaggtacacgagataggcatcctcacatccattgtcctgggaggaaactgaggctttgagaaacggagaacttgccgggccatttgactctacgtcatcccctcccccatcaatgccctgaacagcccctcgtgcc

SEQ ID NO: 10093 - DNA, 539 bp, Homo sapiens
  III.3721 (AI700977)
atggagggcggcggcgactgctgcagctgggccagctgcgcgggctgcaccccctcccagcctgcgagaggaggaagctagtagaagatttgtaccaacaaaaccaaggagtaaacaacttgagaataactgcatgagctcagggcttggactgtcagattccatttctaagcttccagaagagcgacacatagacactggggaagtcagagcctttgaactccaatgccatccccgtcacccacctccaccaccagcaccaccaccgaatggcactttggacaatttttccctctcatgtgacttttgtcatttcttacgtcagttggagccagcacctctcaaatccatcttctaaaacccagaaaattgtgtgtaacacatgatgactgaaagggagtaggctgaccagttaagagcctgccactggaatggaaggctgtgggaaggtgaggggacggtggacatcaaccgggaagagctgaaagatggcgttaccaggtatctaccctgctaccctgcatagaattcccaagacc

SEQ ID NO: 10094 - DNA, 146 bp, Homo sapiens
  III.3722 (AI620852)
actaaattgagaactataaatttcactgctgtgccttgggtcaaaattttcaatgatggaatcctaaataagtaacagttattcctataatggggtatatattcagaaggaataaatacctgccactattaccaaaagactgttct

SEQ ID NO: 10095 - DNA, 292 bp, Homo sapiens
  III.3723 (T40049)
  misc_feature (85)..(85): n is a, c, g, or t
cggaggtgcgtttcctgcgtcctcccgagtggggttccctgaggtcacctgtcctgagggtggtgctcatgtggcctgggcagcnacccgttgggctggctttgtcacaggaggctggtctctggggtcaggagcagctgttttgggatcagattgctctgagtcaccaggcggccaggctcaccagacctgtgggcctcagctttgcaccttaagtgtgagcttattctgtgagagggttgcacagaaagcacgctgtacaatccgaggcctcttgataccaggtttcgcc

SEQ ID NO: 10096 - DNA, 346 bp, Homo sapiens
  III.3724 (T40971)
  misc_feature (247)..(247): n is a, c, g, or t
  misc_feature (297)..(297): n is a, c, g, or t
aaggcaaaataggtactgtaaaatttaattaaaaaacaaacaaacaaacaaacaaacatgcaaagggttcctcaccctctaggtgtaagattcagtcccaagtcctcctctgaaagcaaagtgccctcggtgtgccagcactaggaggggccaacttggactcagcaccaggccaggattctccactgctgcctgcagacaccatcactgggagactgaagaacaagggagctctggccatggttgnggggcgaggtgagagggggctggctttcagagccaccccgctgggctggncttttgtttctacaaccttacactttagtcttgcaagggacacccagcc

SEQ ID NO: 10097 - DNA, 249 bp, Homo sapiens
  III.3725 (AA878846)
ttttttttttttttttttaactttacaaaatgttgtgtttattgcttgctgcaatgtattatttcaggtgacagttacagaaaaatccttttattttgttctcaggaaatgcgattcatcaccacacagataggaagccttccctttggtgcttttttctttacatatctccagcagctggcttcagttgccaatttttggactctcttcattaaagcagacttcaggactctctgctttgagcactta

SEQ ID NO: 10098 - DNA, 254 bp, Homo sapiens
  III.3726 (AI248861)
gagtgtgagatgcagtttttattaaggaaaccaacatgtcaaaagtcagcaaaagaaaggatctgatactccattctttcatcaacctattgagaggaataaaatgttctgggcagtgctggacacagcatgatgttgtgttccaggagggccaccctgcactttctattccatcttgtatcatggaagaatagaacagcatgatatgtggagagtaaacagtcaaggaactggtgacaagcattaagtttagg

SEQ ID NO: 10099 - DNA, 491 bp, Homo sapiens
  III.3727 (AI538686)
ttttttttttttttttttttttttttttttttttttttttttttttttttttttttttttttgggaaaaaaaaaaggggtggtttattaatttatggaaaaagggggacttttggaaagccgggggggggccaagcctttccccaagggggggaatcagggggggggccaagtctgaggggggaaaggaccgggaccaaaaaaaggaggactccaaaggctcctccaaagggggggaaaaaagctttcaagggggaaaggggggatttcccaaaaagggccaggcaaaatttaaagagacgctggcccgggccaaccctttcacaaaaatgggggggggtaagcaaaaaacatgggccaaaaatcacggggcccttcccaggcttcctcctgggggggggggggggggaaacaggacccaagaatttgagggccaaaggggtaggaaaacatggtttttgtccgggacactgccaacactctgggactagg

SEQ ID NO: 10100 - DNA, 543 bp, Homo sapiens
  III.3728 (AI683123)
tttttcaataaataggtagtttattaaccatattaataacaatgatgggtcaaataatcggagattcagcccatctgggaagtacggatgaaaatgaaaggagtccttttttttcttcccctccctccctcatcctcataggtttttatatctaaattatgtgagagtgattcatacacacacccattatgaatcagtaagagaaataacttcaagacctttgctagtgatgaaagtgcaagttaagctcattaagccttagtggttatgatgtcagctgaccacagtaaggagagaatgtctggttgaatttttacacctaaagtcaaagttcaagaaaaccagctaagattcagcttaaaaagcagtgacgaaaaacagccaacacccacataaaaacagatacacacattctgtatgctttgtccccacccttcttttctttagcctcaatctgagaatctgccatgcaacacaggtagaaagaattataagagattcaaggaaaaggtcacaaggccaggaagcctcctaggttccctg

SEQ ID NO: 10101 - DNA, 459 bp, Homo sapiens
  III.3729 (AI922842)
  misc_feature (455)..(455): n is a, c, g, or t
agcggccgcagaggggcaggggatgagtcaggccttgggagctgggcctggcgggaagcagggtccatgcacggccgagcaggtggcggctcccaagggaggccagagggcggcgagctggcagagctatggccctgctctcctggcggcagccccacagcgaggcagaggcagaggggtggagggaagctggttacctttccaccatgcggtctcgctgccgctttttctgcttgtcctgactcttcttgcctgcctgcaacttgcgcttggtctggccattttcatcctgggtggttagggcccctgtgggagcagatgggcactgtcaccaatttggctctgccaggacagggcaggccctgcggcctctggctgaatcacccactgtccactccagagggtccatcgagaatagctgtccaagcaaggcctctggccatgagcagggctgngtat

SEQ ID NO: 10102 - DNA, 480 bp, Homo sapiens
  III.3730 (AI634996)
atttttaaaatgttttttattgagatataactcatgtaccataaagctcacccttctgaagtaaaaaattaagaggttcttgtaaattctcaacatagattcattcttacttcctctctatgctgctaaaattacagtaaagagataaactcacaaggacaaagagaatgtgagtgtctacgtaatgataattgatcttgtgaatctgagaaggccaaatgctaaactgggaaagccaagaagaacctaatttccactgcagcacttccaaaaacctcaggacttggcatcaggtatcaaggaacttcccagaggatcatcagctgccaacgttcccagtcctgaagagaagatgtggatggcaccagtgagggtcctcgccaatcatatattctagaacattcctgggctgttcaacagttctgaagactgggaaatccaatatcaaggggctcacatctggcaagggcctttgtgctg

SEQ ID NO: 10103 - DNA, 209 bp, Homo sapiens
  III.3731 (AI800062)
ttttttttgcattaaaaacttctttattcaagacttttgttcagaacttttatcacaaatgtgtcaaaagcacttcaaccctgtttgggggttcatgggggaagatgggggggcggtcagagccaaagaagagccaggagcaggagaagaagtcatttaagtttttattaaatatactctcttggcacaaatctttaaaatatataaac

SEQ ID NO: 10104 - DNA, 389 bp, Homo sapiens
  III.3732 (H51255)
  misc_feature (246)..(246): n is a, c, g, or t
  misc_feature (275)..(275): n is a, c, g, or t
  misc_feature (300)..(300): n is a, c, g, or t
  misc_feature (326)..(326): n is a, c, g, or t
  misc_feature (355)..(355): n is a, c, g, or t
  misc_feature (366)..(366): n is a, c, g, or t
  misc_feature (375)..(375): n is a, c, g, or t
gagataaggtcttgctatatatatggcccaggctggccttgacccagcatcaagtcgtcctcctgccttgggctcccaaagcactgggattacaggtgtgagccaccatgcccagccagatctttcttgtttttgatgtagatgtttattactaaatacttccctcttaaaactgctcttgctgcatcccatacatttttatatgttgtgtttctgttttcactcattttaagacatttaaatttngtttcttaatttcttcattacccattggncattcagaatcatgttatttaattnccatttatttgtgctgctttaaaagntcctcttgttattgatttctagggttatntcattgtgggncagaaaggnacttgatgtgattt

SEQ ID NO: 10105 - DNA, 414 bp, Homo sapiens
  III.3733 (H51825)
  misc_feature (357)..(357): n is a, c, g, or t
  misc_feature (385)..(385): n is a, c, g, or t
  misc_feature (393)..(393): n is a, c, g, or t
  misc_feature (407)..(407): n is a, c, g, or t
cacaatcatgactatataaggagtagctatacttacgataagagactttgtatcaaacacagtagggatgaaatcaggaagaggatacaaaaattgtaaatatatatgcacccaatatcagagcacccagatatgtaaggcaaatattattagatctaaaggggaagacaatacaataatacaataatacttgtggacttcaacaccctactttcagcaatggacagatcatatacatagaaaatcaacaaagaaacaccaagtttaaactgactttagacccaaatgggacttaaaagacactaacagatctttttcatcccaaccagctaccaggaatacatatttttttttccntaaggcacctggcaatattttccagggngagggccncctgtttaaacccnccaaaac

SEQ ID NO: 10106 - DNA, 380 bp, Homo sapiens
  III.3734 (AI338234)
tttaaattttaaaaatttattctttctcttttgttgctgttgatttgttcttgagatggctacaacaccagacagaacagtgccctcatatctgatggctgtgaagggctgcactcctttgaaacattaagatctgctttgggcttccctcttcggcctcaccctccccttaaaatcaagtcatttccacactttttagtaacatactaaatgacacatcatcccttgttagccctgtaaacattttttctccacacaccctccctctttttttctctcatgtctgtgggtgaataattcactaagaaaaaaaccttaaaaaacaaaaacttacacatttatatcctttccttccacccacccgcccaccccagttttgg

SEQ ID NO: 10107 - DNA, 265 bp, Homo sapiens
  III.3735 (AI631805)
cttctgtatcaattatcaacatctgataaaatatttattttgtacttttttccttttcctgtctccctttccttctagaatcatcttttagagctgagtgaatggtgtctctggattgcatctgcaacctgacgttccagaatgctggctccatgaagacaaggagttttctctctttggttaactgctgataccagtgcctggtacatagtaagaactcaatagatatttgttgaataactgaattggtaagcagataaaaagc

SEQ ID NO: 10108 - DNA, 201 bp, Homo sapiens
  III.3736 (AI916507)
gctattataaataaagccactataaacatttgtttactggtttttatgtggacacgttttcatttctctcactgcgcccagcaatgaatacatttattttatggcaaaactaaaagtttgtcaaacacccaaattcagtatgataagttagctttttataggatactgacaggttattgtgggtactccaatcttgttcag

SEQ ID NO: 10109 - DNA, 365 bp, Homo sapiens
  III.3737 (AI679051)
gtatagacagggtctcccatgttgcccaagctcctgggctcaagtagtcctctcgcctcagccttctaaaatgctgggattacaggcgagagctaccaggcccagccttattttaagtttttttttttgtttgtttgtttttgtttttgtgacagagtctcgctctgttgcccagactggagtacagtggcgtgatctcagcccactgcaagctcttgcctcccgagctcacgccactctcctgcctcagccttccaagtagctgggactgcaggcgcccaccaccacgtctggctaattttttgtatttttagtagaaaggggatttcaccatgttagccaggatggtcctgatctcctgacct

SEQ ID NO: 10110 - DNA, 446 bp, Homo sapiens
  III.3738 (AI807651)
tttattaaaatataattatagcattcactgagcactgacggtgtcccaggcacagtcgtccttcagtatctaatcccagtatctacggggaatttgttccaggacctccctcagaaaccaaactccttatgctcaagtcccttatatagcatggtatatagtatttgcctataaccaacatacatcttcctgtatactttagatcatctctagattattcataactaatacaatgtaaatattgtgtaaacagctgctatattgcatcttatttgtattctattgtattgttaatttttttttcaaatattttcgttctgttgtcagctgaatccacaaatgaggaacctgcagatacagagggctaactgcacttataatcaatccccacaactgccccatgaggcaggagccagcaactctccaggcaggctggctccagagcc

SEQ ID NO: 10111 - DNA, 148 bp, Homo sapiens
  III.3739 (AI583651)
  misc_feature (112)..(112): n is a, c, g, or t
  misc_feature (113)..(113): n is a, c, g, or t
  misc_feature (114)..(114): n is a, c, g, or t
gagaagacgacagaagggggaaagccatattattgcaaataaataatagctgatttctcaacagactcagaagcagccagaagacaatggattagcttcttttaaatacctnnnagaaaaaaaaaaataaaaaaaaaagtcgtatcga

SEQ ID NO: 10112 - DNA, 382 bp, Homo sapiens
  III.3740 (AI537480)
tttttgattaaataatatccgttgactggtcttcaagttcactgatgatttcttatttatttattaatttttttttaatgtttctttttgaggcagagtcttgctctgtcacccaggctggagtgcagtggcgtgatctcagcacatgcaactcctgcctacttggctccagcaattctcctgcctcggcctcctgagtagctgggaccacaggtgcccaccaccacgccaggtcaatttttgtatttttagtagagatggggtctcaccatgttggccagcccggtcttgaactcctgacctcaagtgacctgcccacctcggcctcccaaagtgctggaaccaccagcgtgagccaccgcatccagcctcactgattttt

SEQ ID NO: 10113 - DNA, 459 bp, Homo sapiens
  III.3741 (AI598003)
tttttttgagacagagtctcattgtgttgcccaggctggagtgcagtggcttgatcttggctcactgcaacctccgcctcccgggttcaagcaattctcctgcctcagcctcccaagtggctgggaccacaggcgtgtgccaccacgcccagctaatttttgtacttttagtagagacggggtttcaccatgttggtcaggctggtctcgaactcctgacctcgtgatccacccgccttggcctcccaaagtgctgggattacaggcgtgtgccactacgcctggccgatcactggcctctttgactgtaggcagatcaaggacttgtgcccatctccctagggaattagggccaatacgagaaagcagatgagaagggccagagtgcgggactgccttcggggatctgagctctgatggactcatggaccatggaaaacccttctgatcagtatctgg

SEQ ID NO: 10114 - DNA, 552 bp, Homo sapiens
  III.3742 (AI683708)
  misc_feature (497)..(497): n is a, c, g, or t
  misc_feature (530)..(530): n is a, c, g, or t
  misc_feature (545)..(545): n is a, c, g, or t
ttttttttttttgaaggttttacgatgcattgttatcattaaccagtcttttactactaaacttaaatggccaattgaaacaaacagttctgagaccgttcttccaccactgattaagagtggggtggcaggtattagggataatattcatttagccttctgagctttctgggcagacttggtgaccttgccagctccagcagccttcttgtccactgctttgatgacacccaccgcaactgtctgtctcatatcacgaacagcaaagcgacccaaaggtggatagtctgagaagctctcaacacacatgggcttgccaggaaccatatcaacaatggcagcatcaccagacttcaagaatttagggccatcttccagctttttaccagaacggcgatcaatcttttccttcagctcagcaaacttgcatgcaatgtgagccgtgtggcaatccaatacaggggcatagccggcgcttatttggcctggatggttangataaatcacctgacagtgaagccagctgcttncattggtggtcattnttgctgt

SEQ ID NO: 10115 - DNA, 100 bp, Homo sapiens
  III.3743 (AI252504)
ggagaaaaactgagaaatacgactgaagaagaaaatgaacaatcagaaaagcacatgcaaaatacaaagcaaaaaaatcatgaaaaaaagtcgtatcgat

SEQ ID NO: 10116 - DNA, 429 bp, Homo sapiens
  III.3744 (AI655021)
aatctttttttttttttttttttacttagcaaaatagctttaatgctttctattatcaattgattgcttctaaaagttttaaattctcagcctcaatttaatgtctaagagaaaatatactcaaatccacagcgaatttttccaaaagggaaaacttatagtcaagaaaaacctcacttgttttttgcacaaccaattttcctgtttacctatagctaggtgtatctgtgcacatcacttaattacttaggagtagataatgggttcatttagtttcattcttccatccctaacactttatactcaaggaactgatctctgccttttgccgtttaaggagggttttcctaatatggtttctgatgcaactactacgttggatttatttgatcccttcggaattcaaccccccttttaagactcaatgca

SEQ ID NO: 10117 - DNA, 500 bp, Homo sapiens
  III.3745 (AI653006)
cctgcgaaaagattggaggcctctcattcccagccagtttaatactccgaccctccttttccagagtctgtcatgccctcctgggcagccccttctccaagtgtcagctgtcctgacctggccagtcctcatctatcagtgaccagacatatggtgcaagcaggtctccagcaaaactttcctcaactccagcacagccagtgtcttgcactcgattttcaatttcaccttgtggagcttggccatggaacaaaagacaggaacaagtgatgctattactaaatggaaggagtgttggaagagttaattgatgaaattaactcctcttcctcctccaacagtgcaggagcaagtatctgcttagtgtgatcatacatacacgcttctcttcacaagcttatacctctgggactcagagagtgaaactcagaaagcaaggtccacacgtgccaccgccaccctttaaggcaggtctcacaacaacctctctcatgcatcct

SEQ ID NO: 10118 - DNA, 180 bp, Homo sapiens
  III.3746 (AI915254)
ttctgttgcagaattgtttatttgatgtgtagaggaaaacccaatacatccaaaatcacagaagtatttgtattatggaagcaaagcaggagaaactgagtctgtttttcccatattttcctacgcattaaggacttttgagcaagttatgtctccctaattctgtcttattattctttt

SEQ ID NO: 10119 - DNA, 443 bp, Homo sapiens
  III.3747 (AA115848)
gagagagagagagagagagagagagagagagagagagtgtgattcagctactgaatcccaacaggcagaccatttatttcagggacttcaggcctttgaaggacagcaggtttcagttgctgaatttttctagcagtgaactcaaagtatcattgacaaacgtctcaatttctgatgaaggaagatacttttgccagctctataccgatcccccacaggaaagttacaccaccatcacagtcctggtcccaccacgtaatctgatgatcgatatccagaaagacactgccggtggaaggtgaggagattgaagtcaacttgcactgctattggccagcaagccagcccaccgactatcaggttggttcaaaagggaacacagagcctaaaaggcaaattcggaggttgggaagaagttgggtcagacattgttacacttgtga

SEQ ID NO: 10120 - DNA, 457 bp, Homo sapiens
  III.3748 (AA115849)
  misc_feature (452)..(452): n is a, c, g, or t
aaggtgattagatgtgatcttttaattttgcattatgctaggaaaaaaacctcaggtataggctaaggattatattttaatatccatgcagatatggtgtaaagcatgcttctatttgattaaaaagaccgccactcctattttcttcataagcaaagtaccctggttctaagacactgtggtgtggatatttcaaaggtataatttatgtgtatctaaacatttattcatatatacttatatttggattatttacactggtaacatcaagaaaaaaatacccccttcacacacacacattcaaatatttataacacattgaaatgccgatgcctctggttactcattctttgtcatggtcagttcatggctattttttggcatatgaggcttcaattgaaccagaagagacttaattttggatattataaaacccagagagggagggggcnccttc

SEQ ID NO: 10121 - DNA, 567 bp, Homo sapiens
  III.3749 (AI732421)
aagttgattagatgtgatcttttaattttgcattatgctaggaaaaaaacctcaggtataggctaaggattatattttaatatccatgcagatatggtgtaaagcatgcttctatttgattaaaaagaccgccactcctattttcttcataagcaaagtaccctggttctaagacactgtggtgtggatatttcaaaggtataatttatgtgtatctaaacatttattcatatatacttatatttggattatttacactggtaacatcaagaaaaaaatacccccttcacacacacacattcaaatatttataacacattgaaatgccgatgcctctggttactcattctttgtcatgtcagttcatggctattttttggcatatgaggcttcaattgaacagaagagacttaatttgatattataaaactagagaggaggtgcacatctcaactaaatagaaaatattcaccatttgcaaaatcaacagtaagttataaacaggaagtaagtttaagatgcctgaaatgtagtagatgctcaataaatatctgttgactagagaat

SEQ ID NO: 10122 - DNA, 202 bp, Homo sapiens
  III.3750 (AI499229)
ttttttttttttttttttttttttttttttaacagggccaagttttattacaaagtttgatgggcaaaaaatacggtactttttatacaggaggtttgggggtgggggatggttaatgagtacaaaaatacagttagacagaatgtttatgatccagtttttgatagcacaacaaggggactagagttaagtcaagaataat

SEQ ID NO: 10123 - DNA, 415 bp, Homo sapiens
  III.3751 (AI625159)
  misc_feature (256)..(256): n is a, c, g, or t
cctcttccccatcctgatcacactcagtttattgatggcagttccaccaggcctaatcgccactcaccaacaaaggcaggctatgctatagtatcttccacatctatcattgaggctaccgctctgcccctctccactacctctcagcaaggcgaactcatgccttaacctgagccctcactcttgcaaaaggactacgcatcaatatctatactgactcgaaatatgccttccatatcctgcaccaccgtgctgntatatgggctgaaagaggtttcctcactgtgcaagggtcctccatcattaattcctctttaataaaaactcttctcaaggccgctttacttccaaaggaagctggagtcattcactgcaagcaagggccatcaaaaggtgtcagatctcatcgttcagg

SEQ ID NO: 10124 - DNA, 462 bp, Homo sapiens
  III.3752 (AI369840)
aagaaacacaaaagcacagattcctttatttaacatgtatccagcatatactaagctggccactctggcagactcttggggccccaagaagaatacaacctgaatctcacatcaaagcttcaaagaccctggctttctgccccagctgacccctaagctgtagcactcacccaggtgctcctcaatcactgtattgtctgtcagagggatggtcttattcttgaccttggcttgtccacgtttcaaaatgagttctcggacagacttcagatttggaaatccccaggtcacataaggttccactatacgcagcatttttagattctggggggtgacttttacaaagacaccactaaaaattttctttaggcgaagtcttgcaatggttctctgcaccagtaaactcacgccgtcaatcctttcgatgcgtacaacaaaggccaaggaatgtttatctggcaa

SEQ ID NO: 10125 - DNA, 284 bp, Homo sapiens
  III.3753 (AA592896)
ctttaaatatttattcacttttaaattccataactgataatatattttatttagctataaaaagaaagaaaaatactggacacaatattttaaaataaacaccaagcaaacagatgattaagtataaaaatggacattttaaaaggttttacccgcatcatttcattctctaattgttttttacgatgtagacgctgctgatgagatttgagtacattttctacatgttgctccataaagaatttaaatgcttgaggagaataactttgaatacgagatccctt

SEQ ID NO: 10126 - DNA, 361 bp, Homo sapiens
  III.3754 (AI564234)
  misc_feature (262)..(262): n is a, c, g, or t
tttttttttttttttttttttttttttttttttttttttttttttttttttttttttttttttttttttttccaaaaaaactttttaaagggggccaaaaaattggggaaaaattttggggcaaggggttccccaaaaaaaggcccggttttaaaaaccaaaaacttaaaacccccccccccaaaaaaaaaaccaaggggggcccaaaaaaattttcctttcctttggaaggggttaccagggcttggttaaaaaaacccgntttttccccaaaaacttaagggggccattgaaaaaaaaggttttggaacccgttttccccccctttaaaaaagggggggggggggttttagggaaaaaa

SEQ ID NO: 10127 - DNA, 240 bp, Homo sapiens
  III.3755 (AI758677)
ttttaaaactaacttcactgttaaccaagcagttcaacatgaaagactgaatctcttatgtttaatattttcttctcttttaatcttcataactaatttttttcagataattgtataaaataaccatggtagcaaaataatgtgatcactggaaaataagcagggaaaaacatgctatgaagatactcctatctgggtgaattcttgatagctttacatttttcatctggcatttaaaca

SEQ ID NO: 10128 - DNA, 437 bp, Homo sapiens
  III.3756 (AI889904)
  misc_feature (417)..(417): n is a, c, g, or t
atcttccaataccaatgtttgttttattaaaacaataattaattaattaataggctcaatagtgaccctcaagttaatcccatgactttcccaggctctgcatgcataaagaaatcattgtgacagaaaaatatcaaccacatactgaagcatagcttgctagaacaaatcctgtacatatgaatgccagcaactggggacacatttagtattcacattttatgcaaacttacttggtcaattatttcttttttaagcacaggtttattttggaattcagataagaactgacacatcatagacagtcattgttaaggtaaccctgttatttcaattgcaaacaaacaataaacgttttttcttcaagacagttaccactttttaagatcttagtactaccctatgcaaaaacagttntttttaaaagcctgaacagg

SEQ ID NO: 10129 - DNA, 291 bp, Homo sapiens
  III.3757 (AI915881)
tttgcttttccaaattttttatttttaaaaaaattggaactttttacatgttaattctggatatttaaaaaaattcttagagcccatgaatctgaagtgtgtaatacagatacatagtttacaggtacatagttgagaaagtcaaattgttagtgaaatttataatgaaaaacagcattctcctacgctaggcctttctcacccttttcttactctgcagaggttaactactcccaactctttcctccttgtcccgttatttagcatcacattttcaaacaacttgctctg

SEQ ID NO: 10130 - DNA, 332 bp, Homo sapiens
  III.3758 (AI274571)
tttttttttttttttttttttttaaagcaacatatctttaattcaaaactaaaaaactggtcagttaatatggaaataattatatatctattgaaaccaaaaacaatttcatgtagaacattcaggtaattggcagaaaaaaaaatcctgttttaatgaccaaaaatgactcccaatacccgacatcagcactctcagtatgtaatggtaaaaggggggcaaaaaatcaccttttcccatagggaaacgagtggtgggagtgcaggtgagctaaagatgcccatctatgctcacacagacacaaaaaaatataaacacactcttgtgacgag

SEQ ID NO: 10131 - DNA, 534 bp, Homo sapiens
  III.3759 (AI478252)
cctcaggaagctttaattttttttctcaggaagcttgcagaatcttccactgtttgcagcactgcattttagtaatgatacctgctggtatgggaatatttttatccactgtattgagctcttgagaggcctgtcaactgaaaactcatcaatttagttctagaaaatactgttcgaggatttgctatcctctacttttttctgttctctctttctgaatttcctattatttggatattgggcctcctgaacatgacccctttcttttctttcaaattttctattctttggctttctgctctactttctgggagtttgcctctattttatcatctttttaaaactaaatttttcatttcaactactatattcttattttccaagaactcattttttttcgttctttcttttcaagtagtttactgcctttattcatgaaagtaacaccttctcttatctctttgaggatactctttaacagttttttgaaatgttctctctatataaattctacttactcgaacccacttttct

SEQ ID NO: 10132 - DNA, 443 bp, Homo sapiens
  III.3760 (AA775179)
gctcaaaacaatgttttgttatccttttagacagttgctattatctttaaagagtttgccatctttccagatctatgtgtgacaactttggttaacttggggttttgtggaatgagggattacagcccctcgtgcttttgtgtgagtttagatgatggtatagtccaaagagataacacgacttcaccatgtgtagtaaaacagggactgacttaaattaggaaacctcacaggaggcaactagaggagccccttcccctgaactgagtttgggagacatatgcagtttgcttttaattggtgtggtctgatcaagcaaatcaattgaatgaaatatttacaagctctagagtgaatgatattctttagactctcaaagaacgatatatatagttagctactaattatgtgtgattctgtaaaaaaaaaaaaaaagcacttgg

SEQ ID NO: 10133 - DNA, 427 bp, Homo sapiens
  III.3761 (AI697328)
  misc_feature (380)..(380): n is a, c, g, or t
gtgcaacttgtttatttccattttatttttacacaaaggcaaagagaataggagtgaggaggcaggaataacgctgggtcactcccaggaagtggggaagaggctgcagccaagaagaatgagtcaggctgctcttccttggctttcttggtaacagcaatgaacaaaaggaagacgaggcatggactccaggcttaagttaacaaggtcagtctgttcaggccaagcaatggaaaggaagtgtcagatctgtccaatccatgttcataaagaggaaataaggcctaggtccgtctattgaggccttggctcaggattggctggggcccttctctttgaaggtcgaggccgctgtccccagggcgtataggggccacggngacgatacctgccaaaacccctatgtaccactggggcaggccgctga

SEQ ID NO: 10134 - DNA, 450 bp, Homo sapiens
  III.3762 (AI598097)
  misc_feature (258)..(258): n is a, c, g, or t
ttgttgaaattttttttgtattgcgaaaaggaaaaggacacttcacatttttaaagtttattcatgaatggtttaatttccctttaaagctagaaaataaagatcatttaccttctgatcttcgtttttccaaatggtaataagcattgatccttccctctaataaaggtgaaatttttaaaatctcagtgaataggaatgtgcaaagctctaagaaaactattacttgaatgtctctaaagtggtagaagatcacangttgggaataccctcaaaaactatatttttaccctactgttaaaacttgttttcaaagtggtgtaatctgaaagattacagttcaaaagtaattcccataccaaataatatcaactttaggtgaacatctaagtatttaagagtattatttttcttggctgggtgcggcagctcacacctgtaatcccagca

SEQ ID NO: 10135 - DNA, 383 bp, Homo sapiens
  III.3763 (AI816088)
gagactgcatcattccgcaccggctgctgcagggccagagggagcaggtggagcgagagagcgagagagcgagccgcgagccggagcgcgccagacccagggcgagactgcagtgacgcggcccgggagacatggcggacgggcgtctctgaataagcagaatccggagcccctcgctacccgcggccgccgcagcccgggccatgccgcacggctgctgaccgcacgcaggggccggccccgaggacacatgcggcggcctttgccgcctcgcccctgaccctctgccctgttctccatgttgcatttctcgtcagtttctcggggcggtgtagctgccgctgccaccagagccggcggggcatcgcgctgctcattcatcc

SEQ ID NO: 10136 - DNA, 579 bp, Homo sapiens
  III.3764 (AI816129)
tttttttaaagtcttgtgggcttcttccagttggtgctcagcaatctctttcaatcggatggcatcttccagctggctgttcagcagtaccgtctcctcctcaaatcgcttaatctcatgctttaagccttcgtattcaacctggttctgcttcaacgtggacactagtttctgcaatgtgatattttcttcttccaattcagtatagtcctgaaggagccgtgcctcccggaacttatattctcggatttcatccttcatccgtattctctgtagctccaccatctcattgttctccttcagatcctgcacgactgcggtgagcctctcgttttctgcctgtacattagtgaccacagcccggctctgtttcagctcgttctgcatctccaagatcttccccagatagtaagcctccttcgatgctgactcctgcagaagcgtttcctcccgagtctctccatcttcagcaaccttccggtggatggagaaggactgcccaaatgcctctttgagctgctccagctcctgtttgaggctgtcgtactcagccttcagttcatcatactgctgtttgag

SEQ ID NO: 10137 - DNA, 276 bp, Homo sapiens
  III.3765 (R70263)
  misc_feature (125)..(125): n is a, c, g, or t
  misc_feature (170)..(170): n is a, c, g, or t
  misc_feature (175)..(175): n is a, c, g, or t
  misc_feature (207)..(207): n is a, c, g, or t
  misc_feature (213)..(213): n is a, c, g, or t
  misc_feature (237)..(237): n is a, c, g, or t
  misc_feature (249)..(249): n is a, c, g, or t
gttctaattgaggcatacacgttgttctaggagtctgtgaaattctaaagataaaagtttgattatgcttgttttgactttaatgaactattcacataattttaatacacagtgtctaacacgtntgaaagttgtgtaataccttataccttaacaatggagaattactnggcanttttggctactctgatattagcatttcctganactccncaggctgatgtggcaaaggagaantagcaatcttgngttctgaaaggctaggccgcatttggg

SEQ ID NO: 10138 - DNA, 393 bp, Homo sapiens
  III.3766 (R70316)
  misc_feature (236)..(236): n is a, c, g, or t
cttaaaggggccggcgctctacctggcgacgccgcagccctggtagtggagaggcttgggactagaggatgagattcggcctcatactccgcgctgtcgtcctcgctggagcctgctgtctgcgccctgcagaagtcctgacggcggcgtaccccgggagaccccgcagccccgagaagccagccgccgccgtcattccagtcagaaaaatggcctgcggggcacgcgccggtgcncctgccaaccacgtccggactttggactttagacaggaaggcgtcccggctcagctgtggtttggtcagagtttaacctgttcccacgcaagagaacctcgatctggttttcctcggttaacctgaagttcaactggggcatttgttaagggcccag

SEQ ID NO: 10139 - DNA, 420 bp, Homo sapiens
  III.3767 (AA759287)
ttgtggtttatatttttatttgactaattgtcaaggggaaaaagagctttgggataaatctgatgagttcagttttggatttatgcttgaagtcctgtttaatgccagatggcaatggtcaacaatcaattggacctatggtttctggtattcagaagagttctgaactgcagatagagatttaagaatcacacttcgagagtggtagctgaagctcatcaggatggagtaaatatggatagctggtaaagaagaatcagaggagaagcaggtgcagacctggaatcccaagtcttctcatttttctggaaaacataaccaggtctttcaactatactgattgctcttttctggactttctgttttatcagaatcctttaaaaactgtgaggcccaaacaaatatccaagtgttcagtca

SEQ ID NO: 10140 - DNA, 205 bp, Homo sapiens
  III.3768 (AI474478)
aaagggcacgctaaaagatatttattaaaatcttttttttttaaattacatttttagggtagggttctggggtgctggttatgttccatttcttgatctgggtgctgggtgtattacctcacagtgcaaaacagctcatgaaggagactcttaagggcaccacccaaagcctccctctggcagcctggcccacctccactcccag

SEQ ID NO: 10141 - DNA, 451 bp, Homo sapiens
  III.3769 (AI864897)
tttaaaatttaaaattttatttttttaccttttttttacatttttattttaaaataaacagtgtttccaaaaaacattgactacaagggggaaatgaggcaataaggttggaagaagggaaggactcaagaagaaatgctgaacctgcaaacacaatgatcagggagcatgcagagaggcccttgctgtgacactgtcctctcactgctactcctatgaagcccagtgactatgctgggacactggagctaaagggtcaaagagaagcatttcattcctaaaaggtgatgtcaatttgtacttagccccagcaatgtgaatccccctcttcacagtccaattctaagattccattcttaagaaattaccaaagatagagccaaagagatatatacaagaaactttatcacatcatcattgatataaaaagtatctgaaacaaccaaaattt

SEQ ID NO: 10142 - DNA, 467 bp, Homo sapiens
  III.3770 (AI913324)
taagagacggtgtttctccacgttggtcaggctggtctggaactcccgacctcaggtgatctgcctgccttggcctcccaaagtgctgagattacaggtgtgagccactcttgggtcaatagctgtgatttgcctctgaaaaactttttttttttggaagagtctcactctgtctcccaggctggagtgcagtggcatgatctcggctcactgcaacctccacttcccgggttcaagctattctgcctctgcctcctaaatagctgggactacaggcatgcaccaccatgcccagctaatttttgtatttttagtagagacggggtttcaccatgttggccagcatggtctccatctcttcaccttgtgatccgcccaccttggcctcccgaagtgctgggattacaggcgtgagccaccgcgcccggccttcctctgaaaaactttctaatggaacatctcccaga

SEQ ID NO: 10143 - DNA, 357 bp, Homo sapiens
  III.3771 (AI695273)
tatagattaaatatatgatttatttatgatggtattggatatgtttaaaattaaatgaggttatatatatatatatagcattaatccaagtaagagctcagtaagtgatagctgctattactcataatcctgttaattattcatactttccctatttgacataataggtttccatagatgattggaaaaacccaagagttggtcctctgttccagaccccacacagacacaaacctacaagccaagggagccagtatttggccattcgtccatccatctgcatgtcccagggatgcacgaacagggaacacttcagcctttcggctgccttcaaagaagcaatgagagagagagaga

SEQ ID NO: 10144 - DNA, 406 bp, Homo sapiens
  III.3772 (R54358)
  misc_feature (396)..(396): n is a, c, g, or t
atgaaccacaagaaaaaaagcggaaagctgccccaaagatgaagaaagttattggaattattgagcacttaaaagcacctaaccttactaacgttaacaaaatttctaatatatttgaagatgtagagttttgtgttatgagtggaacagatagccagccaaagcctgacctggagaacagaattgcagaatttggtggttatatagtacaaaatccaggcccagacacgtactgtgtaattgcagggtctgagaacatcagagtgaaaaacataattttgtcaaataaacatgatgttgtcaagcctgcatggcttttagaatgttttaagaccaaaagctttgtaccatggcagcctcgctttatgattcatatgtgcccatcaaccaaagganccttttgccc

SEQ ID NO: 10145 - DNA, 399 bp, Homo sapiens
  III.3773 (R54359)
  misc_feature (324)..(324): n is a, c, g, or t
  misc_feature (373)..(373): n is a, c, g, or t
  misc_feature (393)..(393): n is a, c, g, or t
tttttttttttttttaatagtgcattaaatattttatttaaattaagaagtataacaaaatcacatacatttgttccacggtttgaataaaatttccaataactttcaaataatgcacacatagtatcgcatggatcaaattccgtacatttcaatatggtcatgagataggctgtattccaaaatttggtatataaatccatacataatatatactatatacattgactttaaataatctaactatgtcatttttaaaagtcaaagcaacttatttctaatgaaagttacaatatggcatgccatattgacacctattcaatnggtaaaatctgggggaaatcttttttgtggaatactatttatactgggnatgccaaattcacataaaantacttc

SEQ ID NO: 10146 - DNA, 370 bp, Homo sapiens
  III.3774 (AI282511)
  misc_feature (313)..(313): n is a, c, g, or t
agtatcagacatataatttatttataaagtgcttgaagatattttcattacatccacaaaagggaaggctcttacttgggcagaaatgtattacttattgtgcctattttcttttttttttttgagacggagtctcactctgtcacccaggctggagtgcagtggcacgatcttggctcactgcaagctccacctcccaggttcacgccattctcctgcctctgcctcccgagtagctgggactacaggtgcctgccaccatgcctggctagtttttttttgtttttttttttgtatttttagtagagacggngtttcaccgtgttagccaggatggtcttgatctccctacctcgtgatccgcccacct

SEQ ID NO: 10147 - DNA, 369 bp, Homo sapiens
  III.3775 (AI445115)
ttttttttttttttttttttttttttttttttttttttttttttttttttttttttttttttttttttttttttttttttttttttttcccccaaaaaacctttaaaggggggccaaaaaacgggggccaaaattgggggaaagggggcccccaaaaaagggcccgggtaaaaaaaaaaaaaaacaaaaccccccccccccaaaaaaaaaaccccagggggccccaaaaacccccccccccccctggggggggtgccccgggcggggtgaaaaaacccccgcttttcccccaaaaaaaaaaggggccaaagaaaaaaaaccgtttgggcccccccccccccccccggaaaaaagggggggggggggggt

SEQ ID NO: 10148 - DNA, 258 bp, Homo sapiens
  III.3776 (AI401702)
gttttttatttttttgtaagtaagtctcagcgtagaatcacaagttctcccttccagcccctacttgccatgaacaaaccttactttgttcaccataaagaggagatgggctcagttttctcctctgactacataacgggtgctttctctggggaagtggtagcaggaggatggccaggcaatgtgtcagctcttatcaaccacagtccatccacttccaggtctgttgatccaggggatatagaaaaattgagactg

SEQ ID NO: 10149 - DNA, 511 bp, Homo sapiens
  III.3777 (AI538399)
gacatttttatatattatttaatataatgactgtcatttacaatagtcacaactatttttgttgtcagtgaaatttagttccacgtacagaaaagtaaagcaaacataagaagaaaaacaaagatctttagattgcattttaaaatttttctattattccaatctaatagactgtttaaattatttcctttccctgcttcagaattcagctttctttgttagtttgtctattctataaagtcattgagtttcttgtcatatgttctaggatagcttgcatgtgctcccttctttgaacaacagctccctcaaaaagtaagttcttttgggccgggcgcggtggctcacgcctgtaatcccagcactttgggaggccgaggagggcggattgcctgagcttcaggaggttgagaccatcctggctaacacagtgaaactcccgtctccactaaagcacaaaaaatttagccggcgtgggcgcatgcgcctgtatcccagctacctgggattc

SEQ ID NO: 10150 - DNA, 547 bp, Homo sapiens
  III.3778 (AI890196)
tcataatgccaaaagaatcatcagttcatttaggaagacaatattcataaatagttttttttttgtctctgaatagcttcaaaattcatgaaacaacattcattaatcaaagggagaaataaatgattctaaaatcatagttgacaatttttaacaacattcttttagcaattgatagagccagataaataaaattaatgaagacgtagatggatttgaacaaactatcaaccaccttgacctaaatgattttatagaacactacactgaataactgcagaatatacatcttttcaagtaaatacagtgtgttcactgagatagattatatgctggaccctccaacaagtctcaataaatttaaaagtgttgaaagcatacagaatatgttttctgagcataatataattaaattagaaatcaataacaatgtggcatctagaaaaatccctaacattatagcaaatccctcaaatttctttagtaaataaatcagcaaaaaaattagagaatattttgagattgaaaatacataaaaccatataat

SEQ ID NO: 10151 - DNA, 456 bp, Homo sapiens
  III.3779 (AI356258)
cgtctttaatgctctcaccttagatcccataaaactggggcaccccccccatcacccatgtgaagagaggtggggcccagggcaggttcagtgcacgtggggcactcctgctgtgaccgctccctgcaaagccttttcccctgctgggtccacctcattctggaggacacccccagatctcaggccatgcatgtgtgttcaggcctgggtgcagtcacagctctcagggtggtcgcagtggcagctgctgggtctggggttggggaccttggccgggcaggctccatgaggctctcctgtgcatgagctgactcacatgcgtgcttgtggggcctgtcacaccggttctggggatggcaacccgggatgagcgcccctcagcctttccatggggcccagagcctgccaaaggtggcagatacttcaggcctggagtgggttgctgccggcctccca

SEQ ID NO: 10152 - DNA, 498 bp, Homo sapiens
  III.3780 (AI939547)
  misc_feature (477)..(477): n is a, c, g, or t
tcgtctttaatgctctcaccttagatcccataaaactggggcaccccccccatcacccatgtgaagagaggtggggcccagggcaggttcagtgcacgtggggcactcctgctgtgaccgctccctgcaaagccttttcccctgctgggtccacctcattctggaggacacccccagatctcaggccatgcatgtgtgttcaggcctgggtgcagtcacagctctcagggtggtcgcagtggcagctgctgggtctggggttggggaccttggccgggcaggctccatgaggctctcctgtgcatgagctgactcacatgcgtgcttgtggggcctgtcacaccggttctggggatggcaacccgggatgagcgcccctcagcctttccatggggcccagagcctgccaaaggtggcagatacttcaggcctggagtggggttgctgccggcctcccagctgctgacagcctcctgngagagacctatgccttccctg

SEQ ID NO: 10153 - DNA, 434 bp, Homo sapiens
  III.3781 (AI825531)
  misc_feature (409)..(409): n is a, c, g, or t
ttttgagtttattgaatgtttattagatgaataacattgtgttaatactttcatgtcttacctttttacatccccacaaaaacccagtgaggtggatacttttactacccccattttgtaagggaggatacaaaatatttgaaagattgaataatttggtagatcccatagttagtaagtggcagagctgggatttgacactatagctgcccagtgctaaagctcatgcccttaactgccaactgtactgcctgccatcattatgtgtcttggggttgcctcattcatatagagcaaaaatgttccattcagacatagctaattctggggccggcggcggtccgtctttactagacacacataaaatgtctagcacttttttatacttgctgaacaggaagagaactgngtttctctctccatctttcctgcca

SEQ ID NO: 10154 - DNA, 525 bp, Homo sapiens
  III.3782 (AI674755)
tttttttttttttttttatggctgaacaattctttattaaataaggaagatgtaaagtggttcctcaaatggaaaaagaaaagttcctttaagaatctgaagggtgtgcttcacagatctcattaaacaatagggcttcactgattattaagtgttggcccatagcagctttccaagaatcttaagctagagaagggcttgtttgtgggtgtagattttgtctagtgaagtgcagccaatatgaagctttataggaagcccataggtttttaaaagaattatattggggtaaacactgtcacttcgaattaaaagttacagagaatacaaaataaaaaaaaaggcccttggatctccaaattgctgtaggcaggaaagaggctgagaaaattattcagctgcaaacactgaccatttatcatggaaaaggaaggatgactcagaggatggaataaagaggccagaggacagaaccaagagctttgaagaatcatttccagagaatagggccccgtcctaattaag

SEQ ID NO: 10155 - DNA, 282 bp, Homo sapiens
  III.3783 (AI811996)
ttttttttttttttcaaagatgtctcagtttattagttttctgccaatcattaaaacaagaaagatgaaacatgcaattagatccaaggagacagaactcctaattctttcatcctagctgaagcagaagagttttaattgctgggaaaaataagattttcgttttctctcaagagggaagaggaagcaaatataaattgccttaaagtctatggctggaggtccaatgctccaaaccatgcaaatgagagggggaaagacaagcccatcatctgtatgttt

SEQ ID NO: 10156 - DNA, 479 bp, Homo sapiens
  III.3784 (AI677644)
tcacccttaaatactttaatatacaccatttaaaagataagcatgttttcttctataactaccacaccattatcgcacatatcaaaattaacaataattctttgctattttctgctacgcagtcccaattcaaatcttcctgattatccccaaatctcctcttccagttggtttgtttgaatcaggatccaaacacggcccacacattgcatttggttgttacgtggcttcggtctctttaagccagagggccattttgaactattaaggaaggggttgctctcacccacccatccctctgacctgggccccagtgaatttctccaggtgcgccctgaggcccctctctagcagtccaggcagccagagcagagtgactaaggtctggaggaatgagccttgccatggaaaaaccagaaactcacagattttcaaaattccaggcaagataacatgacgcacgggaaaatgtatgatgt

SEQ ID NO: 10157 - DNA, 516 bp, Homo sapiens
  III.3785 (AI363295)
accagttctcgattttatttaggactcaaattaacaccaaccaaacatatcactaactcacttattttcacattttcaaagttggattgtgctgcaaatccatacatttgtgctcactacacattttttttattacattcattgagaggctccaaagcatcagtccaataaacatttttccagcccgataaccatccttcgtaagaactaagaggtaaaatcattcacacaactattttttcccttctatccttagctcataagcatttgaccaaatgccaatgtttttgccagttcatgttgtccgtgccttatcacaagtgacatgtctacaggacacggtatccactgactttgcttccttggtcccaagaaaaggtgttgacaaattccatagtttggtaaaatgagtgagtctgcaattgtgggaggcattttgtttttagcaatgaatcacattacattgtacctaacttctcaagcacaatctgatactaagatgatgaagatagttct

SEQ ID NO: 10158 - DNA, 215 bp, Homo sapiens
  III.3786 (AI424741)
atatttttcattatatttatttgataattcacttattcacatggttagtagattgagttattgaattacatgttcatatgattattgtatcatctatccactaattccattcattcattcatacggttactgtatcactcattcacccatccatccatctggttagtgactattcatgcactctgctctggctctggcaggtggggagaggtgtc

SEQ ID NO: 10159 - DNA, 279 bp, Homo sapiens
  III.3787 (AI801916)
ttttagcaatgataagtcatttatttggggcaagcaattgttttactacacccggcagttttaaaggtggattgcaaggttttcaacggcactttactttcattctgacccatgggttttggcaagggctgcagcatgtcagtcaagatggcagggaccggagacaggaagtccctcccacttagtgctccccctgccccaatcacagcccagctattctcacccctgagcacagaaactggccatgtggatttgctcaaagggattagcatgtattgc

SEQ ID NO: 10160 - DNA, 535 bp, Homo sapiens
  III.3788 (AI693191)
tcaaaattttgatcattgagaattactttataaaaggttggacatcttgcattacatgaacaaaggattttgttcattttgcatgacatgaacaaagcattttgtattctaaataggaaaaaaatctctcacaagaaaaatcagaactattctcccattcagtgtatacttgatccacacaaagaatatcaatatgcaataaaggggaagaaaaaaatggaggtgggagataacagggtatgccagaaagccaactggttcagaagttaatggacttgaattgaactcccattgtgaaattaaattaatgggcaaatcaccatgagaagtgttttgttccttccctcttcttagttttcctacctcataagtgatttctaagatcccttcccaatataatactaaaatatttggctttcacatcactgcttcctccttaacaaaaaaaatctcacatttctccaggctgttaacagacttcagttagctattgccattatcttcttccatgagctctctccattgctaaccctct

SEQ ID NO: 10161 - DNA, 339 bp, Homo sapiens
  III.3789 (AI572687)
acaatggtattaaagcaatttaatggtaaaataaaatcaaagttcaggctacctggtaacttgaggccagaactgttgtaaagcaggaggcacaaagccaattaaaacatttcccttattgtgcatggaaaataacaaaaaatttttttacccaagcttatgaaatgtaccaggatcacatgtaattgaataaaatgataccaaatacccaattcttctgcaaaataaaaccccctggtcatcaaccaggtttgtatctaaattaatgatctcatttctgcatttccccccactacctacataatcaagaatttataaatgcttttgaaaagcacctat

SEQ ID NO: 10162 - DNA, 502 bp, Homo sapiens
  III.3790 (AI458298)
tgctggtcattttcaaatttatttttataatgcttaataggtgctaacactttataactactaactcgtttaattcattaatttatttaatcctcaaaacaccgggggtgggtgagggggactatatcgatggcagggtcctggtgcaatctggctctgccctgcatccggtcggccattttagaaataaggcatgtcaaccccccagaggaaggatcctcagatgatggaaacagacaaaaaggacaagacaagacacattcataagcagtatctacacagtaccaagccctgcacttagcctcgtgggggatgcaaagatgaaatggatgagaatgtggaatctttaataccagatgaacagtgacaaacgctctacaggtgacgaaatgctaaaggaggggttacaggtggcaggaaccacagagatttcagcgaggagactgcatttgtgctagtcttggcaggagggtaggaatccggcaggctgagatgcgagcat

SEQ ID NO: 10163 - DNA, 474 bp, Homo sapiens
  III.3791 (AI560691)
ttttttttttagtcttttaaaatttatttaaaattattttatggcttaccatatgtcccattcttaaaatagtctgtacacagacaactttacccttcgacaagaaacatcgccaattcctgggaaagagggagaatctgattttttaaattagcacattacaatattcaaaacttccagttctcaacaaaaatatacaaagtatacaaagaaacaaaaaagtatggcccattcacaggggccaataatcaacagtaaatatacacaaggaagacaagacactggacttaataaacaaagattttaaactaactgtcttagctgtgctcaagatgctgaaggaaaccatggacagagaactaagggcagtcaggagaatgatgtatgaactgtagggaatattaataaatagataataaatattaataaatagttgtgtgtcaagcacaaacaaccaaatagaagttctgaagc

SEQ ID NO: 10164 - DNA, 677 bp, Homo sapiens
  III.3792 (AI913325)
  misc_feature (501)..(501): n is a, c, g, or t
  misc_feature (521)..(521): n is a, c, g, or t
tgaagcttgaaaattttatttaattgtatctttgatacattgaaagctgagtatttttaagacaaaggtttcaggaagaaagttctctttccaatttcaccactgtggctaccagttcttctattctcctattattataatgcagatatgtcagatcggaataatttacatttacaaattatatcatagaaaaataattttatcgctaaatgtaaacaggttggggtacttcatccaaaataagaagaaaataacagaatctagcactttcatattttaaagctgatattttagcaatattttgataaaactttattccatttgtaatttttggctacacaacactaaaagaaaatttatttattggcatgcaaagcaatgtggcctcagaatacacctcttaaatttacaggacttaacatttcaaacatcccacgtggctagcaggtgatgttgtgaagatgatcttgaatagtgatatagttatttcctgtcagtgantttggtctgaatcaaccagnttataaagtccctggcggggcagatatcaagaatggtgtcatctcatcagagaaagaaccatcagcatgtctgccggcaagttcttcaacaatggcgacctctttctggaaatcctcgcttcctcggctttcaccagccaagccatgaattccttg

SEQ ID NO: 10165 - DNA, 503 bp, Homo sapiens
  III.3793 (AI633632)
ggggaagattctttaatgacatggaattatagtcatgatatagtcaatgaaaaaagtaggttacaaatggtatgtacagtataactccgttgttattcaaatatatattatgtatatgcaaagaaaaattacccaaaggttaacgattatctctgaattcagcattatgggggttttactttgtgcttcccctgtccctttggattttctataatatggatgtctttttttttttaactaggaaaaaagaacaataagttaattttaaagatcaaaatataatttatgcctattaatttggcaaagattatttaaaaagacaatacacagcattggcaaagatttgggaataaatgggcatgcgcaaaacgtatgctgctaatgttagtataaatagctactaggagcttcgttataaacgtggaaacataaactgaagtccttaaaaacagaggaagtattttcagttctaggaattaagcaaattatttagggatggatgc

SEQ ID NO: 10166 - DNA, 419 bp, Homo sapiens
  III.3794 (AI571536)
ttttttttttttttttagttttctaaaatttcatcactttatattaagtcacaaaacagacttcacaagaattattaggtaccacctaacagaattagtgagtggaaatcattcagtagcaagtcaaaattattttgaacctgatcattgagtttatgccttatctgactttctggcctttcttcattctcttcctcctgctctccccctcttctttgttaggaacttaaacagagactgtattaggaaggctaaggtgagaaattagagaaacttcaaatcagcattgaccattgagaagatccaaaatcgtgcacaaactattataactaaagtaaaagttgaacagcattgctaaatataaaatcaacatttattaattaacaatatttccaaataccatcaataaccagttaatg

SEQ ID NO: 10167 - DNA, 479 bp, Homo sapiens
  III.3795 (AI684878)
gcttttattattatttttaattgacacaataattgtacatattttctgggtgtacagtgtactattttgatacatgtatgcaatgtgtcttggtcaagtcttggtaattagcatatccatcacctcaaacatttatcatttctttgtgttgggaacatttaaatcctgcttttatagttatttgaaaatatacaacaagttgctgttaattatagttaccctatagtgctatagaacactggaacttactcctcctctctagttgtacttatatatccattaaccaacctttggctactctcccttctccgcttcccttccttggctccccttcttctcctctagtagccactattcttctctatacttctatgagatctacttttttagcttccacatgtaagtgagaacctacagtgtttatctttctctgcctggcttatttcatttaacataatgtcctccaacttcatttgtgt

SEQ ID NO: 10168 - DNA, 392 bp, Homo sapiens
  III.3796 (H77748)
  misc_feature (238)..(238): n is a, c, g, or t
  misc_feature (374)..(374): n is a, c, g, or t
  misc_feature (382)..(382): n is a, c, g, or t
  misc_feature (389)..(389): n is a, c, g, or t
gtataaaacattcaatttattggtctttgtggagaattagatgcatcaccagtatattacaacagagccattaatcttgtagcttcatcaacattaactggtttgctttcatgacgctgctgaggaatctgaaaggagaaagtattatatttaaaaacacagacaacaatagcagacaaatgacttatataagctgttattcaatttaatttttctagtcatatctttggaagtagancaatctgtatattctgacaatgttttagagtctgaatatgctatttatactatagagcctagtactagagagccaagtactaaaaattacactccaacttacaggctttgtaaaacttggggagtttaatttattnagccccantttgttnggc

SEQ ID NO: 10169 - DNA, 460 bp, Homo sapiens
  III.3797 (H77749)
  misc_feature (20)..(20): n is a, c, g, or t
  misc_feature (24)..(24): n is a, c, g, or t
  misc_feature (25)..(25): n is a, c, g, or t
  misc_feature (271)..(271): n is a, c, g, or t
  misc_feature (456)..(456): n is a, c, g, or t
cttcaattaaaatctgacantgcnntcctggtatatagcgtcagattccacaggttgagagttgagtcctaagcctctccccaacttccagtgacaatcacaagtcccagatgttttacctgtgcttctcaccaaccagttataaataagtgttcccatgaccccctccttgggtttgattaatttgctagagcagctcacagaacccagggaaaatacttttaccagtttattataaaggatattacaaaggggacagatgcgtagcagnatggaagaggtgcagagggcaaggtacatggggaaggggcatggagcttccctgctctctctgggcatgccactttctagggagcccccatgtgttcagctatccagaagctctttgaacccagttcttttgtaggatttccggaggctttcattatgtaggctaatttcattaaatcttggccntagt

SEQ ID NO: 10170 - DNA, 457 bp, Homo sapiens
  III.3798 (AI925437)
gctataaaattatctgggtttaattattatcaatatcagaactatagaacattaacgtactaaacctgtatttacaattacatgtacaaaaaaaaatgttctttgtgaggagcaattttcagcaaatctgacaaacagcaagagtcattcctattttgggtttgaaaagagaaatggaaatttccaagacgcccccctcctccctctcactccagtgaccctctgaacatcaatttgcaaaggcctgaggtagaaagggaggtattaacaatatcaggcactcattcttcccctcttatgaaagggatgaatttttaggaaccgttttccatcatttattatactgatgtgccatccatctgcatcattaggttcagtagttaccatgacaatatgatgcctacagcaatctaacttgatagccacatgccagaatgtgaaaaaataggaccagcta

SEQ ID NO: 10171 - DNA, 255 bp, Homo sapiens
  III.3799 (AI254095)
gagaagacgacagaaggggagacggtcacaagggtgaggctggaaagacaggcagggccagaccatgcaaggctttgaaggctcttctaaagattacggccttcacatgcctctgcaattagagaaagcactggaagtaaagccaagcagatatcagccaatgtgtctgagcagtaaagatatggaggtgaatgaaacgtctcattttcagattttctcttacctaaaaaaaaaaaaaaaaaaaagtcgtatcga

SEQ ID NO: 10172 - DNA, 255 bp, Homo sapiens; identical to SEQ ID NO: 10171
  III.3800 (AI733985)

SEQ ID NO: 10173 - DNA, 284 bp, Homo sapiens
  III.3801 (AI792888)
catcatcatcatgatcgctcgacatcgatacgacttttttttttttttttttttaggtaagagaaaatctgaaaatgagacgtttcattcacctccatatctttactgctcagacacattggctgatatctgcttggctttacttccagtgctttctctaattgcagaggcatgtgaaggccgtaatctttagaagagccttcaaagccttgcatggtctggccctgcctgtctttccagcctcacccttgtgaccgtctccccttctgtcgtcttctcgcagc

SEQ ID NO: 10174 - DNA, 547 bp, Homo sapiens
  III.3802 (AI652699)
tcagtttatagttttatttttaataaaaaaattttaaaaagtaaaggtttctcgaagactctgcaccactcagtgcccggcatgaagcgctgtgagcagcctccctccaaggcagtgggagcagggccacaggcagagcaccgcagggccctgggcgacgaaagggtcagggctggtgacctctaaaggggctgcgacggcaggtgggtgggggcagctccaagtgaggaggaagagggtggacacaggcgggcacgggatggacacagggtaaacaaagggcagacacagggcgggacacagactggacacaaggctggacacagggtggacatgaggtgggacacagaggggactcggggtgggtcgcagggcgggaaacagggctgcagcagaaggctccccacacccctactgcctccaccactgggtggaagggacctgagctgtgagcgctgacctcctagcaacatagaggacacctcgcggtaggccctcagccccggcggccacacgtgcagggaccgcaccagcagcttccacagct

SEQ ID NO: 10175 - DNA, 402 bp, Homo sapiens
  III.3803 (AI253119)
tttttttttcagcagagctactatttattacttaagaccacagaacagtttggttatcaacgtcatcatcagcagagctactatttattacttaagaccacagaacagtttggttatcaacgtcatcatcagcagagctactatttattacttaagaccacagaacagtttggttatcaacatcatcatcagcagagctactatttattacttaagaccacagaacagtttggttatcaacgtcatcatcagcagagctactacttattacttaagaccacagaacagtttggttatcaacgtcatcatcaacagagctactacttattacttaagaccacagaacagtttggttatcaacgtcatcatcagcagagctactatttattacttaagaccaca

SEQ ID NO: 10176 - DNA, 572 bp, Homo sapiens
  III.3804 (AI793064)
cgtgactattccagggctctttctattataacgtggcatcgtagaaatatgagcacaagctggaaccaggtggatgagagtttggattctggctctgctacttaacactctgtgtgatcttggacaagttacttaagctctcagagcatcaattgccgctcctgcaaattgagataataatgcctgcctttcaaggtcattgtaaggattagagacaatgtgtgtaaagcacttaataaatagtagctctgctgatgatgacgttgataaccaaactgttctgtggtcttaagtaataaatagtagctctgctgatgatgacgttgataaccaaactgttctgtggtcttaagtaataagtagtagctctgttgatgatgacgttgataaccaaactgttctgtggtcttaagtaataagtagtagctctgctgatgatgacgttgataaccaaactgttctgtggtcttaagtaataaatagtagctctgctgatgatgatgttgataaccaaactgttctgtggtcttaagtaataaatagtagctctgctgatgatgacgttgataacc

SEQ ID NO: 10177 - DNA, 519 bp, Homo sapiens
  III.3805 (AI793240)
cagcttagctactatttattacttaagaccacagaacagtttggttatcaacgtcatcatcagcagagctactatttattacttaagaccacagaacagtttggttatcaacgtcatcatcagcagagctactatttattacttaagaccacagaacagtttggttatcaacatcatcatcagcagagctactatttattacttaagaccacagaacagtttggttatcaacgtcatcatcagcagagctactacttattacttaagaccacagaacagtttggttatcaacgtcatcatcaacagagctactacttattacttaagaccacagaacagtttggttatcaacgtcatcatcagcagagctactatttattacttaagaccacagaacagtttggttatcaacgtcatcatcagcagagctactatttattaagtgctttacacacattgtctctaatccttacaatgaccttgaaaggcaggcattattatctcaatttgcaggagcgg

SEQ ID NO: 10178 - DNA, 362 bp, Homo sapiens
  III.3806 (AI655997)
atatttctcccaaagaaactggttttggactctcaatatctgcaaaattctgtatttaaactcaggcacagtcttatgaaaaagattgtaaatgatccgataacttttatcctctgcagaaacagggacttggatgaagtcctgagatggatgcatataaacccaagtttcagggtaaaagtttgctgaagtgaccccatctgggcagataatttgtgatgatgaagttgcttcaagaggtggaggagcttgtgtgggaaccccaccaagtgtctgtaaatatggaagcagtataaaacaggagcggaagaggggtctcctttttatctctctcctgaagaatgaattgtggaggatgtagt

SEQ ID NO: 10179 - DNA, 383 bp, Homo sapiens
  III.3807 (AI682075)
ttttttgttttttttttttttttttttttttttttttttttttttttttttttttttttttttttttttttttttttttttttttttgggggggggggccgggggctttattgcccccccaaaaccccgggaaggggcctaaaaaaaaaaccccccccccccccaaaaaaaaaatgggaaaaaaaaaaattaattccaaatttttttttccggggggggaaaaaaaagggcccccccccccccccaaaaggggaaaaaaaagggggaacccccccccccccccctttgggacaaaaaaaaaagggggggggggaacccccctttctttgggaaccgggggccccagggccccaagggggggggggttccccccccccccaaaa
